United States Patent Application Publication US 2004/0259086 A1 - sequence listing, part 9

SEQ ID NO: 49888 - DNA, 403 bp, Homo sapiens
cactatagggcgaattggagctccaccgcggtggcggccgcccgggcaggtctcacaggcgagaaccctctgcaggtcctggtgaacgccatcatcaacagtggtccccgggaggactccacacgcattgggcgcgccgggactgtgagacgacaggctgtggatgtgtcccccctgcgccgtgtgaaccaggccatctggctgctgtgcacaggcgctcgtgaggctgccttccggaacattaagaccattgctgagtgcctggcaaatgagctcatcaatgctgccaagggctcctcgaactcctatgccattaagaaaaaggacgagctggagcgtgcggccaagtccaaccgctgattttcccagctgcccgcccaataaacctgtctgccctttgggg

SEQ ID NO: 49889 - DNA, 252 bp, Homo sapiens
ctactatagggcgaattggagctccaccgcggtggcggccgcccgggcaggtacttttttttttttttttttttttttttttttttaggtttttaaaaaatgtttattttttcaaagaaaacggcaatagccaattggaaacctacttattcttgaactccaattttggtttctttaaatttaaaaagtgacttactggttttactattttataactaacaccccccgtttccccatttaaatggtttacca

SEQ ID NO: 49890 - DNA, 146 bp, Homo sapiens
tatagggcgatatggagcaccaccgcggtggcggccgcccgggctggtacttgattttttatcagatggcctttaaaacccagtctcacaaaaatatgaaattatcagaaggattatagtgcaattcttatgtctgaaaggaatga

SEQ ID NO: 49891 - DNA, 358 bp, Homo sapiens; identical to SEQ ID NO: 31159

SEQ ID NO: 49892 - DNA, 514 bp, Homo sapiens
aattggagctccaccgcggtggcggccgggcatttctcccagggatctctgtgcttccttttgtgcttcctgtgtgtgtggatatttaaaggggctggaaatgtgcaaaaacatgtcactacttagacattatattgtcatcttgctgtttctagtgatgttaattatctccatttcagcagatgtgtggcctcagatggtaaagtcagcagcctttcttatttctcacccctgccattgagatgtctgtagtctttctttgctgcactgagtacctcggccgctctagaactagtggatcccccgggctgcacgaattcgatatcaagcttatcgataccgtcgacctcgagggggggcccggtacccaacttttgttccctttagtgagggttaaatgcgcgcttggcgtaatcatgggcatagcttgtttcctgtgtgaaattgttattcccttacaattccccacaacatacgagccgggaacataaagtgtaaagcctggggtgcctaa

SEQ ID NO: 49893 - DNA, 424 bp, Homo sapiens
attgggccctctagatgcatgctcgagcggccgccagtgtgatggatatctgcagaattcggcttagcgtggtcgcggccgaggtacttcaataccttgcatgccacccaagcattccttatcacacagatgcattttaagtgtaacagcaagcctaatggctactcgattttctttcccttcaggtgagaatgagatggtgatcatgaaacctggaaaccaatatgagtacctgcccgggcggccgctcgaaagccgaattccagcacactggcggccgttactagtggatccgagcttggtaccaagcttggcgtaatcatggtcattagctgttttctgtgtgaaattgttatccgctcacaattccacacaacatacgagccggaagcataaagtgtaaagcctggggtgccctaatgag

SEQ ID NO: 49894 - DNA, 386 bp, Homo sapiens
  misc_feature 292: n = A,T,C or G
gggcgaattggagctccaccgcggtggcggccgcccgggcaggtacgcggggagggacccgcagctcagctacagcacagatcagcaccatgaagcttctcacgggcctggttttctgctccttggtcctgggtgtcagcagccgaagcttcttttcgttccttggcgaggcttttgatggggctcgggacatgtggagagcctactctgacatgagagaagccaattacatcggctcagacaaatacttccatgctcgggggaactatgatgctgccaaaaggggacctgngggtgtctgggctgcagaagcgatcagcgatgccagagagaatatccagagattctttggccatggtgcggaggactcgctggccgatcaggct

SEQ ID NO: 49895 - DNA, 366 bp, Homo sapiens
gagtcgtacacgactcactatagggcgaattggagctccaccgcggtggcggccgctttttttttttttttttttttttttggtgagacggagatttactcgttgcccaggctggagcgcaatggcgcgatcttggctcaccgaatgctccgcctgccaggtccaagcgattctcctgcctcatgctcccgagtagctgggattacaggcatgtgtgaccacgcccggctaattttgtatttttagtagagacggtgtttcaccgtgttgcccaagctgatctcgaactcctcacctcacgtaatccgcccggctcggcctaccaaagttctgggattacaggcgtgagccactgcgccccccgcg

SEQ ID NO: 49896 - DNA, 179 bp, Homo sapiens; identical to SEQ ID NO: 35325

SEQ ID NO: 49897 - DNA, 224 bp, Homo sapiens; identical to SEQ ID NO: 33795

SEQ ID NO: 49898 - DNA, 506 bp, Homo sapiens
  misc_feature 37, 54: n = A,T,C or G
ctgggtaccgggcccccccctcggaggtacttctagnattaattaacgcggggnaaaaaaaaaaaaaaaaaaaaaaaaaaaaaaaaaaaaaaaaaaaaaaaaaaaaaaaggggaaaaaaaaaaaaaaaaaaaaaaaaaaaaaaaaaaaaaaaaaaaaaaaaaaaaaaaaaaaaaaaaaaaataaaaaaaaagggggcccccccccgggggggaacctccatttccccttttaggggttttttttcccccccctctttggccgtttttttaaaacttgggaatgggaaaacccttgggtttcccaaatttattcgctttgaaaaaattccctttttcccaatttgggttattacaaaaaaggccccccccattcccctttccaaaaatttgcccaccttaatgggcaatgggaatttttaacctttttttttttgtaaaattccccttaaattttttgtaaaacaactttttttttaacccattgggccaaattgggaaaattcctt

SEQ ID NO: 49899 - DNA, 515 bp, Homo sapiens
cgggccccccctcggaagtcttctagaattaattaacgcgggggtctgctggaggattccaacagagagtatttcctccactgtacaatgtcacagactatctctatcatcattgctttgtggctgtttctgttttttactgtatgtaactggtagctgattgtactaggattaaaaacaataaactttcatgataaagccgatgagattcatgggctatacagcaaaaaaaaaaaaaaaaaaaaaaaaaaaaaaaaaaaaaaaaaaaaaaaaaaaaaaaaaaaaaaaaaaaaaaaaattaaaaaaaaaaaaaaggcggccccccccgggggggacctccatttccccctatagggagtcgttttaccccccctcactggccgtgttttaacaacgtggggactggaaaaaccctggcgttacccaatttaatcgctttgaaaaaaatccccttttccccagttggcttaataccaaaaaggcccgcaccgatcgcctttccaaaaatttgccca

SEQ ID NO: 49900 - DNA, 196 bp, Homo sapiens; identical to SEQ ID NO: 37613

SEQ ID NO: 49901 - DNA, 273 bp, Homo sapiens
gcgaattggagctccaccgcggtggcggccgcgctctcttccaggacatcaagaagccagctgaagatgagtggggtaaaaccccagacgccatgaaagctgccatggccctggagaaaaagctgaaccaggcccttttggatcttcatgccctgggttctgcccgcacggacccccatctctgtgacttcctggagactcactttctagatgaggaagtgaagcttatcaagaagatgggtgaccacctgaccaaaccttcacaggctgggt

SEQ ID NO: 49902 - DNA, 149 bp, Homo sapiens
tggactccaccgcggtggccggccgcccgggcaggtactttttttttttttttttttttttttccttttattttttttaaatttttttttcctttgaggggcccttaataaaaaggttaaaatagggtttgcccttggcctttcccttt

SEQ ID NO: 49903 - DNA, 85 bp, Homo sapiens; identical to SEQ ID NO: 35509

SEQ ID NO: 49904 - DNA, 88 bp, Homo sapiens; identical to SEQ ID NO: 35513

SEQ ID NO: 49905 - DNA, 197 bp, Homo sapiens; identical to SEQ ID NO: 33622

SEQ ID NO: 49906 - DNA, 78 bp, Homo sapiens; identical to SEQ ID NO: 35521

SEQ ID NO: 49907 - DNA, 557 bp, Homo sapiens
cgaattgggccctctagatgcatgctcgagcggccgccagtgtgatggatatctgcagaattcggcttagcgtggtcgcggccgaggtacaggcaagcagctacttccatgatacagtgggaagataaaaaggcccattcagtccagccgtgacctgtaaatccagcttgccctccccccaccccactggaaaaaaaatccaaaacctttttccaccagttttttacatgtcgcttctctaccaggagattctttgcgtcatctagatgaacacactggacttatatacagctggacatgaaagtaaccaatttaagtgccttttccttcaacaattttaacttcagttgcttaaggatgatcgagccaccgatgtcaacaaaatatcctttacctttaaatagtttttctttaattaagtttaaagaaaacctatttaacgagtgatattaccgggaaagttcacacagaaacagaaagaggcgaacgggagagcagggcactggcagcggggaagcggggcttggtaaatctaaagccaaagctttcaaagacta

SEQ ID NO: 49908 - DNA, 196 bp, Homo sapiens; identical to SEQ ID NO: 37613

SEQ ID NO: 49909 - DNA, 335 bp, Homo sapiens
agctccaccgcggtggcggccgaggtacgcggggagagtgttccagacagaagaaatatgcaagtgccgagaagctggcatcagaaaaacagaggggagatttgtgtggctgcagccgagggagaccaggaagatctgcatggtgggaaggacctgatgatacagaggtgagaaataagaaaggctgctgactttaccatctgaggccacacatctgctgaaatggagataattaacatcactagaaacagcaagatgacaatataatgtctaagtagtgacatgtttttgcacatttccagcccctttaaatatccacacacaggaagcacaaa

SEQ ID NO: 49910 - DNA, 506 bp, Homo sapiens; identical to SEQ ID NO: 35721
  misc_feature 194, 195, 207, 208, 222, 223, 305: n = A,T,C or G

SEQ ID NO: 49911 - DNA, 122 bp, Homo sapiens; identical to SEQ ID NO: 35727
  misc_feature 6, 15, 25, 60, 61, 62: n = A,T,C or G

SEQ ID NO: 49912 - DNA, 412 bp, Homo sapiens
acccacgcgtccggctgcttcctgcaagaaagcaagtctttggtctccctgagaagccatgtccctcgtgctgtctcttgcctgtcccacctgtgccctgccctccagcttgtatttaagtccctgggctgcccccttggggtgccccccgctcccaggttcccctctggtgtcatgtcaggcattttgcaaggaaaagccacttggggaaagatggaaaaggacaaaaaaaattaataaatttccattggccctcgggtgagctgagggtttttgcataaaaaaaaaataaaaaaataaaaaaaaaaaaaaaaaaaaaaaaactaaaaaaaaaaaggggcggccgctagactagtctagagaaaaaacctcccacactctcccccctgaacctgaaacataaaatgaatgc

SEQ ID NO: 49913 - DNA, 390 bp, Homo sapiens
cactatagggcgaattggagctccaccgcggtggcggccgctttttttttttttttttttttttttgggggaagatgaagaaatttcactcaagtattttgttactttaagattcaatgctggacactagaccagctataacattttcagatagagtgacttcatgcgtgaaatgatcacatacaatgaagaggttttaaaaaatacagatgacataacttgttcagttgaagaaaattaaaatactgatataaactaaatcattctcctcttcattttagggggatttttctctgcaattgtactgatttatgactagaaagctgaagactgatttgagcctctttagcaatactctatttcaccatttatcttccaaagaattatggc

SEQ ID NO: 49914 - DNA, 522 bp, Homo sapiens
  misc_feature 16, 18, 29, 45: n = A,T,C or G
cgggcccccccctcgngngtacttctagnattaattaacgcgggnggaaaaaaaaaaaaaaaaaaaaaaaaaaaaaaaaaaaaaaaaaaaaaaaaaaaaaaaaaaaaaaaaaaaaaaaaaaaaaaaatttaaaaaaaaaaaaaaaaaaaaaaaaaaaaaaaaaaaaaaaaaaaaaaaaaaaaaaaaaaaaaaaaccccccccccccccggggggacccccctttcccccttttgggggttttttttcccccccttttttgccctttttttaaaaccttggggttggaaaaacccttgctttccccaatttttttcccttggaaaaattcccctttttcccagttgggttttttaaaaaaaagccccccccttttcccttttccaaaattttcccccccttattgggaaatggaattttgaaccctttttttttttttaaatttccccttaatttttttttaaaacccctttttttttacccaattggcccaaattggcaaaatccttttttatttaaaaaaa

SEQ ID NO: 49915 - DNA, 489 bp, Homo sapiens
  misc_feature 417, 418, 419, 420, 421: n = A,T,C or G
agcgcgcattaccctactaaagggaacaaaagctgggtaccgggccccccctcgagagtacttctagaattaattaaagcgggggttgcggtgagccgagatcatgccattgcactccagcctgggcaacaagagtgaaactccatctcaaaaaaaaaaaaacaaacaaaaaaaaaacataatttataattcctaaaaagaaaaaaaaaaaaacagagcaaggcatggtggctcacacctgtaatcccagcaccctgggaggccaaagtgggcagaacacttgaggtcaggagttcaaaaccagcctggccaacatggcgaaaccccgtctttaataccaaaaaaaaaaaaaaaattagccaagcgtggtgacgtgcacccccagttccagccactcaggaggctgaggcaggaagnnnnnctgaacccgggaggcacaggccgcagcgagctgcgatcgtgtcactgcaagctccgcctcccgggctc

SEQ ID NO: 49916 - DNA, 72 bp, Homo sapiens
tgtgatggatatctgcagaattcgcccttagcgtggtcgcggccgacgtacttttttttttttttttttttt

SEQ ID NO: 49917 - DNA, 257 bp, Homo sapiens; identical to SEQ ID NO: 36909

SEQ ID NO: 49918 - DNA, 353 bp, Homo sapiens
ctatagggcgaattgggctctctagatgcatgctcgagcggccgccagtgtgatggatatctgcagaattcgtcctttctagcggccgcccgggcaggtacatgcatgcaagactgctgaagccagaaggatgactgattacgcctcatgggtggaggggaccactcctgggccttcgtgattgtcaggagcaagacctgagatgctccctgccttcagtgtcctctgcatctcccctttctaatgaagatccatagaatttgctacatttgagaattccaattaggaactcacatgttttatctgccctatcaattttttaaacttgctgaaaattaagtttttttcaaaat

SEQ ID NO: 49919 - DNA, 569 bp, Homo sapiens
attaacgcggggtatgtgtgtattatactatttattgctaaagtatacttctacttataagaagaaaagaagttcactatgaagcagcttaatgcaggcctttcaggagccattttggaagaagggattgttatggtaggagatgacagctccatacatatttttgccctgaagagcttctagtaggatgacatgtggaggtagaagaggtgatattgatgatcctaaacctgtataggcctaggttaatgtgtgtatttgtgtctttgttttctaacttgaagagtaaaaataaaattaaatagaaaaaaataaaatgaaatagaaataaaattaaataaatagaaaattaaatatattatagaatatatttttgtacagctgacaatgtgtttgtgttttatgttattattacaaaagaatcaaaaagtttttaaaaagttacaaaatgaataaagttaaaaagttataataccctaaggttaatttattattgaagaaggaaaatatttttaaaataaatttattgtagcctaagtgtatggttcttaaaagtctacagtagtgta

SEQ ID NO: 49920 - DNA, 399 bp, Homo sapiens
gactactatagggcgaattggagctccaccgcggtggcggccgcccgggcaggtacaattactcccggaccggcggcgtgaaagtcgtgatatcatcgttgaactattagctttgaagtttaaatccaatggagaagactcaagaaacagtccaaagaattcttctagaaccctataaatacttacttcagttaccaggtaaacaagtgagaaccaaactttcacaggcatttaatcattggctgaaagttccagaggacaagctacagattattattgaagtgacagaaatgttgcataatgccagtttactcatcgatgatattgaagacaactcaaaactccgacgtggctttccagtggcccacagcatctatggaatcccatctgtcatcaatt

SEQ ID NO: 49921 - DNA, 420 bp, Homo sapiens
ccctctagatgcatgctcgagcggccgccagtgtgatggatatctgcagaattcggcttattccttcagggttttcccagattttaaaccatgaattctaattgtctggtcaaaagaagcactaaggatctgactgctatccttagaaaagcttagacaggtgacacccttactgtgtgccctctcaaatctccttaaacattgtccactctgaatcttccacaccttgatttttccatcttgggccccagttgctaacatttctgtatctctgctgaaacacatgcagaggacagcatcatccatcatcataaagttatcttgggcctggtacctgcccgggcggccgctcgaagccgaattccagcacactggcggccgttactagtggatccgagctcggtaccaagcttggcgtaa

SEQ ID NO: 49922 - DNA, 505 bp, Homo sapiens; identical to SEQ ID NO: 45990

SEQ ID NO: 49923 - DNA, 505 bp, Homo sapiens; identical to SEQ ID NO: 45990

SEQ ID NO: 49924 - DNA, 359 bp, Homo sapiens
gctattgggcgctttggagctccgccgcggtggcggccgaggtacgcggggactggcgcgggttgagttccctgttgcccttggtctcggggtcgctgtaggcgctgaggctgcagctatcatggtgaacttacttcagattgtgcgggaccactgggttcatgttcttgtccctatgggatttgtcattggatgttatttagacagaaagagtgatgaacggctaactgccttccggaacaagagtatgttatttaaaagggaattgcaacccagtgaagaagttacctggaagtaaagactggctagattatcgaatgttcacattttaaagttctgagagaaataaaaacatgaag

SEQ ID NO: 49925 - DNA, 278 bp, Homo sapiens
gtacgtgttcatcctggcgggggccgaggtgctcacctcctccctgattttgctgctgggcaacttcttctgcattaggaagaagcccaaagagccacagcctgaggtggcggccgctagactagtctagagaaaaaacctcccacacctccccctgaacctgaaacataaaatgaatgcaattgttgttgttaacttgtttattgcagcttataatggttacaaataaagcaatagcatcacaaatttcacaaataaagcatttttttcactgcatt

SEQ ID NO: 49926 - DNA, 472 bp, Homo sapiens
  misc_feature 24: n = A,T,C or G
gccccccctcggagtacttctagnattaattaacgcggggaacaactggaaccgaaaacatgcctcagtataaaacaaacattataaaacgaaaaaaaaaaaaaaaaaaaaaaaaaaaaaaaaaaaaaaaaaaaaaaaaaaaaaaaaaaaaaaaaaaaaaaaaaaaaaaaaaaaaaaaaaaaaaaaaaaaaaaaaaaaaaaaaaaaataagggggccccccccgggggggggccccaattcccccttttggggggcttttttccccccccccttgggccgttttttaaaaccggggggtggggaaaacccgggggtttcccaatttttttcccttgggaccatttccccttttccccgggggggtttttacaaaaagggccccccccgttcccctttccaaaaattgcccccccctaatggggaaaggaaatttgtaccctttattttttggtaaaattcgcggtaaatttt

SEQ ID NO: 49927 - DNA, 87 bp, Homo sapiens
tactactactatagggcgaactggagctccaccgcggtggcggccgcccgggcaggtacttttttttttttttttataaacaaaata

SEQ ID NO: 49928 - DNA, 331 bp, Homo sapiens
gcttactactcactatagggcgaattggagctccaccgcggtggcctggcgtttttccataggctccgcccccctgacgagcatcacaaaaatcgacgctcaagtcagaggtggcgaaacccgacaggactataaagataccaggcgtttccccctggaagctccctcgtgcgctctcctgttccgaccctgccgcttaccggatacctgtccgcctttctcccttcgggaagcgtggcgctttctcatagctcacgctgtaggtatctcagttcggtgtaggttcgttcgcttccaagcctggggcttgtgtgccacgaaaccccccgtt

SEQ ID NO: 49929 - DNA, 428 bp, Homo sapiens; identical to SEQ ID NO: 36425

SEQ ID NO: 49930 - DNA, 334 bp, Homo sapiens
ttttacatctagtggatccaacgggctgcaggaattcgatatcaagcttatcgataccgtcgacctcaagggggggcccggtacccagcttttgttccctttattgagggttaattgcgcgcttggcgtaatcatggtcatagctgtttcctgtgatgctagagagcttcatagacacacataagttcagcgtcatgcgcaacatgcgcaaaacttttgcccgctacctatcatttcggcgtgacaactatgagctgttgctattaattcttagtcatttagtggcatagcaggtgacatatcaacgcaaccgttttggggcccagcatgacac

SEQ ID NO: 49931 - DNA, 386 bp, Homo sapiens
cccccctcggaagtcttctagaattaattaacgcgggataacaggctagaaatccaaggtatttgactacaggctttcttgaagccagcctttttcaagaggtagagagaggtggggaacaagtgccagcttttggagtcttacacattgggttcaaatcctgactcctccacttgcccaacaagtggtctctgaaccatgtctcctgcacctcaatatgtagtcctgtgaggtcccaatgataaaacatatcaaagcacctggcagctgttaccacacctcacaaggtggcagttactattcttgtgattttttttttcctctgttccctgaaatgaacatattcattccatcccgattgtgtgctgacaaaaaaaaaaaaaaaa

SEQ ID NO: 49932 - DNA, 606 bp, Homo sapiens
  misc_feature 15: n = A,T,C or G
cgggccccccctcgnaaatacttctagaattaattaacgcgggccctaacttacatttccaccaataatgtactattcagccataaaaagagaatgagatcctgtcattggcaacaacatagatggaactggagatcattatgtcaagtgaaatgagccaggcacagaaagacaaacatcacatgttctcacttatttgtggaatctacaaatcaaaacaattgaactcatgaacataatggttatcagaggctgggaaaggtagtaaggggctggggagggagtggggattgttaacatctagaaaataaattgaaaaaataagtaagacctactatttgatagcacaatagagtgattatagtcaataataataacttaattgtactttttaaaataaagagtgtaagtagattgtttgtaactcaaaggataaatgcttgaggggatggataccccattctccatgatgtgcttattttacttacatgcttgtatcaaaacacctcatatacccaataaatatacacacctactatgtacccatgaaatttaaaatataataagacaataaaaatttaaaaaatgaagtttccccatcaaaaa

SEQ ID NO: 49933 - DNA, 449 bp, Homo sapiens
  misc_feature 28, 44, 50, 52: n = A,T,C or G
cgggcccccccctcggggtacttctagnattaattaacgcgggnggcagnanaaaaacccataacagtgagagaccaaaggcacgggaggcaatgaatattacagtccagaagacaaagctctaaaatgctcccacatggaaaatctcagaaattgccactattcttgagcaaaacactttatggaacactgaggcactgaggaccacagtgtcatgtccagttccatagcagattcatgatgattattgattttgtctttaactttagattataggcagtatgcttatttctaacatacatgcatatataagaatacatacatgcaaactgggcatatagatatggagaaattaaacaatctgctacatgtctatttaatccacagtcccaggaacaatttcttctttagaaccctttcttctttagaggccaaaaaaaaaaaaaaaa

SEQ ID NO: 49934 - DNA, 613 bp, Homo sapiens
  misc_feature 39: n = A,T,C or G
ccgggccccccctcggggtacttctagaattaattaacngcgggtctcagggctgaccacactatctctgtttcctcttcatattcatagagccagagatagtccttttttttctttcttgtgtttttaaatgtgcaatgaaatgttttaaagttatgttttaaccactgttttttcatttttgtagcagaagggagagtagtagaatcatctgtatcaatttaacctgccatattcaggaatgttccttaaatccctttagtataatgacataatttgacaatgagagaaaacataaacaaagagcattctcacttaaaggtatgtagttctccattgattaataataattactggcactgtaattaattactggtactgtaattaataactacaaggtactgtaaactgtactagacatatagtggtgagttctagccctcatggagctctcattgtaatgaaataaaacaatcgaaataaaatataggaaatggaagtcaggtgttaagaaataggcttatttctgaaattcaaatacattaggaattattcgataaaattaaaatgcttaccttatttattgacagtatggtcatcttatagtcctttc

SEQ ID NO: 49935 - DNA, 254 bp, Homo sapiens
  misc_feature 16: n = A,T,C or G
ccgggccccccctcgngggtacttctagaattaattaacgcgggattctgaatgtattaatatatattttttgtccatataagcttcagaatcaccttgtctcattttaaaaaatcttcctgttggttggttgcattaaatgtacagattaatttgggaaaaaaaattttcaggcattacaaatcaatgaggtttggggatccatttgttctagaacccatatattgatattcatatagaaaaaaaaaaaaaaa

SEQ ID NO: 49936 - DNA, 598 bp, Homo sapiens
  misc_feature 27: n = A,T,C or G
cgggccccccctcggaagtcttctagnaattaattaacgcggggccaggggctcaagcaatcctaccgcacgcttctcaagtagctgggaccacagatgtacccgctacacctagctaatttttaaattttgtgtagagacaaggtttagctatgttgcccaggttggtctcaaattcctgggctcaagcaatcctcctgacttagcctcccaaagtgctaggattacaggcatgaaccactgtgcctggccaatactgccattctttatgcaaatatttttttcaattgttatcaagtaggaaatctaattaacttcagtttcattgaatttcatctttacttccttcctatccatggcttatgagagaagtgttaacatgaagcaacaaggattatagtaaatagagaattaataatctaaaataactgagttggccatattgttattataattatgctgaagcttatttacatattctttgttttgtgttgaagccttgagctctggtgggggaaaatcatgattttgattaaacacaaaatgggcagttaaacctctaaatagtatacatggagaaagctgaagtacatttaat

SEQ ID NO: 49937 - DNA, 582 bp, Homo sapiens
  misc_feature 28: n = A,T,C or G
cgggcccccccctcggaagtcttctagnattaattaaaatgccaaagcacattacaaaagactcattattatcatttataagtttattaacccattgggtggtattacatattttagatatcagcattttcctggtctcatactcaataatatattcattgaagtaaaatagttgtgtttcattagaaagaaatatgcagtttaaattataccattgctttctaaagcagaaatgttatcctcttgaattgttttcagtgaaagtaaatttttgtatgcctttctaattttttaatatatggtgacacatttatttcaaaaatgatgtgagggtcatgtttattttgtaatattttgaatttgcttttcagggttagaattttagtgcctatctgttatggtcattctacataatttagaaaactgaagcacaggataatatataaaactaattttatatcaatgacttatgttaaaatatagctgctgttaaaatggaattgttagtagagacaacttttaatgatataatcaaatgctggattattttactaataatgtaaatgaccatcaaaatatttt

SEQ ID NO: 49938 - DNA, 595 bp, Homo sapiens
cccccctcgaaagtcttctagaattaattaacgcgggaaatatatattgacatgtttatttacaaaaaaatccttcaaattataaaatattgagatttctttaaattatactttaagttctagggtacatgtgcacaacgtgcaggtttgttgcatatgtatacatgtgccatgttggtgtgctgcacccattaactcatcatttacattaggtatatctcctaattctattcctccctgctccccccaccccacgacaggccctggtgtgtgatgctacccatcctgtgaccatgtgttctcattgttcaattcccacctatgagtgagaacatgcagtgtttggttttctgtccttgcgacagtttgctcagaatggtggtttccagcttcatccatgtccctacaaaggacatgaactcatccttttttatggctgcatagtattccatggggtatatgtgccacattttcttaatctagtctatcattgatggacctttgggttggttccaagtctttgctatcttgaaaattcccacatgcataaataatgaaacaaaaagtttctataaatgatgatcatctactcatt

SEQ ID NO: 49939 - DNA, 418 bp, Homo sapiens
cgggccccccctcggaagtcttctagaattaattaacgcgggaggcagagattgcagtaagccgagattgagccactgcactccagcctgggcaacaagagcgaaactctgtttcaaaaaaaaagaaaagaaaagaaaagaaaaagaaataatgtttcaatctatggacaggccctagacagagctgcctttaacacatctttttccctttccctcacatccttgatcccatctcagtcaaaaaggaaaaaacaaaaagttttcttacttctcagcctaagattcctgatactgtccccagatgccatacatgtattggcctcccagaaatcacccagtgattttctccccatgaaaagtttatatgtctcatgccctcagagtttttaactgcaaataagctaaaaaaaaaaaaaaa

SEQ ID NO: 49940 - DNA, 581 bp, Homo sapiens
ccgggccccccctcgaaagtcttctagaattaattaacgcgggggtgaaattttggtgtagaaaagaagtacaatataagttctcctaaattccctctactaagtgacttactagactaacaatattccattatttctgtaaaatgtattatctgatgcttaggataagttttaatgcacatagctggttagctactcctttgcacttctgacccaaatggctaaggtgtatgcttactaagagccagtcagtttgttcctgaacttgttgatgccattgtatttggttatcagagctatgactgcaaaaagagttgttgcttctccaagaactatttaaaatgcttaaagtagacttaataaaaatgagttgctggccggacacagtggctcgcgcctgtaatcccagcactttgggaggttgaggcgggtggaccatctaaggtcaggagttcaagaccagcctggccaacatggtgaaaccccgtctctactaaaaatacaaaaattagctggtcatggtggcaggcccctgtaataccagctactcgggaggctgaggcaagagaatcgtttgaacc

SEQ ID NO: 49941 - DNA, 302 bp, Homo sapiens
  misc_feature 8: n = A,T,C or G
acttctanaattaattaacgcgggaggctagtcttgaactgctgacctcaggtgatccacctgcctcggcctcccaaatgtgctgggcattacaggggatggtccagcgggccttggaaacataactatttgcaaatatactgtctactgtgactaccgtgcctagctacatgaatagtaggaccaaacctcaaacagggctcatattgcccacaccaaatgggaatctatggaaggaggtgcttaaaaagaaaattcctttctgaggaatctatcgaaagacgtgcaaaaaaaaaaaaaaa

SEQ ID NO: 49942 - DNA, 633 bp, Homo sapiens
  misc_feature 581: n = A,T,C or G
ccgggccccccctcggaagtcttctagaattaattaacgcgggctacagagcatgatttgcaaacaagcaaatccagagcaacaatgttaatcatgtttttattcactctccactcagcagcagtaaaaagttctactgtgggattcaccacacccatggagacattcccagcagcctacatctggccttcaattaccctttattatttatttcatccccaaaatattttgactcctgtgcctgtcgtcctagagcagagggaggcattagccaataaacagagacacacgcaaatttatcaacagatggattaaaaaggaatacaattacatgcaaaatgcctttgcttttaaaaagcattcatacataaattagtctgtcaggaaatatatgcagttaattgcaggaaaaattgggtcctacaataatatcatctacatatagtcacttcttgcaaagcaagagtgattgggcacattattaatttaacagaagtcaaactgtattcattaaattgcttcttttgagggaagaagcctattagaattcattttataacatactcctttttacaactaantaagtatttaactcttatttgcaggccaactaaaaagtatattttgcccttt

SEQ ID NO: 49943 - DNA, 267 bp, Homo sapiens
  misc_feature 28, 44: n = A,T,C or G
cgggcccccccctcgaggatcttctagnattaattaacgcgggngggaataacaattttatttcacctcaggtaagaaagtaaatggaaataaattcaattgtaagtacaactcaaagaactgcctccaaaaatatagttttgcagacttaactggtgttcttgatgattaacaaaaaaataatgcttttctttctaagttaagagtgaaaaagccaacagtaaatcctaatatagctttagcctctgactccaaaaaaacaaaaaa

SEQ ID NO: 49944 - DNA, 528 bp, Homo sapiens
  misc_feature 19, 24, 490: n = A,T,C or G
gccccccctcgagatactntctanaattaattaacgcgggggtagatgataaatggtggctggcacaaggtctcagtgtcagggatctctgaggagcagcggagactacactcaaatgcaaacattcgcctattttaagggggaactgctcctccacacagaattcatatgcaaaaagaagacattctgagtctctaagaaaagctaaatgcctctattttttaaatgttaaatttccttatttttataattgagagctattgggaggccgaggtgggtggatcacgaggtcaggagatcagaccaccctggctaacatggtgaaatcccatctctaccacaaatgcaaaatactagctgggtgtggtagcatgtgcctgtaatcccagctactcgggaggctgaggcaggagaattgcttgaaccagggagtcagaggttgcactgagccgagatcgcgccacggtactccagcctggtgacagagcanaactccatctcacaaaaaaaaaaaaaaaaaaaaaaagc

SEQ ID NO: 49945 - DNA, 408 bp, Homo sapiens
  misc_feature 23: n = A,T,C or G
gccccccctgagggtacttctanattaatagcgcgggcacaacatgaaccacagcctcaaatggcctagaactgttatccttaacctgagggcctgcctttaactccacttacaactttccaagggacattctgtgtatatttactgtatgtgattatcagtgttagtgtatctgtcccccaccaccaccaccctaaggagatactctgtaatttcatggcattaagaaggatggacatgccccaaagacatttagacccattggtctacaatcgaaggctgtgtaccttgaccacaattattgttcaggatggtggaaatggttaagtaattataccacgttcatttcatggaatactctgcagctacaaagaagtaagtttagttataaccaaaaaaaaaaaaaaa

SEQ ID NO: 49946 - DNA, 596 bp, Homo sapiens
cccccctcgaaagtcttctagaattaattaacgcgggatgcatagttttgggaatgctagacttatattaatggaaataagccaagaaagaaaaataaatggcatccaagaaacaggggatccaaaacaaggaaaagcctcttctggaagctgcagcaaaaggtagggtgggtggaaaacaagaaaaagcaaagggaatttgtaagatggtgcagaatgccccaggaggacagacagccagttcaattttaaagagaatattctcaaaacaggtctctaggaataaaacagaaataagttatctgaggttaaaatgtctagaatttaatttggtcaacatttgacagatcttttagccctttggaggaaaaacatagtgatcagtatttgggaagataaacaagtaaaaaaacaatgcaattattaaccccagaataaaacaaaagtgttaggccaggtgcggtggctcacgcctgtaatcccagcatgttgggaggtcaaggcaggtggatcacctgaggtcaagaattcaagaccagcctggtcaacatggtgaaaccctgtctctactaaaaatacaaaaattagccaggcgt

SEQ ID NO: 49947 - DNA, 575 bp, Homo sapiens
  misc_feature 43: n = A,T,C or G
cgggccccccctcggaagtcttctagaattaattaacgcgggnaaaaaaggcaaaacaagtctaatatataatcctagtagtaagtttattttttaataacttcagtgaagaaggcaggactttctgcacaagtccagtggagttggtaatagcttaactctagcatatgctaattgatgtaatcgctttattgcacacattcttttgcacacagccaacaatacatccatattctcaatagggaaaaaaaaattcctttcctagttgtcaggatgagtttacttagtttgttaatcatagtatcttcaagtgattaacacttcttcatattttgcctatttcagtttcccatctgaaatatatttcatcatgtttaattacacatgtggccgtaacatcccatgatgctactttgggtgtgttaacacaatcataatcacaggctgctggttcatgaacagggagattaaattaattcatttcaaggcaagcatattttagtcacctaatttaaacgattatagaacaattagaaaccatctgatttgtctttttgttattttatggctcactg

SEQ ID NO: 49948 - DNA, 463 bp, Homo sapiens
cccccctcgagagtcttctagaattaattaacgcgggatgctaatacaggggccaagcaaactatagcctgtgaacggccggcaccctagttttgtataccttacaggttacaaatgatttttacttttttaagtacttaaaaaaatcaaaataggccaggtgcagtggttcaagcttctaatcccctcactttgggaagctgaggcgggtggatcatgaggtcaggagatcaagatcgtcctggctaacacagtgaaaccccatctctactaaaaatacaaaaaattagtcaggcttggtggtgggcacctgtagtcccagctacttgggaggctgaggcaggagaatggagtgaacccgggaggcggagcttgcagtgagccgagatcgggccactgcactccagcttgggcgacagagcaagcctctgtctcaaaaaaaaaaaaaaaaggaaaaaaaaaa

SEQ ID NO: 49949 - DNA, 579 bp, Homo sapiens
  misc_feature 568: n = A,T,C or G
gggccccccctcggaagtcttctagaattaattaacgcgggtccactccaccagcaaagacatagccttgcagaacagagaacagaaaacagaaatgctttttcttcactccctgttgggaggattctggaatagagctgtgatttggcatactatttctgctccacttttgagtttctgcagcaaacggcaagagaaggctggggctggtataataaggtcaccaggcacctcaggggaacaaagtggtagcgaaagaggaccaggccgggcctggtggctcaagccaggtgtggtagctcacgtctgtaatcccagaacgttggaaggccaaggtgggtggatcacctgaggtcaggagtgcgagaccagcctggccaacatggtgaaaccccgtctctactaaaaatacaaaaattagccaggcgtggtggcatgcgcctgcaatcccagctactcgagagaccgaggcaggagaatctcttgaacccgggaggcagaggttgcagtgagctgagatctcatcactgtaatccagcctgagcaacagactgagcctccatctcanaaaaaaaaaaa

SEQ ID NO: 49950 - DNA, 619 bp, Homo sapiens
ccgggccccccctcgaaatacttctagaattaattaacgcggggattaactttagcatcaagttagagggggaaaagtaaggctgtctgtagtcccagaaggggagataaatggttttgaaatcccagtaatggttaaaaaatgactcacctatccttttaataacccttatattcactatttttagttcttctgtggctttcaatctatagttgttttttagttggccaagcactactaatctttaagatcaaggagaaaaagaggaaaaaataaagccaagtgcttcttatcctgtccaatctgtctcttctctatattcttaaaaagcttgcagttacgccatttgaaaaaaaatttttttaaacatatccacactagaagtgaaaggtactctctagaaagtgaaagaaatataattctattgtggaaccataattgaatttttaataatttttaatatctagaactagatttcttttgattactataccagctaatattttaaagcttatgtgaatacttgtaaaattaattactcataaatctcttgacttgcctgtgtagagatatataagaagaatatcgggagaaggtgcacaactgagtccgtgtcatt

SEQ ID NO: 49951 - DNA, 609 bp, Homo sapiens
cccccctcgagaagtcttctagaattaattaacgcgggccagtcactacgctgaaggctatataaggaatatctcttcaaatcctcacaataaacctaggtacaattatcatcaccattttagaattcgtcaaactgattgctaaagacagcataaaatttgtgcagggccacataatttagcaaatggcagagccaggattcaggcctaggccagccggccctcaagcaaaagctgttaactattaggttggtgcaaaagtaattgtgatttttgacactgcttttaatactaatactatgccacgtcgcctccgtggagaagtatcatcctcagaaattcttcaggacccaggcaagcaccaggaagcttcagtggagcaccagcagtcaggagaagagactttaataccaccatagaggtattaaagtgtctgaattggaagtggaagatgatccacttccaatacagtaaggaggcccattctggtcccttccctcactgacttcttcaactactgtttctcctgttccctgcttcaggcatgaacgaaaacggtttccactgtatgccatctcagaaagcctcgttggccaggtgcagtggctc

SEQ ID NO: 49952 - DNA, 413 bp, Homo sapiens
  misc_feature 41, 57, 61, 62: n = A,T,C or G
aagactggggtaccgggcccccccctcggggatcttctagnattaattaacgcgggnaccnntatttgactagaaaacccttcattcgtgcaacatttattaataccccatggcaaacctagtattccgtgaataatgaacaaaaaatttataatttaaaactaaaattgccttctaagcagagatctacgtatcaataaaatgaagaaataaaatttccatactgttttctttccaatacaaggattagaaggaaaaggaaaagagtaacaaccagaaccaatagcccatgtttggccaggtgccatggctcaatcacacctgtaatcccagcaatttcagaagctaaggcaggaggatcgctgggttcaagtgatccttgaatgaaaccccgtctccaaaaaaaaaaaaaa

SEQ ID NO: 49953 - DNA, 623 bp, Homo sapiens
  misc_feature 33: n = A,T,C or G
ggtaccggggccccccctcgaaatacttctagnattaattaacgcgggcagtgttaggacaagtgtattttctttgtgttctgagacatagctttcttggcctttgatgtcaaccttttggaggctattttttaggtttgaaactgtacttaaaatattcaggaaaatagtcacatttgaaattccaattagttcaaaagggatctcccaaaccatctagggtgttcttactaaattatcgtaagaaatacttgtttaactatctattctgtatacagtactgtggtagatcctggtaagggttaatttttttctaacttattctgatttcgtgattcttacccttgattatggttgcagtgccttacttgtataggatgcttttactttttaaattgaggtatgatttacatgcagtaaaatgcttaagtctaggtgtgcagctcagtgaatttttgcccatgtttatacccatagaactctactcagctcaaaatacagaacatttccatttcccctggaagttctcttgtggcctttcccagtcaatattatttcccctcttcatgaaaaggtaaccactattctgacttctgatgccatagattcatgttgtaagtggc

SEQ ID NO: 49954 - DNA, 392 bp, Homo sapiens
  misc_feature 10: n = A,T,C or G
ccccccttgngggtacttctaggaataattaacgcgggggagcagctttacaagaaggaaacggggcccccttctgagacacccccgtttgcttctgctccttccttgccattgacgtgcccttcttctgaaactatcccacacctgtgtttggcaacaagcgggtggcccttgatccaaatagcatttttcaacttgcgaactcttacacttttggcaagggacaccaagtacctgggtaatgatctttaatggaaatgaacctttggcttgattaacattgaactgggttagtatgcacaagccgagcttcgtgggccttccatgggaaccctttcctggcagccacctggccacctggaagaactgggcctgggcaggtttctctttat

SEQ ID NO: 49955 - DNA, 617 bp, Homo sapiens
  misc_feature 28: n = A,T,C or G
cgggcccccccctcgaaatacttctagnattaattaacgcggggggcttaacctaataagccgtgtaccctcccttgtacccttgagttgaatctcagaaactctagagtgcataaattggatcatgagactaggtcatgaagctaacaaacaacttctgtttttcaaggatggttctaaaccatataaagactctctgatatttgcagtgattggcaaaataagatactttttacatattcttttttttaaataatgtgacatttttctagcgcttgaccaaataggatgaaatgatacaatacatgctctaagggcactattaactaataaataatataagtatttttttgtgctttacaattaattttttgagaaaactagagtcaagtatcgtgcttacacaaggcaaaccattttagtgttccttactctttgattaaatttatatttataacatgttgatgggagtaaaaaattcattggctagagagacaaagacctggattctggtcccagctctggcacttaacctactggctatcaccttgggtatttaaccaccatggtaccagcttctcatgtttaaaatgaaagttagggccacgtgcggtggc

SEQ ID NO: 49956 - DNA, 311 bp, Homo sapiens
attaattaacgcgggtgaacagtgtgaaattatctaggctctgcagcaaggaagaattagaaattatggcagcaggtgtaagatagcgtataaccaagagggattggagttaggaagtcctgtgaaatttgcctagatcaggtcgctagcactggaatcaaacaggagcacatgcagaagaaaaatcagcataattttcagtaaggaaaaacaagcagttcgcatgcctaggagacttctagttaaatatgtcatagtttctccaaatttaagcaaatcataagccaacagtaaagtaaatcgtaaactta

SEQ ID NO: 49957 - DNA, 502 bp, Homo sapiens
  misc_feature 28, 447: n = A,T,C or G
cggggccccccctcggaagtcttctagnattaattaacgcggggggcctgtcattagcgtattagggggggaaaatccatcgatgatgcatactcattcacaaaacatctacaggtcttctgtccttaagctcataactcacagtaagtatcaaatatccttcaattctaccaaatattgctcagcatatagatttacaaaaaaaaaaaaacctaaaaaccaatttctggatgcctgctatttaagacatctagctcactaattgcaaaatctatagaaaagtctgcacagcatcaaagcctcggttgatcctatgagcagttctaaatgaaaaactgtctcttttgcgagtaaataaagcacttaatgcagtttctggctataattgtgtttctcctgtgggttttgaaaatgaccttcctgtaagcctcaaggactgtaactttntagataaggaaacttgttcttgttttaagtctatgtcaggttcattcccctatag

SEQ ID NO: 49958 - DNA, 271 bp, Homo sapiens
  misc_feature 243: n = A,T,C or G
ttaattaacgcgggattgttaaaaaaaagctcattaatacatactgcttataaactaggaagtgcaacaaatatgtcaaatatgtattttaaagacttctaagtacaaaggatttattttgttacttgcttaaactgttattgattctccttttaaatgttaaccttttttctctctcctataaatagagttctgggtggagaaatgataagggataaagctggagagtcaggcttaacttgnaaatactttagaaattgatttttatctg

SEQ ID NO: 49959 - DNA, 430 bp, Homo sapiens
  misc_feature 28: n = A,T,C or G
cgggcccccccctcgaaagtcttctagnaattaattaacgcgggctatatctagtctacctacaaaatgatcatgaaaacactttaagtaccattttttacacatctgaaaatgaaggagaaaggataattttatattagtgtgtttcggtgatgtaggcacttagcatgaaaagaaaaaactggatagaccttgatctgaatggtgtcactccaaattgtggcctattttactgttttcctagaaagcacatattgacagggtacttcttttgaataattcagtattttaaaaatgcaagccaggcacagtggctcacgcctgtaatccagcactttggaaggccgaggtggggggatcacgaggtcaggagttcaagaccagcctggccaacatgggtgaaacctcatctctacaaaaatacaaaact

SEQ ID NO: 49960 - DNA, 626 bp, Homo sapiens
  misc_feature 16: n = A,T,C or G
cgggcccccccctcgngaatacttctagaattaattaacgcggggtagttcagcagggtaagaatgatacaagtgtaagggacagagatggaagtgatgatttcaagttccaaggtgaactgaggtaaataaaatcagaatgggtaaaagggactaggaaacttttcagggcctgattgtcacattgaagtacacgtttcaagggaatgagaaactggatgataggcaaggggagaaagtagaaatcagagagcgaaagttcgcggttctggttcttgtcccagggttagcccaggagcaagtgtggccatccatgttgctggattagagaaagcctaagcactgtgaagccaggttctgcatggactatctattaagtgatgaagtttcccagaatgcaatggcatcctgtgggaaatgtaatcatgggacaggcgtcattttgcttgcagtatacaggcaatgtcctaaaacatgacggtgaaaatggatgactttcgacttcgacttcaaaccattacagctacagagtggaaacaatttgagggtagaggttaggtctgctcttctccataatccctctcagaggatgcagtggtttatacagtgttaatggttcataacca

SEQ ID NO: 49961 - DNA, 498 bp, Homo sapiens
cggggccccccctcggggtacttctagaattaattaacgcgggagttgaattaagtttttaaaaatggtttcgttactttggtctcttataaacctatcagttttgtgctgtaggacagtataaaataatgttttagatattttgtgaaagttatttgatattagactctcaaatcctacttaatatgtcacttattagtaaagtagatatctgtatttaatattctaactagcatatatttgctatattatccatttatttattgaatggttagtgtactgggttactaagctcaatgtttaatagggcagagagaacagtattaaaattttaaatcttattaagttttgatgatcagttaaaataatgtatgtgaaagcattttgagaactataggttgcttctggatgcaggcaacagaagacctcactgaaattggtcttaaaaataggggtattgggggacagagcgaggctccatctcaaaaaaaaaaaaaa

SEQ ID NO: 49962 - DNA, 341 bp, Homo sapiens
cgggccccccctcgaaagtcttctagaattaattaacgcgggatattagaatttaaaagaacgttttttctgtagtagaaatctctttcttctactcccagcaatgttaaagttatagttttagatttagggttgacaagaataactttgctttgcatagctaattaaccagattgagtaacagagcaaaaaaaaaaagtttattttcacactgtggtaataatagttaccatttttggagttccacattatttctattgttgtatatgtcttaataagggaatggcttcctctcactaacttcaagtcacaccaagaaacctgcttcttcctgaagaggg

SEQ ID NO: 49963 - DNA, 492 bp, Homo sapiens
cccccctcgagaagtcttctagaattaattaacgcgggggagtagccaggcaggtgcctcactggcttcttcagacgaggcttcctcaggtggatatatgactattaggggaaaagaggcttttgagacagcttattacctccttcccctttttgaactaagtacattgtctcagtcccagtatgaatttgtcccatttggggtatttttaaaataaaagatggctaacatggaatctggggcatagccttggcctttaattatggttgtaagcccaaataatggcagagaaacacagggctgtttttacaacagaaaactcaatataagttttatataagaatcctataaaatttgaaccagagctcctatttagttgttataatgtctcctaaagatcttaaatgcttctaaaagctaattattattccagagcaactttttccttttcccccttataaagtttttttttaaatccaaaaaaaaaaaaaa

SEQ ID NO: 49964 - DNA, 611 bp, Homo sapiens
  misc_feature 571, 600: n = A,T,C or G
ccgggccccccctcggaagtcttctagaattaattaacgcgggatagtaatgatacctataaactcccttgaacaagtaattcttggctctggagtgccgaatcaagtgaaattaaggagttttgacttaagttgtacagataattgcaggaaagctcagaacatggttgccaggtcaccacgacaacaagaaattcagagctaggtagtgggagaaaagtggaattagacatgtagccaagcctagcctgaactagctgagtgtggtctgcactcacgtccagttccccacaatacagcaggcccagggattcaggtaattgaattacctaaaaaccaactgaataaatgatgaggtggtggcaggaagcgaggctagagactgaggtgagccgaaaaagcgaatgcgtattagggtggagcagcaccacatatcccctgtcaccttgcagcactgggagaagagtgggggccccagctgctgcagacttctctctctggaaagtgccagtctctgtcattggtcttctctggatatacgctaattagagtaatgtgattccaggaactntcaaacagttcatgtaccctgctcaacanatacagcattt

SEQ ID NO: 49965 - DNA, 592 bp, Homo sapiens
ttctagattattaacgcggggacacaccacttcaggggccagaaaactgaagaagactaattctaatcacgtgaattaaaaaaaaaaatcctttctgagttgctatttatggtctgggagagattattatgatatcaaattttcttacttaccactgacaattctcttaaaaggaagaaaagaaagactgtccttgaagttgactaactcttagaatatcaagcctacttcattctccataacattaataactgatgcagaagcaaaacagaagagtctgagttcagaacatttttgtctaatggaggggcacagggactcatgtcatgcttcaggataccttgtaaccattcctgttttattagagaagataatccagctacattctcaaggtgggtaagtcaacacagcgaggtgccttggacagagcgtgcttcctgtgctgggagctcgggtgcctgcaggcgtgggctccctctggtgcaccctctgcagctccccagatagccaaagcaatcttgagcaagagcaacagagtgggaggcatcctgcttcctgattactaaatgtatgacaaagctgcagtgatgca

SEQ ID NO: 49966 - DNA, 446 bp, Homo sapiens
tccaccgcggtggcggccgcttttttttttttttgaaaaaaactgggtttaaaaaaaaaactttggaaaccctaaaagactttggtttcctccttctaaaaaaacaaacctgtggaaaacctaaaaaattttgtaaattttggcctttttaaaatttaaaagagacttttaaaaattcctccttttttaaaatttagaaggccttttacttgtaaccttttttaaggaaaattccttttcccaaattaaaatttcccaaaaattttttctttttggccagtcggtggcttaataaaaaatcccgggattctgtttatccctcggctttaaatcggtggcagtatcacatgatgggtccccttgggaaaggtggtttttttattcgggagagatggagatttaaaagggcaattgatgtttttataaaaagggtttgggctttgggg

SEQ ID NO: 49967 - DNA, 582 bp, Homo sapiens
  misc_feature 25, 38, 502: n = A,T,C or G
actgggttacccgggccccccctcnaaatacttctagnattaattaacgcgggtgattagaaaactagacttaactagttacgtgtgccagtaattctaaaaattgatcaaaatcattacttatgtttaaaaataaacattgtggaagacagtctctgggaaaattgaaactttttaaaactaaaattgtgtgttggttgctttcctaatagaagcatttatatctatgttggtagaggccataaacttagatgcttaaaggggaagctaatataaatgagcaaagctgagaagtaaaaagaaccacaaatcctagaaacaatggactgaaaacaatgttcttggtatgcccctccatcttaaaaaaaaatgcttttttcatttctactttttttttgatacgtgagaaaaatgggcctgagtttgccagattgtgtggtggtgttttgttttgtttaaagaaaagccagatatctagtttttggtgtaaaatattccaatntttaaacatagaaaacaaattaaaattatttaaaattaacagaaaggaagatttttgtgggctcagaataacacttttgt

SEQ ID NO: 49968 - DNA, 513 bp, Homo sapiens
cgggcccccccctcggagtacttctagaattaattaacgcgggaatcccttaaacagggaaatatgagtctgtgtgatggagatactatctcagaagcagtagcaggagtttccaaaaggaattcattaaacagaaaaaaaaaaaagactatatattttcacaactttaaaagaagactcttctttatgcacaacaagaatgtagtcggacaggaaaaataaagcataaatagctattatataatcaaatatagtgttgtgatagaaatattttcaacgaactagaggcaattctgtatctggtatggcagagtaagccccatcatggtctacattcctatgaatggcaattctaaactctgaacaaaacataaaaatatttgtagaaactagggagtgaacaaaataagacagactgtaaataagtgccaaaacttgccagaaggaaaaagaatgaggtgcattttttcattattgcaggtattagtctgaaagtaggctaaagcctaaaac

SEQ ID NO: 49969 - DNA, 631 bp, Homo sapiens
  misc_feature 23, 36, 536, 610: n = A,T,C or G
tgggtaccgggcccccccctcgngggtacttctagnattaattaacgcggggcaacctagcagagaagaagtttcatgaagtcagagcccaggtgtttgggtgagggtagggagttggggcaaagcaacactgggcttctaaaaaagaaatgtctcccctgagatgaatgacttgttggcacaagtttcaggaaagacaaagctctaaaaatatcattgtaaaattaataatacttctccaaagtaaggactcaactcaaactatccttggatgcaattaaaatggccttggaagaagctttcaggtgcggaggtactcaccagtgtcctgccagcaccttcatctctgaagaagtcatcggagggagccactaccttgattttatgaccacagatgagtttcctttaatccgaaagagattgacttttggcatttttttcttagtttttgtttatttatattcttttaagctttaaaaaaaagtgtcattgctgtgcttcttattcctctggctgactttagaattgaggactgngaatcctgaaaatttgcaaagttatctcctatcctcactgccttggaacacccattattccactctgtctaatntctactcatgtttcaagtcta

SEQ ID NO: 49970 - DNA, 567 bp, Homo sapiens
ccgggccccccctcggaagtcttctagaattaattaacgcgggactataggtcattttatttattattaccttaagtaaaatagttctagaagaagaactggatgctaggcctttcttttacctggtagtggagtttcatacttcaggattagtgaatacagtttgctaattaattttatataacctaagactcaaaatgaacttgtaataattactaaaattatatgaggagaaatgaaaagtcaatgagtaaatgaggacgatgataaataatgaataattgcaagataacatatacaagacggatatggtaatagtaaagcaatttgattagtgggcattcaaagtagaataaaacacctttctgaatggccagaaaaatggttgaatagccactgaccatctttttaattctatattatataacaaatctttcttggtaatctttacttattttcctcctcagttctttagagatacatatacttggtttgggtgttgaattaggaaattaattgctaattgtagtttttgttaaaatgtaaatagagattgcttattagctg

SEQ ID NO: 49971 - DNA, 448 bp, Homo sapiens
tccaccgcggtggcggccgctttttttttttttttcaaaaatattaattcaattgaaaatagaatgggggtaaacaaaccccttgattcccctttcgtgttgccctccctgcgtaatgaaaaaagggctcagggaggcgaacccgaatggggaggcggttgaaggccccttttgcttgttaaaagttgtggggccctgggggggtcagaacagttggacccccctgattttcgttgtttataaaataacagtcaggtttgcggtccctccctttcagggtaacggggaaattcaaatgaggtcttatttgtaaaacctttttttaatttgtaaccccagccacttgtaataaaaggtcggggtcctcctgtaacttggaactttgggggtccctggccactttccaattgttggctctttggtcatttaaaaacatggggctcatttg

SEQ ID NO: 49972 - DNA, 627 bp, Homo sapiens
cgggcccccccctcggaagtcttctagaattaattaacgcgggattttcagtgttacattgcttttctttctgtggtgaaatataagtggacagaattgtgcaactgccaatattaatcattgtaataactgccatttgcgtgactgctctgtgacttatctctgagctaggaactttaagtttcattcagtagttaattgtcatagtaaccctgtaaggtcgatatttttcatttaaggactggagctcagaaagtttcagaggtaatatacaatttggacaagataatatggttacctatgattggaaaccagacttctttgatctaaaagctgtcttactctttactgtactagggttatatgaaaagttaaagttttgatagaatcataattgttttctttcttcttgctgaaaaggactttaaagatcattttagtttatgccacatagttggccaatgaagagataggttctaagagtaaatggccacagtcatattcttggactcataatgagatgatttttcaatagaaactcagtggaattgttttgttttaatgcaattgaatgattttgtagaaaccctggtgtcagttgtaaagggaaaagcctgttgcttgcat

SEQ ID NO: 49973 - DNA, 364 bp, Homo sapiens
ccgggccccccctcggaagtcttctagaattaattaacgcggggctacagtaatcaagacagtgtggtaatggtaaaagaattgacacatatatcaagggcacaaaatagagagcccagaaatattcataaaatctctagtcttttttctgtgtcatgaagctccctttagactaaatcactaattggtaagaatttcattgttcttagctacattcatccttgcatctaaaattaaaattatttctataaaattatactagttttgtctctcacttccacaggatctagcagctctgtgtagtttcctttgaatttactgactcaatccctaatgggttgcccaccaccaaaaaaaaaaaaaa

SEQ ID NO: 49974 - DNA, 278 bp, Homo sapiens
  misc_feature 36, 52: n = A,T,C or G
ctgggtaccgggcccccccctcggagtacttctagnattaattaacgcgggnaaagtatttattgtacattattttcatagattaaataaatgtctttataataccaaaaaaaaaaaaaaaaaaaaaaaaaaaaaaaaaaaaaaaaaaaaaaaaaaaaaaaaaaaaaaaaaaaaggaggaaacacgggggcggcccccgggggggggcaacaagggcgcctatggggcgccgttttaccccccccccccggcgcgaggggtgccccaaccccccgggg

SEQ ID NO: 49975 - DNA, 519 bp, Homo sapiens
ccgggccccccctcggaagtcttctagaattaattaacgcgggtaccaggttcctgtaaaaattccttgtccataaaggtcgtattctttgtaaaggacatatgcttttagacgattgggtaatggaagaaatgacatgaagacagggcagcgcaaatgtaaccgtcccatgcatttccggatctttaggcagcacaaatgttttagggagcgagggtttgctaaaaagaaaaggcacattatccaaagagaaaaagaactttttttttagtatcttagggttttgttagcaaacgtatttgatagcatttcatttgctgttactaaatggcaaagtcaatagggaaacagtttttcagttcttattgcaatccttgttgtagatatggttccagagccatgtcaagttagaatccaaagactggcatcaatcatggatctggcctgtgagatctgaagttcttaaatctgcatgtggccaggcggggtggctcatgcctgtaatcccagcactctggg

SEQ ID NO: 49976 - DNA, 610 bp, Homo sapiens
gggccccccctcgaaagtcttctagaattaattaacgcgggcatgttgaaaagaatgcaatggccttattggagttttcatcttgtaagatcctttaattgtatgtttttttttcctttgggttcattaacagtttctatttaaaatacatccacttacagactgaagatgtcagaagccccagcagggaccatggctggaaggcccagtctgtagatgactgctcccctcttctgcacccctcatacctctcctgttcccaaacagttaactgccttcttccttctccttcccttcccccatccttcagctttttaaatttcacctcagaagaaaccccatctatattcttttgaactcatgtgcttttgagtcagggaagggatgacttttcttcgtctctttaaatcaacagatcacagagccatgggcgcgttgccttgctctgctgctcccggatggaattcagctgagcagtgggagaagccagggcagttcttaaactgtcctctgggtgcagctgatctcattaaatcatggcttttgttggtctgcagaataaagaacagtcctgcactcctccgctgttctccattgtgctggggaacct

SEQ ID NO: 49977 - DNA, 631 bp, Homo sapiens
  misc_feature 27: n = A,T,C or G
cgggccccccctcgaaagtcttctagnaattaattaacgcggggttcccttttaaattagatgttttaaaggggatgaagtactgtgattttggatctgtggaaagcaatctttatagtaatctcaaaagctacttctgactacctataacaagaccgtctaaaatgcaaaatttgtttcttaaaatatatgcaatttgcattgcaagttgtaaaataattaacactaaatatagcaacaaactccaatgacttagggcatcacatagtatgtaatatatattacatgttcaacaaaggttggcaggatgtgaggagagatgtcttcccaacaaaataactcagaaacttggactagtggatgcctccatcttgtagcagcattacctggaaacgtgtttctgaagttgcaatggcaggggagtagagagacagaggttgagagagacatgggcttttaactgcctctgccccaaagtgactaacatcactttctctcacaaatcattggcctaaaccagccacatggtcccagcttagctacaaggaatgagaaatgtaggggagtataaggaatatttgatgagaactctctctgccacacacaatttgcacatcagctttgggcactg

SEQ ID NO: 49978 - DNA, 580 bp, Homo sapiens
  misc_feature 29, 497: n = A,T,C or G
cgggcccccccctcggaaatacttctagnaattaattaacgcgggacctcatctctaaaaaaataaaataaaataaaataaataaataaaacaagccttttaatagtctggatcatatagaagattaatattatgatggattgcacattaatgtctcaaaggacaccccccgccaaaatcaccctactaaaaatcacactgggtttctaatcttggggtttagaaattttcttcttatgctttaaaaactcattttacttcctttatcctctgattttttgggaagacagagggtgcttcttcttggactcttgagtcctgacactaaattcctccctcagttctagtgcccaggctaagcagagacactaaatcccttacttcctctcagtgttctctttcagctgcctcaatgcttcacctggctacattcatacttcattcagaagtctgaacagggccgggcatggtggctcatgcctgtagtcccagcactntgggaggctgaggcaggtggatcatttgaggtcaggagttcaagaccaggctggccaacatgtgaaaccccatctctactaaa

SEQ ID NO: 49979 - DNA, 326 bp, Homo sapiens
ccccccttcggggtacttctagaattaattaacgcggggctgtgagttccctgatgacagagaatgtcttgttggttttggaattcccagtgcccaacttaattcctggcacagctgagtaagcaaatgaatgaacgccatctagttgagtaaaaataagtctcgttaggccggatgggtggctcacgcctgtaatcccagcactttgggaggccgaggtgggcggatcaagaggtcaggagatcgagaccatcctggctaacacggtgaaaccctgtctctactaaaaatataaaaaaaaaaaaaaaagcggccgccaccgcggt

SEQ ID NO: 49980 - DNA, 502 bp, Homo sapiens
  misc_feature 27: n = A,T,C or G
cgggccccccctcgaggtacttctagnattaattaacgcgggactgtgggtgttattatcctgacaatttgtcatacatttcctgtctttaaaaaataactgtatactaagcaaaactcaggtaagaatttcgactctacatttagacagtaatagtatatgttgatattaaaattttgtttcattgttccaaatgaatgtgaattagtcattgtgtttgaagtaatctatattcttacagtaaaaaagtaaaattgttatggaaatcctcctatctatgcctcatgtaccttgaattcttttcaattgttgagtcttcatgctaaattcttgtattcgttaatggaaagtatatttcaaacttagcatgaatattgatttctttacatgctacctgtatagtgtggaggagacagggatacagaataaaataataaaatcctgtgcataataaaaagtaatgcttagctatatagaagtaaattataaaaaaaaaaaaaaa

SEQ ID NO: 49981 - DNA, 449 bp, Homo sapiens
cccccctcggagtacttctagaattaattaacgcggggactaagagagtctggagactgtcaagactgcagtttcatcaagacagaaaggtgactgcaatgttaaaggaagtgagtcagtctgaggaaatgtggatgagcctacactatttttcaaggattggttataaaaggaaagtgataaaagtgatggtagcttgaaagagtagcagagttgaaggtaggttgggtgagtgtgtgtgtcttaaaagtaaaaatagttaacttgcagagcttaaagagcagaatccagtggagagattgaagttgcaggatgatatgacccaccaatgacaagaaaacagaagagatgagcagagacatgttacccttagaaagaggaagagacacctgttcctctggcagataagggaagatgatcaagcagtggctgccatgttgctgacagcc

SEQ ID NO: 49982 - DNA, 609 bp, Homo sapiens
  misc_feature 23: n = A,T,C or G
ccccccctcgaaagtcttctagnattaattaacgcggggcagtttgagtttttaaaattatcgtacctacagttggctgtagtcatagtaattcaccctttctctctaggctgtgttaaaattcctaagaacaaaatagcatgaacaaagcctgggaagttttaaagccaatcttgaatcccaaatgcctgctgtttcaccaaataattaagcggctacttcatttctattgcacacctggagcttaattgcttcacaaaaccacacacacagatggcttcgagagaggtaagtccacataataaaagttcatgggcagctccgttatttggacaaggttttggttttatggagctgctgcccagggcacacaccatctaagtagctcctgctgatcagctgaacgtcactttgcagttgacagcactaaggctaccctacagcctatcttcctatgggaacaatccggcatctcccctgagggcaaccagactgtgctgtgcacaataaagaaagccctatgccccatattctcacttgaagaaaagcagagattacagaaaggtgatatatgaatattcatttgctgttattaaaaaaccatcattt

SEQ ID NO: 49983 - DNA, 589 bp, Homo sapiens
  misc_feature 561: n = A,T,C or G
cgggccccccctcggaagtcttctagaattaattaacgcgggctcctaaaactttgtcttcaggaaaagcctcaaaggatctcatgagattcattagggagcaggaagtgtgtgtgaatcaaagtgattgaagataattcccaatcctctactcccaaggggcttctggtttgtttttttgtttttttgttttttttaagagacaagatctcactctgttgctcaggctggaatgcagtggcctgatcatagctcactgcatcctcaaactcctgggctcaacaaatcctcctgcctcagcctcccaaagtgttgggattacgggcgtgaaccatgatacctggcctgatattgaatacattctgccttgccaaggaactaaacatccttagcacctgatctggcctgcctttctttttcgttcttagtcactttgggtgtttctttgattccctgccattctcttggtgtgttctttggtttggtgagttgaagttatcttttgtggcttcaagtgtcacttccttctcctgggcaacatagcaagaccctatatctacnaaaataaaaatacaataattagctggga

SEQ ID NO: 49984 - DNA, 599 bp, Homo sapiens
  misc_feature 577: n = A,T,C or G
ccgggccccccctcgagaatacttctagaattaattaacgcgggcaaatagaagcaaaaaaaaagaaaggcagtgattacattattataaaattaaagactcaaaagcttcaaaggtattaatggtctatttatttttaaatagataaggggttaagtcaataatacataacaattataaatcattacttagtatcataaaaatatgtaaacattatgagttcaagagaaaaatgacaaatatttacaaattaaatttgaattaagattgatttatttagattcaatattctatatagagtgaatacgcattattctcaagcatccctagaatgtctaaaaatctatcacatagtagataataaagaaaacttcaagaaaatctcagaaatcaaaaatttcaagggttcattttctgatagaccaagggcccttatccatgtatgggcttcagaaaatccataggcttcctgacacagtattttgtgtttatgatcattttctctgtgttgcatgtacagtttttcatcaatattccaactaatcccaatccttcataaatatgagattaggagctnataaagacaattataatgaaag

SEQ ID NO: 49985 - DNA, 310 bp, Homo sapiens
gcgggataaaaaagcacttttttactacctcttaatacggtgggggccctccaggtcaaaaaccacctgcccaaattccaaccctaaatgaaatcaaaccccacagggttggaatggcaataaaattgattcacctgaaaaaaaggggattcacagatcaaaaaactgaaacctccctatcaagttttggctccctttctaaacagtgacatgaaacccaagggctccgggaggtctcctacacttaccctctatcccggaattgtttttcagggggggtcctaagggttaacccaaaaaaaaaaaaaaa

SEQ ID NO: 49986 - DNA, 507 bp, Homo sapiens
gggccccccctcggaagtcttctagaattaattaacgcggggtggggggaggtcagagggaacagttgctgtaaattaggtacaaggatcaatttgtggtgtgctgtgcgcgggggtggggcatgtcgaaagccttgttattcgaaagaatgtgctttgaacgacgttgccacggtcattctacattatgaatctactgtttccttgcagaagtggctcccttcgccgcaactccacacctcggggtaaccgtagagattggcagcaatgccccatcccctcaccagcactgtgcaaagtgactttgacaggcagagaaaagccaacccagtcgaattcgtctggaaagcattccagcaacccagagaggagcctctgtttctctctctgggaaaaagccccaagggttttgctgaacccaggtcttcctgctcatctctcagcagttcagagctacataaacaacttctgaccatttacgcgatcatgtaaacctaccctgacatc

SEQ ID NO: 49987 - DNA, 468 bp, Homo sapiens
cgggccccccctcgaaagtcttctagaattaattaacgcgggactgtagctcatctatgctcagcagcagactgcctggggaacaggagacaatctatttgtcaaatgaagaattagtccctgatgctatccttcggccttgatccccccctcaacactctcctctctgttccttcttgtataaagtcttgccttgggggtttcccttaactacaaataacggtagcataaaacaatctgcattgtgcctgcgattccccatttagcatttgttgacaaataagagtcatcaaatatttattatttatctacaatgcttttagcactgtggggttacaaaataatctttatagaataatctcttggccttgaggaggagtttatagtcctttgagagagtgaaaacctccatacatggaacttcagatcagaaggtatggtctgtagtcattcagaaaaaaaaaaaaa

SEQ ID NO: 49988 - DNA, 477 bp, Homo sapiens
  misc_feature 36: n = A,T,C or G
tgggtaccgggcccccccctcggaggtacttctagnattaattaacgcggggtagtaatttgttccaagtcacacaacttatcaatggtggactattcaggacttagatcccggatattcagcctcagtaaacgtctccccagctccagggcgctgcgtcatctggctttaaaaaaacgtttctggccgggcgcagtagctcacgcctgtcatcccatcactttgggaggccgaggcgggcggatcacgaggtcaagagttcgagaccagcctggccaacatggtgaaacctcgtctccactaaaaatacaaaaattagctgggcgtggtggcgggcgcctgtaatcccagctactcgggaggctgagacaggagaatcgcttgaacccggcaggcggggttgcagtgagccgagatcgcgccgttgcactccagcctgggcaacaagtaagactccgtctcaaaaaaaaaaaaaaa

SEQ ID NO: 49989 - DNA, 129 bp, Homo sapiens
ttctagaattaattaacgcgggtgccttttgttacatagatgcttaatttaacaattacctatttatagttcttattattgacgggaatatgattagaagtaccaaaactaaaaattgcattatgtact

SEQ ID NO: 49990 - DNA, 614 bp, Homo sapiens
  misc_feature 15, 26: n = A,T,C or G
cgggcccttctcggnagtcttctagnattaattaacgcggggcgctcactggtttgttctcttctgccttgttcctcttttctccccatgccaatatcagtgagaaaggatcttttttgatagtaggttcgtaggtgatgtcctaaaaattttcataaatacagaaaagaacgataacatttagccaccacccagatacatattttagatgaaaaagaagtacagaggccgagtgtggtggttcacgcctgtaatcccagcactttgggaggccgaggctggcggatcacagggtcaggagttcgagaccagcctgaccaagttggtgaagtcccgtctctactaaaaatacaaaaattagcctggcatggtggtacccgcctgtaatcccagctactcaggaggctgaggcaggagaatcactgacacccaggaggtggaggttgcagtgggccgaggttgcatcattgcactccagcctgggactgtctcactcagtcagagtgagactccatctgaaaaaaaaaaggaaaaggagtacagaaaagctgtggtttctattgtcagcacttttctgtacttggacattttttacaatgagcttttgttacttg

SEQ ID NO: 49991 - DNA, 607 bp, Homo sapiens
  misc_feature 537, 585, 592: n = A,T,C or G
gccccccctcgaaagtcttctagaattaattaacgcggggaccctggcacttcctttatatgggagttaaccctgtctctataatcaagaatataccactatgtaagcttcctgagaacatacatatttttcccaatctgttttatcagtgaggtcattttgggtgatgggtgacaaaaactcaacttaccctgcttaggttaaaaagaatattaattggctcatattatgaaaacctaagaactaatctggctctaggaagaagtgaataagaaagctccaaccacgcagtcaatgtttacccattttttttccttcactcattgtctctgtttcttaatacagtgggttcctctctccataggccctcaggtttacattacagtcaactgcaatccccagagaaaggctttctttttcccagaggtttcaacaaaatctgggttgagtctccttggaagaactggtgtcacatgcttattcgtggaaccaatcactgtggcaggggcggggactctgttgattggtcagtcctgngtcagttgcctgtctctgacgggaaaggaaattaccttcatccctcanaccctgngacttagtgtgatgc

SEQ ID NO: 49992 - DNA, 200 bp, Homo sapiens
ttctagaattaattaacgcggggccagaagactgaacaaggctgtcctgagacctctgtttggcagagatcttgttgattcatattttatttttgtttcagaaaaggtctgctattgttcaaatttctaatgtagctcataaacacacagccagtatcatttccccttctactgactgatatatacaaaaaaaaaaaaaa

SEQ ID NO: 49993 - DNA, 473 bp, Homo sapiens
ccccccctcggggtacttctagaattaattaacgcggggcatgcaatctttctcagtgctttattaaggctggcttgacttcgtttagtcttaacaatgtatgggccagagatttcacaagcaacatgttctttaagaatcataactactttaaggtagctactattattttatccagccttatagatgaaaaaaaacatatctttagaaaattttaattttagtaagtttcccagagtcaaaaagttaataatgtccaaaccagaatgtgaggtcaggcagtgagacccctatgcttttaacttttttgcgaggggagtagagacagagtttcactttgtttccagtctggtcacgaactcctggtttcaagtgatcctccagccttggcctcccaaagtgctgggattataggcatgaaccaccacacctggccactttcaacctctctaaacattttttgtacatactag

SEQ ID NO: 49994 - DNA, 533 bp, Homo sapiens
  misc_feature 16: n = A,T,C or G
cgggccccccctcganaatacttctagaattaattaacgcgggttttatagttatttaacaagatatacaagctccactgcatactttaggccatttctttctctctttgctttctttccctcctgctaatttatcaaacatcatacatgtcgggcactatatgaggtgctgggctgtactcgtgaccaaacacttgacatgaatcccattcatgtgacacttgaagtctagtaagctacacagacattagtcaaataaattgacaaataatatacaaatgcagctgtggtaagtgctctagcttttaaggggatttatttgatctcacatgggcatagtgtaagagttaagaaggttggccaggcacagtggctcacgcctgtaatcccagcactttgggaggctgagatgggtgaatcacctgaggtcaggggttcgagaccagccttaccaatatggtgaaaccctgtctctactaaaattacaaaagttagccatgcgtgttggcgtgtgcctggagtcccagctactc

SEQ ID NO: 49995 - DNA, 622 bp, Homo sapiens
cgggccccccctcggaagtcttctagaattaattaacgcggggcttattttgcttataactgacatgagaaaatctggcaatacataaaaataatctgtttaaatgaaatttaaacaagaagttgaattcatttttttaaattaccactttctcttacatgatgataagtattagtagtttttattttattttattatcaactgatcttttcaaaggtcaagtcaatcaagtaaataggcttttggtgttgggtggtaaggtcgagaaaaatcaaaaatcaaatttgaaaacaaaaatataattaagcctgagtttagtggaatttaatctagttagctataggctaaatccaatacctttgcatctccataattaggcataagcagcaggcaacttgtactggtgaccagcagtccacagcccagattgaggagacaaactgagctttgggattggaatggagatgtgactagtgagaggaattttaaactggtagagcccagagccttagcttcatctaaaacagaaactccaggggctactctcctgaccgcaaaccctaacagagcctggaaccagaatcagttaaccactgccaaattattcagtacctctgttttg

SEQ ID NO: 49996 - DNA, 298 bp, Homo sapiens
ccgggccccccctcgagagtcttctagaattaattaacgcgggagcaaggataaggacagaggtgctttatatccttggaagtcaaacagggagccatttatcagaaatggggccagcttgcgacacaaatggaaaagcatagaaatgtcataaaagtgtatcttccagctaggtgcagtggcttatgcctttaatcccagcactttggggaggccaaggtggaaggattgcttgaacccagaactttgagaccagcctgggcaacatagcaagaccttatctcaaaaaaaaaaaaaa

SEQ ID NO: 49997 - DNA, 588 bp, Homo sapiens
  misc_feature 28, 566, 570: n = A,T,C or G
cgggcccccccctcgaaagtcttctagnattaattaacgcgggcacacccatccatggttattgagtgtagaaatcttgtgtctatttttgcttcatgtggtatggctaaaagctgtcacattgactggcacttaaataggccctcaaattatttcctgaaggaatatgtgtgggtaagtgaaagtgttcttgatatcaaatatatcaccaagtccagttgatgccacccccaaaatatcgctggaatccatttattcctctttatcttccctgctggtcccagccaccatcatctctggtctaacctattaaattgtttctcagtggtctgcctgagaaacttttcccctccatttagcagtgtcttcacagcagccagagggccgggcacggtggctcttgcctgtaatcccagcactttgagaggccaagtcaggcagatcacgaggtcaggagattgagaccatcctgtccaacatggtgaaaccgcacctctactaaaaatacaaaaattagctgggcctggtggtgcgcgcctgtagtcccagctatttgggaggctgangcangagaatcgcttgaacccg

SEQ ID NO: 49998 - DNA, 552 bp, Homo sapiens
cgggccccccctcgaaagtcttctagaattaattaacgcgggggaggaggagggaaggtaagagattggcccaagacacagctttttaacaaggagccaggactatcaattttcagctatcaaatgttgactctctcactagaaagttacattgtgggtcacagtgtagcatgtgtgctaacttgagcatctaaggctctatcagaactattgttgttaataatccagaactaaaacacttctgaatttcaccatatcaggtttgcaaaatccttttgacagagctaaatccaagggcacaaatgaaatcaccacggccacatctctatttccccatccctagaacagactcacttcctgtagcacacataatgccatcagcccctcacccttacatcacttagcttgaatgacaacatttttatagacatatgccaaagaggacagtcactggcccaacttgagtcatgtgcccctccctgtgtccaagatataggacatcctatttcctttggtcacttggccactagtaagaatgggccctggctgaac

SEQ ID NO: 49999 - DNA, 580 bp, Homo sapiens
ccgggccccccctcggaagtcttctagaattaattaacgcggggtgctaagagagaaaggaacaggaatctcccagttcctgagagcctcccaggctttctccctcgatgtttaaaatttggaaaacaggcttttcctatccggatgaacagagataatttgtgtggatggatgttctgtgaaggcctattgtgtcgagcagcgtattaaaacataaacatggctcttcccccaagaaacttacatttcagtaagggagcctggccaaaatggaaaactgcaaggttcaaatcctggagtgcagaagaagcattaggcattgaccctgtggcttcctaatagatccgcaaagtgctttgttcctggaaatcatccgatgagtagttcagtgctattgtatatcttgttagagcagccgaagtgccacaaaatgaactaaaatctccctgcagagttgctgtatcatatgctgagaacattcggaactttcaacaaattcatgttacgatcctgggtagccatggttaaatctgtacaggggttaaatgagaaatatgagcctgctgtttagtgtcttctg

SEQ ID NO: 50000 - DNA, 222 bp, Homo sapiens
  misc_feature 28: n = A,T,C or G
ccgggccccccctcgggagtcttctagnaattaattaacgcgggatattagtgattattttctcattagacttgttttattcaagaaagaagccaacaatagtacataaataaataagggacccatgttaccttattctcatcacaacatttatttttcacagacagaattttgtgataagtatttgtgatgatttggggaaactataagcattgaaatata

SEQ ID NO: 50001 - DNA, 590 bp, Homo sapiens
cccccctcgagagtcttctagaattaattaacgcgggggcattattttttcttctcctaaaggagaatttttttgaaacaagtttcaaacatcacaattagggattattcagtttaaaaggcctgataaaagccaattggaaaacaccagaaatagtgttcaattaatatgtgacagattacataataatgaacacacaaaaaagaggacacctgtttctttccactcctaatctattcataagggaaatttgacagaatgacaggatgcccacacattcaagtttctaaaatttttatattggccttttctggaaaaatgaaaagattcagtttgtgttgtttggctaaatcgtatcatatgacatggttacctgagggtctaaattgtacacaccaagaataaggagacctacattcttgtcgtagttctgctattagctagttgtgcaacttgagggagtcactcaacttctttcaagtcataagcttgatgatttctaagtacctccagtttgaatagtctgtgattctgctctaaaaattaagtttgttagatgattgatgctttttacagtctttacaaatttg

SEQ ID NO: 50002 - DNA, 312 bp, Homo sapiens
cgggccccccctcgaaagtcttctagaattaattaacgcgggatagtgatggggactgaaaagccctccaactctgagtctggctttttttcatgattgatttggggatttgtttccatgaagtagggtacattttgtggccaaatagcttcctgctgtcttggaacctgtttccagtttagatgataaagttagttattctctttcctatatgaggaagcaagaagtcctaggtatcccctaggcttccaattccataaactctactggaagtaaaaataattataagagaagaataaaaaaaaaaaaaaa

SEQ ID NO: 50003 - DNA, 603 bp, Homo sapiens
  misc_feature 28, 543, 572: n = A,T,C or G
cgggcccccccctcgaggtacttctagnattaattaacgcgggtactttcactattcattcttttaatagaaggagaactagaaacaatcaagtacttttttctttagccttgtactaaattattggtagcaaggagaagaatccatctcctagcattctagcaactgaatactctcttggatcctcttctgactgccaagctctagaaaaataatcagtggccatatgcaggcctataacatgaatctaggcagctcaaaggagggtgaaactgatggtctttggcagtcctatgatcaaccttgggaaaattattctttcttgtgctaatttcaccatatgtaaatgctacctcttatttagcacctgacaaatgctaagtgctgtacttggcattttacttctttagagacatttcatttaaacctcacaataactttgtgttttacttttatttagatacaaaagaactgagattcagtaacttgcccgaagtcaaatatataaattaaaggcaattcaacctgtcaaatctatttcanagggataatataactcagaaaatgcatgntaagcattcagatggctgtggtactgcttct

SEQ ID NO: 50004 - DNA, 283 bp, Homo sapiens
cgggccccccctcggaagtcttctagaattaattaacgcggggggggaatgggggctctgtgttcacaccagacgaccttcgtgctatcacggccttgttgcttgccactacggagccatgtgttgcccacgctggttcgctggcatcatagagatgtcattgggccaacctgaaacaacagggatacgccccaaaaagatctactgtcttccagctaaacgattgaccagtaaaatctagcgggccactattgatagaggtgagcgctgtccatatgcatct

SEQ ID NO: 50005 - DNA, 607 bp, Homo sapiens
ccgggccccccctcggaagtcttctagaattaattaacgcggggtctcactgtgttgcctaggctagtcttgaactcctgggctaaagcaatcctcccacttcagctgctcaaggtactaggattacaggcaagagccaccgtgtccagcctgcaccaagttttgattttggaagtcactaaagctcaaagcactttagaggaatggccattggcatataggaaaaacatgcctaactgccctaaaatagtggaggcttccacagtccacggcagagccacagctctaagaggtgctcagagcaagtatgcatttcaatcgtgtcctctgtagaagttctaatactgcacagattaatgaaacagggaaagataatagcatgactcgtagacatgctgttgttaaattcaaggtgttgcagaaagcttcttagtatttaagcaatgacagctggaggaactagattctctctgcaattaaaatgtaagatctgatactagaaagttaataggtcttgtgaaagcaaatcagtatttttcagagatgtgcatcttatgacaaaaagaatcacaatattgaagataaggtgaaccaaagtgctgctggc

SEQ ID NO: 50006 - DNA, 546 bp, Homo sapiens
  misc_feature 27: n = A,T,C or G
cgggccccccctcggaagtcttctagnattaattaacgcgggtgttgtgcagtgtacaactgaggacaattccagcacgtgctagaccttccatctaatatgagcccagatactctctcaggggctgctcttgctaaataacagagcttccatagtttcccctggatgcctggccacatccagtttcctgtagaagatcacatcttgttgatctgctgatataatacaaaacgagaacacaaatggtagaaaacaaacaacaaaaactgtttcagatcccaacaattcaaaaaggagacgtctcagaaagcaagaggaggcctggactgtgccagatttcagttgagcctctgaggtgagctctgacatccacaccacttaaaggcaggcaagtccagcctggggaatggactccaggttttgagtaggaccgggggagtctctgagcttaaccagcaagccgcagataaaacaggttgcactgagttgggggccttccaagccaggcatctgtggcattgggtgtgtcaccaaatccattagccg

SEQ ID NO: 50007 - DNA, 355 bp, Homo sapiens
cgggccccccctcggaagtcttctagaattaattaacgcgggttggctgggacatctttgttattcctccacaggggcctcgccacaaggcaacttgggcttctccacagcatggtggtctcagcgtttcaacagggcagaagtggaagctgcccggcctcctaggggctaacctggcacagcatcacttccactacattctattggtcaaagcaagacacaaaaagctggggacaatggtgtgcacctgaggtcccagttactcaggaggttgaggcaggaagatcgggagttcaaacccaacttgggcagtgtagtgagaccctgtctctaaaaacccaaaaaaaaaaaaaaa

SEQ ID NO: 50008 - DNA, 488 bp, Homo sapiens
  misc_feature 23, 72, 452, 453: n = A,T,C or G
ccccccctcggggtacttctagnaattaattaacgcgggtggggtgacccaggcagacttcacctcccccanacgatgcagatccactctgggctgggcctctgctctttcctgggctgacgtaaagcgttctgctcatttatagatgagagtcgtgccgtgcagaacccagcatgtcacccgtggtgctgctgccatgcggcgcttctgaccaggggtctttgcatgaggccccttgacagggctgctctgggtggtcactttgggtgtgtacagtaaaatacacgtgacataaaattcactattttaaccactggggcatttcttttctttctttttttttgtttgttgttttgaaacagggtctcactctgtcacccaggctagagtgctgcggtgcgatcacagctcactgcactcgagcctgggtgacagagcaaagccttgtctcnnaaaaaaaaaaaaaaaaaaaggaaaagaaaaaaaaa

SEQ ID NO: 50009 - DNA, 420 bp, Homo sapiens
cccccctcgaaagtcttctagaattaattaacgcgggatcttaaaaaaggatacttcctatgctttatatatatatattttttctgctcttttatacttgtttctctaatattttcaatgtcaatattcaatgtttatatttaaagtaataaaatcagtataatacatcatccttaccttcacaagttcaaaccccatgctaattgatgactctctaaaactatgtctcttatatattggtaatttttacccatagaacttcccatatttaaaaagctgaaaagaggctgggcacggtggctcatgcctgtaatccaagaactttgggaggccaaggcgggcagatcacttgaggtcaggagttcgagaccagtctggccatcatgatgaaaccttgtctctactaaaaaaaaaaaaaaa

SEQ ID NO: 50010 - DNA, 486 bp, Homo sapiens
  misc_feature 33: n = A,T,C or G
ggtaccgggcccccccctcgaaatacttctagnattaattaacgcgggactgacatagtttatccccttcatggacaaaggagaaaaactatgtattctctcaatggatataaaattattttaaaatattcaatattttttcctaattaaggaaaaatccttgctcacttattaatagaaaatattccggccgggcgcggtggctcacgcctgtaatcccagcactttgggaggccgaggcgggcggatcacgaggtcaggagatcgagaccatcctggctaacacggtgaaaccccgtctctactaaaaatacaaaaaaaaattagccgggcgaggtggcgggcgcctgtagtcccagctacttgggaggctgaggcaggagaatggcgtgaaccccagggggcggagactgcagtgagccgagattgcgccactgcagtccagcctgggcgacagcgagactctgtctcaaaaaaaaaaaaaaa

SEQ ID NO: 50011 - DNA, 444 bp, Homo sapiens
ggtaccgggccccccctcggaagtcttctagaattaattaacgcgggattgcccgtttatatgaatctgaatttgagacttcatccacttatatatccatcctaaatcagaagattttgggttgccaaaaggatggctcaggattcagttgcaaaagattacatcctgatcctttcctgcgtagtcttgcctattgggtaatgaaagattacacccgagccttggacacattactggaacaaacaccaaaggaggatgatgaacatcaagttatcatcaagtcttgtaacccggtggcatttagtttttataactaccttcgaactcatcctttgctcattcgaagaaatcttgcctcccctgaaggaactttggcaaccttaggtctcaaaactgagaagaactttgttgataaaattaacctcatagaaaaaaaaaaaaaaa

SEQ ID NO: 50012 - DNA, 413 bp, Homo sapiens
  misc_feature 40: n = A,T,C or G
agactggggtaccgggcccccccctcggaatacttctagnaattaattaacgcgggggttgcggtgagcggagatcgtgacattgcactccagactgggtggcgggagtgaaaccctgtctcaaaaaaaaaaaaacaagattgagcaacagtgctcctggggcagagaccagcatatgtaaagcccagatcaggcagcaagtctggtgcactagaagcaggcccttcagccagacaggacgaagctcacagggcagcaaaccaccaaacagagcttggccttcaccccaagggcagcaggcgcaagtgagggttgtaggcagctggctagtgaggtcagatgtgtgttttagaatcatctgtccgacctgttcaaaagctttgctcaaacccattaaagaaaaaaaaaaaaaa

SEQ ID NO: 50013 - DNA, 603 bp, Homo sapiens
  misc_feature 549: n = A,T,C or G
ccccccctcggggtacttctagaattaattaacgcgggtctagtcatggggatgagctcttggtgtgaacagtgatccagagagagttttgtagactctgagtttcaagaatttggatctttgcaaaccaatcaacctcaattatctttccctactaaatgtccagaccaaaattatgacaaaacaacttcatcttgcttccccaatttgactaaataaaaataacatttctaatcaattgatactttaattcaacgtaactcacatcctgagctcctcttatgtgccagacatgagaaggcaagtaaatcatagctcacacatgatggagctcccagtttcatgaataaaggattgcagtaaaatgtaacaggaatgttcaggatgcaaaatccctacaaagaagccgctgacagctggaaatgctgggggaaactttgcaaaggatatgatgattgaactagatttttatagaatgaataggggtttatccagtgaaataggaaagaaaagcaatttcagagaagaaagagtatgcacaaagcacanatgtgtgaaaagaggttaacattagagaatcgtgagtggatctgtgtggtatga

SEQ ID NO: 50014 - DNA, 263 bp, Homo sapiens
cccccctcgggagtcttctagaattaattaacgcggggagcctgtttttgacattctgcagggggcacgtgaccctaaggcagtgtgcgcacagtctgatttacaacaagggtcactagtcagcccaggccgtgtgtggcagctcacacctgtaatctcagcactttaacaggccaaagcgagtggatcacctgaggtcaggagttcaaaagaccatcctggccaacatggtgaaacttcatctttactaaaaagaactaaaa

SEQ ID NO: 50015 - DNA, 170 bp, Homo sapiens
  misc_feature 13: n = A,T,C or G
ggccccccctcgngggtacttctagaattaattaacgcgggggaacgggggcgggatggcgcacggcgagatttttgggcgccggagagctgccgattagaatcatataacagatgggctgtggagcctgacccaacagagaagcggtgatatgcagtagctaggaaggg

SEQ ID NO: 50016 - DNA, 496 bp, Homo sapiens
cgggccccccctcggaagtcttctagaattaattaacgcgggagatcaaaaatttaatgacattataggatattacaaaggcatttcaatatttgtgatattgtaatcagatagaattatgaaagtcattagttagagaacagactgtcctgaatgtcatgtctgttttacaaaggaagataatacaacaacaaatagtcataagaaaagaaaaaatcaaaccttgaatgatgaaacagaggcagggaccacactgtatctacacagttttaaactgaagaattgtgttaccgttagaggtacgagtgatggaacgctgcaggttcaggaatggttagggagcggtgcagagcctatgctaacctgaaaagcagctttttgaaaattagcaaagatatcatctctgggtgaaccttaaagtatttcctctccataaattctagagtgcctcctgtgtatggacaaaggggatcctttcgcattgcagttgcaactt

SEQ ID NO: 50017 - DNA, 239 bp, Homo sapiens
  misc_feature 54: n = A,T,C or G
cgggccccccctcgaaagtcttctagaattaattaacgcgggcttatgaaaccnactttccaggaagcgacccattctcacagctgaacactgcatcctctcttctttttggaatagccatatggcattaaatcaatgagcattttccttgatgccttactgaaacaaataccttttctggttttatttctaaaatcaatcctatttctctaacaccaaagcagttcttgctatcagca

SEQ ID NO: 50018 - DNA, 387 bp, Homo sapiens
  misc_feature 285, 292, 294, 297: n = A,T,C or G
cccccctcggaagtcttctagaattaattaacgcgggggagaaagggaagagagactttaaattttacttgtacaaaccttttcaaaatagtggatgtattcaaggactgcttttgtaataaaaaaaaaaatacacatataaaaatagagaaaaccaacttgtgaccaagcacttttggccttagtttcctcttctacaaaatgagttctgaactgagccatttcaaacttctttttttttgagatggagtcttacactgtcacccgggctggagtgcaatggcncaatctnanctnactacaacctctgcctcccgggttcaagcaattctcctgggaggcggagcttgcagtgagccgagatcgcaccactgcactccagcctgg

SEQ ID NO: 50019 - DNA, 344 bp, Homo sapiens
cgggccccccctcggaagtcttctagaattaattaacgcgggggcacattgcacaacctcactgtacctcagtttccttcatctataaactgcctccctagggttgctgatgtatgttgatctattacaaaggactgaaaacagccactggcacataggaagccctcacgtaagtgttcaccattatttgtatgattaccatatcctgtgcaaggtccctcctaagatgtaagctgccttaggtctccagggctccccctttggaatgtgagccccttacagattcagtacctgatttctgggcttcgaggcaagacagacatggccaaggggagaaaagcagt

SEQ ID NO: 50020 - DNA, 340 bp, Homo sapiens
cccccctcgggaagtcttctagaattaattaacgcggggaggtcttttccctcatgataacaggccaggagtgatggctcacacttgcgaatcccagcactttgggaggccaaggtaggaggatttgcttgaacctaggagtttgagacaagcctgggcaatatagtgagatcccatctctataataatagtaaaataactatatcaacagcagcagccattacctttattaagtgctgtgcttaggcactttgctttatatacattattttagctaatctttacaaggaccaccacctactgaggtaggtactattattatccccaaaaaaaaaaaaaa

SEQ ID NO: 50021 - DNA, 614 bp, Homo sapiens
  misc_feature 38, 598: n = A,T,C or G
cccccctcgaaagtcttctagaattaattaacgcgggngggagactcaacaacaggctatgaaataactttttgggatgaaaatattctgtatcttgactgtggtaaaagttacaagactgcacttctttgtcaaatttcatagaattatatacctaataagggtaaattttactgtatataaattatacctaattaacctaaaaaaaatcaacaccaagtcaatgtgataaggcagtataagaatcttctctcaaattttagacataaagatataacttattttaacaaaataaaaatgtactagtcatactgcatcaaatttattccttcaaaactccgtgtcatctgatttttttaaagcaaaaatattttcatggtattttatatcatattaataatgcgagtcagagaagcatttattgaagcacataaatacgaacactgtagattatcagactagtatactaaatagttggatttcaaccattaaaggttgtagaagaatggctaaacttctatctagggaaaatgttgattaaagggccaagaaaggttaatgggattctggcacgttatcctttctataaatgactcanaatcaggtaaagtctt

SEQ ID NO: 50022 - DNA, 476 bp, Homo sapiens
agcaattaattaacgcgggcaactttgggattttaaaaattctctaaatatggacttttagggggtacgggagtgagagagttgtaatttccattttaagtccactagaaaccaatataattagggtacagcatattctgtcctgtagtagattttagaaacatgcaaatgaagcacactgttttccatggttgtttgattttcatttgggtgttttgaatttaatgagattttcctgatttagtgaccagtaagctgacaccatgttttactgtggaaggatattttttttcttttaataagcacagcaattcattgcatgatacaccattgctgttttgtgatgaggaagaacctacaaatccaatgtacgtttattctcccttttgctaggacaaaatgaatttgtccagccatatcatagcctagagatatattatttctgtggcaggaatccattgacaaaaaaaaaaaaa

SEQ ID NO: 50023 - DNA, 583 bp, Homo sapiens
  misc_feature 504: n = A,T,C or G
cgggcccccccctcgaaagtcttctagaattaattaacgcgggctccttcgctctgaccttgtctcttcatgcgccacctgaatgaaatattcaagcacgtcattcctttcaagcatcccttcctggggtaggcgaggaggttggtgtgtatacagagggtcctgtattcctggctcagttcttgtctctacctccagcagcctgacctctctgcgtctctattttctcatctgaaaaatgggagtattactgaacaaaagggttctgcgcttgctctgctagaagccaatcttgatcaggtgcagaggttcatgcctgtaattccagcactttgggagactgaggtgggtggatcacctgatgttaggatttcaaaaccagcctggtcaacatggcaaaaccccgtctctactaaaaatacaaaaattaggtgggcgtggtggtaggtgcctgttaaccttagctactcgggaggctgaggcaggagaatcgcttgaacctgngaggtggtggttgcagtgagctgagatcacaccactgcactccagctagggcaatagaataagactctgtctccaaaaa

SEQ ID NO: 50024 - DNA, 365 bp, Homo sapiens
cccccctcgagaagtacttctagaattaattaacgcgggccccacagctttaagatacaactatgacttttcctcccaacacctaaattcttttgctgctttgaaaggaacaaaattgtgagacaagaactcacagaagcctaaccttatccttaatcaggacttaaaagaaaacaaaaatagactaagaatttttcaagagggaaactagttacacagtgcatgttcatgatatggatattgactacagagaaagaaacatttccagagagacacaagatgataataaaacacgcaagttctaacactggttctcatacttttttgtagtcatattcagggtcttctctcaaaaaaaaaaaaaa

SEQ ID NO: 50025 - DNA, 498 bp, Homo sapiens
ctaagaagctatcctaagaagaatatagccaaaatttctatgcaaaaacattcatagtagtattatatgcagtattgagaaacaagttttacttttgtccttaggaagacagactgttagccaaattaaccatattcacctagcaaaatattattttgtaacaaaaaggcataactaaggtaatgcttactctggtgtgctggaaaaagcacaggctctagaaaacgctaccaagttaaaatctcaagttgatcctggactaaatctatgactattagcaagatagacaaactctcaacttgcatttcctcatgtgaaaatgtgatgtaattatactgccttatgtggatataatcagtaaacaagaaaagtatcccaaatgtctagtctgaagcttggcacatacaataaactagttactgtatcatgatgataaatggaaaaggcaggatacaagtaagaagtgtagtaggacaaactatgtaaaaatattcacag

SEQ ID NO: 50026 - DNA, 446 bp, Homo sapiens
  misc_feature 16: n = A,T,C or G
cgggccctttctcganagtcttctagaattaattaacgcgggaacctagttttaagaatgttttattatagtcatgtataaaaattattaacatatagtaactcacttggcatattgagaagtaagtataataaagaatcttaaagcatgggccatatctcaaagaatcataaaccaaaattaatataattgagcatgcaattagtcctttatgctaaaactatgaaaaatgtttttcatatatgaggttctttggaaaggtatttacacttaagactatttggaaagaagcttaaagagaaatatgatacaaatagtctgcactaggctgtcttgaacttcttgcacatttaatttaattcaacagacgtgtattgaatatctgctatgtaaagttctgtgttacttgctaagagggatactaagatatgtaaaaaaaaaaaaaa

SEQ ID NO: 50027 - DNA, 224 bp, Homo sapiens
  misc_feature 28: n = A,T,C or G
ccgggccccccctcgaaagtcttctagnaattaattaacgcggggtcatgcctcatgaactaaaccgcaccctggctatgctcggcttacttggcctaaggacgccggatggactcacagccggcgcataacggtggagggatccgccaccttattggcgctattctccctactgatccatgctgctatgtgatgggatgcaccatgtccaggcgatagctggc

SEQ ID NO: 50028 - DNA, 612 bp, Homo sapiens
cccccctcggaagtcttctagaattaattaacgcgggcagcctgggcgacagtgatgccctgtctcaaaaaaaaaaacaaaacagtaatttacactattatagtccccaaatttaaaatttgaatacgatgatggaggagctatgcagcgatggattgaggttattcataactgattataaaagcagttattttattggtggggaaacactgacaagtcaacagattcatttcagccattttctctcctaaaacaatgacattctaataaaaaaaactaacatttacaccacccaatgaattatgccactgcaatatgcccttctacattttccaagaacttaagctgtgtcacacaggtgtctaaattagtaataaaattaaactggagaaactattactccaattttaaaagcagcacggattaaaaaagtaagaagggggcaaggcacggtgactcacgcctgtaatcccagaactctgggaggctgaggcaggcggatcacttgaggtcagttcaagaccagcctggccaacttagtgaaatctgatctctaccaaaaatacaaaaattagtcaggcgtggtggcgggcgcctgtagtcccagctact

SEQ ID NO: 50029 - DNA, 616 bp, Homo sapiens
  misc_feature 11, 36, 599: n = A,T,C or G
tgggtaccggngccccccctcggaggtacttctagnattaattaacgcgggggaggggggcgtgggaaccacgtctaacccaggtgccaggcaaaggctcctaggaggtggagggagactccaccctacgtctgcagcccagggttggcaggttccttttcaaaggtcaaaccaatgatcttcaaggaaattcagacactcggcagagattgcgatggaattagaaattaatacaatgaaaacagcgtatcattaacgcagtgaaaacagcatctgacaggaaatgtaattctgtggaaaacagagagtttgtgcaaaaattgtaaaatgatgacggtttctttcgtggttcacttgtgatccgtgtgggtcctgatgatttaaccctaaacaatgatgcaactccgttatgagaaaacaggaagcaacaggaggtggaaaggtgatgtgtgcaggacacagaccagaaatgtgtggctctaagccctcatcttctgcagcgggcgtcagcagctcatgctgactccggaaaaatccaggagacacttaagcatgttatttggaaatgtggacataaataccaaaaagaagaatctaanagaggtgaaagcgatcc

SEQ ID NO: 50030 - DNA, 605 bp, Homo sapiens
  misc_feature 48, 111, 112: n = A,T,C or G
cccccctcgagagtcttctagaattaattaacgccgggctgtacactngaaaatggttaccatggtaaattttatgccaagtttattttactacaatttaaagatacatanntttctccattgaaaaaaattcattctaactcacctatcagctatgattttctggctattgcactgcatgttgctgttctcttggggagctttgactgcacatacaaaacatcttcagggagaatggcaataactagccccaagatcaaaagaacaaatacaagactgagttctggtatttccagtttagccatcagcacttagatagtctaacagtctgcaatgaggaatgcagccacagataagtaactgagccacaaagtagaaacatacatatcagatgaacagtgccacatgttttacagtagcctgaaagtgaaatcaacaaaactgctcatcaataaacaactggataaacaaaatttaatatattcattcagtggaatgctattcagtcataaaaaggggtgaagcggtaacgcgtactacaacacagatgaaccttgaaaacattatgcccaatgaaaagagccactcacaaaaggtcatatatg

SEQ ID NO: 50031 - DNA, 350 bp, Homo sapiens
tccaccgcggtggcggccgcttttttttttttttggggctcaacttgcctcctattggaattaaccgggtttaagttttggctgcactgttccctttgccggaaatggaaaccttccttttcaaaaaccccacctcctttccaccttccattggaaaaatattattcatttttaaaaccctaattggccataagttcctcaaaaccctaactttaacctcccttcttttaaaaaaatgaaacccctgccttttttgggtaactgcccctatcgaagttgggaacagctaaaaccctttatttttttattctatatccctaccccctaaatgagggcaggggctaatgttt

SEQ ID NO: 50032 - DNA, 564 bp, Homo sapiens
ccgggccccccctcggaagtcttctagaattaattaacgcgggcagcagttcaatgggtgaagtgttagagagaatctaagccctgttttagcctccttccatatctgctaacgtcacctatgtacaaagctctctcatttagcacacttgactgtaatcactgggttatagtttttgtttatttttcctcactagactgaatatcctaagttacaaacaatgttattttattcattttttgtatgcttagcataatacatattataagtggcttaataaaagtttggtaactgattgtatggatcgatgaatgaatgagtgagctaacattctatatcactatgcatgtatgtaatctgtaaacgtataatccccctcaactgcaggtgaagagtaactatttatatagctagactgctacacacccttggatttcaccttgtgatactcagataggctctcaatgtccagcaggtgaattcaattctctgaaacttctctggcatcacatctatagatctttaatgcacctattaaaaagtgggttaaaaaaaaaaaaaaaa

SEQ ID NO: 50033 - DNA, 595 bp, Homo sapiens
gggtaccgggccccccctcgagagtacttctagaattaattaacgcgggcatgataaaagagctattcctatttttattacattattcccttacaataaaatatgccttcatttttttcttaccagaaaattgaaattctccaaaccaaaaatctaaacatagaataccttacattagcctaatttgctgggttctacaagctgatccggaacaaatgaacaagtggaaagaattttttacactgggttttccagaagttggaatgtttcttcttataagtaaaatcaagtttacttatccaaaatataaagttattgaggaattattagaatgttaacattattgatgaccaaagtaaatatacatcaacacacttttcaaagacagtttctatttagaacccatgataaaatttgataattgctcacatgagaaaaaacaaccaacaatatacagaaaacaaacgaatatttaaaaaaatataggctgccaggtgcagtggcatgcacctgtagtcctagctatttgggagcctgaggcaggaggactgacagagccccagagttcaagttctgcctaggcaacatagtgaga

SEQ ID NO: 50034 - DNA, 449 bp, Homo sapiens
cgggccccccctcgaggtacttctagaattaattaacgcgggcacttttacccatgcaaacaggtgggctgggctccgggggcacacatgccttcccacctctggccgaggctcacgcggggggatcacgggcgtcacgcactccatgaccatcactggcctactccaacctgttaaacatggtgaaaccccgtctctactaaaaaataacaaaaaaattaaccaggcacggtggcaggcgcctgtcctcccacctacttaagatgctaatgcacgaataatcgattgaactcacgaggtctaggtggcagtgagccaacatcgcgccgatggactaaaacctgggcgacacggcatgactccatttcaaaaaaaaaaaaaatatcatatattggctatatcatcaaaaggtccaaaaaaactacctttttatacttttgataaatggc

SEQ ID NO: 50035 - DNA, 631 bp, Homo sapiens
gggcccccccttcggaatacttctagaattaattaacgcgggctgatcacgaggtcaggagattgagaccaccctggccaacacggtgaaaccctgtctccactaaacatacaaaaaattagccaggcatggtggcacatgcctgcagtcccagccactttggaggctgaggcaggagaatggtgtgaacctgggaggcggagcttgcagtgagccgagatcgcaccactgcactccagcctgggcgacagagcaagactctgtctcaaagaaaaaaaaaaaaaaaagaaaagaaacacacaaagagtgaggctgagttaaataggtctttttattccagtttatttagtcaattttattttaattcctcatagcttcactatcacatgcaaagactctttcctcagttttctggtgattttaaagctattcttatttcttagatggttttcctataatttatttttaagctagtgggatgtaaaagaagtcagatgagttaatttattcagttttatagtattaagctgataggatctcttctgtatgattgccaaactatatttgaaacaaaggtggcagatcataaaatcaggcaggccaaattcatcacatatggacataattaaac

SEQ ID NO: 50036 - DNA, 622 bp, Homo sapiens
  misc_feature 32, 507, 508, 511, 516, 518, 524: n = A,T,C or G
tgggtaccgggcccccctcggagatcttctanattaataatgaaacattttctaggataatagcagaaggcaaggggctaagtaagactgaacaaggccttcaatgatcaaaactgtatgaccagaagattcagggagaagatagtatgccttggtaatgtggctttgagaaatagcttctgcttgaggaggcataagggaaagggatatcttaggagttcaaccaaacgtcaatctagcaagctggaagacaaaatatttgcagaagttgaagagttagaggtttatgtttagaaaattctaggaagcatcaactataggctttttgtaggggagagggcagtgaatggggtctttatagaggatatgtggattcatagaaggatatgaattctcctttaagcattaagaaaacccaggaataacttaaggctgagacagacaatgtacagttcagaaccatagacctcgtcctttgttttgctttgttttatttttttggcaganntantcttnanggcttntgatatgctcattgatgcataaatcaacacttttgttcttctcatgaaaatcatataaaagtaataaacaattttttaaaaactcaaactccattttt

SEQ ID NO: 50037 - DNA, 566 bp, Homo sapiens
  misc_feature 14, 19, 40: n = A,T,C or G
taattaacgcgggnaaaanagtttttcataggacactagnggaaagagaatgggaacttgtggtctaaagagggaaccaagtctggccaacatggtgaaaccccatctctattacaaatacaaaaattagctgggcatggtagtgcatgcctgtaatcccagctactcaggagggttatgtttgagaatcacttgagactgggaggcggaggttgcagtgagccgagactgcaccactgcactccagcctgggcaacagagcaagacctcgtctcaaaaaaaaaaaaaaattaaatttaaataaaaaaaaaataaacagggaaccaacaagagctggcagaacagaataaagtctcaagccaaataactcccttgccttggaagaacaaggctgccagcgtcttggagcctctgtttatcgggtaccagttcaaaggacagtgagcctgagctggcctgggaggccctcccccctcccagatgaaaacaataggcctgttttcctgagctcttcctgtaatccagaaggcccacacagagaggaagaggggggcaaaggcagtggc

SEQ ID NO: 50038 - DNA, 404 bp, Homo sapiens
tccaccgcggtggcggccgctttttttttttttgggccaacttttaacctacacttgctgatttctgccctctggcccccaggaacactgataaagggattttggaggtctgggaacagcccagggccttttcaaaaaggaggacccaaaagggctgggtctcaaaaaataacctaaccttttcaggatcattaaagggaaaaaaaaccttggccagaaccacaaaggggtaattctgtagaatgtccccttgatggcacctaaacttttgaatcatggggtaagaaaaaggatccttggtgttcaaactactttttacaatgaggatccttctctacaaaaagccaactaatgtcttgtcatggcccatcccacctgacttttggggctttggaaccgggcca

SEQ ID NO: 50039 - DNA, 341 bp, Homo sapiens
cccccctcggggtacttctagaattaattaacgcgggtattcctcttcaccaaagtttagggtaaagctggtggtaattgaatagaaaaggaaaagtgatgtttagtgtttgaatgcacgcgcgcgcacgtgtgtgtgtatttgtacagtaacactttgatttttaagttatcatataattaatagttaagagaaaggctccagggccaatctaactagaattctggctcttccagttactaattataattgtaaccctggtcgagttacttaacctgtctgtgttaatgtatcttgtgacctcgatcaatttactttagttctaacagattttttgtgga

SEQ ID NO: 50040 - DNA, 572 bp, Homo sapiens
gccccccctcggggtacttctagaattaattaacgcggggggtttcgtgccttaggctgggtgtgctgagggcattcactagttttcccacgaatgttctttcattccaggatcccatccaggataccatattgcatttagtcatcatgtctccttagtatcttctgaactgtgtccaacacagaaatccaattttgtcaacatttcaccacaagccggggaaggatgctgcccgtttctcaactattttacaatcactattgagttcctactgtgtgagacaaggacaagtttaccagctggggatggttatggagaggtgcagaaatagttactataccttgtgacacctactgtaacaggaaatatacgaggcactataatatccctcgaaaataaatggatgattcttgccaggaagatacaacagcccaattcatattttctggtagagggttcattgggatgaacctcgtggtcaaatgaatcaattgaattgggatgtccatttatgtaagagattgtgtttcaacacagttcaaaaaaaaaaaaaagcggccgccaccgcggtg

SEQ ID NO: 50041 - DNA, 180 bp, Homo sapiens
cgggccccccctcggaagtcttctagaattaattaacgcgggtcagcattaacatgtacaatatatttttgattattttgttaaatgtggcctggtgatttagtgcctcatattctgtggatcctaccaatacatacagtaaatcacaaaatttagagcaaacctaaaaaaaaaaaaaaa

SEQ ID NO: 50042 - DNA, 501 bp, Homo sapiens
cgggcccccccctcggaatacttctagaattaattaacgcgggtgttgggccgtgtttgtctgtttcaagtggggctggggaggggttgctggagggtctcattcatgtccctccccaaggtggtagcaggcatcagtctctccagcttccctgtgtctgacctgaggttttccccaggctctataagtggtgcagttccttaggggctgtgacatctaagaccctgtgctgggctttctgtcccatttgtgggtgcgggggttctactgtttcattatttctctccctacctctggtgctgagtttgagtggctattaccgtgtcttatctgggtttccttttaaaacacaaatcgctggacacggtggctcacgcctgtaatcccagcactttgaggctgaggcgggtggatcacttgaggtcaggagtttgagaccagcctggccaacatggtgaaaccctgtctcttctaaaaatacaaaaaaaaaaaaaaaaaaaa

SEQ ID NO: 50043 - DNA, 584 bp, Homo sapiens
cccccttcggggtacttctagaattaattaacgcgggggtaggggtagtggtgtcaggagggtagattattccacaggaagttctactttggcccctgttgttatgaaacatatcttgaagctgtcagtaaaagggactgtattaccaggttgttcaagataaacatctagcttacataacaaacacttacatagtacttactatataccagccaccgaatgcaacagatttgccaaaattcatttacccacacaattggggacagatgggccaatttctgccactgaggactctgctcttctgagtggagtggaccatttcaggagaggccgattctactcacaggcatctctaggtcttgcaccacccaaccaacacccctaatttcatacaatggagggataaaataggattttcttatttaactgcaccttctcagtagggttttaatttttaaattagtaacacctttagatttggagaaaatgtaagagatttctatgtcccaattaagcaacttttcagagtgctttattcgttttgagtctttgtctaatgaagattaaatatgtataacacatag

SEQ ID NO: 50044 - DNA, 315 bp, Homo sapiens
cgggccccccctcgaaagtcttctagaattaattaacgcgggccaactgcttgtccctacatgttctttcaaacatgcactatatgcaataaggaatactccacatctgctcttaagagaaatgaatttaattgctaagctgctaatggggcgttttctcctgtagaatttctacccatctgcacactctgattaccacatcctcatcagatcttgtctacttcaacctttcttcctaaatgatcatcattaatcccatctatggtatctctaaatatgggaaatgagtctagagtaataatgatgtctgattat

SEQ ID NO: 50045 - DNA, 337 bp, Homo sapiens
ccgggccccccctcggaagtcttctagaattaattaacgcgggggagatgtcctgcattctcattaaaaattaatgatgataagcaaactcctctaaacagtcctactccagatcattgtttccagaatttcctcttaaaattatcatccgtgttccatttatgtatcagtgtaattggcaaagacaaagagagggctaatctcaattgcatatttggtattataatggagactcgtatctcttttaatacttgaggtctctggtcttggcataaatactttaaatagaaataatcaggctgtgtgtaatggctcacccctgtaatcccagcacttt

SEQ ID NO: 50046 - DNA, 585 bp, Homo sapiens
  misc_feature 65: n = A,T,C or G
ccgggccccccctcgaaagtcttctagaattaattaacgcgggattcttataaattgcacatggngaaaatagattgagaatgctgtaagaatttaatgtgtttcaagttgcatgtgggtaaaagtctatggaatttctggatttacttagtttgtatatatagaaagtgcaaaaaggcagtattcctcttgagattgacttttaaaaaaagattaaaagcagagattctaaattattattttctttctaggcctacagtaattttcttgtgattagttactaggaagctctgtattaccagatttggagaattcgaatagagttttttaggccgggcatggtggcttacgcctgtaatcctggcactctgggaggctgaggcagatggatcacttgaggtcaggagtttgagaccaggctggccagcataacgaaaccccatctctactaaaaatagagaaaaaaattagccaggtgtgatggcacatgcctgtagtcccagcttcttgggaggctgaggcatgagaatcacttgaacccgagaggcggaggttgcagagctgagatcatgccactgcactcca

SEQ ID NO: 50047 - DNA, 595 bp, Homo sapiens
  misc_feature 24: n = A,T,C or G
gccccccctcggggtacttctagnattaattaacgcgggcttaggctagacatcaacttgaagagacggcagcatttcctttcataaagtctaggctaatgtttttcagatcgctaagttgtagtttgtctggaatttaggaagccatttcagtatttgtcacttggtgaacgaacattcaataccttcagatgtcttcgtgttgacttgtattcatcctaagaaatagtaaatatagtctcaagtgttatttatgttatactgctggtttattctctgcttaaattattgacataaatttctactttggaggcttttcgtttgaactaaggctgtgcggaatttattttacttttatatttaaatctttgaaaaatctctgattaaaaaaaaagtacccttaaaggtttgaggatgtcctttcacaccagacaaaatttggttaatttgcgcccaatattcattactttgacctaacctttgttctgaaggccgtgtacaaggacaaggccctgagattattgcaacagtaacttgaaaaactttcagaagtctattctgtaggattaaaggaatgctgagactattcaagttt

SEQ ID NO: 50048 - DNA, 243 bp, Homo sapiens
cgggcccccccctcggggtacttctagaattaattaacgcggggtgggggaaaatcgtatcctaacattgcattagccccaacactgcctactaagcacaattgcgtatcgcttcgtcgtgcttatagccattagatcacttaccttccacatatatctgctgatacttctgctctctttagaaatatagcacaaggcatgctttatcaattcacgcgatatcatatattcatattactgacc

SEQ ID NO: 50049 - DNA, 608 bp, Homo sapiens
  misc_feature 577: n = A,T,C or G
cccccctcgaaagtcttctagaattaattaacgcgggattgataggatttttatttctgccttaagaattctttccatcaccttttcattttaagacacttatcatttctatcccttcctttgtcccctgtgctgtccttccttctgaagttctcacccggaaaggcattacatctttgatgctgcagttcacttctgtgtgcacccctgagttcttccagtacatcctccagttcctctgctttccatttcacaacctggttacagttagtcacactgtaacttcctgttactgagtatttcaggggccaaagctctctatgccctatgctgtccacttagtcatctctctccacatttgtattattcacagcaagatgcatgcacacaaatcctttaagtccgtcaggcttttcttaccatttcccattcaaatatgaatcacctagcaacatttattgaagaccaattgcacatgaagctgtgttcccattattgtgagcctcacaaaggaagtaaaagccatggtccttgccattaagaagtttatcctctactaaaagctggattaaaaaantttttttaaaataataacagcatacagattc

SEQ ID NO: 50050 - DNA, 435 bp, Homo sapiens
gcgggggattgaatattttaaatcggtatgtggggctctcgggaagagttgttgggtgatagaggagcaaaaatttattgttttaaaatagaaaagaagaatgagagaaaagtgaaaagcagccatttataaactgttctctttgtgtactttgaacttccatttggattgatcttaatcagggatagttgggccaaaggggacagatcagagctttcaggaaggcccagttcagctgtagcaattggcgcaaacgaattaaacatgtgtatgtgctgctatatgcctgtgagtgtatatacatacagatgcatgcataacggttatttctagatgagcatattctgtaatacatacatatacacaactgtttgaaggtgcagtgtcagaagattaataattgcatttaagaagccagtggtatgaatgggcaac

SEQ ID NO: 50051 - DNA, 587 bp, Homo sapiens
cgggcccccccctcggaagtcttctagaattaattaacgcgggaggcatggacctgggagggaggaccgaacagtcagacggacccggggggccacaggctgcctcacccggccaagagcctctgctggccaaccggctgcggccaaagggaaggccctttcttccgtgcattttgaagacaagcttggaatcatgagcccaaagtaacccaacacggctaagtgaggctcagctccatcgtactgggtatctgctggttgccagccttgtcctgaacatctccataaagatgacttaaaaaaaaaaatcaaggctgggcgcggtggctcatgcctgtaatcccagcactttgggaggctgaggcaggtggatcacttgagttcaggagttcgagaccagcccagccaacatggtgaaaccccgtctctactaaaaatacaaaagttagccgggcgtggtggcaggcaccagtaatcccagctacttgggaggctaaggcaggagaatcgcttgaatccgggaggtggaggttgcagtgagccaagatcgcgcccctgtactccagcctgggcgacagagcgagact

SEQ ID NO: 50052 - DNA, 456 bp, Homo sapiens
cgggccccccctcgaaagtcttctagaattaattaacgcggggaaggagaatcacttgagcccagaagttgacttgctgtgagtcatgattgtgccactgcattccagcctgggcaacagaaaaaaaaaggaaaaacaaagaagaagaaaaatgcttttagcagtaaaattcaattcaaaattacttcatactgtaagtggaccaaatgctttccaacagtagaatgataaatatattgaactatattcacacaacaaaatagcaatgaaaatgaaaactacaactctgtgcgacaacatggataaatctgacaaacataaagttgagcaaaaaaaagctagacctcccaaccctcctccataatgttaaataaatcccatataaattccatcaggcaaagctctactatattgtatagggatgtaagctttagtgttaaaatggataagaaaaat

SEQ ID NO: 50053 - DNA, 606 bp, Homo sapiens
ccgggccccccctcggaagtcttctagaattaattaacgcggggcatgatggtgggtgcctgtaatgccagctactcgggaggctgaggcaggagaatcacttgaacccgggaggtagaggttacagtgagccgagattgcaccattgcactccagcccaggtgacagagcaagactccgtctcaataaataaataagtaaactgaattagaggattctgagtaggcagtggactgaataaagtcatggcatctgaaaataacacagtctaccatttatttaaaactttctaagtagtctattaaatttttctcttaaagcctcacaactggaagaggggaatattatcattattcccatttcacggaataggaaactttgactcagaaatgtaacctcttgcccacagtcactacttaaccgctatactacgacatactggaaaaatagggggaaagtgctaggaagctggaagatactaaagacaaacctcaagttcattttggaatcagaacaaggttctggttctaacttaattactcactctgtaaccttgaacatgttaacctctcaggggtttagtttacttgtttgtaaaatgataat

SEQ ID NO: 50054 - DNA, 182 bp, Homo sapiens
  misc_feature 43, 52: n = A,T,C or G
cgggccccccctcgaaagtcttctagaattaattaacgcgggnaggcatggnaagggaaaaataatttttaaagttatcagcccttgttgcctaaaataggtcttggaaagacaatatatgagatatttgggtgatacatgtgaggaatctatgaacctttgagggggaaaaaaaaaaaaaa

SEQ ID NO: 50055 - DNA, 587 bp, Homo sapiens
  misc_feature 33: n = A,T,C or G
ggtaccgggcccccccctcggaatacttctagnattaattaacgcggggaacccatgaggcaaaggttgcagagagccgagattgcaccattgcactccagcctacgtgacaaagagactgtctcaaaaaaaaaaaaaaagcaaatatgaaatgttcctgattcaggtttgaaacattatccacttcttttttcaaagtcataggtcaatttgagagtgtcctgattctactctaagtctcaagaaccaactaaaacaactcttccagttgtggtggacattgtacaatcaaaacaaaatagaaatttaatgcagagattgagaaactacaatcattatcagttattcaatttcaaattcttgagtacatcaaaatggcctaagtcattcattcatttatttcactaagatacatttggaatctgctatgtatgaggcactgttaaatgctaggaataaagtggcaatagaatgtcgtgaagataagacaacttaagagcctaccctgaatgtcactgatcccctttatgctaagttaatgttataaatatgtacttaaagttatacaaaaatgttactttttattt

SEQ ID NO: 50056 - DNA, 570 bp, Homo sapiens
  misc_feature 28: n = A,T,C or G
cgggcccccccctcggaagtcttctagnaattaattaacgcggggcctttaaggtgaactaaaacatcacctaaataaattaaaattatgctttcacatcacttagtttcttcattcactttcttacataaagctgacaaattgtaaattggttactttcctaccaaagtatgtagcactctttagttggggagggaaggtagtggctctaaactctctctgctgaatactcaacgtgatattggctaaagtcaatagctgcagttgattgaaattctgaaaccaaataatgcatggcataaacctgtttactgttgattcagtgggctatttgttatataaatcaaaatttaaaaggctttgttaccctttctcagaagtttcctggtttcacaaaagaaactgaagagattaagagacacaaaaatatagaaactgttttacggccgggcgcggtggctcacgcctgtaatcccagcactttgggaggccgaggcgggcggatcacgaggtcaggagatcgagaccatcctggctaacacggtgaaaccccgtctctactaaaaatac

SEQ ID NO: 50057 - DNA, 359 bp, Homo sapiens
ccgggccccccctcgagagtcttctagaattaattaacgcggggacacaaggaatatcataattttgtctgaaactatactataatggtaaatctagctgatttaagttctttgggaaaaaagggcaattactgagaagagaaaatagacaacaaggtgtttctgcctcccaggtctggagatatttaaacccttctcttttattaaagagttgtttggggagtttcccaaatcaagagatggtacagtgaccaccacatttaatcacctgggtgtttatagacctctgtcaaatagttctctgtaaagatgctgagttgtactgggtgtaagacttggcttgccaaaaaaaaaaaaaa

SEQ ID NO: 50058 - DNA, 616 bp, Homo sapiens
ccgggccccccctcggaagtcttctagaattaattaacgcggggcacggcagaacctgagaatggtcgacagggccagcaggataagagtgagtatctgtagtaagcctctttgctgtctttgagttctccttgatctgactccatttttaaatttttattttgttatttttagagtcggggtcttgctctgtcacccagactggagtgcagtggtccgatcatggttcacggtagccttgaactcctgggctcaagcaatcctcccacctcagacttctgagtagctggaactacaggcacgcaccatcaagcctggctaagtggctggaatttttttttaagagagatttaagcgaggtggggttttgctatgttgcccaaactggcctcaatctccgggcctcaagcaacccgccctccttcagcctcttcagttattggaattagaggcgtgagccaccaagcccagctgtgactccatttttgaacttcttttatttgagaagtcttcgtcatttcagagagtgatcataaactgagcctgtccactcccctgatacctttcccatgtaacccataaaaaggttgagttttctgcttttatccctaggcta

SEQ ID NO: 50059 - DNA, 220 bp, Homo sapiens
  misc_feature 10: n = A,T,C or G
cccccctcgngaagtcttctagaattaattaacgcgggcaaatagttgtatgaaaactcaatactgaagtgattgctgtacttaaggactgggatcattcttatttatggctttattatataaggtattgagagcatagtaaacgctccactggtgtgttaacaatcagtcttgtaccatttctaaaaattgatagagaagatgcaaaaaaaaaaaaaaa

SEQ ID NO: 50060 - DNA, 595 bp, Homo sapiens
  misc_feature 28, 194: n = A,T,C or G
cggggccccccctcgaaagtcttctagnattaattaacgcgggtagtttcaagcgtggaagatgagaaagttcagagatgaatggtggtgacggctgcacaaaaacatgaatgtacttcatgtcacgcaactgtccatttaaaaatggttaacatggcggattttatgttatgtatcttttacaataaaactgngaaaaaaagtaaatcactttacacattagatacaataaaatagtagctaagaggctgggcacagtggctcatgcctgtaatcccagcactttggaaggccgaggcaggaggaccacttgagctcaggctatcaagaccagcctgggcaacatagcaagaccccatctttgttcaaaaaaattttttttaagtagctaatttaggaaaacaataataagacagatgtattatactagaaagcaaaacatatcattaagcagaattaaactaagcatgtgtggtactgacacagctactgataaagagatagttaaaaaataaaaagcccaggcaaggtgccatggctcatgcctgtaatccccgctactcaggaggctgaggcgggagaatcacttgaacct

SEQ ID NO: 50061 - DNA, 598 bp, Homo sapiens
  misc_feature 28: n = A,T,C or G
ccgggccccccctcggggtacttctagnattaattaacgcgggggttaggggtagagagattaaaaacgggaagcagtgcataggcagtatgaagtagacactttggcaaataaaaactgcaccgtatgacatgtcacatagaaattgttagagactttgaatcctaaaatttagtttaccaaatgtagctttttatgttttatgttttaccaacaaataatttgtatgttaaatttaagcatctgaattccgaaatgataaagaacaggaaaataatgactaagctaacaaccaaactttcagagtataaaattttgtcagtggttttcattttagaattaaaaatttgaatttccctttgcctacaagtctaagtaacttgcagcagcaaattcccccactgacaacttcaaagcatagcaagaatccacagtggtttgcaggccactaattcttttacggatgaaagcattcaattatctctataaaattcaattccttagaatatgtgtttgtgattgacgatgtacatttttaaatgtggtgataacacgttattattcatgatttaaaagtgaaatgaagtagcttgtggtt

SEQ ID NO: 50062 - DNA, 610 bp, Homo sapiens
ccgggccccccctcggaagtcttctagaattaattaacgcgggtgaggctgcagtgagctgtgatcatgccattgcactccagcctgagaaacagaaaaaaaaaaaaaaaaagggggccgagcacagtggctcatgcctgtaatcctagcactttggaaggccaaggcaggtggactgcttaaactcaaagagtttaagataagcgggggcaaccccctctctacaaaaaatacaaaaattagctgggaatggtggcatgtgcctgtagtcccagctactcaggaggctgcagtgggaggatcgcttgagcccaggaggtggaggttgcagtaagccaatatcataccactgtactccagcctgggtgacagagggagacctggtctcaaaaaaagaaagaaaagaaaaggaaaaagaaggacttaagaacaaagcagaagcaactcaaccgagtttgaataatactgagaaaacctcacgaactttattaacagttgggtgagacaatatcttctgcttccagagatacagcctgagattgtgaacttccgtgctgttcacaccctactccatgaatcgccctccatgctcctctcaagagtccacact

SEQ ID NO: 50063 - DNA, 597 bp, Homo sapiens
  misc_feature 28, 481, 546: n = A,T,C or G
cgggcccccccctcgaaagtcttctagnaattaattaacgcgggactgtgacagatcaaattcatttatgcatcactactctcaaggtttatttaaatttttaaaagggaatcttgggagagcaatgctttttccaaaatgtaattccctcagattcttcctactggtccataccttcgttgcctggatatttgttggcccttttttttctgataggtgttaagagatacacttttgggagctccttccagataaggctgcctttctcattttactttccctgcttccctccccccactttctttctttctattattcattcattccagaagcattactagcataatatatgcatttaattcatgagaaagggagaggcatgatcacagaggaatcttcctgtttagacttgaaacatgagtagaaattagacagagtggaataatgggtgttccaaggcagtgaggataggagataactntgcaaattttcaggattcccagtcctcaattctaaagtcagccagaggaataagaagcacagcantgacactttttttttaagcttaaaagattataaataaacaaaaactaagaa

SEQ ID NO: 50064 - DNA, 215 bp, Homo sapiens
  misc_feature 174, 191: n = A,T,C or G
acttctagaattaattaacgcgggtcctcgtgatggcttttcatatggcttctactcaaggagaacgctgtccattactgcacagctgttacctgctggtaccttccctgagtcctctggagagcattagctgtctcacagctctgagtacataggcagagaagaatactgcgntaaaacagaatatcacnaaatatttgtcagcgcccttcatc

SEQ ID NO: 50065 - DNA, 543 bp, Homo sapiens
cccccctcgagagtcttctagaattaattaacgcggggataatctcagtgatttttttttttaatcatcaccagggatatttgggaaagtcaatcactgtatcagctagtggtttcaacttataaaaacaaccacaattacaacagcaaaaacctctgattcactcacataaagagtgtgtagacgggccttcctttctacttcaacacctgctcctcagactcaccccctttgtgacttcttgaaaaatgccttgggtgttcattaacctgatgtaaccaatataaatatgttagaggaaagcactcaatgttatctgtcctggaccatccttgccagagaaggacaagctcttaataccataggagattgtttatctgaaaaatctaaccactggaagcatccaaggactgtttatacgctaaatttattttctttttttttaggcaatatgttcacatgtggaattaacattatctaaattccagagaaagtgctgattggacattcaaggtgaacatattacctaaaaaaaaaaaaaaa

SEQ ID NO: 50066 - DNA, 578 bp, Homo sapiens
cgggccccccctcgagaagtcttctagaattaattaacgcgggattgtacacatttgacttactgcacagtatattgatctgccctcctcggcctcccagggtgctgggattacaggcgtgagccactgcgcccgaccccatcctgttccttctatatcttattactagatgatcattgaaccaagaaatgtttaaagataagggttttttacaaggttagtgagagcattatttcccacaatgtctcatgaaacaccatcctgtaagatactatgagaagtttccttgatattcattctcagattctccatactatattctttctcagatatttataatatatatattaatattggaagagctgaaaagtcctactgtaaaggaacctactttaggccgggcatggtggctcgcgcctgtaatcccagtactttgggaggccgaggtgggtggatcacgaggtcaggagattgagacgatcctggctagcacggtgaaaccccgtctctactaaaaatacaaaaaattagccaggcgtggtggcgggcgcctgtggtcccagctacttgggaggctg

SEQ ID NO: 50067 - DNA, 183 bp, Homo sapiens
aggccgggtactttcgtatttttaaatacagaggggagactttgttggcgatgcttttcggtgttccaaaatatacagagtaggtataagaggatgtgcacatcgcaggtgtgcctgcaacactgaattagggcccttacgagggttccttcccctccaaggagagttcgaaaaaaaaaaaaa

SEQ ID NO: 50068 - DNA, 540 bp, Homo sapiens
cgggccccccctcgaaagtcttctagaattaattaacactccaatcgataaaatatgatagtgaccatttctttatattatcaccatttctatattatatctaattaaggatgaacaatggtataacatacagttaattggcatttcccatactattaatgaaattgatcacttgtttattttccattttttatgtgtttatgtatttattattttgtgtttattttccatttcaatttcttttttgataattctttttactataatttatcaaattattttacttttagttatcagtatgtagaaacatatcattattagaaacattatctagctttgatcacatagttgcaaaaaattcccattctatcatatgttttttgatgttttgatatctcagtgtagttttttaaaacaataattattttatggaagtataaattacataacaaacagcaaaaacaatcataattttacagcttgatgatttatcataaaatgaacataaccatgaagacatcactcaaaaaaaaaaaaaaa

SEQ ID NO: 50069 - DNA, 344 bp, Homo sapiens
ccccccttcgaaagtcttctagaattaattaagcgggcagggggactactattttctatcacctgaaaatctcgatgaaagtgttttagcctaaagatgactttatgccttgccttctctgctctgtttctctgggaaaagaatggaaatagttcatgtgtagtcacatgtttgagtgcctgaagggggcaggtttgctgaaaagagacttactttaacaatatataacttttaggacagatagaagcaagttctgaacaagtaataacactgcgtttttggccctttggctctgaataacagcaaaagtacactaaacattttttcattacattgcttttagc

SEQ ID NO: 50070 - DNA, 254 bp, Homo sapiens
gccccccctcgaaagtcttctagaattaattaacgcgggatagatactcctagttgaaaaggtccaacaagtcgccctgtcgtcctgaacctctacagatggctcctggtgatggctgcgtgataaattgtgcatggtgaggtcaccagtccagatttatttgactgtatgtaaatatgggactgtagcgttctgctgctggcctcgctcagggcagtaatgactatatatttagcaagaaaaaaaaaaaaaaa

SEQ ID NO: 50071 - DNA, 492 bp, Homo sapiens
ccgggccccccctcggaagtcttctagaattaattaacgcgggattatggagaactataagaatacatacctaaggattagtttactagtaatggaacaagaaattgccaaggtggcttttggcgtgagattgcttgactttttccccttgattgtgacgtatttaaaatgttgttagctatacagatattgaagcaggccctcatttcttttgtaagaatattggcaattgctctgtgatatctgaacattttactaatgttcatttttatagtacttttcttaaaaattaaaaaaatcctttatagcaaccatgatgggtagtggtaatggcactttttaagtgccttttagcttataaagtgctttcacacgtgttatcttatttgatccttgtataaaaagccccatgatatccaaagtgattaagatctttgaagaatactgacaaatgaataagttctcttcttcatccctaaaaaaaaaaaaaaa

SEQ ID NO: 50072 - DNA, 608 bp, Homo sapiens
  misc_feature 16: n = A,T,C or G
cgggcccccccctcgnaaatacttctagaattaattaacgcgggagtctgaggcaggagaatcgcttaaacccgggaggtggaggttgcagtgagccaagatcccaccattgcactccagcctgggcaacaagagtgaaagtccatctcaaaaacaaaaaaataaaaaataaaattaggacatagctcagggattttcaaaaatattgtcttgccatcagtctttcttttgtggtaacgcaaatttgaccacgcaggaagcagatcaaggaggagcgacaccgcattcctgtccaagaaggaaaagatatgccttgaaatagaccagagaataaacaagactcaaaacttcaagcaagtcgggcgcagtggctcagcctgtaatcccaacactttgggacaccgaggcgggggaggatcatttgagcccaggagtttaagaccagcgtgggcaacatagtgagacctcatctctacaaaaactacaaaaattagccgggtgagatggcacgtgcctgtagtcccagctatttgggaggctgaggtgggaggatcacttgagcccaggaggttgaggctgcagtgagccatgatcacgccactaccctc

SEQ ID NO: 50073 - DNA, 608 bp, Homo sapiens
  misc_feature 604: n = A,T,C or G
cccccctcgagaagtcttctagaattaattaacgcggggtgataaattcagtttctcaacctgttggatagatagtaatataattaatttaagtggcagtgagatttaggaagaagttaataggttcatttgggatgtgttgaatttaggttgtccacagaattgtaacaattacattaataattgatataaaaatggtttacatactaataagtcattatatcaatggtaactatatttctctcctagtttttcttagtagttacaaaatgtattatggttagatttttaccccaattttagtaagtaactgagttgtagttttattttttgtattctctttcattgatgtcttaaagtatgtgtacccagtgttttgacatggttaatctcccagaaattagagtaagatagtcaattccaaagtatattaaacaagatagagtgaaaatattatatgattaggagtcaggccgacctgacctttccacttcgctgtgtatgtgatctttcactaaccctcaattttcccacctacaaaaacgtagtgagagaatatacttgaacagtttagtgtggagcctggcacgtggcacttggaatntgtg

SEQ ID NO: 50074 - DNA, 575 bp, Homo sapiens
ccgggccccccctcggaatacttctagaattaattaacgcgggggaggtcgaggtaggcggattacttgagctcaagagtttgagaccagcctgggcaacatggcgaaaccctttctctacaaaaactgcaaaaaaatagccaggtgtggtggctcaggtcttgggagtctgaggtgcttggaagtctgaagtgggaggatcacttgagcccaggaggtcgaggctgcagtgagctgagatcatgccactgcagtccagcctgggcaacagagcgagaccctgtctcaaaaaaacaaaaacaaagtattcagcactgtgaggcactctgagcagaaagatgtggtggtctcacctcactcagctcttactcttcgcgtgtctgttaaattctcttcctctgagcgccttcctgaccacacaggctcacactcggtcttgggggaattgtggacagtgtgtttgtgctggccccacaggtgttcagtgagagccggacattgctctgttaatgacaccatggtggtccctcggggttggggagaggcttggggacctcttataccaaaaaaaaaaa

SEQ ID NO: 50075 - DNA, 617 bp, Homo sapiens
cgggccccccctcggaagtcttctagaattaattaacgcgggatatcttctttgctgaagtttctgttccattattttgtctacttttaattggattgtttgttttcttatcattgagtttaaggaattctttatatattctgaataaaagcgcttcataagataggtgatttgcaaatattttccctgagtctgtggctttttcccccattctcttaaaagtatcttttgtggcacaaaagtttataattttgatgaagcacaatttatcaatgtgtcaagcatttagtgttgtatctaagaatcttttgttgtaacccaagaccatgattttctgctacattttcttttaggagttccatggtcttaaaatttacatttagatatatagcccattttgagttagtttttatataagatgtgaggtatgaaccaaagtttgttttttgcttgtggacttccaaatatttcagcaccatttgtaaaaatgactatcagttctccaatgaattgcctttgtacttttttcaaataacaattgaatatgtttacatcagtctatttctgaaaatgtaaaaaacttgaagtcatatcagatatcttctcagaccattgca

SEQ ID NO: 50076 - DNA, 588 bp, Homo sapiens
ccgggccccccctcggaagtcttctagaattaattaacgcgggcttatgagacaaacgtaacagcaaagcagctctgtgatgagcagtgagagcgagacactgcggtggaacaggaagggtcgggaacggagatgaaatacaattaacacccacagcggattcttgcgggagcagggattggggcacagtaaaggcactgggttaactcacacagtggtggtgaacagctcccattgagcctccctggtttttgttttttattttattttattttttgacaaagtttcactctttcacctaggccggagtgaagtggtgcgatcttggctcactgcagcctctgcctcccaggttcaagcaattctcctgtctcagcctcccaagtaactaggattacaggcgcctgccaccacacctagctaatttttgtatttttagtagagatggggtttcaccatgttggtctggctggttttgaactcctgacctctggtgatccacccgtcttggcctcccgaaatgctgggattacaggcgtgagcaaccgcgcttggcctagcctcccaggtcttaactcaatggtacct

SEQ ID NO: 50077 - DNA, 312 bp, Homo sapiens
cgggccccccctcggaagtcttctagaattaattaacgcgggaggttactgtctagatatttaaatggaaaatagacaggagtcagactgtgaaagatcctttatgctacgctaaggagttcagattttatcctgcgggaaagaggatatggctttttaaaaaactgaagcactactatatatctataaaataaattttaaaaacggaagcagttgtgcttctggaaacagtaaatttggtggctatttgtgggaagatactaatgtcagtatcttcttttgcggtcattctaatgaaaagataagagaacc

SEQ ID NO: 50078 - DNA, 217 bp, Homo sapiens
  misc_feature 15: n = A,T,C or G
cgggccccccctcgnaaatacttctagaattaattaacgcggggggcacggacatgaaatcttaaaggaggtggctcaaatcttcggcaaaaaacttaatgctcgattagttactacgcctgtgtgtcatgactaacaaggggaaagacgtgcacataactgatcgatctacaatgcatagaaccatgcagcatattaagcccaagtccataggcac

SEQ ID NO: 50079 - DNA, 599 bp, Homo sapiens
cgggcccccccctcggaagtcttctagaattaattaacgcgggagtgacaagcgtcaaaaaattatgttaattagtttatcccataatttgttggttcacttaacatggaagtccagggaatcgctggcttcaggcatgtctggaagcagaagctgaaatgatatgctcagtgttaactcctgtgcctcttgtcattcttaatctcatccatcctccctccctctcttattgctcctctctactcctctttgtccttctttttcttcctctctttctcctactctttattctatatccctctattttgctcattctgaaactggttctcaacacttcgtacaatgtataaatgataggcattcacagctcttagcttacctgacttctcattatgccagagtcaaggaattcctttctacaaaatgcatatatcaaatgtttctggaaggaatatgattagccttggttgaccacatttctgttttttgaccaatcctaccatggaggagaatagaatagtaagattggctatgaataggtccattctagttgcccagaagtagatgaggcagtgtatttgataatctcacccaaacat

SEQ ID NO: 50080 - DNA, 345 bp, Homo sapiens
  misc_feature 7, 40: n = A,T,C or G
ccccccntcgaaatacttctagaattaattaacgcggggnaacataacataaaagataccatcttaaccatttttaagtgtacagttcagtgacattaagtgtattacattgttgtgctatattcaccaagggttatttcttttaatacaggaaaaacttcttgatgacatttgagtaacatgtagggttctcaggctgaagttgctggtctacttgaataacatagttgtgtactgcctgcactcctgaaatttttcacactaaaaatttaattatttgaaaacatactttctgtacatttatttttatttactaggcatttttgcaacaaagacatgctacac

SEQ ID NO: 50081 - DNA, 306 bp, Homo sapiens
  misc_feature 10: n = A,T,C or G
cccccctcgnaaatacttctagaattaattaacgcggggtgacccatgcctcatacaccacatactcttgattaaacatggattcggtgagctcacccatactcctggccaggagatgtccgtctttttcagaagagaggagatgtaccaaaaatttgccggacatattatataaccatttactactgatctttttgcaaaagtatgatgccagccccacaggctcatgcctgtggtcccaccatttgaggaggccggggcaggtcacatacacagatgccaggaggatgagcaccagcctgacca

SEQ ID NO: 50082 - DNA, 105 bp, Homo sapiens
ccgggccccccctcgaaagtcttctagaattaattaacgcgggatgaatgaagctaactgaaaatctgctctcaatgtctgttgagccacggcaaaaaacccttc

SEQ ID NO: 50083 - DNA, 593 bp, Homo sapiens
ccccctcggaagtcttctagaattaattaacgcgggtctacagggcaatgtctggggtctgagggcaggtgagagtacacaggattttatgaaaatgtgttctgtgcaaacacctcacttgtgccgctcttctccacaccagcaaactgagcattctttaacacagttcggcaaccgctggccaagcctcacttacataagagtgccataaaagactgggtcggctgcttctgcaaaacacctgtggttttgcaaaaggatgtgatttcttagaagtcagtaaacaggctcatttcctttacagttaaattttggcatcagaataccaaaatactctatgaccccacctaagctcacataaccttactccccaccttaaatggttgggagagcaaaaggccctgtgagctggaactgcccagggtgccagccttgctgctgggccagtggccaccatgcccacctccaccactttcctttgaggccccaggaggctggtacacactccaggagccaggaagaccacttggcacccttagctcctgggacactagaacacatggccaagttataaagacttcatatgcatcttc

SEQ ID NO: 50084 - DNA, 419 bp, Homo sapiens
aattaattaacgcgggcggcggattcttctggtccgcaggtttgtgaatggatgcagcacccacgcttaccctcaaactttaacgatgtccacacagttacggtgacctatttttgttttaggacggttagggggagggaccctgggatcaccattgactgaaaagcgaggcccggatcacttagcccaaatgttgctcctgaaatgcactcacgtgatctctaaaaggaaccccataaaaaatttctttttaaaacccgggcgcgggggctcacccctgtaatcccagcactttgggaggccgaggcgggcgtatctcgaggtcaggaaatcgaaaccttcctggctaacacggtgaaaccctttactaaaaaaaaaaaaaagcggccgccaccgggggggacctccatttcccccta

SEQ ID NO: 50085 - DNA, 592 bp, Homo sapiens
ccgggccccccctcggaatacttctagaattaattaacgcgggtacccaaatgttagcatttggatagcattctaaattgcattctaagtagcattctaagtttatttctcttttctaagtgttttcctttggttgaagcaattgtttcctcccatgctaccaaagttgtcttgcacaaactcattattcaactgctgttaaaatgtggtgatttattactgcctgtgcatagaaactcctttttgtggtagataggagaacacttcgcttttcagccaagtgctcagtgtaacccctaccgtttcgtgctcctgggcactccacatggagaggtctcatctggtatatagtcgtataccttgcctctacctcccttcttctcttgacactctggagaagcagccaggcacagctcctgtaagtccaattcgttgtgtgtctctgtctacgctctataggtgtcacaccaaagaccaaccttctggcctcaataatgatttttgaagctgctatggccatgtggatgttggtaacagatgtatatataaattatcctcattactattgtaccccccacacaagtaaagatta

SEQ ID NO: 50086 - DNA, 521 bp, Homo sapiens
ccgggccccccctcggaagtcttctagaattaattaatgtaaaaacacatgatagcagcaacacacccttttattcttgcaaccatctctcctcccaatctccctctctctccccttacaaggctttgctgggaagcggtattactggccttaggacttagagcaaatagagcatgccatcttcccctgaagcaaatactgactcacatggtcaggcttgtctgcacgaggagagacagatctggatctgcagatccacttctacggtcaaccaaataggtctgcttagtgggggcaacttacaagaagaaagggcatcctactttaaagtacaggaaataaagaggaagcaggtcgtggtctaagacttttagatctctagtcaatagactgaccatgtgaatgtcccagatagatgctgctcaaaggagctgaaaatattaccttccactaacatgcaggtagggagaggggttaagttacctctctcaaagaatacaaccacaaaaaaaaaaaaaaaa

SEQ ID NO: 50087 - DNA, 470 bp, Homo sapiens
cgggccccccctcggaagtcttctagaattaattaacgcgggccttccaagtgttgggatggccagctggtgccttttattgattcttttaatttatacatacagctaactctctattgggactgtacaagtttctcatgaaaaaaaatatttaactaatgacaataaggatagatgttttcaaagttactctcatttatattagaataagacataaaggagggggcttcctatcaagtgtactcatcttgctctttgttgtttgccattttttcttcctttttctccccagctctgttcagttttggggagggggcagatctagatttaagaatacccttggcgggctgggcgcagtggcttatgcctgtaatcccaacactttgggaggctgaagcgggcagatcatgatgtcaagagatcaagaccatcctggttaacatggtgaaaccccgtctctactaaaaata

SEQ ID NO: 50088 - DNA, 646 bp, Homo sapiens
  misc_feature 19, 32, 585: n = A,T,C or G
taccgggcccccccctcgngggtacttctagnattaattaacgcggggagaacaatacacgcaggggcctgtgttggggtaaaggttgggggagagcatcagggaagaatagctaatgggtgacagacttaatacctaggggatgggttgatctgtgcagccaacaaacatgacacacatttacctatgtaacaaacctgcatatcctgcatatgtaccctgggacataaaataaaagttgatggaaaaaaaaataaaagaaattctataatgtttctatggtgtatggttaaggaaggcaagtaagactcaaattacaagaattaaatggaaagaatacaacataaacacccttttatcaagtgagcatctacatattatttgtctagaactatggtatgagctttaaggctggacgtggtggctcacgcctgtaatcccagcactttgggaggccaaggcaggcagatcacctgaggtcaggagttcaggaccagcctggccaacatggtgaaaacccatctctaccaaaatacaaaaattagccgggtgtggtgtcacatgcctgtcgtccctgctactcangaggcagaggcaggagaatcacttgaacccaggaggtggaggctgcagtaagccaagaacg

SEQ ID NO: 50089 - DNA, 600 bp, Homo sapiens
  misc_feature 29: n = A,T,C or G
ccgggtccccccctcggaagtcttctagnattaattaacgcgggtgttcataactttgtactacactttacccttaacaaaattcagattcagttgacagatctatgcaaatgtatgaaaagtggaaaaagacaagctagcatttgtttcagaggttgaaagcatcactttgatttgcaatgatttccaatctacctctttttccacaaggaaaaattgcaaagacaagatccctaaatgtcacaaaataaagcctgccaatgttctgttggcatatagtttaattcttgaacaattaccctgccatatacatttattcttaaattttatatattgacacattgaattttgaaactgaaagagaaaatgacacatgtaaataccctcaaactcagaactgactttaaaattcgatctattactgtgtatgcatgagtgtgtgtgtactaaatctatgacaagtgcaagttgctggtttattgcaattgacttaatatcactctcaaagactgagtgtacattctcatgccctgaaaaagttttgagtagatctcttctgggacaggctatcgtgtatatttaagacatgatctctacaat

SEQ ID NO: 50090 - DNA, 592 bp, Homo sapiens
cgggcccccccgtcggggtacttctagaattaattaacgcgggtcttctgattttaaaataaattattttcatgggtgcctaaaagttggcaggtcctagccactgtgcctctttcacctaacagatgggttaaccccgagcggcagaggtgatgaaattcagacttgagtctctatgtgactccggtgataatacttctacatgcctcagaagttctgaaaggaattcttgctgttctctttttccctctcaaatattagaatatgatcagcccgtgtctgggcgagaggagaaagctgataggaatctggggctgtgccagtggaagaaagattattgtcacacaaggttgtgacagtacactgtcccacagcgattccatcccacaaacatacatgtgtcctcttcagcgtattttcaattgctaagtttaacatacagtttttgccctggccgtggtgcaggtgagtgaatcagcctcttcccaccctgagggaacccttgtggtatcaagcgtctaacaggctgaataactttgctcttgggagttgggcttactcctgccattcttgatggcttgcgttcagtgga

SEQ ID NO: 50091 - DNA, 594 bp, Homo sapiens
  misc_feature 23, 576: n = A,T,C or G
ccccccctcggggtacttctagnattaattaacgcggggggacacaatttcactcctctgcattcaccaaatgtccaattacatatcctccctgcctggaccttcagaacaatataaaactgaatgaaggctatgaaagaagtcacaggaggatttttgcagagcttccatccagttcagaaacaaagcaattcaatacatgtcttcaagatttctaaaggcaatgacttaattctaagttccatgaaagcaggcattgtgtgaatttctcctgcatctggaactggcctagcacaccaaggccttcactagatactggccttttgactttggactttccagcctacagactgatggagtctcactctgtctcccacgctggagtgcctctgaatgctgttttagccatggttctggagagggtagcgacaggagctgtctaggtgggatccagaggaaagtacgaatgagcagaaggggcaaacttgtttaccaaattctcaaatgaaaaacaaaatattcttgtgcggaatttcagagaattgcagttcctgtttcagcctgaacctcagattnttccacccacatggagtt

SEQ ID NO: 50092 - DNA, 595 bp, Homo sapiens
  misc_feature 25: n = A,T,C or G
ggccccccctcggggatcttctagnattaattaacgcgggtccccattttaaaacaaaaccaagacatagaaagattaactgatttgtccaagatcacccaactagtaaatggcagggccaggaatcaaacacaagtggtctgtctccagagctataacaattctgctatgatatctcccagaaaaaatattcgcagtctaccagcatttggatccaagatcaatcctctcaagcaagttccctaactacttccttttttgttgttttgttttgtcttttgggttttttctgagtctcaccctgtcgcccaggctggagtgcagtggtgtgatctcggctcgctgcaatcttcgcctcctgggttcaagctattctcctgcctcagcctcctgagtagctgggattactggtgtgcaccaccaacatctggctaatttttgtacttttagtcgagacggggtttcaccatgctggacaggctggaagttccctaactactttcaaaaatattcagaaatagttatggccaggtgtggtggctcatgccggtaatcccagctgagtcgcttgaggtcaggagttcgagaccagcct

SEQ ID NO: 50093 - DNA, 311 bp, Homo sapiens
cgggccccccctcgagagtcttctagaattaattaacgcgggggggtagaggtgcggctgggccctttacgaggttcggtcttggagctccgtcttcggcagcgggctcgggggcctcggactctgcataaggccccggaaaagatgaccggccccgggctgggcgcggtggctcatgcctgtaaccctggagctttgggaggccttggcgggcggatcgcttgagtccaggagttcgagatcagcctgggcaacaaagcgagacaccaccccccacccccagtcgctacagaaggaaaaaaaaaaaaaaa

SEQ ID NO: 50094 - DNA, 602 bp, Homo sapiens
  misc_feature 23: n = A,T,C or G
ccccccctcggaagtcttctagnattaattaacgcgggggatatacagatagaaatatctccagccatccttttcacagtgcataaataaaataattctttgatggctggctaaggttactaccccagaacttgaagctgttttcatctctgtgtgttccagtgaagtcaataattgtccactgcatgtccaggactggattccagcaaagggagaaatggcagaagaattttgacaaactgaagggatctacccctcatagacaggaacagggaacatttgttttctgcgcaagtgtattgttagccttctagaatagcctgccagcttaaagaatgcagctggagctagctccctagaatgttcatactgtttgtatcagctaaccagctcccaagcagtattttcatattgtaactcctctaatgaagaataattgtcagtcattggtcttcccaaattctaggacagttgcttcacatgtaaaggaatttcagttaaaggacactaggaaagtaaaaaatgaaactctctgttaagtgccaacatgaaagatagcacatctatgttatgaaatccaaaataagtaacttggaaatgta

SEQ ID NO: 50095 - DNA, 615 bp, Homo sapiens
  misc_feature 566: n = A,T,C or G
cgggccccccctcggaagtcttctagaattaattaacgcggggaagtatattggaaatgcgcctcttctttctttctgttagttgtattcagtcacttcagtggctaatttttccagtctctcactcaactacaggtcatgtatccctgactttgctttagcgaaattgactttttccttgattaatttagaattcaatgacctggcggggaagttatggcattggggatttttggttgccattacttaacaggaagacagagagagcttgcaagttggactcgggagacctgcttttaagccctggctggaccatttattggccagatgaccttggacaggccctgtaggcttccttgacacccctaccccaactgccatctatatttgtggggcatttttagcctcctagccttttccaaggataatgtgggctttcaggtctgtaacctaggcaggcattatattattattattattattattattattattattttgaggtggagtcttgctctttcgcccaagctggagtacagtggcgcgatctctgctcaccaagcctncaggttcaagcgattctcctgcctcagcctcccgagtagctgggattac

SEQ ID NO: 50096 - DNA, 454 bp, Homo sapiens
ccgggccccccctcgaaagtcttctagaattaattaacgcgggatcttacagtgctcccaactacttcacaaacattcaatagtattaatagctaatgtatgcagatatctactgtctctgatagaatcaactattttggttacaaaagtaatacaattaggccgggtgcagtggctcacgcctgtagtcccagcgctttgggaggccaaggagagcagatcacgaggtcaggagtttgagaccaacctgaccaacatgatgaaaccccgtctctactaaaaatacaaaaattagcctggcgtggtggcacgtgtctgtaatcccagctactcagggggctgaggcaggagaatcgcttgaacccaggaggcagaggttgcagtgagccaagactgcgccactgcactccagcctgggctacagagcaagactctgtctcaaaaaaaaaaaaaa

SEQ ID NO: 50097 - DNA, 586 bp, Homo sapiens
  misc_feature 35: n = A,T,C or G
gggtaccgggcccccccctcggaaatacttctagnattaattaacgcgggcgggcggcccccaggcgataatagaggagaaaagtgaaacttcgagaggtgaaggaactagcctgagaagtgataagggggtttcaaagtgaggtttgcctgactctaaaacccattctccaggcctcttctgtttgcatctgtccccttctccctctgccatgaccctggcgggaaggtaggctgctcccattggccatccaccctcactgttcctccccagcccagaaggctccctgcacattgacttactgcttcactcctccttccaaatgcctttacttcatttctgtagggaagaaaatgggattagtctattactgtagcctgtctttgaatagagtatgctactcaaatgaagttttcattggtcagtctttggaccctaagataagaatctcagagagcattaagggaatattttttattaacaggtctcttcagactataaatagtctataaatcacaccccctgagttcttcgctttgtctgttataagcaaagctggctcaataccacagtatgccacatacta

SEQ ID NO: 50098 - DNA, 329 bp, Homo sapiens
  misc_feature 42: n = A,T,C or G
gccccccctcgggggtacttctagaattaattaacgcggggngaaaaaaaaaaaaaaaaaaaaaaaaaaaaaaaaaaaaaaaaaaaaaaaaaaaaaaaaaaaaaaaaaaaaaaaaaaaaaaaaaaaaaaaaaaaaaaaaaaaaaaaaaaagggaaaaaaaaaaaaaaaaggaaaaaaaaaaaaaaaaggggcccccccccgggggggagcccaatttccccttaaggggggtgttttaacgccccttattggcccgggttttaaaaagggggggaggggaaaaaccggggggtacccaaattaaatggtttggaaaaaaatcctttttt

SEQ ID NO: 50099 - DNA, 591 bp, Homo sapiens
  misc_feature 26: n = A,T,C or G
gggccccccctcggaagtcttctagnattaattaacgcggggagggacactgcggggaaggaaagagatccaaagcttcatgatgtgacacttaagaccagtcagttttaataagggagctattcatttctaccaggagctcacgtcatggctgctagtgagaaaggcagtaagctgcgatgttcctgtaattaatgagctttatttttctagaacaaacatggtcgggtgtggtggctcacacctgtaagtccagcactttgggaggcctaggaaggcagattgcttgagcccacgagttcgagacaagcctgggcaacatggcgaaaccctgtctctacaaaaaatacttagccaggcatggtggcacatgcctgttagtcccagctatgtgggaggctgagatgggaggatcacctaagcccaggatgtcaaggctgcagtaagccaagatcctgccactgcactccagcctggcccacaaagtgagaccctgcctaaaaaaaaagaaaaaagtaccacatcatatgctgagccaggtgctatctctcacctggttcttgacacctatgagcctgcgggcaacgctaa

SEQ ID NO: 50100 - DNA, 607 bp, Homo sapiens
  misc_feature 76: n = A,T,C or G
cgggccccccctcggggtacttctagaattaattaacgcgggccatctagtttcttcaacatcagttgtcactgtngccgaaaattgtatggttaaaagtcacctcattctgcatagaatatacaagcctccattatacttgccaacttcttatttaaaaagtcaatttagcatactgttttccaactactctctttttctttgattctattttacatatatatttgtcaactgcagggtcttcttttttgtcattttaattttaaatttctattccaattttaattttaattagcaccattatttcaaggcagcaagtgtcaaaattatatttgaatctctggatagtttaagaaaaggtagttattttgttgaaaatcacctaaagcaaggagaggtgtgacctcttatagctgtagattctaagtactttgaaacgtgatcttgaataataaatataaaacataccgtcatatggaagatgtgactatttgagtcggaaagatatactttgctacatttattggagatatttacaagctagctattcacaaataaagatactaatctatgaacataactaatatgttaaacaacacattctctg

SEQ ID NO: 50101 - DNA, 600 bp, Homo sapiens
cgggccccccctcggaagtcttctagaattaattaacgcgggtcaatgttcaccctgtggtttggccttgatggagggacaacatcccataattatttctgagcagtcaaagtgttcatccttctctttcacgagaaccatctggaactctgaagacgatactttggggtccagtgaagctagtggcatacccacgagctgcatttgcttggcccacacactctgccccaggtattaacctagaaaccacaccattcctggcttcacacctggggaaagctcagtctgggcagacaagtcagagagacaagtcagagagcacaagagtggccaggaggcaggctgggcaggtggccctcttcaacaggtccctatgcaatgccttctcatttctttttctttcttttgctatttttattaactgcctcttcaaccattcatgctgagccctgataatgacaagtgggcactcccttgctctaaggtcaccaaagaccccagaggtggctaaagcttgacctaaggagggaggaaaagcttgaacacatggaacatttcatagagaaggggaagtcaatgtgaagttgcaggtgggagtgc

SEQ ID NO: 50102 - DNA, 346 bp, Homo sapiens
gggccccccctcgaaagtcttctagaattaattaacgcggggatctcttttaggcttcgcaattttcctgtatctaggtgataccattattctcattttatagaatggaaaaaagaaacagtagtaaagaaattaagtccctctctcatggtcataaagacagtaaatagtgaagctggaattggttctctggaagtctgactgtcatgcccacactcctaattatcatgcttagagtacttaaggaactggaaaatagccatgtggctggagtacagtgagccagaataatggcaagagatgaagttggagaggaggtaggggccaggtcaaaaaaaaaaaaaaa

SEQ ID NO: 50103 - DNA, 410 bp, Homo sapiens
  misc_feature 24: n = A,T,C or G
gccccccctcggaatacttctagnattaattaacgcgggactaatgttttgatccagtaggtctgggtgagggccagagaatcgaactttgggaaagctcccccaagtgatgttgataattggggatgtctcctttctgattgagagatgacagatgagatcagagcatctccctgaaatgtgccatgcaaacaattgggtgtctggacttgccaaaaaggcttttgaggattctggagcttaaattcaaaatattaataaaataaggggctgaacgtggtggctcacacctatagtcctggcactttgggaggccaaggcaggagggtcacttgaactcaggggtttgagacaccctgggcaacatagggaaactcatctctaaaaaaaaatagaaaaaaaaaaaaaaa

SEQ ID NO: 50104 - DNA, 343 bp, Homo sapiens
cccccctcgaaagtcttctagaattaattaacgcgggggggcaatggcgggcgcccctcccccagcctcgctgccgccttgcagtttgatctcagactgctgtgctagcaatcagcgagactccgtgggcgtaggaccctccgagccaggtgccggatataatctcgtggtgcgccggtttttaagccggtctgaaaagcgcaatattcgggtgggagtgaccggattttccagagtttaggatgcttcaagggaaagatgaaccggggaaccgccaccgtgactatttctcatctacatatccaccccccgaagttcttaaagtggagcggaattcatttta

SEQ ID NO: 50105 - DNA, 601 bp, Homo sapiens
  misc_feature 16: n = A,T,C or G
cgggcccccccctcgngaatacttctagaattaattaatattttagggcagtcaagtcatatttgctagtcttatacccattttagcaattgtatcacacaattacttcacattgagtatggagtaaaagaaaatctcaattgttttccacttgaaaacttgcctagttagatttacctcatctctctattgtaagatttttcttttaacctgtctttaaagtatccctaaagcaaacaaaactccgtataaatagatgagccaaaattaaattggtatatgatgcaaacttcttgatgtcccttgacttcatcacttataaaaatctttagtttctatgagaggttgcttgtgcgaaagtgattaatatgaataagtgaatgaatctaaatgttgcaatttatcatattcactcttagtctagaatgaaaatagctctgaaaagtgactctaattgtacttttccttctgtgatagtatcttacaatgtcttccatttgtatggataaatattcataaataattatcttccctccagcaacatcatgaacattctggtagaatgtatgagggtacaaatttgataaagacagattatcta

SEQ ID NO: 50106 - DNA, 580 bp, Homo sapiens
  misc_feature 28, 55: n = A,T,C or G
cgggcccccccctcggaagtcttctagnattaattaacgcgggattgattttttnagtaagcccattgaaatccatcagattatctcctgctagataataatggtctcccccatgtgaagagacaggctttctttcagcagggctgcccaacagccattactttaggaaaatggagttgagagacacaaggatcctggatagggatgaggcgagacacccacgctgtggtgaagaccaggtggccaaagcccaatttgaaaaccctgatgtggatgtgtcctgggcctgttctcttggagcaggacctccctgtagtttgcattcttcttctctcagcttgaacctctttcctcagcacctgtggttcatatctgttgagcaagggggaagacatttgttgtctgggtgatgttcaaaaacacaactgtgttcttgagccagtttctatgttaagtacaaccaaggtctcactggtgaccttgaacaaaacagaagtaacctttgttcttctggccagttccaagtcctcggaacctacagtcacaagccacacatttctgaccaggttttcccatgcct

SEQ ID NO: 50107 - DNA, 340 bp, Homo sapiens
  misc_feature 15, 28: n = A,T,C or G
cgggcccccccctcnaggatcttctagnattaattaacgcgggtacatgtgccctgaacttcctacaaatgcggtgttggttgttttccatgccacattgaatgtttctttttaatgaacactcagatttcccatccttctatttctcattccccagaccacctggatcaagagacacattcagacgctagaattgaatgtaacatgaactaaggtttaggcacagcatattgaaagcattcattggagtggggaagagagatggggtttctcggtcactcaactcctaccatagacttctgtttttctctgtaatgaaattgaaggaaaaaaaaaaaaa

SEQ ID NO: 50108 - DNA, 447 bp, Homo sapiens
  misc_feature 9, 22: n = A,T,C or G
ccccctcgnaaatacttctagnaattaattaacgcgggttggctgatcaattaccaatctgccccactgccatccatcagctttggtatttgaaagtacatcttcaattctcttatggtttctgaggaaaagttcttttggggcttagtgtggtggttcacccctgtaatctcagcactttcggaggccgaggcaggtggatcacctgaggtcaggcgttcaagaccagcctggccaaacctcgtttagtagaaacctcatctctactaaaaatacaaaaattggctgggcatggtggtggatgcctgtaatcccagctactcaggaggctgaggcaggagaatcacttgaacctgggagacagaggttgcagtgagctgagatggcgccattgcattccagcctgggaaacagagcaaatactccatctcccaaaaaaaaaaaaaa

SEQ ID NO: 50109 - DNA, 203 bp, Homo sapiens
gggccccccctcgaaagtcttctagaattaattaacgcgggaactagaggaagacatttataatacagacaaggaataatgctgtcataactacaatagtggtggtacagatagacgtagacagtttcaacttcttagaaggtatgttcaaggatagtgaccaggtttctggctgtacaattgtgtaaataatgtaccattca

SEQ ID NO: 50110 - DNA, 587 bp, Homo sapiens
cccctcgagagtcttctagaattaattaacgcgggcacaatgatatggtaagatttggtgacaaagaaaattatgaaggaacaggcagtatcatagcttaatttgtacctcaactagagcttttttacttccactctgttttatatacattcacaggtatgaaaattcattgactgctgttatagaaaagactgtgaatgattgctaaaatggaacagtaaataacttattttgaagagataaaaactatgattattcctgagcctttgaatatgttcacttgagagggaaagtatagtggcattttcaaaataactctttaagtatatttcatagaatattattccacatgaatcacaataggaatctgttattgtggatacaaaaacttcattcacaattatatcctatttttactcttgaagtggaatatcagaaatgttatgagatattgacattttatttaaaatcaatccctattcacacatagctagtaaattgtttcaattttattggccctcatgtctacagtatagtagtttaacccatattaatactttagttctttctgtaaaaaaaaaaaaaaa

SEQ ID NO: 50111 - DNA, 433 bp, Homo sapiens
ccccctcgaagatacttctagaattaattaacgcggggagtggtggtgggggctgctcttgagaaggaataactccaaagtctgaaaattttggatgcacagcataatttatttgcttcctggaaagtcacatggtgaaaattctacaataaaaaagtctgggccggatgcaggggctaacccctgtagtcatcagcattttaggaggtcaaggcccgcggatcatgaggtcatgagattgagaccatcctagcctacatggtggaatacaaaatacaaaatttccctgggtgtgctggtgcccaactctaatcccagctacttccgacgctgatggaaggataatcgcttgaacccggctggcgccatactgtgagagcctagatctcgccagtacactgcagcctgggttacatagtgagactccctccca

SEQ ID NO: 50112 - DNA, 575 bp, Homo sapiens
  misc_feature 13, 26: n = A,T,C or G
ggccccccctcgngggtacttctagnattaattaacgcggggcctggcacaagtaagggttctataagcattagccgttaaagcagccattaacaaatgctgcaagcaattatccaagacttcgcactgtgctagggtgagagtactccccacaacccgaagtgccgcactcttgtcctttttgaaaatatgatgcagaagtttataatttcttacctagcacttactgaccccccggcccccactaattattcctttcactaaagaagagaatggaaagacaaagtctaattgaggagcaggagagtaaacagcagttgtgaactttcaagacctagatgatctctagcccactgtagagggccaggcctgccaaggcccaggggggttaaaaatgagattctttgtaactgtcaatcaaaacattcaaagattcccccgggctaggggaggaagaaaagtgtgtccctcaaaaatacaatctaccttcagttgaggataggcaacacccatgttaaccatttagaataactccttttgaggacgggcctggtggctcacacctgtaatcccag

SEQ ID NO: 50113 - DNA, 596 bp, Homo sapiens
  misc_feature 39: n = A,T,C or G
gactggggtaccgggcccccccctcggaatacttctagnattaattaacgcgggagggatgatgataacaattagtaatgaatttaagctggctaagaaaagaagaaacaagggtggtggtggagttaggaagagcagaaaggtaattggatcaataggttgcaggtcctgctgctgggaacattgatagagttaggagcccacaggtagggtgctggaagggtaggaggtgatcccactttcctctttgcccattgtttagtcacatcagtcttccaacctggggtgttggaagattctgtacagatttcttcccttcaatctcatccgtctcagctccagtacctgatttttctcaggagaatgtgcaaactaaattagattctcctattataaccttggtacatccttggagcacttgtaatcataattttaaaactataggaaaatttgacatctaactccaccaagatctacagcttctttgctcacgactgtcattgctagtgcctagagactatcaataggatgctttcggccgggcgcggtggctcatgcctgtaatcccaacactttgggaggccgaggcgggcggc

SEQ ID NO: 50114 - DNA, 114 bp, Homo sapiens
gggccccccctcggaagtcttctagaattaattaacgcgggggctgtggggacctgagccgagtcggcattgctcgccctgtgcacaagacaatatcctgtttgtttggatgca

SEQ ID NO: 50115 - DNA, 152 bp, Homo sapiens
ctggggtaccggggccccccctcggggtacttctaggaattaattaacgcgggggagtaagaacaggagagttaagtggaaagccagcatcagtaaatgggtcaggagcccctgacccccgaaccgctttgatcccactgaccagaaacact

SEQ ID NO: 50116 - DNA, 251 bp, Homo sapiens
  misc_feature 32: n = A,T,C or G
ggtaccgggcccccccctcggggtacttctanaattaattaacgcggggtgggatctggacttacaaaagcttccctaggaatttcggctcttggcatgcacacctactctcaagggagaagagttaatgttgtcaggcacaccacagaaagaagggtgcctcagagaaggatttaaggagggacggcaattccactgctgctcaccagaagccagtatgactttaaaatattgatgatgtttatttgctg

SEQ ID NO: 50117 - DNA, 596 bp, Homo sapiens
  misc_feature 34: n = A,T,C or G
ggtaccggggccccccctcggaagtacttctagnaattaattaacgcgggtactaaccttcgagttgatttactctaaatgaaagtacatatgacttgtaaactcctaactttatatcccatatgagcgattgattttttatttaagtatatatagttggaaggtaagactagaaacatacacaagagcttgtaatcatttgctgatagtattgacttgtggatcctttacaatgtttgtctcactattttactgatcattaacatttcaaagaagtaaattctttgggaatccaagacggtagacttgacagtgggaagacccctttaggcatcagatcgggcttttgccacccaaaagacctgaaattctatacttggtaacagcttggagtgtggagtatgctgattactatcactgcccaggtgaggggtatcagcaaatggtgaagggagctgcctcttctctagaatgtgatcagttgtgtggattttccattttgcatttttacagttctgctctttattgagtacagcataccttcaatctgttaaccaaaccatcacccagtgttgacaggtgagagaacattcata

SEQ ID NO: 50118 - DNA, 354 bp, Homo sapiens
aaggcaggaaaagagctttgtggttgacttattacagaattaggacaggacagatatggaaaatatgttcacacagggttgctctaaatgtccatgaaagacaccaacatggggcaggaggctgggagaggacagacagggagaaaaacagtgaaaaggttctccacatctagctgcaaagataacctatacagaggaaaattcaaagtacatttaaaaagccttagaattggaaaggacccagaggttatttatcaacagggactttattacactgaaagatgggccattctatcaggccataataagtaaatatctaaataatgaatcattttcctaatgacttcctttata

SEQ ID NO: 50119 - DNA, 597 bp, Homo sapiens
cccccctcgagagtcttctagaattaattaacgggtattttgcctatccccacatgtgtttttattgatatagtcattttaaatgttgcttatattgcatacatgtcctttgcttctttgacctaataatgtagcttggtggtctttccatatcagcacaaacagatatcacattctttttaatgtaggcatagtattccctcatatggatataccataatttatgtaagcggtcacctattcttccaattactatttttttttaagtccagtgatcctctttattatacgcttagcaaataattgggagcatatatgtaggctcaagtcctaacactggggaattctgggtcaaaaaatatgtgtctttaaaattttgatagatagaaaaatattacttttaaaacttttgaaatgcagacagaaacccattttcattacaatgaagcacattgaaagctccttcccttcacttaaccctcggaccagatggccgactctgcacatgcatgcatggattaaaagaagtctactgtacagaaaattaatttagggtctaaattaaatgcttaaaataaatttattctcatcagcccc

SEQ ID NO: 50120 - DNA, 314 bp, Homo sapiens
cgggccccccctcggaagtcttctagaattaattaacgcggggttgcagtaagcatctgatgaggtgacagagttagaaaacagttgattctgctaatttgttgtccagcttaatggtggttttggtggaagaaccaattaatccctgaagcttcctgccctgccgttttctgtgacgtcactgctgtcttaaaactataactaaatattagtcatattaaaaaaaaactataggctgggcgcagtggctcacgcctgtaatcctagcactatgggaggctgaggcgggcggatcacgaggtcaggagattgag

SEQ ID NO: 50121 - DNA, 360 bp, Homo sapiens
ccccccttcgaaagtcttctagaattaattaacgcggggaaaaaattagactttggttttccttttattaattgtacaatttagtattttcattgttatttttcacaaaactagagggaaaaggaaccatatttttttcccaggtcttcatggcctctccacacctttaatctggcttggatcaggcaataatatctcagatttcaagggtagagtgctttaggtgtttggctgaactctagacttaaggtggctgggcatgggcattggaaacaaggctcaataataaatatggtggtactgcatttgtgtgaatacaaagctggctggccatgtaaaaattcttcctctcccagccgg

SEQ ID NO: 50122 - DNA, 521 bp, Homo sapiens
cccccctcgagagtcttctagaattaattaacgcgggggtgtgaaagagacccagctataagcatgttctccaacacaaattccatcttcatcatgcatcaaagctttttattattttgaaataaaacttattctacaaatacttattgaacagtttttatgccccagaaaccgcgtcaggcaggagtacattggtgaacaaaacagattaaaaaccctgccctcggccgggtgcggtggctcacacctgtaatcccagcactttggaaggccgaggtgggcggatcacgaggtcaagagatcgagaccatccaggctaacacggtgaaacctcgtctctactaaaaatacaaaaaattagccgggcgtggtggcaggtgcctgtagtcccagctactcgggaggctgggacaggagaatggcctgaacccgggaggcggagctggcagtgagctgacaccatgccactgcactccagcctgggtgacagagcgagactccatatcaaaaaaaaaaaaaaa

SEQ ID NO: 50123 - DNA, 387 bp, Homo sapiens
cgggccccccctcgaaagtcttctagaattaattaacgcgggacaaaatgaaatattcagaggccgcttatctatcaggaccaaatacaaaacaatcactcttctataacagcagaggccctgttggtagctcttgccagtttttatataggcctctgtgtagtgaagcaacaacagaaagggggctatatactctcatattgcctttgaaagtcagaagctgtttgtgtcgcatttgtttgattgactccaattgaattcttattctggctaactcccaaatatttagcacttaaagaaaacagattgaatttttaacatttctgtagaaacttatctgtgggtcaatttcttcattgagtacaccagaataaaaaaaaaaaaaaa

SEQ ID NO: 50124 - DNA, 567 bp, Homo sapiens
taattaacgcgggcactaccctggagatagtgtacatgctatcctttttggaaaattattacataaaatatgacattaaaaaaatttcattacaagaacagaaaaacaaaacaagaataatcttcaccttgtcagtgtatccctcagagcaacagagttatagattaactcctaacaataatgttgtcatctacagcgatttcatgtttccatgaactaaattagtaaaatgctttaaaactacaattgatttttactgagttcaaaaagaaaacgtggctgggtacagcagctcatgcctataatcacagcactttggaaggctggggcaagaggattgcttgagcttagaagttcaaaaccagcctgggcaacacagtgagacctcgtctctacaaaaagtaaacaaaaaactagctgggcgcagtggtgcacacctgaagtagcacctacttggtgggaggatcccttgagcctgggaggtccaggctacagtgagccaagatagagccacagcactccagcctgagtgacagaacaagactccgtctcaaaaaaaaaaaaaag

SEQ ID NO: 50125 - DNA, 506 bp, Homo sapiens
gccccccctcggggtacttctagaattaattaacgcgggtggagcaggtaagggcctaaagtctagagttagttttgaatgaaaagtggttatatcacacagtcttaagttatccaaaacatacaaattagtactttccctttgtaatttacacatttggccagattttcttctccagatctttcttctgtgcctagccactagttgctttttaaaaaatacattttttggtcaggtgtggtggctcacatataatcccagcactttgggaggccaaggtggtggatcacgaggtcaggagatagagaccatcctggccaacacggtgaaaccccgtctctactaaaaatacaaaaattagctgggcatggcagcaggtgcctgtaatcccagctactcagaaggctgaggcaggagaatcgcttgaacccgggaggcagaggttgcagtgaaccgagactgtgccactgcactccagactggtgacagagagactccatctcaaa

SEQ ID NO: 50126 - DNA, 595 bp, Homo sapiens
  misc_feature 504, 577: n = A,T,C or G
cccccctcgagggtacttctagaattaattaacgcgggggcaaatgcgagtccctgtcacgcttttgacgccacagctttggagttgtcatggaaacagttgaacaaatgaagcccaggaaatccctcatccagactccatcgtagagaatgtgtggaatgaccgatccaggggccccataagtccgccggttttcaggtgcccacttggacacagctggccaggaaagggaagggacgggtctgggccaggagggacctcacataagttctatgatgatttggtttaaaatcttggccgggcgcagtggctcaggcctttaatcccagcactttgggaggccgaggcgggcggatcacttgaggccaggagttcgagatcagcctcgccaacatggtgaggccctgtctctactaaaaatacaaaaattagccgggcgtgatggcgcacgcctgtaatcccagctactcaggaggctgaggctggagaatcgcttgaacctgngaggcggaagttgcagtgagccgagattgtgccactgcactccagcctggtcaacagagtaagactgtctcanaaaaaaaaaaaaaagaaa

SEQ ID NO: 50127 - DNA, 614 bp, Homo sapiens
ccgggccccccctcggaagtcttctagaattaattaacgcgggggtgggtggtgtgcctctgtgttggtacccttcctttttggttcatctccctctggagctttagcgggttaatacagagtgtcctgggagacagccttccgtgaatcctgcacagtgtgtccaagccgcactggtggtgactgagttgctgtgcccgtgtccggtgagtaaggtgagctaacttggtgtgttgtgctggaggcctggttcattgcagaggtggtgcagggttagattttgacgtctgtccgggactcaggcttttcctcagcctttgttccagagcattggggtgacagtggaaatgtctccagtgccggaaagaaaacacaatgaggaatggcgtttcagtaggcggatctgcctttcatctaaagtaataacagccaagtattctggaagaattgaaagaggctagcagtcattcttaaaagcaaagtcttttctgccaaaacagtagtacattttatttttaaaagacttgaaaatacaaaagaatgaccccgcataaccccacggtgcaaaggtcagcattgttaacacttttggagtttgtttccctttcagtttt

SEQ ID NO: 50128 - DNA, 570 bp, Homo sapiens
  misc_feature 434: n = A,T,C or G
cccccctcgagagtcttctagaattaattaacgcgggggtctcactttgtcacccaggctggattgcagtggtgtgatctcggctcactgcagccttgacctgccaggctcaagcaattctcccataccagcctccctggtagctgggactacaggcccccgccatcatgcccagctaactttttgaatttttttgtagagatggggttttgccatgttgcccaggctggtcaaactcctgagctcaagtgatctacccgtctcaggctcccaaagtgctgggattacaggactgagccactgcacctggctactctctaccttttgataaaaggaattaagttggtaagttggtatatagttcattcaattacgtgtattgaaattgattctatttctatatcaattattttatacattttattttattgttntttcttgtaatctttttttcttttacaagcttgcacaaatttttgtttaataccctattttctctttttttagtttgaaaattttcatggtcaaatatctaaaataaaacttttagattttaactgggcagagata

SEQ ID NO: 50129 - DNA, 601 bp, Homo sapiens
  misc_feature 28, 581: n = A,T,C or G
cgggcccccccctcggaatacttctagnattaattaacgcgggcaatagtgaggcagacactgcttcagacatcttgccttttttgtgcattatttatgaaattacttggcaatgatgctccttgaaaaagcggccagtttgtaaaaaagccttcatatgtagatgttgaattttgcatttcaaggtcccttgataatttggtagtttgaaaaagctgggctttcttgattgctttggtcttattctttacctagcattttttccctagcacagggcaattgatttattttcagtggtagctgaaacaaatataaaattagatactgttttttgcagtggtcataattatcattttatagtactatagtgttatcctcatctgtgaggaaaccaaagagataaaaatgtcattggttttctaaacgagttaaagtgactaaatgtagactttggataaatgggaactttttctttcaaaaaatgattcattctgattatgaaagtaatcgatataatagttacacttggcaaaaaattggaaaattcaacagtatagtgctatgcatagcaagcaatgtanatttgaattgtgaatggaac

SEQ ID NO: 50130 - DNA, 326 bp, Homo sapiens
cccccctcgagagtcttctagaattaattaacgcgggatgctaaataaataactctcactgttattactttgtattaagatattatctttgccccctcgtggcagtctctcaacaaagagtactgtaattgcatttaatccacttagtggatgtggagcccaaagggcagccatcactagagcagcgtacaggcttagttccagacttcgtgtttggttgttcatttcataggcgagccacgtgttttgtaacatattctcgtatatgttatttggattattttcagggctttctgaagaaaataaacatcgaaaaaaaaaaaaaa

SEQ ID NO: 50131 - DNA, 595 bp, Homo sapiens
cccccctcgagaagtcttctagaattaattaacgcggggagaagaaaatcggggagccatgcatgaggaggcagtgcctagaggtggttagaggtaccaaggaaagtttcaccgatattgatgatattctgcaccccccacccccaatactgatataattctatctcaagataccctgggcccatcatggaaaagagtttcatgggtcaagattgagttttggatttttctcatatacaaaactagatattatgaagaggaaaggacacaaggtgacaattttataagaaatttaaaatggtgtgattttaaacacatttggagtacttttaatctctggattctgaaatatatttctcgaagaggacattatttatattaaaaagcccttcatgcttagaactgctcagtccatcatgagcatcttctgtgccagctatttataaagtaacttcaatatttgattttcaacatgccttggtaacccctaaaatattgggtcttgccattcatattaaatattatcaattccatgtctgtttcagtaaattcactcattgagtgccaactatgtgtcagcactactcgttattaa

SEQ ID NO: 50132 - DNA, 448 bp, Homo sapiens
  misc_feature 359, 363, 397, 407, 420: n = A,T,C or G
cccccctcgagagtcttctagaattaattaacgcggggcaccacgggggatccagccaaggtcgtcgaatgaaaactgaggcagaagaggtaaaatcactcgtccaaggtcacacagccagtggtgaggataagcctcagataaattcaaggtcatccaatcagcctagccacatcccgcattatagaaacgaaaagaatgtcaagaagacacatcagtcagtaaactccaaattgtatgttgatcgtaggtaataaagcattgtgtcagggaagacatctcactaaggactgcactccagcctgggcgacagagggagactccgtctcaaaaaataaaaataaaagcttcttgagctngaanaaaaaaaaaaaaaaaaaaaaaaaaaaaaaaaaanaaaaaaccanaaaaaaaaaaaangggggccgcccccgggggggggccccaa

SEQ ID NO: 50133 - DNA, 286 bp, Homo sapiens
  misc_feature 36: n = A,T,C or G
ttctagcattaattaacgcgggcgaggttcttcaanactaaaatatttactatctggtcctttactatttactaatatttactaaaataatctgccaacctctggtcaagagaatagacttcatgccctacttttcatcttttagcccaaaaatactagttgctaaagctcacacatgccttaattgcacccactgtcctcgctgaatgcagttgagattctgttcctttatgcttttaaaacaaagtactgctcatcaaagaacaagaaaactgatttcctgaat

SEQ ID NO: 50134 - DNA, 545 bp, Homo sapiens
cgggccccccctcggaagtcttctagaattaattaacgcgggcgaggttctccaagactaaaatatttactatctggtcctttactatttactaatatttactaaaataatctgccaacctctggtcaagagaatagacttcatgccctacttttcatcttttagcccaaaaatactagttgctaaagctcacacatgccttaattgcacccactgtcctcgctgaatgcagttgagattctgttcctttatgcttttaaaacaaagtactgctcatcaaagaacaagaaaaactgattcctgaaataaaatttgaagataaagaacattctggattgccttaggaaattaaggggaaggaagtaattcaaaaatctatagatcttgataggtcataaatcctaaaggatttcagacataggtcaagagaaaaccgaagtctggaaggggataatgaaggagacaaataaataatataaatgtatttattaccactgaacgatacacttaaaaatggtcaagatggtaaattatatatgtatatt

SEQ ID NO: 50135 - DNA, 629 bp, Homo sapiens
gggccccccctcggaagtcttctagaattaattaacgcggggagcagatgctgctcacaattctctaaaacaaggtctttttttttcaaccccagatatatcaagaatgggacacaatctccgaggaagaaattgtcagcatttatcttgaaaatatctttggtttcccattacatttcggatttctctagaccatatttgtagttccctttttggtgttcccattcttgtaagtttatataaacagcaataagactatagctcttctcacaggatactttgttatttcttaatgggactgtctgtcctgtaggctatgagctatttgagggcaaagaatattctattcatctttatattcctggcacatggtaggcactcagtaatgctgctgctgaattgaatcggctgtgggaaaaaaacaaatgcttctcctcagtcagcatttgttttctaggatctattccaatatatttccaacaaaaatatgagatttaaaagataggcagagagtgaattgaactgaatattgcacaaaaactccttgtctttaaaggtggaaacaaaatccaccaccttcccaagatagctgttctgtctcacatcttcttgaagcaatgaaatgatga

SEQ ID NO: 50136 - DNA, 390 bp, Homo sapiens
tttttttttttttcggaaatagggcctggctctgtggtccggcctaaaggccaaaggtgggatcatggctcactacacccatgaccactctttattattttctcccttcggctggttttaatgtccattggcttctctttttcttttcttcttttggaaagggagcctcccctttccccccaggcgggattcaacccccgggcccaaaaattctcccccctcaggcccccgagtaaaggggactatgggcccccccccgccctcagctggctccttttttcctaaaatagttcctcaaaacaaaacctgggaatatttattggaaaatttctcccccaaatataaccaggggatgctataagtttcttcctgataaaaaaaatataattt

SEQ ID NO: 50137 - DNA, 600 bp, Homo sapiens
  misc_feature 28: n = A,T,C or G
cgggcccccccctcgaaagtcttctagnattaattaacgcgggggaaccatgaagactggttttaggataactggttaagcagattcaacagcaaccatcgttcagatttttttgtttgaatgtttatttccaaattttttattacaaataattgctgtaaacatcttggtgtaggtaactttgattttttttttaaggattctttttttttaggatgcttccataaaaatagtgttactgagttcaagtgtgtggatatttttaaggtttcatgagtaatttttcctttaggctgcttcttacaagagttggacctatttagagcagcagtaaataaagatgtccctttttactattctgttataagtataagctaattgcattttacattttttgctaatttcatggcatgtgccatttaaacattcgtgaagcagaatattttcctgtctgtttactaatgatatttattttcattgacttgtttggccttgtcctagttatgttagagccttagtgtttttcttattgatctacctgagacttacaaatatattaacctgttgtcatatttgctacaaacatttccatgatgaatt

SEQ ID NO: 50138 - DNA, 584 bp, Homo sapiens
ccgggccccccctcgaaagtcttctagaattaattaacgcggggatggctcatgcctgtaatcccagcactttgggaggctgaggctggtggaccatgaggtcaggagttcgagatcagcctggccaacatggtgaaacctggtctctactaaaactacaaaaattagctgggcgtggtggcgcacgcctgtagtcccagttgggactggggctagtcctttggtcttatatactatattatggcttctttaaagaagattcatacatgatttgatatacattctgagaagattatcacaatcaagctaattagcatatccaacacctcccatagttactttttttatgtatgtgtatggtggaaacacttcagatgtattctcttaacaaatttcataccttatcatgtataattaccaggctgtatgttagatcccccagaatgtattcctactgcataactgaaactgtataccctttgaccaacatctcctatttctcccacctcccactccagcccctggtaacaccactgtactctctgtagaagttcaacttttaaaaaattagccaggcaaggtgg

SEQ ID NO: 50139 - DNA, 345 bp, Homo sapiens
cgggccccccctcgaaagtcttctagaattaattaacgcgggagggacataagttagacaccgggaatacccacacctttgcatgtggctgcttcgtttctgtgcctgagccacttggcccttgctgtagcttcctactcgttttacaaagccctgcttgtgctcacctgcccggttggcgcccttgccaactacccggccaaccacgaatcacggccccaggctgtccacaggctacccacaggctacaccggctgcagctcctcttgcagcataccctgcatccggcgctgtaatgtgtgtgtgcctccccctgggctggggccccttgaagctgcgggtctt

SEQ ID NO: 50140 - DNA, 580 bp, Homo sapiens
  misc_feature 39: n = A,T,C or G
actgggataccgggcccccccctcggaaatacttctagnattaattaacgcgggcagtgcatatatatatatattaatttttttaaattaagttgaattttaaaactatgccacactcacatatacacaaacacgtcttatagcccagctggttttattgtggaattctaccacacatttaataaagaaatgacaccaactctacaaaaactctgaatattaaagaggctacccttaaaaatttattctatggagacataattaaccctgctaccaaaaccagagaatttcattttaataaaagaaagcgatggttcattatacccctgtgtgcatagatacattcttgacaatagtttagaaaataggatctatcagtatataaaataaataatacatcatgaccaatagggattttttctataataaaatatttattaaaatatcagaaatccatccatgtccttcactgttatcaatagagtaaaaacagtgatctcttaatgagtggagaaaaaacatttgagaaaatgcaatatttgtttatgacaaaaacactcagcaaattagaaggaaactt

SEQ ID NO: 50141 - DNA, 390 bp, Homo sapiens
  misc_feature 21: n = A,T,C or G
taattaacgcgggaatagganttagggcaacaatataagaacatagtgcctgctgctggagcccttccacgttttttgtcttttttttctgtactctgacactgtcttgacagttttctaaacaatctcttattgattctcagtgaacctaattcatattctgagcattttgttttttttttacagcttgaaaatatgtaaacctatcttcagaatactaaaaaatagttgtacagaattaccagtaattactaattttattttctctctcatggaatcacattacagaacaatagatttctattactaataaaagcatctttctgtattgcaaacaagaatgttgaaagtatttgaaaccactttggcaatgggaaaaaaaaaaaaaaa

SEQ ID NO: 50142 - DNA, 577 bp, Homo sapiens
  misc_feature 28: n = A,T,C or G
cgggcccccccctcggggtacttctagnaattaattaacgcgggggaggtcgaggtaggcggattacttgagctcaagagtttgagaccagcctgggcaacatggcgaaaccctttctctacaaaaactgcaaaaaaatagccaggtgtggtggctcaggtcttgggagtctgaggtgcttggaagtctgaagtgggaggatcacttgagcccaggaggtcgaggctgcagtgagctgagatcatgccactgcagtccagcctgggcaacagagcgagaccctgtctcaaaaaaacaaaaacaaagtattcagcactgtgaggcactctgagcagaaagatgtggtggtctcacctcactcagctcttactcttcgcgtgtctgttaaattctcttcctctgagcgccttcctgaccacacaggctcacactcggtcttgggggaattgtggacagtgtgtttgtgctggccccacaggtgttcagtgagagccggacattgctctgttaatgacaccatggtggtccctcggggttggggagaggcttggggacctcttataccaaaaaaaaaaaa

SEQ ID NO: 50143 - DNA, 340 bp, Homo sapiens
cgggccccccctcgaaagtcttctagaattaattaacgcggggtggtatccaaggtggctggggagattgtagaaaactttcatattgggtgttcagaccaaggtggaagctggaagaggaggtcttttattaacagatgtagcacattatggtggtttataacagtgctgcttatggtttaatccttgactacacataatcatttcaaacatttgaaattcaaagagaaacctaacatttcaaacatttgaaagaactattagatagtaagtttggtccactgattgctttatttcaagatactgaaatgatttggggattgactcccatacttaattt

SEQ ID NO: 50144 - DNA, 512 bp, Homo sapiens
aattaattaccgcggggataaaattgagggttttccagtagaagcttatgcttaaaaaatacttaacatgcattaaataaaataatgcaggccaaatgagggggctcatccctataatcccacctctttgggaggccgggggggccaaatcaccaaatgtcaggatttcaagcccaccctgcccaacatgggaaaaccccttctttactaaaaatctaaaaatacaaaaaatacccaggcgggggggcaggtcccaaaaatcccatctactcgggaggctgaggcagaaaaaacacttaaacccagaagggggaggttgcagtgaccctaaatcgccccattgcacttcaatctgggtgacagatggaaactccttttttaaaaaaaaaaaaaagggaagaacagaaaaggaagtgccccttttaaaatgttaaatataccgcttgactttttgctttccctatacctgtaaataaaatggggtgtttctatgcatatcagaaaacacaatt

SEQ ID NO: 50145 - DNA, 606 bp, Homo sapiens
gggtaccgggccccccctcgagagtacttctagaattaattaacgcgggggtctctacaaaaaataagataaaattgctgggcatggtgatacgtgcctgtagtcccacctactcgagaggcagaggtgggaggatcgctggagcctagaagtttgaggctgcaatgagctgtgatcatgccactgcactccagcctgagaaacagagcaagatcctatgtcaaaaaaaagagagaaagaaagaaagagtgaaaagaaacagaaagagagaaagagagacaaaaacagagaaagaaagaaaaaagaaagagctgaggaaggaaatgtagtcctttagcatctgttgtgatagagcattctgccacaatattaagtgaaattcacctacccatattacatggccgcaaatctcctccctttcccagcattgttctcctaagcaactcttttttcattcttcaactcaacctgaacctcacctctttctgcatccttgagagagatttagagcttctacataaggcacacagcacctgcatatatattgtattatcttaatgctatggaaataagtctcctaacacacattcatttctaagcctggaa

SEQ ID NO: 50146 - DNA, 278 bp, Homo sapiens
  misc_feature 23: n = A,T,C or G
ccccccctcggggtacttctagnattaattaacgcgggatcttccaaatcaagaagttaacatcgctacaagaccgttcacagaatctatataagtttcaatttttcaatttcaactgtcccaagaatatattttttaaaaaattggactgggtgcagtggctcatgcctgtaatcccagcactttgggaggccgaggcgggtggatcacgaggttaggagttcaagaccagcctggccaagatagtgaaaccccatctctactaaaaaaaaaaaaaa

SEQ ID NO: 50147 - DNA, 340 bp, Homo sapiens
cgggcccccccctcgaaatacttctagaattaattaacgcggggggctgctggttgtctcccatttttctccagagcccggcctgagtcccaggtttggggaaccttgtcttcaccccactgctttcctatacaccgccatccactcagcactgactacattttggcaactccctctatcccatcaactcaggaagacacgtatttcaaaggaatataatgctagacactttacacgtgacaacacttaaccttcacaacaaccttgcaaaatcctgttcgttcactagttaggacgggatactgaagttctgaaggaggctgcctggggactctgtcac

SEQ ID NO: 50148 - DNA, 580 bp, Homo sapiens
  misc_feature 21, 75: n = A,T,C or G
ccccctcgaaagtcttctagnattaattaacgcgggggatgcattctagttgatgatatgcagtaatgctacagngaagaacccaccaccagacattttcatgaaatcagtattaaaagagtttcactgaaatcattcaaatacacctctgtcattctttttggctgtgggagtcctctgaggacatttgtgcttacaaacatacagggcactctggcctagtaaattaaacaaacacaacaacaatacgtttgtaaaaacaaaaacaaaggggggtggcaaggattagcattttgatgtcgctatgtgatgttcacccacttttctcccccgccaccgggttatgtgcatttgagtcatggtgaagatgatgccaacttaccaaacctcctcagtgagccaaggattgctgatctctgctgggtgacctgacgcagagtctctttccaaggcctccgttacctgagctttccttgttaagtttttggagccgcccacttcagaaattaacaccattcacagcccaggagcaacttaacacagctaggaagtcacctacaacatcttctcgtccgccttc

SEQ ID NO: 50149 - DNA, 354 bp, Homo sapiens
ccccctcgaaagtcttctagaattaattaacgcgggggttaacacaaagtctctggtaaaagaatgccagattttaatgatttttaacaaaaatactttccacttttgtaagtatttaacttattagtgtgcacttgcatctcacttgatctttgcattaatccagcaagagagataggccatatgttgtcatctctattagacagatgaggaaatagagatatttattactaaaaatttgagtaagaaagcaaacactgagccagaattggaactgaggtctgactcccacttctaactcttgagagtatggctcagaaatgggcatctctagtcacaaaatgtggctgagct

SEQ ID NO: 50150 - DNA, 352 bp, Homo sapiens
gcgggtctttaaatttagttcatacctcaaaatggatcttagcttctttttgtaaaatcaaaaaatataaaacttataagtgaaaacttaggaaaagggccttgtaaacttgggtaaccaccttttttgggcccattcccaaagccttgttttacaaaataaaaacctttttaaccgggcctaaaacaaatttttgtccttccaagggccctttattggagtgaaaagataaattggagagaaaatttttgcaatttccttatctaataaggcactgggatccaaaatatataaaaacctctcaaatttcaataataaaaaagcacccaccccagtaaagggtacacaaaat

SEQ ID NO: 50151 - DNA, 298 bp, Homo sapiens
  misc_feature 28: n = A,T,C or G
ccgggccccccctcggaatacttctagnaattaattaacgcgggggaaagaaaaaaagcagatcccttacaatataatagaacaaaaacaaaatctacccagttatttgctggattatctgaggcaatctctctggtcctagttaacttggaatactgaaagacactctatacgcctgcaggtgggagacacaaattgttcttcaactgaaaatactcttgaaatgtcaacctgcctcctgagaagtactgctgaacacatagctctaaggaagtgtgttcaaaaaaaaaaaaaaaaa

SEQ ID NO: 50152 - DNA, 570 bp, Homo sapiens
  misc_feature 28: n = A,T,C or G
ccgggccccccctcggggtacttctagnattaattaacgcgggatcttggagtcttctagggcttgggtccctccgtaagagttgacctgacacaaattagggcaattaataggttcacttgtatatagtttttgtagaaaacaagcaattgaatatcagcaattttatatcgttcaatgtgacatttgaattttttaaaattagaattaacaggacttgataacttattagtggcaaaagaagaaagagctaagtgattttgataaatgttgatctttggtgcttctcttgaattagacttcatggtaactaatgttaatatagacaacagtcatcacatatgaatctttgtttcaggcacaattctatatatatgtatgtatatatgaacaatatacattacgtatgtatacaaatatataaacaatatatatacttgtatattatatatactagtatataagtatataaatatatatacttcatatattattatacattatgtatgcttatatatatacttatatataatatgtataatatacttacaatatataaacaatataata

SEQ ID NO: 50153 - DNA, 573 bp, Homo sapiens
  misc_feature 10: n = A,T,C or G
cccccctcgngaatacttctagaattaattaacgcggggatactaacttgttcaagaaaggaaggagttccttggtaaagaaggaaacagggctctagaaggaagaactaataatgcatcagaggatgagtttggagtgaaggcttggataaaacttgacactcacatcatgggaaaagtggagaatgggacctggtctcaagtgtagcatatggcacagacagaaacttcaaactaacttctctaggtctgtgggtgtgtataagaataatggctgctggccaggcatggtgactcatgcctgtaatcccagcactttgggaggccaaggcaggtggatcacttgagatcaggagttcgagaccagcctggccaacatggtgaaaccccatctctactaaaaatacaaaaaattagccaggcgtggtggcagccacctgtaatcccaggtaatcaggaggctgaggcaggagaatcacttgaacctgggaggttgcggtgagcagagttcacgccattgcactccagcctggacaacaagagtgaaactccgtttcagaaaaaaaaaaaaaa

SEQ ID NO: 50154 - DNA, 312 bp, Homo sapiens
ccccccctcgtacagtcttctagaattaattaacgcggggtagaagattctggggactccaccaaaaaaaaaaaaaaaaaaaaccttttgaaaactaataagtggagtccaccaagaagggggaggatccaccttcttttttataaaaatcatttgggcccgggcttggtgggttcacgccctgtaatcccacctttttgggaggccaaggcaggtgtatcatgaggtcaggaaatcaaaaccttcttgcttaacacggaaaaaccttgtttccattaaaaatacaaaaatttacccaggcgtggggggggg

SEQ ID NO: 50155 - DNA, 386 bp, Homo sapiens
  misc_feature 28, 344: n = A,T,C or G
cgggcccccccctcgaaatacttctagnaattaattaacgcgggcctgctggttcaagaatgcccttgagtttggctttgccagcctgggatgcttccctcccatcgatggtgcccaccatgtccttctcccttgtgcctattgtaaaacaaaatgcaaggattctcatgcatccgccaccaccttctctcttgcatatattgtaaattaaaatgataggactccaagcaacattgtgcaaagggtacctaatcttctccatgtacaacaaaactggaaatctgaattcaaaggtgagttaggatgggggtcttctcactacagcataaaaaaaaagaaagaangaaaagaaaaaaaaaaaaaaaaaaaaaggaaaaaaaaaaaaa

SEQ ID NO: 50156 - DNA, 588 bp, Homo sapiens
  misc_feature 35: n = A,T,C or G
tgggtaccgggcccccccctcggggtacttctagnattaattaacgcggggcggtggtacaactacccacccaagcgggatttaggatgcatatagacataacagcctatatttctgggaactacagaaaagataagagatcaattttaaagtgcacattctaggtcatctataaaaacatgaaaacactccagaagcagcaaaacagttttcaccatgcatgaaacacacacacctgactctagtatctacctgtccttaattcaatttcccccaaccccaccactaaggtcttcctaccccttaggggccagaaatagctgctagccagggaccccacctcctgatcagtctatggtttgtggccggaccaggtgggtttggcctcatctctttggtggggggcatctggacctctcattctgtcaactgtcccatgaacagcacctagctgtggctgcatacaaaaactgtacatctcatcacaggatccatactactggactaactattgaaaagtgacgtcatgtcatatccttcttcctcgaaccactaaaaggtttgtgattgttcacctgaatccgttct

SEQ ID NO: 50157 - DNA, 253 bp, Homo sapiens
aagattcagggaagacagcgatcagaaatgaagaattcgtcttgagaaattacagaggatttaaaccagaatgtaaggaatagatattctagcaagatgaatgtggaaagtgatagtgtgcatgtaatgagtcttgaagctggaaactaggtaacaggctctcaaatagtacatgtgaaaatcatgacaaactaaagcaatggctgtggggctgaacggaagttctctacaaaaaacatctgaaacttgaatg

SEQ ID NO: 50158 - DNA, 587 bp, Homo sapiens
cccccctcgagaagtcttctagaattaattaacgcgggtggccaacaaaggccatcttaatagagaggggaggaagccagatcgaactccaagagtgaagagtggaagttgaggaagtggagagggaatgctgactgctcttttgggaagtatggcttcagaagggaagacttgaagacataggagcagagataataatccataaaataaaaacaggcagccgggtgcggtggctcacgtctgtaatcccagcactttggcaggccgaggcgggtggatcatgaggtcaggagttcgagaccagcctggccaatatggtaacaccctgtctctactaaaaatacaaaaattagctgggcatggtggtgcgtgcctgtaggcccagctacttgggaggctgaggcagaagaatcacttaaacccaggaggcagaggttgctgtgagctgagatcgagccactgtactccagcctgggtgacagagtgagattccatctcaaaaaaaaaaaaaaaaagaatttgagactagcctggccaacatagtgagaccccatctctactaaaaatacaaaaaatagccgggcgtc

SEQ ID NO: 50159 - DNA, 579 bp, Homo sapiens
  misc_feature 17, 28: n = A,T,C or G
cgggcccccccctcggnagtcttctagnattaattaacgcgggccttatttaaaagcatcaaaaactctttcagaaagtactactcagctcctcagcaaacttcctttctattactctctcatgaagcctgaattctcttcaaccctttcacaaggcagttgccatggcagtaatcagatatgactctctaagtccaaaattacagcctttattaaagtggtgggtcctacgcgtagaaagtcttttaacccagaagatagctgagctacttcaaatcaccacagaacaaaatacataagttggacagaggaaagtgttgcagaaataattcaagaaagaagaacaagagtattaagctaccccatgagtgattttataatttttccagagtggggttagtgttactgtaagaatacaaaaaaaagatggtgaacgattctttggaataattccattggaagaattatctacattttgagaaacaaatgtttttgaaattcaagcgtcaactattaaaacttaaatcttaggcccctctaaatttttaaaaatgttaactataaacgttataatatttt

SEQ ID NO: 50160 - DNA, 566 bp, Homo sapiens
  misc_feature 28: n = A,T,C or G
cgggcccccccctcggggatcttctagnattaattaacgcggggtaggggctgatgtcaccatgtcagcaagggatttgaactttagagaattgagttttctcaccaagtcatgtagagcagggatcccttctaacggaagcccatcctctcccactctgctctcttgccttttgacacgtgtgacattttatctaaacaaattttgtgaccttcctgaacaaaacaggttgttttaggatgggccagtgtttctggacacctgtactgttcaacacttgcactgtctaagaacatacgctgatattcatgtcatttacccatccagcccctgttggtgggaagctgctatgtgtgtacagaatgactaaaccagacttttttatttgaccctgtttgctacaaacgtaattgaataattggggcctggcagatcggaagcaataggaacaatatatttcaatccagtactctgtgagcagcagcatttcacagagccagaaataatttagcctgtagagcttattaagaagtgcaatgttcgttatgcgtaacttcagttctgtt

SEQ ID NO: 50161 - DNA, 584 bp, Homo sapiens
cgggcccccccctcggaagtcttctagaattaattaacgcgggatttgcctgtgatccacacaaccatcctataaggatattacctcatgtactcatcacacagtttcagtaagtgtcaactagcgatcactttataacctctacctacccctcacccttgcctatccccagtaccctggttattttcacacaaaccccagatagaacatcacttcatctgtcaatataccttataatgtttgttggcttcaccatgtctggaattctaagtaaacaaacttggttctggacgaggcacacagttgaacaccgtgcctgtggtccaatgtcagaacaaccgttctcattccacggatgagctgatccccttcaggctatagggggcgctggagctagagaaggaatgacagccaggcatcctgctgagaaggcggcctgagagcggtgcagggagtgatctctgcggccttggcctcctgcggagaaacctggaaaaaggatgcctggtacgactgtttgaggccaccgcccagccaggctttcccagtggaaacctgtatccagacctaaaactgtacacaca

SEQ ID NO: 50162 - DNA, 617 bp, Homo sapiens
  misc_feature 28: n = A,T,C or G
cgggcccccccctcggggtacttctagnattaattaacgcgggatcaacaccattagaaaataattgtagtgatgcctcatagttatgtagtaagttataaattaatttctcagccgggcacggtggctcaggcctgtaatcccagcattttaggaggctgaggtgggtggatcacctgaagtcaggagttcgagaccagcctggccaacatgctgaaatccagtctctactaaaaatacaaaaaaaaattaaccaggtgtggtggtgcatgcctgtagtcccagctacttgagaggctgaggcaggagaattgcttgaacctgggaggcggaggttgcagtgagctgagatctggtcattgcactccaggatgggcaacagagtgagactttgtctcaaaaaaaaataaataaaataatgtctcattttattctcagtgttcctgtgagtgagccaggccagggattttatatatttagtgtggtggttgtggttattctatggatacagccaattttgtattttggcttaaaaaatttatgttggccaggcacagtggctcacgcctgtaatcccggcacgttgggaggctgaggcgggtggatcacctgaggtc

SEQ ID NO: 50163 - DNA, 591 bp, Homo sapiens
  misc_feature 28, 44: n = A,T,C or G
ccgggccccccctcggaagtcttctagnattaattaacgcgggnaatcacatcagagacgctttctaggctgcagatgtaacatgcccaaaagaggagctgcatcataagccattaaatttcaatacagcgatcagcaagacttaggaaacggacctttcactccattctgtgcctatccaaggcaaccatcagggcttaccactttcctcaccaaaaacagacacttcacacaaagatttctacgtgatgttttccaatagctttattcataatagtcaaacatgaaaactacctgaaggaacatcaactagcaaatggataaacaaattgtggtacatcatcaaagtggtacactacccagcaatacaaagcagcaaataactgatacacacagcagagatgaatcacaaaactacgctgagtaagcaaagccagacacaaaagacatcacacactttaggaggctgaggcaggcagatcacctgagatcaggagttcgtgaccagcctgaccaatatggtgaaaccctgtcaccactaaaaatacaaaaattagccaggcttggtggcatgtgcctgtagtcccagct

SEQ ID NO: 50164 - DNA, 323 bp, Homo sapiens
ttaattaacgcggggggtgtgagacccttctcatacagggctctggagggaaaggaataaacaagatagacaactcttttgaggccattttctgcctaatctgacttttagacggaaagagaatccatgtattcctgactaaacagatgccaatacatactggaatccagaaatctaaacatatcatatcttatctcaaaaggatagaacacaaagcagcaagaaaagttcacttaagtataagagtttgcttcacttactagaaacaaaaagaaccacccagagaaactgtctgaactagggatcctggtagaagaaatact

SEQ ID NO: 50165 - DNA, 474 bp, Homo sapiens
  misc_feature 32: n = A,T,C or G
gtaccgggcccccccctcggggatcttctagnattaattaacgcggggacatcatttaatttttttaggtttttttaattgattattgattggttcatttgcaggaactgactattagtaatcaaggatacaaattgttaagagaatatgttacagagaaaaacttgacaagctagacttagatttttgtcgttaaagataatttgtgggatatgatttttataaggagttgcattaaatagaatgtcttacacagatttaagaggttaataattataaaattaagatgagttcttataaaatattcttgaggtataataaaattatacttgtggagtatatctttgaataacatttaaaagcaaactaatactttccaggtaaaataattatcaacataactttttaaaaataattcatagtacttcaggttatttctatgtttgacacattaacttaaaaaaaaaaaaaaaa

SEQ ID NO: 50166 - DNA, 603 bp, Homo sapiens
ccgggccccccctcggaagtcttctagaattaattaacgcggggtgctactgacccctccatatgcttggtaatgctcacttgccttactcactcacattctgctgggcagcctggttcctaatggggggctcggggacccctaataaatgatctcctgatgacaaggttaatctgaaagtgcccatagcttattgaagatgaacatcttacattcacgtggtgatggaattcatggacatgcactgatatggtatatgtcctgctcatctaatcaaacattactgtacctgcatataccattattaactctatgtgggtattaacacttttttcctgcttaccacacaataggataagagatgctgtgttattgtatagaatatactaattcatacccagagcctcttaggatgtctaaagaccggtcttgaactcatcgatccccagaatcataacaccatatctgcttcataatctctattcaaggaatgtgtactcatgtggatgtagtttaagaagggctgccttgaaggcaagggttctaggcattcattctaaaactaccaccaggtcctcatacaaaattaagctctctggttac

SEQ ID NO: 50167 - DNA, 450 bp, Homo sapiens
  misc_feature 28: n = A,T,C or G
cgggcccccccctcgaaatacttctagnattaattaacgcgggattctccccatgtgtattattccccactaccctggaagttcctgtaaagtcttggtactaggacaaaaaggcctttggtatataaaatgttttgttaaaaataagtttctttcctttttttaaaaaaagtttaatgtaggcactttatgaaatgtacttttttggaaagtcatattgaaaatatattaagaatataaggcttgttaatgtaacatgccagggtgaacgccaattttgttacttttctctgaatataaacctattacctatagttatttaaggagatgggttatattttatctttgttttgtctgactgacctcaaagaggtagataatgtacaactgacttaatgttatccacttattagaataaaaatcggtcatccttaagcaaaaaaaaaaaaa

SEQ ID NO: 50168 - DNA, 594 bp, Homo sapiens
  misc_feature 27, 568: n = A,T,C or G
cgggccccccctcgaaagtcttctagnattaattaacgcgggcccagtgtgcccagatgcctccacctcattgacggggatgcctgcgggagagaaggagggagagtgccattgtaccaacttgcttgggtaaatgaacctcaggaaaatgagttctagattagtaatagcaatgaggatgtcaataaaattctacctgacctcccattaaccctgggaactgttaacttcagtgttagctagggatttcttagacatgcatgggcttaaagttgtttcaagaaattcacttgcttagaattcagtgagtttttttgggaagctggtacaatctgaacaaccctttttattgcttactttgcgttttaagggtctcagttaatgaagtatctcctagcacaggggatgagaagaggggaaagaaggcagggcatcaccaatccactattcccttttactaatcctcacaggaaaagaccatcctacaacatcctccaagtccagctggctatctgttctgcctcatttcttctatgttttattccaccaacacgaacaggcttagttntccccagccctgaacagagctctgtc

SEQ ID NO: 50169 - DNA, 605 bp, Homo sapiens
cccccctcgagagtcttctagaattaattaacgcgggcggatcatgaggtcaggagttcgagcctgaccacatggtgaaatctcgtctctactaaacatacaaaaattagccggccgtggtggcacgcgcctgtaatcccagctactcaggaggctgaggcaggagaatcgcttgaacccgggaggcggaggttgcagtgagccgagatcctgccactgcactccagcctgggcaaaaaagcaagactccgtctcaaaaaaaaaaaaaaaaaagaaattctctctaaagactatctggatagcgctggtgctgcagactgcgctgcccatcctccctgcaggagttcctctgagctccgtggggaacagtgctggccccgagtgcgcacctggagcgctgtgctctgcggtaggcagcctgtggtccagggcccgctgaagccatgccttcgaagcgctgtgggcatcgtgaccaacggttttgctgtctgagagcttaaaggtctctggtccaccatcatacgtacagaacagtctatatttcttttcaaaagtaatttttaaggccgagcgctgtggctcacgcctgtaatcccagcactttg

SEQ ID NO: 50170 - DNA, 473 bp, Homo sapiens
cgggccccccctcgaaagtcttctagaattaattaacgcgggtagatcaagtcacagtggttttctttgggaattcactagtttgtccttcaggcaggttgggagggaaccaagcctatttctcttaccacaatcatggatgccctgtggccatttctctctttggatataaacacccttttggggggctttggaatctgaagctcagacacaagaccactcttccccattcctgtatatgtggtctcaagtgataactaaattatagggcatctaaagacagagctggacaatcccttacaccaagctgtgtgccctcctcctgcatcacatgatttattgtgattttgccaggtctcttcagctgaggaggcctgccctccatgtatcacatgagactttacaaacagtctggggatgctgtcctgtacccgcatccaggagtagatctctgggggggaaaaaaaaaaaaa

SEQ ID NO: 50171 - DNA, 586 bp, Homo sapiens
  misc_feature 27: n = A,T,C or G
acttctagaattaattagacgcggggnatttctttttccaaggggaaaaggacatagggaaagaggaaattctgttttgaatagattctccagtttcaatggtttagattagaagcataccgaaaatgtaaattgagccatttgctcttttggaatttattgcggcttaggcctctgggcctagtgtaatacctgatgttcctaaagatttgaatgaagaattaatgaatacgtagtttcttggggttgatggggagtacgtaagcagggacttactattctacctgctgatttaatgtccatgaaaataatcatacactaaaatgttaataatacatacacacaaacggactagtgtacatggtggacattttaaactctttcaccaaaatatttattgattaacatctgtcagggccagatgaggtggttcatgcctgtaataccagcactttgggcagatcacttgaatccaagagttcgagaccagcctggccaacatggtgaaacccagtctctactaaaaatatgaaaaattagccaggcatggtggcgtgtgctgtccttccagctactcaggaggctg

SEQ ID NO: 50172 - DNA, 603 bp, Homo sapiens
cgggccccccctcggaagtcttctagaattaattaacgcgggcatctaaaatacagcaaaattttttccattgcagtttttaacaggccaaattcaggggaacggcagttgggaaattctagatgtagtcagctggaagcattgaataaaaggctaatatcaggatcaagttgtgcttgtccaggcaatgttgggcccacattccaggtcagctaaatttgaaagagaactaggaatgagaagaagggaggaaagttgtgtccttactggaactccagggacagaaataacagagttctggtaacatcagtgtgtgtagagataggagggccacacacacacagagctcttctttctcagggatggtggtcggctgtatggtgtatcctggtctatggaacaggaaactattttgtaatgatgcttacctgggtacatttaaacagcaatgcatattcttgtgtgacatttttgttttgaacaacctaagacagaatttcaggattgtcctcacagaacctaaagatagaacgtaattaaatgaaaccaatcttcagttcattgactgagcttggtcttctctgcgcaaacagcctctgcctg

SEQ ID NO: 50173 - DNA, 265 bp, Homo sapiens
  misc_feature 24, 41: n = A,T,C or G
gccccccctcggggtacttctagnattaattaacgcggggnaaacaaaactctttctaaatcatgaagagtaatgctgagccaccatgcctggctgagaagagttttaaatgttttgttttgttgctgttttagcaggtaaacatttaatttcagcttcacttggcgggtgtttttttctatgaggtatgatcaaggtcataagtgagaacgcagttttgggcttgtgtcccctgtctcacatggcccaggaaaaaaaaaaaaaa

SEQ ID NO: 50174 - DNA, 561 bp, Homo sapiens
  misc_feature 548: n = A,T,C or G
cgggccccccctcggggtacttctagaattaattaacgcgggggactacttagtttttattctgtttcgatctcacaaaaagtagccactgcaaaccctatgtgcagaaagttagaaaactgttcttcaacatttagatgcatgatgaccagcagttacttcttttggtgtctgctaaatcagtttgtacatgaaccacaatttcttacccttaatatttccctttgcgaagttggatttattcttagccataaagtgacatagaggcaatattgcttatgtcccagaaaccatgctatttacacaattgaactaaactcaaattaggaatttctcggtttcttataagcaaagataaaggtgtgagctcaagtaatggatgaatctgggagtaaatctggtttcatggggagttctatccagaagtgcaaatgttatctttgggacccggtttctccccttcaactccagtttctaatctctacttccatctgagctggctccattctcaagctccatgtgtggtcagatggttaccagaacctccnagtttatatcctc

SEQ ID NO: 50175 - DNA, 552 bp, Homo sapiens
cccccctcgagaagtcttctagaattaattaacgcggggccatgagcaggtgaaaatgaaggctctgatattgtgtggtggtgtcacaggatggtgggggcggggcagaagtctcctgttggtgttctgatgcctgttcagctttgtcctcaggaaggtttggtcatcttggttctgccatcctcttgccttcctacggcagcagctgttcatggcactgaagatgtcccttcactgtcccaaaactggcactagaagtggctgggcagggggaccagagtcataggaagggtcttggagtcatcagatctgggttccaggcatggtgtgccttttcttggcaggattgatcttgagcaagccaatgaacctctgcatcagtttccttatgtgtgaagttagagtgcttggctgtgccacctgtaattccagcactttgggaggtcgaggtaggcagatcaccgagcccaagagttcaagacaatcctggccaacggcgaaactctgtctctacaaaaaatatacaggcgtgttagcatgtgccctgtatcc

SEQ ID NO: 50176 - DNA, 129 bp, Homo sapiens
cgggccccccctcgagagtacttctagaattaattaacgcgggactgcagaaacaacaaagaagacaggcaaagatctttgtctttatgtttttttaatcattgtgcagtgaaccatgtagatattgac

SEQ ID NO: 50177 - DNA, 596 bp, Homo sapiens
  misc_feature 15, 26: n = A,T,C or G
ggccccccctggggngtacttctagnattaaggaacgcgggaagttggcgaatactgtgagtcgtcttggcccgcagagccctgacgcatagagaaatgcatgtggtatgagggacagccacccaccagcagcctcgggtgtgggaaaatattccttcaactaagggaaggcagcccaaactctgaaaatttgatcttcttttgccaaagagccagcaacaagattctgggttccatcactgttattataactgtagggggaaaataatgacttaattgtaaaccaatgacctcaccctaataaccatgttctaatcatttctaaagaaagctgccttcttcattcctgccaactttcaaatgaaacagatgacattggaagatgattatattcattagcaattattccatgaaaacagtgagaatttgaatttaccctacacttaacccagacaactaaaactgcagtgcaacctcgggccaagtgttgatcaacactgtgtggggacaatgtttagacctaggctttgagcatttgagtgtttcctttccccagtgaggcactggttcaggaaaaaaaaaaaaaaaagcggccg

SEQ ID NO: 50178 - DNA, 603 bp, Homo sapiens
  misc_feature 574: n = A,T,C or G
ccgggccccccctcgaaatacttctagaattaattaacgcgggtgtggtggtgcacaacctgtaatcccagctactcaggaggctgaggcacgagaatcacttgaatggggaggcagaggttgcagtgagccaagatcatgccactgcactgcagcgtgggtgacagaacaagactctatctcaaaacaaaaacaaacaaaaaaattatataaacatttctaaatgctcctctcaatttctgtacattgcattacaaatcagttcatcaatcaccctctgagtgcactttatctcccttcttcctgaaagctggctcttccttcaggcaggagcatctgaacagggagaagtataggaacaaaacaggctccatttccaggaaacaacaccatggaggggatgtagtcagatttttgttatgatcagctatatgaggagacaataaattaaagggaaaaataataatttcagaatgatgggttaatgttgtttaattataaagggcagaaaaattaatatattggcatcaagtttaaacattactcggaggtccatgaagatatttcttgagtntttgtccattgaggcaacgtattatacct

SEQ ID NO: 50179 - DNA, 343 bp, Homo sapiens
ggccccccctcgaaagtcttctagaattaattaacgcgggcaatatagaaaaaattttaagatttgacaatgacaatgtaagctttagacaggatagacctaagtcataaaagtcttagagtctgagccacggaattctttatttgaaaaagcatctgcccagcaattatgaccaaattggttaaagctgctaaaatggcaactattatgtaaggtcaaagcacttgccggttcattgactgccttagacatcacagtgtgcaataaaatgcttttttcttaactgtcatttcctctaatttgattgaaatagagaagtaatttttactggaacagaattttg

SEQ ID NO: 50180 - DNA, 346 bp, Homo sapiens
cccccctcgagagtcttctagaattaattaacgcgggcaattatcaatgaaacatgaatctctggtatttggctacagttactgaaatatttataaaacaacctaatttattgacatttcattccatttatcttatttccaaggttattgtgagaaaatgtgctgtagttatactatcaaaaatttggcataattgaaaaattcctggtcctttgtgaatagtacttttatttaattgtattgtggaaacatccttttaataatccactctagactcttgtccaagaagcatattaaattcaacagtatatagtttatattgaacctttagttaagcttatggtgt

SEQ ID NO: 50181 - DNA, 255 bp, Homo sapiens
  misc_feature 229, 240: n = A,T,C or G
gggccccccctcgggagtcttctagaattaattaaaaaccgtgcagacttttaacatgatcaattttgctgctgtcattcatttccctttaatgaagtgaaatttaccccaaattatgattctcttctttctccctctttctacttctgttttatgggagaagccagcttttaaactctgtagttggaatcccctacccctaccccgcctaaatttatctggcattatntctctcctatntgccccttattctga

SEQ ID NO: 50182 - DNA, 578 bp, Homo sapiens
  misc_feature 28: n = A,T,C or G
ccgggccccccctcggaagtcttctagnattaattaacgcgggactcagcccgggttctattgtctgcttaggcctgatgctcaacactgccagggatgaacagcaccgtgggtgacattgtaaagcagcaaggctttctcagccctgatataaacttcacttctgacctgctcgggaaagggctatgatatgcacctaaagaaaaacatcttcctcaaaagataacctgaattaggccacgatgcctgaggcatcacgcactgtagatctccaacctctattggggaggactgaggcgagccacatcactctgacgtcaggagttcgagactagcctggccaacatggggaaaccccgtctgtactaaaaatacaaaaataagcctggcgtgatgacgcatgcccatagctccatctactcaggaggctgacgcaggagaatcgctcgaacctgggaggtggaggttgcagtgagctgagatcacgccactgcactccagcctgggagacagagcgagactccgactcaaaaaaaaaaaaaaacagcggcccacaccgagggggaactgcaattcgc

SEQ ID NO: 50183 - DNA, 597 bp, Homo sapiens
ccgggccccccctcgaaatacttctagaattaattaacgcggggatgtatcattgtgtattggtaggaataaggaccaaggttaataaataaaatatgatggggaaatgtgaagtcctaaatttacttaaatatgaatccataaattttattcacaaatacaaatccctaaataaaaaatcagttaggaaaatacaaaatggtaaagacctgatttggtagtatttttctaaaaacaaagttttcataagtgataagttcaatgtgtatcagtagagtgatatgactactttaaaaaagatgcaaaaacaggtgcattagtagaagtaaaatgtacagatggtgaaaattatgatattttgtacttcatttttgtcaatctgggtatagaggagtgtttcctctgaagttttaaaaaggcactgaccacaaaactgcaagaaatgagaataggtgacattcatggagagggttgtaggaatcaagacatacaaggaatgattgaataaaccatatgtttaaactagagaagaaagaaaaaatgaaaaaaggtaagaggaataggcaagctccttaaattttgaaagggctctgacac

SEQ ID NO: 50184 - DNA, 548 bp, Homo sapiens
  misc_feature 38, 507: n = A,T,C or G
ctggggtaccgggcccccccctcggaaatacttctagnattaattaacgcggggggtcggggcggcagctaaatggcatggagtttctttctgggtaataaaatgttctaaaactggtggtagctttacaattctataaacatatcaaaaaccactgaatagtatactttgaatggataaaaggtgtggtatgtgaattacatcttaataaagaagtaacaaaatggtcacttacatttttggttacactttactacatttatcaggaaaattgtatgccattttggtcttcacaaaggccttgaagtttatccctccaaacagaaactctttctttaaaggagacaaagataaggaaggtaggaaaagaagggaaaccttcataactgaatggctaccattatctaacatatataattttacttattcattcttatatttttttgtttgtttgttttctgagacagggccttgctctgtcgcccaggttggagtgcagtggcctgngcgacagagcgagactccgtctcaaataaaaaaaaaaaaaa

SEQ ID NO: 50185 - DNA, 367 bp, Homo sapiens
cgggccccccctcgaaagtcttctagaattaattaagtgaaaatttagtgatctagtaaagcctaaatctagcaattcagcctaatcttactaactgaatacattttcatagagcatttgtacattttaatgatgcagttggctctgaagtgttccatgaaaaaggtggctattttgctctaaactattagtaaacagcagtcaattacaaatggctctaggaaaagaacaaaattacacaaaggaaaaggcaaaagcaagggcacaaacaacaaggttgctcgtctgaaggatacaactaaaggaacacgtggtctttggccagtgagcaaataagggtctaattttattgtattctctaacacct

SEQ ID NO: 50186 - DNA, 356 bp, Homo sapiens
  misc_feature 13: n = A,T,C or G
ccgggcccccccntcggaatacttctagaattaattaacgcggggtttttgtggtggaattatgatgactttgcaaaattttcttcactttctacattttctaaaatggatatgtattactccttaaagatgacatgtaggttttatcttatataccagctctgatccattgtgagtagctgctaagaggcaatgttgtaaaggttctgagacaaactgggttagcaggaaagagtataattgaatctaattgtcatgataggtggcttggagaggtgaaatccacaagtcaagatcttcttattttagaaaatgaagttggacaataattcatttaaatggtgtaatgtagcttt

SEQ ID NO: 50187 - DNA, 350 bp, Homo sapiens
cccccccttcgaaatactttctaaaattaattaacgcggggagtagggttggtaaactaactgtagggtactatgctcactgccggggtgatgggaagatttgtatctcaaaccttggcttcatgcaatatacccatgtaacaaacctccacttgtaacccctgaatctaaaataaaagttgaaattatattaaaaggaggatatcagagttataaaatgattactggtttctggtttgcctaattcctgacctcctttattcagagacatttgcatcaatcttttcatctgtagcagatttaaaggggtgagagctgagattcccaaacagatacctacaggggaggta

SEQ ID NO: 50188 - DNA, 276 bp, Homo sapiens
  misc_feature 11: n = A,T,C or G
cccccctcggnagtcttctagaattaattaacgcggggcctcacttactgtggggatggagtccccacggcccctctcctctggagctttgtggcaaacttaccccatgggctgggagagaggaatgagaatctcagtgggggctgggtttggtggctcacatttgtaatcccagcactttgagaggctgaggtgggtggatcacctgaggtcaggagttcgataccagcctggccaacatggtgaaactgtgtctttgcaaaaaaaaaaaaaaaa

SEQ ID NO: 50189 - DNA, 460 bp, Homo sapiens
tccaccgcggtggcggccgcttttttttttttttaacaataattttaaatctggggttgctaaaacctgcaaatgtgaaacccaggaatttggaggcccaactgtacttttaccttattatgtaggctttgctaattttaatgactaaaaggttattttatttcttctaaaatttcaacaacagttgaccctcagggtcaaagtttccggccctaaattaaaaaaaatgctttttattaggacaggaaaccaccttaacctttttttattccaccctactttaaaaagtaggaattccttcaacaaaattttcgcacatgcctatccaatttcccaatgactaaagcaataacaacagtattgataataatgaacacatttttcatacttactgggtgccaaacactgtcctaagtatattgagtagtactgactggaaataaacactgttcctaaaact

SEQ ID NO: 50190 - DNA, 494 bp, Homo sapiens
  misc_feature 28: n = A,T,C or G
cgggcccccccctcggggtacttctagnattaattaacgcgggggctgggtgtctaaaacttaaaaaaaaataaaaacaaaaacagttaaataacttgtcaatccaacagtcaaaagaatccgtattggaaagatatgacatactttgtatctaacgggatgtaaaaccaaatcttccatactaaaaacatgtttcaggctgggcgcggtggctcatgcctgtaatcccagcactttgggaggccgaggcgggcagatcacaaggtcaggagattgggaccatcctggctaacatggtgaaaccccatctctactaaaaatacaaaaaatcagccaggcgtggtggcgggcgcctgtaatcccagctactcgggaggctgaggcaggagaatggcgggaacccaggaggcggagcttgcagtgagccgagatcacgccactgcactccagcctgggtgacagagcgagactctgtctcaaaaaaaaaaaaaaaa

SEQ ID NO: 50191 - DNA, 499 bp, Homo sapiens
cgggccccccctcggaagtcttctagaattaattaactcgggcatatgttataccacagcccccgtggtataagaaataagaaatgcagtggaagtgataaaccacagaagatgaaagagttatacatggcacttttggcccacctagggttagggtcagagttgaaagttatgaagaaatcatccaatcaaatcccttcactaatgctggccagacacagtggctcacgcctgtaatcccagcactttgggaggctgaggcagatggatcaccttaggtcaggagtttgagaccagcctggccaacatggcaaaatcctgtcctactaaaaatacaaaaaatagccaggcatggtggctggcgcctgtaatcccagctacttggaaggctgaggcaggagaatcacttgaacttgggaggcagaggttgcagtgagctgagatttcatgccattgcactccagcttgggcaagactctgtctcaaaaaaaaaaaaaaa

SEQ ID NO: 50192 - DNA, 436 bp, Homo sapiens
  misc_feature 411, 412, 430: n = A,T,C or G
cccccctcggggtacttctagaattaattaacgcgggataggtctaacaaaaaaacaaagccattcatctctgcagaaaatcatgcatctgctttgccaccaatttagcacactaattgacattatacaacaatatgaccatatataaacctttcagtactaattcacttatttacttacaatttaatttgtttaaataatcactttagcaaagcagatctaattccttaaagtatctacagtctaaaattcacttaagtattaaactcattgtatcttcagaaatgttcaatgccagcatttttattgtccggattggcttttggcacttatctgttacaataacaatttttagggtggggggagcattttctaattggataaaaatacatccatttgaactggactggnnaatctatcttaataatanggggag

SEQ ID NO: 50193 - DNA, 586 bp, Homo sapiens
  misc_feature 25, 573: n = A,T,C or G
ggccccccctcggaagtcttctagnattaattaacgcggggcatgaattcatgaatttctggatatttcttcaaatagagtatcatgtagctggcagtggattgggctgaccttaatccaggtctttttcttcttaccttttcaaatgacattctgtcacctcattctatatttatatatatacatttctctatatgtgaaattctaggctcatatatctatatatagatataattccagacttgtttggattttcttagtatccaacaaggctaatatcttactttcagaagttggggaatgcctttaaggattctataccttatttctattttctagttgtgacagggtgcaagaattccttaatataggagagacatgcggggcattatgggaaccttgctttgggggactactttgaatatcccaaactttgggtttttccttctactgcctaactttactgtgcctgctgggatgtcaaaagtagaggatcaggacttcagttccagggttacaccaaggcaaccagtagtatcagaatggaattactacagtagtgagatccatgtntgcatttgtgata

SEQ ID NO: 50194 - DNA, 251 bp, Homo sapiens
cgggccccccctcggaagtcttctagaattaattaacgcggggagaggttcaaagggtgctggtggccatgtcgtaagtactgagaatgcctggctgccgttggcaccatcatcaactggggtcaggcaggggtggcaggaaggcctgggggcctttccttggggaagggcacgcatcccctgtcataaaacctcccatggctcccaagagtacatggaataaaatcctcaactccaaaaaaaaaaaaaaa

SEQ ID NO: 50195 - DNA, 342 bp, Homo sapiens
  misc_feature 43, 51: n = A,T,C or G
cgggccccccctcggaagtcttctagaattaattaacgcgggnaccccttngaaacttactatttttaagtttttcttttgtgtctgcttaggaaggcagagagaatcactggctagtcatgatgcttaaattcattgggatttcctggaagcttagctttggtatcatttgataatcacaaagagcatttagaatgaaaagatataggccaggcatagtggctcacacctgtaaacccaacaccttgggaggccgagggaggattgcttgagccccggagtttgagaccagcctgggcaacaaagtgaagtgagaccctgtctctgaaaaaaaaaaaaaaa

SEQ ID NO: 50196 - DNA, 584 bp, Homo sapiens
  misc_feature 561: n = A,T,C or G
cgggcccccccctcgaaagtcttctagaattaattaacgcgggggaataggattaggtaaggattctcaaagatcttggaataccattcccagcttggtcatagttttgattataatctaatgactatgtctaatgtaggaaatatagatctattttttgaactgaggatgtcactttgcctgggtgtgctttatacagattatggcatattgaggtttcagttagaaaaatatatgggacttaacccttcaaattgatgggaaggaattatgtcattgtaggcttttgtgttttgcagtcattgtacaaagcactggaattggggaaatagcagggtgtttcccccacaattagaagcagtgttgcttttcattttccttttactgattagcactaagtagacattaacctatatgaatttttcaaaaacagcatttagggtccacatttattttaattctgatcttctctaatctaattggtgaaacttatggcgaaaaatatgcatagttacttttgacatagatttgtttaagcatgaaagctaggaattgattaanaccaatacataatatttagtttt

SEQ ID NO: 50197 - DNA, 465 bp, Homo sapiens
  misc_feature 427: n = A,T,C or G
cttctagaattaattaacgcggggtggtaaaactcttcaagttcaaagaaatgaggttccgaatttagagttccggaatatcataatcaccaacagtaatgccactggtgaaagggtcaagccgggcacggtggttcacgcctgtaatcccaacactttgggaggccaaggcgggtggatcatctgaggtcaggagtttgagaccagcctggccaacatgacgaaaccctgtctctactaaaaatacaaaataagccgggcatggtggtgcgtgcctgtaatcccaggtactcaggaggctgaggcagaggaaccacctgaacccaggaggtggaggttgcagtgtgctgagatccattgcactccagcctgggcgacaagagcaaagacctgagcaaacagctgagaccactgcactccagcctgngcgacaagagcaaaactccacctcaaaaaaaaaaaaaa

SEQ ID NO: 50198 - DNA, 434 bp, Homo sapiens
  misc_feature 25, 38: n = A,T,C or G
ctgggttaccgggcccccccctcgngggtacttctagnattaattaacggcgggggcagaggaatcgggattcttcttttggggcaaaattaattttcctttctctcttttaaagtgagatcatgattctctgaaatgtattttcttctttgtgaagtgtcctcgggttttgtgttatcatctgggcaatgtaacggcctcttcccaagtgttccctgtaacgttgcgcaagtgtaagagaagatccattgctctgctctttgggggctcgagtttccagttaaagcatttcagcgcttgtttttttgtaccaattttttcaactctaacgaccttcctgagacactacaaacaaaccaacaaactctttgctcagaagccgctccattaactcaaaggtttatggacagaaaataaacaattctaaattcccc

SEQ ID NO: 50199 - DNA, 180 bp, Homo sapiens
  misc_feature 102, 104, 107, 109, 111: n = A,T,C or G
ggcaaatggagcatttgactatcccaaggcggaaaaggcaatgtgcagatggaagcggttattgacacattatagggataataactaatttttttttaggancnacnangntttatacgatggactgggcattttatatatgctgtctcagtttatcctggcaagagccatgtgaagtgg

SEQ ID NO: 50200 - DNA, 443 bp, Homo sapiens
  misc_feature 27, 38: n = A,T,C or G
cgggccccccctcgaaagtcttctagnattaattaacngcgggaaggtagacagaagccaggtcatgctcagccctgaaggccaggctcaggcagaacttactagaggttcagagtgatgggtcctagaaagaggctgacctgggctgggcacggtgtcccacgcctgtaatcctagcactttgggaggccaaggcgggtggatcacgaggtcaggagatccagacgatcctggctaacacggtgaaaccccgtctctactaaaaaaaaaatacgaaaaattagccgggtgtggtggcggcgcctgtagtcctagctgctcaggaggctgaggcaggagaatggcgtgaacctgggaggcggagcttgcagtgagccgagatcatgccactgcactccagcctgggcgacagagcgagactctgtcacaaaaaaaaaaaaaaa

SEQ ID NO: 50201 - DNA, 579 bp, Homo sapiens
cgggcccccccctcgaaagtcttctagaattaattaacgcgggacagatgtggaaaccgaggcctagagagggtcagggacttgcctgaggtgaccccggcggcctctgggcattttgaggtttattctcgcatagctccctcacctcatcagcttgtggggagccgatcagagatagctgtggtcccctgggcagcttcctgttggcctgtcttagaattttgctatatttggggggtgtgaagagtggatatagatgtgttaaaactgtttaaagtggagaaggaggaccgggcctggtggttcatgactgtggtcccaacgctttgggaggctgaggcaggaggatagcttgagcctgggaggttgaggctgcagtgattgcaccactgcactccagcctgggcgacaagagtgaaaccctgtcttgaaaaaaaaaaaaagtggggccgggcatggtggctcacacctataatcccagaactttggaggctgaggtgggtagatcacttgagatcaagagttcgagaccagcgtggccaacatggtaaaaccccgtctctactaaaaatatgaaac

SEQ ID NO: 50202 - DNA, 406 bp, Homo sapiens
cgggccccccctcgaaagtcttctagaattaattaacgcgggtagcaatctaacccatatagcgcctaaattgtgatctgcaaacatttcccactaaaagtaaccaaagctgcttcttcaagaaattagttaatccaagtctgtggcataagatgtacaaaacagggctagattaaaaaaaaaaacaaaactattagggtctcatcaaaatgacaagatgacagggctccaaccagctcaagtgcagtggttcacacctgtaatgccagcattttgggaggctgattacaggttcacacctgtaatcccagcattttgggaggctgaggactgcttgaggccaggagtttgagaccagcctgggcaacaaagagagactctgtctctaccaaaaaaaaaaaaaaaa

SEQ ID NO: 50203 - DNA, 346 bp, Homo sapiens
taattaccgcgggtggtggggaaaaaaattttgcagaagtctcaagctataagtaaacaaatgggcaaaatcaatgaccagatagacttttggaagggccttttataactgccaaactttgagtttacctttttcttccctgaaagatcatgcagtaaatgttgactttgcccagtcccaataaaatgaaatgttgctgctctaaagggccctttatgcccacacctttaaaatcacagcgcccaagaataaacatggcccatccttccaagtcatgtgttttatcctaagactgggaagaggaccaaaaaaaaaaaaagcgcccgccaccgggggggagctccaa

SEQ ID NO: 50204 - DNA, 606 bp, Homo sapiens
  misc_feature 22, 63: n = A,T,C or G
cccccctcgaggtacttctagnaattaattaacgcgggccctaccttttaaaaaatacatagnaaaaattaaaaggacagttactccgagaaaagaaaaagtaaagttgttacatgttgctgaaagctttggatgaactagcacagtaaataagtggcaatgtgcttccttagcccaactgagaggtgttcgccagggaccctgcaccctaaggaagaggctaaggttacacagaggtggctgcagcttttactccattgcttgttaaagagcctggtagagcagtgctggcctcaagatgggccacagcagctgaatgacacccctctggaggtcacacttgatggacttgatggagatcaacaatgatggtggccaggcatggtggctcacgtctataatcccaacactttgggaggctaagacaggtggatcacttgaggtcaggagttccagactagcctagccaacatggtgaaaccccgtctctactaaaactgcaaaaaattagctgagtgtggtggtgtgtgcctgtaatctcagctactcgggaggctgaggcgagaaaaatctcttgaacccaggaggtggaggtttcagtgagct

SEQ ID NO: 50205 - DNA, 426 bp, Homo sapiens
  misc_feature 376, 377, 378, 379, 380, 381, 411: n = A,T,C or G
cccccctcggaagtcttctagaattaattaacgcgggaggaatgaatagcagagaataccaaagccagtccctatgtacaggttttaaacaagtgacaggaaaatattggtttgtctggaggtgctagcttgagtgtttgagttcgaaggggacaaattgtgagaaatgcccgggtggctgccctaaggtaaattgtggcagctctcttactgctcagtcagcttataaacagactgcttaataactctaaacacataattggagtttgtcaattgccctgatctgattactatacactatatatgtcaaaactaggtaccccatgtatgtacagttattatgcgtcaattaaaaaataaaaatttaaaaacttcnnnnnnaaaaaaaaaaaaaaaaaaaaaaaaaaaaanaaaaaaaaaaaaaaa

SEQ ID NO: 50206 - DNA, 635 bp, Homo sapiens
cgggccccccctcggaagtcttctagaattaattaacgcgggtgtatgtgtgcataagaatcacaatcaaactagcgccctaaatccactttagtccagatcctgactgataaatttaggatccattttcctaaaaatctgtcttgctggaaggaaatagagccttctgattgaaattgcaaaagcacggaaagtatctgtccttaatcaccagtacgacaggttgtttttttctttaatatttgatgtaacataatcaaaccacaaagaccaacaatatagcaaaactggaagactgtttctttgggttaatagtgtttctagtgtattgtgagtttaaacatttctttttcatttattcaactgtgttgtgtatgtactgtatgcatatataatataaaggagaggaatttccaaggatatttctgaggctattaatgtgacaagtacattaaagacaaagcaggtaaagctcttttactctagtttataaggaaattgttgctctgttccatggtttaaaaaaatcacatccggccaggcgtggtggctcatacctgtaaccccagcactttgggagaccgaggcaggtggagcacctgaggtcaggagttcacgaccagcctacgcaacat

SEQ ID NO: 50207 - DNA, 189 bp, Homo sapiens
  misc_feature 88, 93, 100, 144, 145, 157: n = A,T,C or G
cgggccccccctcggaatcttctgaattaataacgcggtagagatttctacagcagaatcctgtgcgggtcaccatggaagccacctnccagncctggtnacctagttgccattggaaataataaatttgataaggtggtgaannaaaaaaaaaaanaaaaaaaaaaaaaaaaaggaaaaaaaaaaaaa

SEQ ID NO: 50208 - DNA, 408 bp, Homo sapiens
cgggccccccctcggaagtcttctagaattaattaacgcgggtctaaactgttaacttcaaagatatccactcctggtacctttgtgattgtgggttagcccaggaaatccccaaatgtacatacttactggtctactgaagctgagaatatatttgctttatctttagccctattatgagtactcccattttaatggcttttagtccataagcatattgtcagtcactttctttcacacttctataatttttttccccagtgtttagggcaacaccgtagcttccatcttttgtgttctagtacattaagataatgcattaggatgtgtatgtgtacagtatatatgtacgtaaacacacaggattgtattaaacatactaatttttaaaaccaaaaaaaaaaaaaa

SEQ ID NO: 50209 - DNA, 422 bp, Homo sapiens
ccccccctcggggtacttctagaattaattaacgcgggccagtatacatttacatgacatgtttgctgctccttctctatactgtggcggaagtctttctgttcattcatccttcttataagggcactcaaagtgatttttagcagtcttatttttacatttaaaatataaacatatttccacaagttaaatggtaattttaaaattcattgtcatagtaattttttatggtttttctggtatgtctaccagtgaaccacttaataacgaacacttagttgtgtattgatgactgtaatgatgatccctatagggtttatcttacgtggagcatttgtttacccatccacactaaattgagtcttgctcttttttttttttttttcgagatagggtctcacctgtcacccaggctggagtgc

SEQ ID NO: 50210 - DNA, 507 bp, Homo sapiens
  misc_feature 451: n = A,T,C or G
ccgggccccccctcggaagtcttctagaattaattaacgcgggcctgcaatctcctcctttttatctttgtaacattttgtctttgaagggcaggatggagttctgatattactggcaattagaattaggccagctaatagaaagttaaaaagtaagagggaccaggacagaattctatctcaaatagcataaaacagaaatttactgtgtcttatgatggcattagaataaattatctgaagaaatgttaaaagtctttgttctatatttattgagttcaaacactttggctcaataccagtacctgtctatggaacaggctttcaattttaaagaaaattggtaaatcttttaaaaagcattaaattactcttaactgaatagtgttgggtggaaaagagttcagatgttaaattgtaaaacaatttatatcaacatatacctacattntattcatatattgatgaagcatgagcaactttgtgaggaggaatctggcatagctt

SEQ ID NO: 50211 - DNA, 499 bp, Homo sapiens
  misc_feature 28, 480: n = A,T,C or G
cgggcccccccctcggggtacttctagnaattaattaacgcgggaaccaagttctaaagaacaaataagatttttgattttccaccaagaacccatgttttcatgatctcgcttaatctttaagtgtttgcatgagatgatgtcacaggttgacaaactttaacagtgagggacagttgaaagtcacagagaggcagaggaaaaatatctgaaatcatcactctcagttttttatacaattcattgttttgatgtgaaaaaatatgttagatactatattattgtgttaccatttctttaaaagaactgatttttctcatgtagcttctcctaacagaatcttaattggttccaataatatactgacattcttataaacacttaaccaggctaggcacagtgcctcattcctataatctcagtactttgggaggccaaggcaggagaatgcttgagcccaggattttgagaccagcctgngcaacatagtgagatactg

SEQ ID NO: 50212 - DNA, 589 bp, Homo sapiens
  misc_feature 72, 515, 518, 581: n = A,T,C or G
cgggccccccctcggaagtcttctagaattaattaacgcgggccattaattcccagcatgggctcccatggnagaactaagaaaaacaaaagcacagtagttatggtcacaagtggatgagttaaggctcaagacaacttggattgactcctttaaatcttatggggcaacttgataaacaagatagctccctttcttttccaccctggttgcacattcctctataatgtcattctcgggtctcccatgactaaggtaatgacttgactgtgccgcaactagaatgtcaaatgaagaatcagttcttcctgctcagcagtaactagactgggaagtttttgcccttttggccaattgggtgattatcaaaacattttcatagatctgaatgatagaaagaaactccaaagaggtatctggttaggtaaatacaacttttggatattactcttgtctccaaggatgccccagcgtctctccaacattcccagtaccctattccacttagatcactntangtagagctctgctcatgtcagaaaataagaggagtccacagacactctcgtctgtctttcctncactggac

SEQ ID NO: 50213 - DNA, 415 bp, Homo sapiens
aattaacgcggggtttctccatgttggccaggctggtctcgaactcctgacctgaggtgatccccccaccttgccctcccaaatggctgggattacaggcttgacccacctaacctggcccaggcagggttttaatagaaaaaggctggggctctgcccttccgtgtgctgttttatatggctaacttaaccttccccaaaagggaattaaaccatttctgggggcctctcagctggggttgtaaaacaccctggttgtcccaccttttctttcttatttataaaaaactccacagagttagaaaagttcttcaaaaagcaaagcaaatttctctgctaaatgaaaaagtccccccattccagtaggagatgcacccaaaacccacaggacggggcttcaccccagggatgccgg

SEQ ID NO: 50214 - DNA, 588 bp, Homo sapiens
  misc_feature 13, 25, 570: n = A,T,C or G
gccccccctcggnagtacttctagnaattaattaacgcgggcctgagttttttgtgctctttaagttgaggtcagtctcagcaaggtgtgttctgaatggctacattctccccaagggtcacacaccaccaccagagagggtgtgcatcccatctggtgcacaacttaagaagggaaatcatgccttcctgtgtcctttctccagagcctcctgtcttcctcctagcattgctctgctggcccaggtttaagagctggagctgctgtgctatgggcttacactggtcaggcagccaggaggaagaggaaaccagaataaacatgttttgcaagaccaagtctggtttaaatgaaagcaattctaaataaggacaatacagtcttatagagccagtgcctgggccgcctgttggcagtttcctctacagaggggtttgccatggaaaaccaaaggtcagactgataagctgaaactgcctgcagccaggctggcaggaggctcatgacaagacctcctcatccagcatttgaatccatcccaggccagaggatgtgattacagaggcaggnaatccaaggacccagtct

SEQ ID NO: 50215 - DNA, 349 bp, Homo sapiens
gcgggcttatgtaaatatgtgattttttgaacagaatccatgctacttactaacatacacaggtggctttaggggaaatgtaaacagatttccctgggaaaaaataatgtttgtctttaaagggactggggcttattttttttttaaacaagggatggcaaagggggattcacaccccccctccacatttgggggcgtgtgggcaacttaccttaaaaaaagtaaacatttccctaccaaaagccctaacaaatggaatcttattaaataaaatattgtatggggggggaaaaatgaaataaatttttttctttaactaacccaacctcccttaagggcaacaatatgt

SEQ ID NO: 50216 - DNA, 423 bp, Homo sapiens
ccccctcgtgggtacttctagaattaattaacgcgggtgtatagcatactttaggaaactctacactagacaaatgtattttccataaaaaccagaatattaggcatgtcaaaaaatgtatacaagcaattctgatgatccatattatttcagatatgatgatgatatttttaataaattaccaaagaataataagaagggaagtttcccaatggtaagaaggggtgtttaatgtaagtttcacctctttctctctccctcattctctccctagtgggtcaagggagagggaggggttaaagatgacttcctccaagattgttccagatctattgaggcctgctctgtctaaatagtgcttccaggaacagcagggtctcaattatctcaccgtgggctgtgaaattgtaaaaaaaaaaaaaa

SEQ ID NO: 50217 - DNA, 381 bp, Homo sapiens
taattaccgcgggctcctgtaatcccaccttttggggaggcgggggcaggatatttgcttgaactcaggaggcagaggttgcagtgagctgaaattgcccagctgccctcagagcctgggagacacagcaagactccgtctaaaaaaaaaaaaaaaaaaaattcctttctaaatttcatatggacccaaaaattcattcctgggcgaataaaacaaagctggggtttcactttccctgagttaaccttttctatagggacgctccggtacccaaaacggttgggtacagatataaaaccagccccttagcccaggggagtggaccagacggaattaacgctccccccctacagccatctgacctttgacaaagttaacaaa

SEQ ID NO: 50218 - DNA, 291 bp, Homo sapiens
ccccccctcgtgcgtacttctagaattaattaacgcgggtggaagcaaagctgggcctgtgctcaccagggaggtggcggcagttctgaaaattaaaactcttctccacaagggtaatttctacctgcccttttacaaatcgagctactttttaaaggcgtgatgtctccaccctttctttttattcacaaactccttaggaagagggatctgcccccatggaagcttgcccaaactatgccactaactttaaaatgccgggggcacccaccctattatcgtataaaaaat

SEQ ID NO: 50219 - DNA, 569 bp, Homo sapiens
cttctagaattaattaacgcggggggtaggtggtcactggggcagaaattgtgagcatacctcccactacttttaggagtctgggggatccatttctttcttctttaattgaaacaaaagcaaagaagtgtgatctttaggtgaaaaggaattttgaactagaaaatctgcagtcattacatgccccctcctttatttttacatgcaaatcatctttggggaaaggatctcagggatcttgttggaacttgcttgaaaacaataggctgagtctattagcaccctgttcttcacaagaaaagaaaaagaatcattttgaagtagtgtcagaagatgttaagattttatgagggcttcgcataacactcgtctgtatcactttccaatggaaaaaaatcagatttattctcacagatgttgctgacacgttagcatcttagaaaatcattttgcaacaacccatctaaactcctcactcagtacaatgtggaaactcacttggccttttcttttcctctccctgtagccacaccatgcctcctgacatttcctgcacctggtatatgttt

SEQ ID NO: 50220 - DNA, 337 bp, Homo sapiens
ccccccctgcgaaagtcttctagaattaattaacgcgggcagaatgtgaaggaattaaggataatgttgagtaccaaaaacatgataaaccgcatgagagacaaactgaacataactaactcataagggaattaggatctctattccaattcaataacagatcttattcaaaccaaatgtacctacaatggctccttcaacagcatattcaatagggaatttttattaattcatttgtttcaaagttcaatttcagagattctcagagcctttggatttacagataaatctcaatgtgtggtaagatcttaagctaaattcgcaaaaaaaaaaaaaa

SEQ ID NO: 50221 - DNA, 603 bp, Homo sapiens
  misc_feature 17: n = A,T,C or G
ccgggcctcccctcggngtacttctagaattaattaacgcgggctaagtttaaaatgatggatgagttatcagttataactcatttggaacacacatattgggacctctgattcccctttacttgaagttaatctgaacttactgctttccctgggatcagactccatcttgtaaacctgtttataaaggctgacaccatagggagtgttcagtgattgattttggatgttctcaaacatgtcatctaatctaaatgtctacctcttttagcagaagtttcttccattttcagtctgggaaggtgagcttactctctgcttttcaagcaggggccagcacctgttaactattttcttagtttcatagaagtgatgtcttgttgatattcttagtatcatagatttttttttcagatattaattataagagaaacacatgcccatgagagagaatttgtaaaatttagacaggctttccgtattctatctatattgcccagttgcatttcttcttcaagaaagagaaaaaatattcttccaggtccagctataaaagacagaaagatttgctcactccttgatactcctgttatatccattgga

SEQ ID NO: 50222 - DNA, 610 bp, Homo sapiens
  misc_feature 30, 563: n = A,T,C or G
gcgggcgcccccctcggggagtacttctanaattaattaacgcgggaggcttgtctcaaactcttgacctcaagtgatctgcctgccttggcctcccaatgtgctgggattacaggcgtgagccaccacatccgacccagagacatacttaaagagatagattaaaaataaaaagaaagataaaccaggcaaatgtgaactgggttgcgatcttattatctgtcaaagaggaattttagtttcaaaagatgagatggaaagtcattattttttcttaaaaggaacaatagacaaatacatagatacaacaggcaaaacacacagatgcacctaatcatacagtcttaaaatatacagaactcaacctggacaaacatggcgaaactctgtcactactaaaaataaaaaataaaaaaattattcaagcgtggtggcatacacctgtagttccaactaccgttccacctgtttaaaaaataaacataactgaaccaggtgcagtggctcacgcctataattcccatgcttttggaagcttaaggagaagataacttaaaggccgngtttaagacaaggcccttatcagacccatcttttaaaaaaaaagcgg

SEQ ID NO: 50223 - DNA, 610 bp, Homo sapiens
  misc_feature 16, 29, 561: n = A,T,C or G
ccgggccccccctcgnaaatacttctagnattaattaacgcgggggatcaagactgttttacctcttctcccatatatctgaccctactcccaaatagcatttgaagtgttttatttatttttattaattttaaattcttaaatttttatggatacatagtagttgtacatatctatagggtacatgtaataccaacatacaatgtgtaatgatcaaatatgggtaattgggatatccatcatctcaagcacttatcatttatttgtgttgagagcattccagatctcttctagctgttttgaaatgtacaataaattattgttaactatagtggccctattgtgttatcaaacactaggacttatttcttctatctaactgtatctttgtacctgttaaccagctcctcttcattctcctatccccattacccttcgcagcctctggcaatcaccattacaaactctctgcctccatgaaatcagttgtgtagcttccacataaaagtgagaacatgcatttgtctctcggtgccttacttatttcacttaacatagttntctcctaatttttattaactttaattcccacattattaactataaataa

SEQ ID NO: 50224 - DNA, 399 bp, Homo sapiens
attaattaacgcgggagtgctgggattacaggcgtgagccactgcacccggccatttttaatgatttttaaaaattttttggcagctctgaattggcaggtgtggaaataaaactgaaaggaccatctgtttctaaaaaatcattttgagctttttccccacctagagggtcccgaccaatcgggatgtgaggggcacagtctgggctgttgtttcccccatttgaatacttgacatatccagtgtatcctacactaacggggcttcctcaccttaaagctgggagctcatgactgcatacccaccctttggtccctttgcttaaaagggaagaggggcccaagggacaggcattacctcaaacactctcttttaaaagcaaaaacgggggccattaaa

SEQ ID NO: 50225 - DNA, 439 bp, Homo sapiens
  misc_feature 17, 28, 59, 64, 65: n = A,T,C or G
cgggcccccccctcggngtacttctagnattaattaacgcgggggttaaatgtacactngttgnnagttttctggtacactaaaaataattggaaataatacaaattttccttcaaaaaaaaaaaaaaaaaaaaaaaaaaaaaaaaaaaaaaaaaaaaaaaaaaaaaaaaaaaaaaaaaaaaaaaaaaaaaaaaaaaaaaaaaaaaaaaaaaaaaaaaaaaaaaaaaaaaaaaaaaaaacccccgccgcccccccggggggccccccttttcccccttttgggggggccctttccccccccccctgggcccggtttttaaccggggggggggggggaaacccccggggtcccccccctttaaccccttgcggcctcccccccttttccaatgggggaaaaagcccaaaaagcccccccccctccccctttcccaaaatt

SEQ ID NO: 50226 - DNA, 610 bp, Homo sapiens
  misc_feature 28: n = A,T,C or G
cgggcccccccctcggggtacttctagnattaattaacgcggggagataaaattgaaggagtaacatgagtaagatcaaagataggagaaggacaaaagaaatgaaaagacctaaataacttactacaggtcataactgcaagcaaacaacaatgtcaaaattcagatctaagtctcttaactccaaagcctttgatctttgaagtaccatgtacgatttaaagatcgttacctgttcagtgttatatagatcaaaaatggaaggaattgacaattgttggcagttaaatttgggggaaaaaaaataacatttattacatatttagcatacattattaataatactgttatatttagtatttaacatagtattaataatttcaaatgaaataaatggcaaaggattttgctagttaccacatatttaacatattaatattaataatgaatagggccaggtggctctattgtacagtgttctacagtattatacagtggctcatgcttgtcatctcagcactttgggaggccaaggtgggaggacctcttgaggccaggaaaccaacctgggtaatgttgcgagaccctatctccaaaaaaaaaaaaaaac

SEQ ID NO: 50227 - DNA, 593 bp, Homo sapiens
  misc_feature 27, 99, 100: n = A,T,C or G
cgggccccccctcggggtacttctagnattaattaacgcgggaatgataaaagagacaatccaccaagaagatacagcaattctaaatgtgaatgtacnncaagcaatagaagttgaaaaatacataaaataaaaactgatagaacagaaatgagaaatagacaaatccataattatagtttgagacttcaacagtcttctctcagtaattggtatcaccgctagacagaagatcaggaaagatttagaaaactcaacaccatcaatcagctggacctaattaatatttatggaacacttcattcaataacagcagaatgcacattctttttaagcatctacattacatacggatgctgatgcagtattttgcttatgcaagagctaccatatccttagccacagaacaaacctcaacaaatttgaaagaattaaaatcatacagagtatgttctctgactacaatgagtcaaactagaaataaataataaaaaaaatagaaaaatgtccaaacactcggaaattaaacatacttctaaataattcagtgatcaaagtgggaatctcaaggaaataaaaatacattaaactga

SEQ ID NO: 50228 - DNA, 589 bp, Homo sapiens
cccccctcggaagtcttctagaattaattaacgcgggtcagtactgatcttcttcttctaggttttacatggatgacttctctgtgttctatatcttagctcaagactgtatttgggcatgtagaagtcttcctggagctctggtcatctgataaagcgtacattttctccatctcctttcagaaaccctccattaattcacagttatatttgcttatattcagtgacacttattaccattgaaagttagtctacatgtctattacgtttctcactactagaatcaaaaattcatcagagtatgtttatcagttttgtccattactgcatcatcacacctagaacaatatatctggaacgcagtaattactcataaaaatgacaatttaaaggtaacaataaacgtatggagcaacgtcatctgctcaaatagctattacagcaggacatgtagagctgaacttaacaaatatgcatctcagaaccatctagataaggcacttacgggaaatgaggtttagtttccctacgttcataattgaatttcccatatggttgctatgcttaacttgctcaaaagggaattatt

SEQ ID NO: 50229 - DNA, 576 bp, Homo sapiens
  misc_feature 11: n = A,T,C or G
cccccctcggnagtcttctagaattaattaaccgggagggtttttagaaacagaatatctaagattctctcttagaagatctgtattaatagttggagtggagtctgagattctgcttttgacaaatgccctgggaaataattaggatacagaaattatagaaaactccacattctatcattctgtcttcagagataaaagatcactactaatcaaataaactgatataggaatttctaaaacatatggctatgaacttattttaaaacatagacttattggctgtgcttatgtattagaccttagagaagccgtgcatttagacctgtatgatacatccatttataagtcaattgtcctgggatctgattttatgtttatggtgtttacatgtctgtcatctgtaatattggtattttttagagttcatctagatctttgaccattcagtcagcactctgtttagtaagatacggaatccaaagatgcactaaaactatcccaactgtgctataggagacgtgcaataggaattaatgtcaggcagaagcagttaaaacacttggcaactgcctg

SEQ ID NO: 50230 - DNA, 440 bp, Homo sapiens
  misc_feature 171: n = A,T,C or G
aaaagttggagacagtcttccatcagtcaaaaaaattgttactgtatgcattccaaaaagaaatgtaaagggatagcattccctagaaacaatgaataaaataaaattccctgtatttaataaacagcatctgtaaaacctacaacaaacattccgaaggtgaatcttccngttcaatcagatacataaaagaggtgtttgctacatctattcactggaaggcctaactagcacaataacacaagaaagaaatgtgaagcaattggaaaacaagtaaaactatgattattaacagatgatatgattgtctacataagaaaacaaaaaaaaatctgtacataaattacttaactaatgtgagtttggcaaatttgacagatggaaaagtgatattcaaagaccgactgcattttaattaccagcccaaaaaaaaaaaaaaa

SEQ ID NO: 50231 - DNA, 413 bp, Homo sapiens
ccgggccccccctcggaagtcttctagaattaattaacgcgggcagtaagtgtcctgtttcatcatcagccgtgtaatacaaatccaagctttcctttgctttatgaaacttacacacgttagaaatcatgcttggcatcaagacatttttcctcccaagatactgcctgctgcttagagtagcgattagtaatgagcgtaataaaccaggctacagtcgtgcaggagatgagaattagccaggcttgttttctgtggaagctgttgtttaagaataagttgtggccgggcgcggtggctcacgcctgtaatcccagcactttgggaggccgaggcgggcggatcacgaggtcaggagatcgagaccatcctggctaaaacggtgaaaccccgtctctactaaaaaaaaaaaa

SEQ ID NO: 50232 - DNA, 620 bp, Homo sapiens
cccccctcggaagtcttctagaattaattaacgcgggcaatgattagtgatggttgtaacctttcaacatgtgcaaaatattttgtctgccattttcctgaattatttgcaataattcttggttaatttttatttttggcttaacagtaaaattactgggaacaaagacatattaatgcttagtttgagacttcataatggtaacataatctcactacattttgtacatattgtgcatctcacaacttgtaaagacttatcacacatattatataagtcttatggtaggatttcaaacatatattcaatttttaacccccattctgtacataaactagaatccaaaagaagtaaggcaaatcagctggagttattgagacacagcttgggtttgtgtgtttgtgtctacaaacctaggtttataacttcaagttcagtgtaatagctgttatagaacagccaccactttggagtatatatagacaagttcaacacagtcatgtgcacccttcaaagtcaagatgctttctttggtatcttggtttaaagctgatacaatcattcactgtactcaatgctaagttatttagattgcagaacaaaatgctacttagtgaaat

SEQ ID NO: 50233 - DNA, 278 bp, Homo sapiens
cgggccccccctcgaaagtcttctagaattaattaacgcgggctagtgtgcaacagtagtacatttttgtgagtcatttttcttccagccatagcagccctcctgtgtctttaaaggcactactttttgccttgccttgcatgccctgcatcctctctgatagatgcacaaactgtgaagttatgaaagttgagaaagaagcttggggttcctcattctgtaacactggtccctctccattctgtagctccagctcttataccttcctacgtctgatt

SEQ ID NO: 50234 - DNA, 537 bp, Homo sapiens
ccccccctcggaagtcttctagaattaattaacgcgggttttttgggtggatcacttgaggccaggagtttgagagcagcctgggcagcatgactaaaccccatctcaaaaatacaaaaattagccagtctcttaatccagtcccccaaataaataaacacataaaagaggcataaactactatattcaattgtctggagatatgtaagccaaaaacctaacaacaaaaaaattgctgccaagctggtaatatccttggtagaaggaaattaaaatctgttcaggagattgtacaagattcccacccaaaaaacccgcttaagttcccctttcaaaatctgcaaacaaagaaggaaactctaatcaaatcgatctacacaacacatgatgggaagaactcaggtaatagaattatcacagattttttttaagtatgtttaaattaagagaaaagaaaaatcggatatctgtaaaactaatgacccatagaaaaggattaaaagattttattaaaggctaataaggactaaaaaaaaa

SEQ ID NO: 50235 - DNA, 205 bp, Homo sapiens
cgggccccccctcgaaagtcttctagaattaattaacgcgggctaatataaagtcttaatgtcatcccttttatttcattcaacaagtaatattggaaaacaagtatttagtttatttgggatcaaggaagactaacaaaagggtttcttcctccttagagaagtaggaaggaggagaactaaaccagcacttatttggtatctg

SEQ ID NO: 50236 - DNA, 200 bp, Homo sapiens
  misc_feature 15: n = A,T,C or G
cgggccctccctcgnaggtacttctagaattaattaacgcgggattcaaagatcagttacaagcacctaagtgacatctttaatagagaaattgataattatataatctgaacagaacactttttgttagatttaactgtagccatagctctcttacagtggataattactttaaaacatttctgggagagacttctgtc

SEQ ID NO: 50237 - DNA, 376 bp, Homo sapiens
  misc_feature 28: n = A,T,C or G
cgggcccccccctcggggtacttctagnattaattaacgcgggctactgaaggctccatcacaaattgggtggttgatgctgttggctgggacctcagctagggcagttgcatatgaacacctacatgtgacctttttatgtggctgcataggcctcctcagcttggtgcctgggttctgaggagtcaggcagagaaactgttattgcttgttgtgatctagcatcagaaataacagcatctcggctgggcgtggtggctcatacctgtaatcccagcacttttagaggctgaggtgggtggattgcttggggccaggagttcaagaccagtcttggcaacttggtgaaaccctgtctctacaaaaaaaaaaaaaa

SEQ ID NO: 50238 - DNA, 602 bp, Homo sapiens
cgggccccccctcgaaagtcttctagaattaattaacgcgggcatccttactaaatcttatgaagtaatagtctgatgaaatatgagtatttagacttgcattagctttcaaaaaagtccccagtatttgaagagggtacttcctgtggctggtttggcaattgagattagtaaattaggaagatgctactgtcttcattgaccttttataacatgtgtttgacaaagccttgagtcttctataataacaacaatggtaatagccattctttatttgtcacttgcacacactgccaggccctgtgcttcacaggtagtatgttaatcatatgtttattttaaggggaaaacctaatatgtaccatgcttcctatcccataagtggtgcaagatgagagttggaatcagatctgtctgtcccctgaatcctgttttcgataatacttcttcaaaagaagaaagatgagaaaacagcaattacgtgctccattgatggaagataccagatcaaatcctttggcagattaatcaacatgatcccacatccttttaggttgcagtgtaagacccaacctgtactatttccagtgtagcaagtactg

SEQ ID NO: 50239 - DNA, 324 bp, Homo sapiens
ccgggccccccctcggaagtcttctagaattaattaacgcgggtctcatatccacaattagaaacaattttgggattacagaactgcaggccaagaggggaatcacttgttgctgcagtctgaatccccaaatgttgattctggctggtgctgggtcagagagttcacgtggcaagtcgcagcccgaggcagacacacttttaccaagcaacacagcacctggatgacgagggctactctgtttccgctggggctgagacctgctcagtgcatttctacctcatcagctgggctataactgtttttctacaaaaaaaaaaaaaa

SEQ ID NO: 50240 - DNA, 350 bp, Homo sapiens
cccccctcgagagtcttctagaattaattaacgcgggtgccagccatgggcttgtgctaacctttagctacctcttttaacatagaacaaactgccgcccgatatggaacagcagctgacacaaatgctaacttcccctaccatctggggcctcggcagaggtctgcgttgaagaaaccaaagttaggtttgaaacctcgagacgggtctgttctgtgttcaccagaaggccacgggtcctgatgcctgttctccctccttctgtaagtcctggggtggtcctggaagatttcatctaccacttgggtggcccatctcacaggctgccccagagctctttaccccctttc

SEQ ID NO: 50241 - DNA, 569 bp, Homo sapiens
cgggccccccctcgaaagtcttctagaattaattaacgcgggagggagtgattcaagtcaaaaagtttagcaagtattcagaatccacaggccccagtgaaaccagatgacaaacaggttagtgaagtcagaacatagatcagaaggctcaacagtaagggaaaaggcagggcgtcaagggttcatataacctacatgattcagaaatgctggtggcaggcaagaccaggcagcaggaatcctgagcccaagttgagtctaaacagcagagtgatcaacatttatgcaactaactctgcagtagtctatccacagcaagaaaattctgagtggaaaaaaaaatattaactatattcagcctcatctctgacgactttaagccattttaacttcctgatgcataaatcatgagtgaatccagcccaggttcccatacatcaaaatgcatataaatttgtacatgataataaatggacaggtgtggagtggagataaatgttaccataaaaggagtacattctggagggctttgaaatctcagagagatctttgaaggtcttcaacaggaa

SEQ ID NO: 50242 - DNA, 608 bp, Homo sapiens
ccgggccccccctcggaagtcttctagaattaattaacgcgggaccttgttagctggaggtggaaggaattatctctggcatcacattggcataacatgagccaaatcggcatggacactggcctgtcatctgcagtgagtgaagtgactagaaatactgcatattccttgccagccctcagactgatgttaattacgtgtggtttgttttaattataaaatattttggcctggtacagtggctcacgcctgtaatcccagcactttgggaggcggaggcaggtggataatgtgaggtcaggagtttgagaacagcctggccaacatggcggaaccccgtctctactaaaaatacaaaattatctgggtgtggtggtgggtacctgtaatctcagctactcaggaggctgaggcatgagaatcgcttgaacctgggtggcggaggttgcggtgagtcaagatcgcaccattttaccctagcctgggcgacagagtgagactccatctcaaaaaaataaaatattttacttttaaaatgggagtttggaaattccaagttaatccttttgttttagaaagcttcggaagacttgttaccaaggagtctc

SEQ ID NO: 50243 - DNA, 498 bp, Homo sapiens
  misc_feature 411: n = A,T,C or G
cccccctcgagagtcttctagaattaattaacgcgggatatacttaaaagcataaaggttaaccatgccagtctaatcagccactctttcacacacacagctacattattctacagtaacgttattaacctacagataactaaatatgactttcaagtatagtttatcatagtaacactttctaatttaaaatttaaaagtcaacacttggtcacggtggctcacgcctgtaatcccagcactttggaaggccaaggtgggtggatcacctgaggtcagaagttccagaccagcctggccaacatggtgaaaccccatcaactaaaaatataaaactagccaggtgtggtggcgcacacctgtaattccagctacttgggaagttgaggcaggagaacagcctgaacctgngaggtggaggttgtagtgagctgagatagtgccaccgcactccagcctgggcaacagagtgagactccatctcaaaaaaaaaaaaaa

SEQ ID NO: 50244 - DNA, 609 bp, Homo sapiens
cgggcccccccctcgaaatacttctagaattaattaacgcggacttctctctgatcctatcttatacatccaaacatcaaacactctctgagccaggcatttctagttctttagccatacttatttgaacaatgtaaatggctcaataggatttttgattcaattactaacacatgtaagagcttttgaaggactgtcagtaaataattttaaaccaattcagatgactgaggaaggtggattaatgtcccaaattgtgtttctctgatttttatttatggacaaggaagaagtaagctttaaaaaagtctaggctgggtacagtggctcacacctgtaatcctagtactttgggaagctgaggtggacggattgcttgagcccaggagttcaagaccagcctgggcaacatggtgaaaccctgtctctaccaaaagaaaaaaccctcaaatatacaaaaattagcccaagaccagcctgcgcaacatggtgaaaccctgtctctaccaaaaaaaaacccctcaaaaatacaaaaattagccaggcatggtggcacacacctgtagtcccagctactcaacaggctgaggtgggaggattgcttgagcc

SEQ ID NO: 50245 - DNA, 417 bp, Homo sapiens
  misc_feature 51, 324, 381: n = A,T,C or G
cgggccccccctcgaaagtcttctagaattaattaacgcggggtggtactnttcctatataattgtcctttttatattcttatattcccgttgatatattgaaagagtttcctgaagttatctgttcctatataattgtcctctttatagtcttatattcccgttgatatatcgaaagagtttcctgaagttatctattgctaatatttagcatttacttttaggagcaaaattctcaggagaattgagaaatctgttgtcatttattttgattatgtccaagtaaaggtcagagatatgaaattaaatgtttgtaactgacanactagtcatcacagtctacttcaaagggaatgtctgtcacagtttcagtagtgccanggtacatagagatatgttgtatgaaaaccatatggt

SEQ ID NO: 50246 - DNA, 456 bp, Homo sapiens
ccgggccccccctcgaaagtcttctagaattaattaacgcggggagcctgaattttaattatccactccaaggaccatggacatatacgttttaggaaactctatcctcatggcacaaaagcctttgaccatgttgactttggcctgctttttggtgtctaaacacatacaggcagagatggcaagcataaaagctaactaagcaaacataataaatgaaaaaagatgagccaggacatcgctgtttggagtaattaaccatctcagaaagctcttgctcaatattcacagcctttgcctttgaagctgactgtggcagcctccagttgaaaggggatgaggagctggcattttgaaacaggtgccgtgggctgggaagtcagtaggggaaaattggagtcattgtcttactgtaccaagcagagttgtagcctgtgactttgaatttgcacagat

SEQ ID NO: 50247 - DNA, 599 bp, Homo sapiens
cgggccccccctcggaagtcttctagaattaattaacgcggggggagtgacttaatctgatttccatgtaacagcaaaagcaaaaatcacccagactgctgtgtggacaagcatccttgtggattctaatgcaagtctgtgatcggactttgagaaatactaatttagtccttaagtcagtatcctgagatagctgatttcaaaagagctctctcagggcttctgaccaaaagtgacagattggctacacctgtacatctcttcttatttcctaatccctgcctaaatggaagaaagaaatcagagactgggagaggttacaacaggagacagaagctgctatacctctttcaaataagcagatggacaggtagtgactgactttgcagaggaatcacacagtacctgtaagtgcacaaaaatacctgtaagaaatgcagtactgtgtttgtccgaagctcccaagagtctcagcatttggaggcaccagatactaaggaagataggggtcagaaatggagctgaaaacaggggagctggtcggaaaatctgtgtacactgacaggtggacccctacgattttctccctatgtgccctt

SEQ ID NO: 50248 - DNA, 390 bp, Homo sapiens
  misc_feature 15: n = A,T,C or G
cgggccccccctcgngggtacttctagaattaattaacgcggggtggcaagaagagggtgtggtgaatctgcgggaatatcgtccgtggaaatggtactctgaatatgggccccatggttggtgaaagtactacaacattgttcattgacacgcacgtatcttaaacacagtcatccacgtttgccttctattgtagctggtcaggtaatcactctctaatcttcgtgtagggtgaaaggagtcctttactgaagtatcactttgcatttgggatagagtatttgttactctgctgctgcctaatagactttcttctcagaagcagcttggaactcaatgcggcaaattgaaatttgagatcctaccttaacacataaaaaaaaaaaaaa

SEQ ID NO: 50249 - DNA, 539 bp, Homo sapiens
  misc_feature 28: n = A,T,C or G
ccgggccccccctcggaagtcttctagnattaattaaacgcggggttataaaaattcctacacaatgtaatataagtcctaccgcctcaaccacccttctttccttgtccaacatttctcagctcttctcattttgagcagtgtgtctgcagtttaatgtgtgagggcttatgtgtaacgtatgttcaggaaatagaaggataaatggcagagctgaaagtttaggtgggatggggagaaaagacaaatataactaaaatacaagctatattccccactctacaacaacaaatgcctgaagagagaaaaaggtaaagtctcttagggtgaagggactaattttggtgagaaaattttctctttgggaatctgacaccttagaaagtaacactgagttgagctgggcatggtggctcacgcctgtaatcccagcacctacggaggctgaggcggatggatcacgaggtcaggagttcaagactatcctggccaagatggtaaaaccttgtctctactaaaaatagaaaaaaaaaaaaaaa

SEQ ID NO: 50250 - DNA, 253 bp, Homo sapiens
  misc_feature 13, 43, 51: n = A,T,C or G
cccccctcggaantacttctagaattaattaacgcgggcatgngctcaaanatactgaaagaaatatatgtacacatattttcttaagaatttttttattacgtttcctaaaatgttttaacttgattcctaaaatggaaacaggcccttaaataataatgactaaacagatttagaagcataaaggatgtcagaacatctcaggtgttttaactaagaatttgagatataaatacataaaaaaaaaaaaaaa

SEQ ID NO: 50251 - DNA, 492 bp, Homo sapiens
ccgggccccccctcgaaagtcttctagaattaattaacgcgggatacacataagtatatacacttaaaaatattgttaaatctctatgacacagtactgtctcaaatgaatttctaataggcttagaaagttgacattcaaattctaaagtttatatggaaataatgaccttgaatgggcaaaatcatctgaagaaagaacaatgtcatcagtggaattataggatctgattgcaagacttaccctaaggctataataatcaagacaatgtggtattgacataaggctagaataacagattagtggaatggattacagtccagaaatagatccacacatatgtggtcaattagtttttaacaaagccaccaaggcaatttgatacagaaaggaaaatattttcaaccattggtgctggaacaattgaataaatgtaaagaaagagaatgaactttgaccctctacgccacaacaaacattactttgagatga

SEQ ID NO: 50252 - DNA, 525 bp, Homo sapiens
  misc_feature 34: n = A,T,C or G
gggtaccgggcccccccctcgaaagtcttctagnaattaattaacgcgggccattaacttaattccctgtgtagtcatattagactttttcattttctgtaatttgctcagcctctctttatatttttaatctctttttcctctgtgtaacattctgtgtaattcctgacttatacataatttatgcacttttatttcaccaattctttcttcaaatgtgtcaaattgactgagcacagtggcttacacctgtagtcccagcattttgggaggctgaggcaggaagatcactcgagctcatggattcaaaaccagcctgggcaacataatgagacctcatttctacaaaaaaaaaaagtattaccccagaacgtggcacatgcttgtagtcacagctgcttaggagactcaaggtcttctaagacactcgaggtacttatgaggttgatgttacagtgagctataatcacgccgctgtactccagctttggtaacagagcaagacccagtccaaaaaaaaaaaaa

SEQ ID NO: 50253 - DNA, 280 bp, Homo sapiens
  misc_feature 272: n = A,T,C or G
cgggccccccctcgaaagtcttctagaattaattaacgcgggccaccctcctcactccctaggactctgactcccctgccaggctccactcctgcttctcctgtggggaagccacctcctgcctggggtgtcaggttttctgtgttggacactgcccgccatgggtgcttatcattttttgaatggcttttgcattgaattgatcaggaatggaagagaaaagaagaaaggcaaaggggaaagggaaaaaaatggcagaggaagagccccanatgatttt

SEQ ID NO: 50254 - DNA, 448 bp, Homo sapiens
  misc_feature 28: n = A,T,C or G
cgggcccccccctcggggtacttctagnattaattaacgcgggatggccagactgtaggctacctaggtggctttgtggtctcatgtgatcaaagtcggggatagattaaggagactagatctttctttagtagatggaatatagcaattccaattactgacatcctaaaagcttctctggagatgcagagcaaattctctatacatttaatgttttctacattaaaggatattttgcttccacaactgaagtgaattatggaaacaaaacctcctttaagataagcctgaaattatcattgtatttgacaatgggaggaaaaaagctgagacgttttcagaatctaccagcaatgcatcccccagagaatacacaatttgcatgaatccccctgagctagggaagctgaggatatctgaaagagagggggaaaatgtattttaaaag

SEQ ID NO: 50255 - DNA, 584 bp, Homo sapiens
cccccctcgagagtcttctagaattaattaacgcggggtttcaccatgttggccagggtggtctcgaatgccagacctcaaatgatccgctcgcctcggcctcctgaagtgctgggattataggcgtgagcccctgcacccagcctttctgagaattttcacaggacatatgtccagcaggcctcggcattaccttctactccagaaaattcagctcagaagccaatgctccaggagagggtttcccagagcacaccaagcaagatttaagtgccctctctctctgagccagcacagggtccatctctctggggggttggtccccaccagactgcaagtactgggaggggatggttatccccttggctctgcagccagcggctgctgcagaacacgtgttggactaaataaagctagacttaaattctgccttcacgtcgcaagtttacatctgacaccaacaacgtaagaccaccagggccagcacgcattctcaacatactttccaaagctggaaaaaagcacagccaagtcactcagaaaagcctcttttgatttggcttctggataaaaagagtctccct

SEQ ID NO: 50256 - DNA, 436 bp, Homo sapiens
ccgggccccccctcggaagtcttctagaattaattaacgcgggggactgggcttaggtattctttagctcaggtagggtagaggacccagataaataagggagttttcctataaggaaaagattaaaactatttcagtccatgggagcttggtcaaattgacaaaaaaatatgcttagttttttttttctggagccaaattcacttcctagaagtaaatccgggccctttgagagctgaattgctttcagcaacattaatataatacattaatttgctattcctaggtgatatcatgaaggagttttaaattgaggtagttttcctgcagagctgctagaatattttaattatttccttatggtatatatttcgcttacttccaagtgggattgaggcagtatacatctaaaaagattatcaaaaaaaaaaaaaaa

SEQ ID NO: 50257 - DNA, 542 bp, Homo sapiens
cccccctcgggggtacttctagaattaattaacgcggggagattgaaaatgacaggtcagagcaatgacataactatttttctcacaggataatgtacatatgaaacactatagaatataacacttaaagaagcactagcaaaatgaaggacatccagagaagtgagtaaattgataaagaacagagaactctgaacacatgaaaaaccagagaaaccacagttagaagagaacactgctgggattagagctgtattcacacatgtgaaaggaagtaaatttttgggtaatcaagaaatataaactttgtggtcattagaattttccttaagtagaatgggctacactataatgaagtaaactagtaaagggaaaggtcaaagctgagatcggtgaggcaagaattgggtaaataattcaactagatgcctttaaagtctgttccaatcagagatcttaaattctcttacgtaattagaaacttggccaggccctatggctcacacctgtgaactcagcactttgggaggtagaggcaggta

SEQ ID NO: 50258 - DNA, 564 bp, Homo sapiens
  misc_feature 529, 557: n = A,T,C or G
cgggcccccccttcggggtacttctagaattaattaaccggggattattctatacacctcacaggactgtgatgtgaacttaaaaaataagggactggaaaaaggatgtaagtaaagcctttagcataaaggctttaggcagttttagtgaagctggaacaaagttaaatggtcaactaacggagctgcttttagaagtacggtgcataaggaaatgaactgagaacatttccagtttggaaaataaaacaaatccaccacctcagtaattcttttcattgctatgcccacttataaggtgacataaaatagctaaaaaatgttgagaaaaaaattaaatcacctataatctgataactcaatcagctttcattgttgagttttcttctccttgtctttagtcacaggcatatgtcaccacagggtacacacagcacttttcattacatcatttcatagtactcattattatattcaaagactgtaaaatacttcctcttactcaaataatgataaaagctagatgttntatgcccactctccacaccacataacanagctctc

SEQ ID NO: 50259 - DNA, 426 bp, Homo sapiens
  misc_feature 22, 33: n = A,T,C or G
cccccctcgaaagtcttctagnattaattaacngcgggtctccatactagaaaactcataagtgaagctttgcacatgcagtgcaatgtaaaaaattaccaggatttcggaagcacaaaacagttgctagggccgggcatggtggctcacgcctgtaatcccagcactttgggaggccaaggtgggcagatcacaaggtcaggagatcaagaccatcctggctaacacggtgaaaccccgtctctactaaaaaatacaaaaaaattagccgggcatagtggcggacgcctgtaatcccagctactgaggaggctgagacaggagaatggcgtgaacccgtgaggcagagcttgcagtgagccgaaattgcaccactgcactccagcctgggcgacagagcaagactccgtctcaaaaaaaaaaaaa

SEQ ID NO: 50260 - DNA, 560 bp, Homo sapiens
cccccctcgagggtacttctagaattaattaacgcgggttctaattcttcccttcaatgtaataattcctactgagtaatataaagtttactactccagccacacaatcaaataattgaagttcattaatctgcctgctcaatcttaaataaatgtatgtgtttatacatttatcaactcatatatacattcattcctgaaatatatactggatgtatgctatatgacaggtcttgtgcacaagcaaattttaaaacttagattttttttcctgctgtgttgttgggagactagctatgaatatttaaagatattgttcacattatatcatcttttaaatagtggctgttagaatagccttcttggttgtgctgtgcataaccaacaggagcagttttttatctatctataatgtgtacaatcataccagcagctttgctggtaaatgattttggtttctctaatattaatttcacaccatttttctataattctataacttcttcatctagccttcattataaatttactcacagtataaaagttatgtgtttggctgg

SEQ ID NO: 50261 - DNA, 501 bp, Homo sapiens
ccccccttcgaaatacttctagaattaattaacgcgggggactttagagaaaatgctggaaagcaggctaaccacacaggttgatatgcccgaggcagctacagctggatgatggtttcagtaaatagaaatgccttcattctggatgccacatgctgcaaacagacccaaatacatccaaacacacaggttttgtgtttaagggaactgttgttcctgttctcctcttgcattaaaaaaaaaaaaaaaaggcagccacgcgtggtggctcatgcctgtaatcccagcactttgggaggctgtggcgggtggatcacttgaggtcagaagttcaggaccagcctggtcaacatggtgaaaccccgtctctactaaaaatataaaaattagtcgggcgtggtggcgggcacctgtaatcccagctactcagaatgctgaggcaggagaatcacttgaacccaggaggcagaggctgcagtgagctgagatcgcgccactgca

SEQ ID NO: 50262 - DNA, 421 bp, Homo sapiens
  misc_feature 15: n = A,T,C or G
cgggccccccctcgnggagtcttctagaattaattaacgcgggtgtgaggagagcttggcatgattccacagaggaggaagaaaaaaggaaacaaacaaacaaacaaacagatgaaagggaatttgttgaatttacaatgaattagagtctttccattgtactaatttaaaagttaatatatcagcttcaaatttttcataaattgtggtaatttccaagaaggtcatctacatgtttcttggtttgctttgagaaagcactcaatataaagaatccattccattactttttatgtattaaaatctctcttaagcatctgactatttcataatttataagctagtgtagacttttgaggcaagcattttctttgaaaagatacagacattatctcagatttggcaaagaaaaaaaaaaaaa

SEQ ID NO: 50263 - DNA, 621 bp, Homo sapiens
cccccctcgaaatacttctagaattaattaacgcggggctgcctatttggtgagatctaacactttcttcaactctggactgcccttcacgatgccagaggaaaatgaaagaaaatacagtaattttgaggcagaacagaaaggtatataaagaaattgcaaaaatcctaaaaggagaaacatgccataaaaggaatgaggaaaaaagataaacagggtatcagttagggagtccacatttgagaagaaaagctcatctctcttcctgccctaagtctaaattttcagttaaacacagaggaaacaccctgtttaaaatactctgtctacattattttgtaaattttactctctattgtattatctgaataactgtccatcttcggtaatatggcagcttgtacaggcacctagtaaatacctaaaatatgatatctattatcagtgtaaatactgaaagtacactgataagaaaacaaaaacatacaaaaatgaaaatacattgaattatctggcctggacaattaaggtgattaaatataaaactgtttggttgagatatctgtttattaaaaagttattcctggactcctaagatgtaagacatcattaaaaggcctt

SEQ ID NO: 50264 - DNA, 563 bp, Homo sapiens
  misc_feature 28, 537, 551: n = A,T,C or G
ccgggccccccctcggaagtcttctagnattaattaacaggggccactgggtgtaggattggggagggaacacagggagtcctagcagctgtggattttcagtggtcacagaggatgagtagaagctgagaagctggtggtcttgaaaacccttggattatacctatgttgtcgatttaggaatataggtagaggggcaggaaatagaagagataactttaccagatactcctgatgagctgaatgtcttgctttgtcctctgacttatgaagcaatgaaaggtccatgtggacctgccaaagccttcattggctgggaagtaatttcctttggttcaagttctgtgtctaccaaagaccctgctaaaaattcaaatatattactcaagacgggtaaatcattcagctgtatcacaatcatggttaataggttaacaagttatttacctagcatgtaccttagggaaaaggactatagctttcctccctccatcattaggaaaattaccaaaattccccccaaataccaaatgaatntatgtttattccanaaaaaaaaaaaa

SEQ ID NO: 50265 - DNA, 573 bp, Homo sapiens
cgggccccccctcgaaagtcttctagaattaattaacgcgggctgcaagatcatttgttaattcttacttattactgatatagaagtaaaagattgggcaaattaagtgtccacacatcccttcttgccagtgtggacagtgttggtcaccttatactcacttaacaaatatttaattggttattagtgttgcttctctttttacatttttttttaccactggtaccaagaataatttgtacccattttcttgaccatatgtctaacttttataaataacacagtgaaattgaaagtgatctgataagaactgtacacttgacaatatgacaaaacacattgttaggaactgtagtaattttagccttggtttgtgggttttgcatttttgcttgctggagtgtgtagatcttgtgagatagattcttcacatcattcagaataataatgattgctagcattttgatgtctgtgtttcattaataaaaagtagatccttgactgggctcagtggcttcacacttgtaatcccaacactttggcaggccaaggcaggtggattgcttgtgccca

SEQ ID NO: 50266 - DNA, 318 bp, Homo sapiens
ccccccctggagtctttgattaataaaggttaatttgaatatgatgttcttaagggacctactaccagcagactgttctgaggtcatgtctatgtacatgccaacattctagggcagtggttcaatgtcttccagatagtgaatctgtgcagactggttttaagtcagccttgacttcttgtacattgccttggcaagggttgatgatgttgcaaaggtgttagtctgatttcccaagggagcaggtctcagctgcacagcacaaatgatttgtttaatgcctagcatagtggcactggtctcaaaaaaaaaaaaaaa

SEQ ID NO: 50267 - DNA, 465 bp, Homo sapiens
  misc_feature 32: n = A,T,C or G
taccgggcccccccctcggaaatacttctagnattaattaacgcgggtggcctatacaccaactaccaaaatgaacaattgaatttgaaataaaaacatattaccctttacattagcaccccctgaaaatgaaataaataggtataaatctagcaaaatatgtacacgggctgggtgtggtgtctcacatctgtaatccccgcactttggcaggctgaagcaggtgcatcacttgaggtcaggagtttgagaccaacctgaccaacatggtgaaaccccctctctactaaaaatacaaaaattagccatgtgtggtggtgtgtgcctgtagccccagctactcaggaggctgaggcagaagaattgcctaaacccgggaggtagaggttgcagtgagtcgagatagtactactgcacaccagcctgggcgacagagcaagactccatctcaaaaaaaaaaaaaaa

SEQ ID NO: 50268 - DNA, 548 bp, Homo sapiens
ccgggccccccctcggaagtcttctagaattaattaacgcgggacattcagttgaattttatttattccactatttatccatcctcccatccatccattccacaataaagtaacaaaaactactatgcatctgtcaacttatgaaaaagtatgaacaaaagtcagaactgattcattttctgaagtctcaaaacgagaggttaatgtaatcaaaacaaattcattatgggtgaaattccaggagaataaatttttctaaactttatctccagaaggacctttcacagttggcagtacgtaatcaagataaggacaaagatgttatataagagagttcttcagagaaaccaataggatttctgcctatcagtctgtttatatatttatctatctctatacatattatctatatataaagcaatatataggtatattaaaggggatttatttggggaactagctcacatgacttaaaaaaaaagaaagataaatattttctagaaaatagactgagggtgggtgtgatggttcacgcttttaatcccagc

SEQ ID NO: 50269 - DNA, 590 bp, Homo sapiens
cccccctcgagagtcttctagaattaattaacgcgggattgatgaggaagccagactgagctgagcatgggagggagaagggtcgggttgcccaacctgaatttcggaacccagaagcggtaaaacagcgctctaacatgcctcttcattccccaccagaacctgggtttcctacagatttccccactttagggttggagtgaggcaagtgggaaattgtagttacataactgagccctctgctcagtggttaagtctgtggaggcaggcaggcctgggttcaaatcccatccaccactattagtagaagtaaataagtaacttgacctgtctgtactggcaatgcatgtttatttctgagcacactgtctagaacatacgaaggactcagtatatcagctctttattatcaataataggcaggattctattttagagaagagtaatcagggtcagaggggggagtctgatgctctacactatgcctgctacacagagagctaagtggggaaagattattagaaaaatctcaaccagaccaggctcagtggctacacctataatcccagcactttgggaggccgaggtgg

SEQ ID NO: 50270 - DNA, 330 bp, Homo sapiens
cgggccccccctcgaaagtcttctagaattaattaacgcgggcactagacattagatgacattatacaattgttgataaattctcttaggtgcaatcaaagtgttgtgagagttctgaaaatttaaatgcatagaaagaatagctaaattaggccgggtgcagtggctcaagcctgtaatcccagcactttgggaggccaaggcgggtggatcacgaggtcaggagattgaaaccatcctggctaacatggtgaaaccctgtctctactaaaaatacaaaaaaaattagcccagcatggtggcgggcgcctgtagtcccagctactcggg

SEQ ID NO: 50271 - DNA, 581 bp, Homo sapiens
ccgggccccccctcgaaagtcttctagaattaattaacgcggggggctcaataaaaaacaccagccacttttgtaataatggcatcacagtgtcatcatgtatgcaagcaataaaactctttagggtatggttttatactgaaaatttaatatgaaggccccttcccacaagaatatagataattattaactttctagatgtgatacggtaattcgaattgcagagtataaggaagggaaatgggaaggggcatcattccttggattttaaataactatcaagaacatttttactttaacaaagaaaatggatagaaaaagcacattttgttttccctgaagtttaatttgacatcaggtttgtgtacttatcttcactaggtgacttaacttaccccaatttttttaaaaattattaaactttttacagaaactaaccttttaaatgtaccctttccccatatatatatacgcacacgtttggattttttttttttaagaacacttgttctagttataaatatataaagaaaacgataaagtttgtggtactgcagggttgttaaagattctttgatgcc

SEQ ID NO: 50272 - DNA, 221 bp, Homo sapiens
cccccctcgaaagtcttctagaattaattaacgcgggtattgtaaaggcttatgaatatattagttcctttctcaacttcctcaattcattccaccactacaagtcaatctagagattaaaataggcaaaactgtgatctacgttaggatggggttgtttgagtggtggtttatttctgactgcttcattttatacttgtatttaaatatacagtttttgt

SEQ ID NO: 50273 - DNA, 329 bp, Homo sapiens
gggccccccctcgaaagtcttctagaattaattaacgcggggataataaaaagaaatgcctcccgcaaatttagccaaaaatctgaactgtctcagtttaagcttcaagtaaagttactgggtgatgtttctaaaccacagcctgagtgacaagttctgctgttcttcttttccacctctgagttgaacacatactcttttcagaagacattggggcccacatagatgaagagaattgtttggaatctcagaaccacctatttgaagaacaaggaggtttagaaacaccccacttagtcagtaaggctaatggattgagggcagggact

SEQ ID NO: 50274 - DNA, 601 bp, Homo sapiens
cccccctcgagagtcttctagaattaattaacgcggggacaaagcaattcctgtagcgtgatgagtgttccttaatagcacagcaaggcccatccatcaatttagcaaacatttattgatggtcatgtatggtagaacacagtgctaggtatcgtggggtgaatacaaaatagctggaagataacttcacagacagacctgattaaaacacaaatagataagcagtttagctcatttgcgtccaaaatggtcttcacctatcttaaagactgtagattgttataatgaaaacagctcgggccttgaagtaaagcaggcaaagctttacttcctccctttagcagttaagagctgcgtttccatgagcagctcactcatcttctcagagcagcattcctcatctgcaaaatgagctttatataatagatacctcacgacgcctgataaagtttttggcattaagtcctccattgttattttcatttatctttcctcatttttctctattgagaacatgtccttatcaatagagttgttataaacattaaatgagaaaacttatctaaatgcccatgaataacaggtcagaaaaaaaaaaaaa

SEQ ID NO: 50275 - DNA, 607 bp, Homo sapiens
  misc_feature 19, 32, 75, 577, 578: n = A,T,C or G
taccgggcccccccctcgngaatacttctagnattaattaacgcgggtgttttttttattttatgatactcacanactcattttttgctttattttctcccaatattcatttgaagttcagctgcatgagtgttgtctgaaatgaaatgtcagaggctacacttggatgctattaaatgtttgtgttgtttcacaattcatattcaaaacttagaagatattcctgtagagttgcataaaaattgacacatttgcagaccatattttgacaaagccgtaccttatgtactccatgattgccagaattgcagttaaacttggtttggtttatatattgaaaaaaattttaaaaatcatagttccttattatagaatcatatagatctgtttgattttccttattttcttctgctttaatctttctctattttacaaataacttcaaatatttttcaaattgtttagaattctctgaagtgaataaaaggtgtattgtgcaaattatgtgttcttaaaagatgtttagatatttcttaagagattaacactaatttctacttatatatttaaataaatnntattcaaaaaaaaaaaaaagcggccgcca

SEQ ID NO: 50276 - DNA, 591 bp, Homo sapiens
cccccctcggaagtcttctagaattaattaacgcgggcagttgagatttgtctgcaggctcataggtcattccccctagcaagctaaaaaaatcactttcaaagtggttcataacctgtagaaacgaaagcccacagcgtaacatctcaggtaaaaaatccagtgtcactcagatcacgcttacgggctgaagtctggtgattatgaagtgaactctgttgttgcaaacctgtgtgagcatcaaagcctgtcatcacttttattggcaggtgccatgggctcagacagcaagagggcaggatgggaaagtgccactgagctagtcaaacagagaaacaatggagaggaagagagcaagcaccagcattgagcattttgatttttctaaaaatggacctatttgtatagcgggaactaattaaaacttacggccatgtggtttgtgttaaatgttaagtgtttcaaaatggttaaatgtgttctgtgcacttgatggaaatgggattctctaccaactaattgagggaagggggaaaacatggaagggattagttttctagaaggaaaatgaaaatgaaaaaatatgatgcc

SEQ ID NO: 50277 - DNA, 347 bp, Homo sapiens
acttctagaattaattaacgcgggtcagtgggattacaaaaatataaattagtttttatgatagaaatctgacaagtcatttctgtttctccaaagacatacacatgtggtgttaattttgacctgattcataggtcctctgataccctaacacacaaaaagcatatgcaaaaaagctagacttattgacattaactttcttccagctcttgccaacaaagaaatactattgtacaaaatctgaatctggtttcaaaacaaaaggcagaattttaaaacactggaattactggaacataaataggtcatttaatgaagctatttccctttcactcccttggtacttc

SEQ ID NO: 50278 - DNA, 267 bp, Homo sapiens
cgggcccccccctcgaaagtcttctagaattaattaacgcgggttcccaaagaatgactatgagttgcacagggcaagaagggaggaaggagttcccaatccaccaaggaggccaatgggctactttgtgttgctcctgaaacgcatataccaagggccagataacggtaccagctcagggaagtgtggcaaggagctccacagagcccaggtgatctatggctgctgagtggaggaggagtctgaagtggcaccacaccagcactg

SEQ ID NO: 50279 - DNA, 413 bp, Homo sapiens
cgggccccccctcggaagtcttctagaattaattaacgcggggttccaaaagatgctttttgacctttaggtaaggaagactatagaaggaaatgaattatcttgttacctatacccttagccaggagtggtgtctcatgcctgtaatcccagcatttcaggaggttgaggcaggaggatcacttgaggccaagagttcaagaccatcctggacaacatagcaagacattgtctctacctgttcccccaaccccaaattagctgggtgtagtggtacatgcctgcggtcctacctactcaggagactgtggcaggagtccaggagttctaggctgtagtgagccatgattgtaccactatacccctgtctgggtgacagagtgagaccctgtttctattgaaaaaaaaaaaaa

SEQ ID NO: 50280 - DNA, 352 bp, Homo sapiens
gggccccccctcggaagtcttctagaattaattaacgcgggggtgggttctattttggcctctagctcccacatcactaaggaacttgctgtaacccttaacccaggtggctaaaggcacagtgtggatcccagctgctctgctgtcccttgaactgttttttctccagggcatcttcttgtgtttcaagtttcaatcatgttgtgaattttaaaaaattgccaggctaggcatggtggctcaagcctgtaatcccaccactgtgggtggctgaagtggaagaatcacttcagcccacgagttcaagaccagcctgggcaacgtagtgagaccccatctcaaaaaaaaaaaa

SEQ ID NO: 50281 - DNA, 571 bp, Homo sapiens
  misc_feature 26, 530: n = A,T,C or G
gggccccccctcggggtacttctagnattaattaacgcgggtctccttccttcctcctgtttcctgccagccagcatgcctgttggctgaacacagaagcaagaagacaggggatctggcgatgtgatccctacaagccaggccccagggcacagagttaaggcagaaagtatggacagtggatctggagggccaaggaaagttctccagcagaaaggaagagcctccactcaaaaatttcttggctgctcttgcacatatacttcaccagtgaccacagtcttatagtatcagtttattataaaaccatcctgaggccagatgcgatggagcacgcctgtaatctcagcactttgggaggccaaggtgggcagatcacctgaggtcaggagttcgagaccagcctggccaacatggtgaaaccccgtctctactaaaaatacaaatatcagctgggcgtggtggcacgctcctatagtcgcagtcactcaggaggttgaggcatgagaatcgcttgacccgggaggcanagttgcagtgagctgagatggcaccactgcactccagcctg

SEQ ID NO: 50282 - DNA, 346 bp, Homo sapiens
  misc_feature 23: n = A,T,C or G
ccccccctcggggtacttctagnattaattaacgcgggagtcttgttaagtggtattttataatcaccattgtaatctttgtgctgcaagagagaatatttggtggactggagatcatagaacttgcatgttaccgacttttacacaaacagccacatttaaattcaaagaaaaatgagtaagattataaggtttgccatgtgaaaacctagagcatattttggaaatgttctaaacctttctaagctcagatgcatttttgcatgactatgtcgaatatttcttactgccatcattatttgttaaagatattttgcacttaattttgtgggaaaaaaaaaaaaaa

SEQ ID NO: 50283 - DNA, 373 bp, Homo sapiens
attaattaacgcgggcaaggagcaaactgacttgtggatggtgggggagggcaccctgctgacccattgctcccctcccatctttctttggctctgatcaccctcccccatttccttttctttggcctggctccttgctctccctgaggccccctttaaagcagtgggagggaaatcaggctctaaataaatccaagggctaatttccctcctttccttcccccgggccaggaaaaaaaggagctgcaccctgcccacacactcactaggcagggggggccccaccagggcactgtgccaactcctggcagctccaaagaactgaaactctggctattttggcgtaccagggtacaggaaaggtaaaacccta

SEQ ID NO: 50284 - DNA, 580 bp, Homo sapiens
  misc_feature 14: n = A,T,C or G
ggccccccctcggnagtcttctagaattaattaaaaaaaatagttaaaaagagaggtggctcagatgggaagaccttttaaaccattctttcacatatccaactgtccaccagagagcactttgcacagctttctttttctacttagttaaggacactctaaagaaatttagatttcgctgttcagaatatcaaaagtgttttttggcacttataatacacccaagttggacttaactttaggcatgacctggtccaaccctctttgttttgcacacaggagaatctaagagaggtttggaaactttctcaagatccttgacaactgagggcagagctgtcttttttggacgcccttcctgagccttgctgctcatccagggcctcgcacctgtaatcctaatgttttgggaggctgaggtaggaggatagcttgaggccaggagttcagcttgaggccaggtgttcaagaccagcctgggcaacataacaagaccctcatctcgccaaaaaaaaatttttttttaaattagccaggtgtggtgacacatgccagtggtcctagctgcttgggaggctga

SEQ ID NO: 50285 - DNA, 607 bp, Homo sapiens
cgggccccccctcggaagtcttctagaattaattaacgcgggtaatgacctttgctggaaatcaaaataatatggtccgtttattgctttacattatatttttaaagatacatacagcaaaccgagggcaataaatagaagaataactgtcttcctccccttgacccccgtcctgatttttctcttagtgatactctacaggccttgtctcaaactttggcttttcttcatttctctctgttcctgcctagaatgctttgtctggccctagcattccctattggtcatggaactttgctatgtgatagttaaaaatacttagaggaaattaaaccctatgtgataatgagtatttggctttgttaaatctcttaacctaccttccctctgttcccatctccaagtattttgtgatgggacttctaccttaactcaaaccgatggtaatggtagaaattttagaaactatgggaggctgttgagggataaatttctgagaagagttttgtggaatctctcagaaactatagataatgcgttgttgtgctttgtgtaaggttgcttttggccatagagaatgagctgtttttcaggtgtattgccagct

SEQ ID NO: 50286 - DNA, 626 bp, Homo sapiens
gggccccccctcgaaatacttctagaattaattaacgcgggcaattaagtaaatataaaagttataaacaactagtttcccaattatttagaaaaagacaaagaaaaatcagtattttatgaatcatcattaatatgtaataatcaaacatggctgggcatggtggttcacgtttgtaatcccagcactttgggaggctgaagtgggcagatcagttgaagtcaggagttcaagaccagtctggccaacatgatgaaaccccgtctctactaaaaatacaaaaattagctgggtgtggtggtgggcacctgtaatcccagctacttgggaggcctgaagctgaagaatcacttgaacctgggaggcagaagttgcagtgagccaagatcacgccactgcattccagcctgggcaacagagcaagactccatctcaaaaaagaaataaaataaagccaggcgcagtggctcacgcctgtaatcccagcactttgggaggccggggtgggtgaatcacctgaagtcaagcgttcaagaccagcctgtccaacatggtgaaaccctgtctctactacaaatacaaaaattatgtgggcctggtggtagggtgcctgtatcccactactc

SEQ ID NO: 50287 - DNA, 368 bp, Homo sapiens
  misc_feature 10: n = A,T,C or G
cccccctcgngaagtcttctagaattaattaacgcgggcaggattgcctggtaagaccgcccacatcccacctgcagtgactgtggtcgctttgcagggatatgctggtctgattggacagaccttccttgcagtttcctgtctgttttccatcatagcacacttcttagccattttctcactttataagtacacacttatttatcagttttattggttttcccacgctcacccatctcacctataaactccctgagggcaggcactatttcagtttcactcaccaccatctagtaggcacctagcacaggcccaatgtatatatatctgaataaatgaatgaacaaaggaaggaaaaaaaaaaaaaa

SEQ ID NO: 50288 - DNA, 600 bp, Homo sapiens
  misc_feature 10: n = A,T,C or G
ccccctcgangatcttctagaattaattaacgcgggatgaattttaagatgaaacacactttcttgcttttagaagaggcagaaatgcttcttaggaatatctcatatcctgatgaagtgatggcattctacaaacatacacacactgcctgttacattagatgtcttatttttcatcattcataaattgtcatcatgggcttgttgtgtttccctgaagcatgagtatgttctcctcatgaccactaatttttcttttggcaacaatttacagtgttcttttcgagtttatattagagtatcccatatttatcctaaggaattagtcaagggctatcaaataacatgttaatgaaatcccttattacagtttgaattatggttacacctttgagggataaagaataaatatataatgttatatcaacaaagtgctgtatatgacatatatgtgcatccaaaaatacagtgaaatacccttagaagaatagaatgaagttactgagacaagccacatgagcagtttagaaattcaaaggagcaagcgattgctgttggagaagtgggtacagcgagagttagttaatatttaatactagc

SEQ ID NO: 50289 - DNA, 468 bp, Homo sapiens
aattaattaccgcggttatcctcgcattgttggttgtttttccccccccaccatgggtaccatagtggtctcaaatgaccatgtgaaaatcaaagttttacttgtgctaaaaaactttgttatctactaaaaaagtttatgctttttttttaaaagattatgtccaaagacgggccgggcttgggggctcacccctataatcccaccattttgggaggctgaggcgggtggatcacagggtcgggaaatcgaaaccttcctggctaacatggggaaaccccgtctttactaaaaaatacaaaaatttacccaggtgcgggggcgggcccctgtagtcccatctactcaggaggctaaggcaggaaaatggtgtaaaccctggaggcggaccttgcagtaagctgaaatcccgccactgcactccaccctgggtgaaaaaccgagactttgtctaaaaaaaaaaaaaaa

SEQ ID NO: 50290 - DNA, 504 bp, Homo sapiens
  misc_feature 25, 38, 497: n = A,T,C or G
ctggggtaccgggcccccccctcgngggtacttctagnattaattaacgcgggttatcagagaagtggttggctctgcatgacaaactgccaaatggttctaagaagcatgtcaacagttgtttttggtcaagctactggatgtggcctatctccacgggtgatagttggtagagctcacaactatttttattcttaataacacatggaaatatagaccataacgaatgaattgtcatatttaaagagaggcaatttttaataataattttagaaatgcttgcttctttttgagatggattttcgctcttgttgcccaagctggagtgcaatggtgcgatctcggctcactgcaatctctgcctcctgggttcaagtgattctcctgcctcagccccctgagtagctgggattacaggcgtgcaccaccacgcccggctaatttcttgtatttttagtagaaatgaggtttcaccatgttagccaggctggtctcanactcttg

SEQ ID NO: 50291 - DNA, 625 bp, Homo sapiens
ccgggccccccctcgagagtacttctagaattaattaacgcgggctatatactaaacttgtttcttagaaagacacagaagaaccctttcactgtaaagtctcaaaaggatccatgatcccaataaaagttaaaaaccaagcatatatcttccatgtcttcatatcattcatatgcgtattaaaagccatgatgtcatacagacatcacaggacatcttcatatttgccatgatctttatcaatgccctcagctacttggcctcttggtaggcagcaggaagtatgttttacctttgctcaggagattaggaatgtcttctagaatgtgactattcagtagtatatttgttaatgtttccttttattgcttctgagactcccccaatcttaatcttctatacaaagtggcatttttggtttacagtgtttttaaacagtgaaaaggaactttttgcctgttacaaattttatgcatcaccatatataaactaaactatgtcagtggctctatgagatttcctgtaaaacttttttcctacaaatagataaattcacacaggtatgcaaaaacttatgttgaaatattgtttttatgtgatgaaaagtgaaatcaatcaaatgccc

SEQ ID NO: 50292 - DNA, 564 bp, Homo sapiens
  misc_feature 12, 28, 540: n = A,T,C or G
cgggcccccccntcggggtacttctagnattaattaacgcgggatatatggaaagggaaaaggtaaatcacttaaactacttgatgcaaaacagcaatccttccagtttgaaatataaagtcccatttggctcttagtagagtaaggagagtagtaaagaaaacagccagctatgaccaataatttgtacatacagaagaaagatttaaattttcttaacatgccttaatccttactcataagaaggaacaggaatgcttacagactattaatttaaaatattctaaaaatatcgacgttatgtacaaatttcatgctattaggatgaacagctaattatttcttagtaatgatgcttcattaataagcatctgtttatgtctgtttatcaatgctatataaatttgcgtggaatagctatcaaactagcttaaaaactaaaaactaatagtcctcctggtgctttcaggaaaaagacaacctaagcatttaactttacatccttctgaactcttaaatttttggtcattggtatgtatntatttttaaattaaaaataactaa

SEQ ID NO: 50293 - DNA, 471 bp, Homo sapiens
aacgcgggcagtaacatatgacaacaacctttcccagcctgcgtggcaggcaggtggccattgagatgtgaaaagaagatgctgagtggtgattctgggaaatccctggaaagtgataaacttcttttgcccttcctctcctcatccttccactgagacaggacaagatggtgggatccccatcagccattttggaaacacagggatgaaagcctcactctatggctgggggaggagggatctataaggagccacgtgtctggcgtgggacttcccattctggaatgggcattatggaagacaaaaataaacccgtcttggttaaatagatggaatggggatgggtctgggacctgcagctgatggagatggccagaaataggcgtatgtgctggtaataatggggaaatgctgtggtaatgctactaccactgacaaagaatgagagacctactctaaaaatggactaaa

SEQ ID NO: 50294 - DNA, 587 bp, Homo sapiens
gggcccccccttcgaaagtcttctagaattaattaacgcgggcagaaacagaagatcaaaaacccatgttctcatttttaagtgggagctaaacaatgggtacacacggacataaagatagaagtaacagacactggggactcctaaaggggagaggctagagttgaaaaattatctgtctggtgtaatgctcactatttgggtaatgggtacattagaagcccaatctccaccactacgcatgtgcctatgtaacacacctgcacatgtaccccctgaatctaaaatacattaaaacttgaaaataaataaataaatatcaccttaaaaaaaaaaaaaagtgactcctaatcctactactggcaatctagtggcagagacaggtgaaacctttcacccactcataaaacaggaggcccaattatttaaactgagaattaaagtaagattgatgtgttcctttaacagagatgtctgaatgagggatattcatactagtttgacccaacaggaagaaagtacattttggaaggagacccagttcttttataatcacaggaaatatttcctcacctttcacagcagat

SEQ ID NO: 50295 - DNA, 527 bp, Homo sapiens
cgggccccccctcggggtacttctagaattaattaacgcggggggattggcagatttccctgaagttggttccagagtagccagaagaggaggacattttaaagaagggtttaggctgctcttctagaagaaaactcctgtctcttgctcctatgatccaaggtttcagggattattttagatcctccaaggactagccttttgtttggccccatacagctgccagaccagaatttttgtgccatggatttcatgggttgctagcaagccttgcctatggttcttgtcaaagacctgtcactctagtctgcctttttatttttattttttattggtttttattgagacagttcgctctgttgcccaggttggagtgcactggtgtgatcttggctcactgcaacctccatttcctgagttcaagcaattctcatgcctcagcctcccaagtagctgggaccacaggcatgcaccaccacgcccggctaatttttgtatttttagtagagatggggtctcgctgtatt

SEQ ID NO: 50296 - DNA, 332 bp, Homo sapiens
cggggccccccctcggaagtcttctagaattaattaacgcggggaatcatgttgacatttggaatttttttaacccagtctgcaccacaaggtgtaatttggtttttaaaaatgcctataataaaaaatagttcttcaaggtgtaatttcatgatcaaaatagattattgcccccacacagcagtgtttcaagacattccacgtgttttaactgacagccattgatgtttcaaactgtgaccatgcactgcactgctatttctgcaagagatagtgatggttacttgcattggtataacgcaagtctaaactacccccaaaaaaaaaaaaaa

SEQ ID NO: 50297 - DNA, 578 bp, Homo sapiens
  misc_feature 28: n = A,T,C or G
ccgggccccccctcggaagtcttctagnaattaattaacgcgggtcctgcctcggcctcccaagtgctgggattacatctaccacacccagccaataaaatgttttctaaaaatatgtttaagtatattgagcactcaacatggcttatcacgtagtagtgctatattatacaagtgtctatgtatttgttattttacttactactttcaagtaacttcttttgcctaggcatcaggttaaaccatgtgagctaagaagataggtctaggcagaattataatgccagtactcacctagcttggtgtcatgaaatgcccttttggttctgaaatttagattctattagtgggtgcagtaagataacttgtatattgaacaaatgcagatagaattcattttgccaacctgatccttgttttaaaagacaatatcagccaggcgcggtggcttatgcctgtaatcccagcactttgggaggctgaggaaggtggatcagctgaggtcaggatttcaagaccagcctggacaacatggcaaaaccctgtctctactaaaaatacaaaaattagccgggagt

SEQ ID NO: 50298 - DNA, 341 bp, Homo sapiens
cccccctcggggtacttctagaattaattaacgcgggaatgtttccaaatgtataaaatacaaaggaaatcgataatactcaaatacagttattaaacaactaaaaaacaaaaaaaaaaaaaaaaaaaaaaaaaaaaaaaaaaaaaaaaaaaaaaaaaaaaaaaaaaaaaaaaaaggaaaaaaaaaaggggggggcccccgggggggcctctggggggccccctttaggggggctgttgggccgcgctttatggcggggggtctccaaggggggggcgggtaaacccctggggtggcctggcttaatccccccgtcgcgcggcgggtttccccgggggggg

SEQ ID NO: 50299 - DNA, 400 bp, Homo sapiens
  misc_feature 28: n = A,T,C or G
cgggcccccccctcggaagtcttctagnattaattaacgcgggcacctgtaatcccagctactagggaagctgaagcaggagaatcacttgaatccaggagatggaggttgcagcgagcagagactgcaccactgcactccagcctgggcaacagagtgagacggtttcaacaacaacaacaaaaagaccacctctcacaccataagacactcattagaagtctacatacatctcttatttatcccatgtattttgtaaattagttgtgaacatttaaaagtcaatcgatttcacaaaagttctgacttctagtggtggagcgaaggctaccaagatctgacgataaaaagtccaaattaggctgggcgtggtggctcacacctataatcccggcactct

SEQ ID NO: 50300 - DNA, 643 bp, Homo sapiens
cccccctcggggtacttctagaattaattaacgcggggattgcaggcgtgagccatcccgcccggcctgtactaagatgttttatttctccttgagtcagtttaacttttgagccagtaatttacattattgaatttgttggcatatagttcatagtattaattcatttatttttatttcttttcatggatgtttttaaagctaaaaatttccctctgagcattgcttcagccattttccatagcttgtgacatgtattttcatttttaatataattttgcattttctgtttgtatttcttccttgattcaattgttgagaatttcttaaaccatttttgaggccaggtacagtggctcatgtttcaaactcctggactcaagggattctcccgcccagcctcccaggcaactgtactacaggcacagttatcttttgaattatattttcttgtaatacttttatactcctccatctcccagtatatctttgatccataaagcataaaggatccattttggtatgtctgtgaaatgggtctctgatgcaatcttttttttttttcagatggctgcccatttgtctcagcagtacttattgattaatttatggatatttatttttggaagtcagtatccaataa

SEQ ID NO: 50301 - DNA, 493 bp, Homo sapiens
  misc_feature 27: n = A,T,C or G
cgggccccccctcgaaagtcttctagnattaattaacgcggggagttgtgagggggaaggtagactctttccagacctttgataaaggggctgctcaaaaaagccacgaccttgggcctctgctaaaaccatggctttaagtaaggagggagcagatatataaaaatccttatccctctttctaatctcttatgtcctgtgagtgtcacccattgagtaaacccaagtggaagtcagcaggaaagtagctgggatgatgcagtctttacagggaaaaaaatttcaaggacaatcggatattctctcagatgactgaacctttctttccatctacctgaaggctatgatgtaaggaagcatgagattaatgagggcagaggggtgaaactgcttccagcttgacttccatccaatgcttgaagcatcttggagattgtcagtgacctacagaactttcctatatataccataagaggagttaattcaagaccgg

SEQ ID NO: 50302 - DNA, 628 bp, Homo sapiens
  misc_feature 611: n = A,T,C or G
gggccccccctcgaaagtcttctagaattaattaacgcgggatcgtaaccccccttaagactttgccttgaatttgtcctgatgttatggtaaaacttgtaaagaacagttagtcctcctttcctctaccctggtcattcctgaacctatcacagtttggttctgggctcaacagtctcatgaaaggaatttcatctggtcattgattacttcccattttccaaacccaaagacctattttaagttctctttgacattcccctgatatttgcaactgttaattgtaatcaactcctcaaatcccttttttaatgttcctggaaattaagctttttatcagtccaaatatgatctttttgtcagtagacaattcctataggaataagacacctttaatttgtttatgtagctttactttttgtcatttctaccttctactttgtataaattattaacctacttaaataattatgtacacaacatagccacacacagtgtctgttttacctcagaaatgtgtcttgaatctgtttcctgtctccatcctgatggctgctgccactgctttgactcttgcccttgtcttctcttgcttcgctgattgagatatnctatttagtcttttctc

SEQ ID NO: 50303 - DNA, 650 bp, Homo sapiens
cgggcccctttcggggtacttctagaattaattaacgcgggaggccccgggaatagtagtcccaagggtgtggtcattgtccttggtttgcaaggtgttggcacccgccctgccacttgtaatccccgtggctcgtggaactgataatccccgtgactcattcctccacttggttccaggaccttaactttttcacctaccctcccatgcgagctcaggggtgtgggggagcagcacagaaatgcgtaggaaattgcgttttgcccgtccggtgatttaacaggctttgcatggtcccaaatcgtaaggattgaaccctagttctgaaacattggcagaggttcaacaaggcgcctcaggctcagagcctgctctccactctcatctttaaaacatattttgtggttgcttctagagtttaaagagttctgctgctttaaaaaataatggatcacctgtttgatctacggagtccctctcacttgtaaattttagaattctccgtgtcatatcttgctacacaatcggagacagtactgttctaagtggaaggactaatcatctggacttctgagaactgagttttagcttggactctgtcactaatttgctgcataaccattagcacctacctgggctggtctaaaatg

SEQ ID NO: 50304 - DNA, 575 bp, Homo sapiens
  misc_feature 24: n = A,T,C or G
gccccccctcggaagtcttctagnattaattaacgcgggccatagctggttactattaggaagatagctaactagttgtcaaatacacccgggatttttctgaagtttaaccactttaaaaataaatgtgtcatttgtcacatatttgtataatgagcagctttggtcaataccataacctcagtctctccagaatttaacacaactgtggtgccattcctattggacctacacactcaaccacagaatggagtcgggtgaaagattgggtgactggatttgccatttcaccgagtgctgtgaatgggtctcactcgcagggctcggaacagaagccaccagacccacaggccatgggagtccagtcccacagctgtcttggctcctggtgaactaggtcaactgctaataccttagtaatagacactgccattgcacagaccaggcaatgaggcatagttaacggctctgtcaaacagcagcagcacctttcatatgtcgcccagatactttcaagacaaatttgagtgggccgggcgcggtggctcatgcctgtaaacccagcactttgggag

SEQ ID NO: 50305 - DNA, 400 bp, Homo sapiens
  misc_feature 28, 45, 56, 57, 79, 89: n = A,T,C or G
cggggccccccctcggggtacttctagnaattaattaacgcgggnattggttacannaaaataagaattggttccccancctccacatngaaaacagacaattctaacagactgaatttctaaactgagtggcacttggtattttaaatttgattactattgggagaaaaaagcaatttccgatttcttaataaaaaatacttggaaaaattcttacagcattcttaaagctttgaacttagaaaaattctatataaatgaaaggcatgtatttatgtgccacttaaaattaaagttttaaaataaaaaaagagaatttacagctgaattacctaacactgattctgtcacaggacagaaactaaggaatcaccaccccaaactcaaaaaaaaaaaaaaa

SEQ ID NO: 50306 - DNA, 164 bp, Homo sapiens
cgggccccccctcggggtacttctagaattaattaacgcggggggccaattaagctcacctggcctaaactcagtcggttcgccaacgatgtcctgacacgcgaacaccacccttccaggcccatctgcttaccagcggcgccgaacctataccctcagccctg

SEQ ID NO: 50307 - DNA, 367 bp, Homo sapiens
  misc_feature 28: n = A,T,C or G
cgggcccccccctcggaatacttctagnattaattaacgcgggcatgaagttgaggcgagttggagacaccattgcagcagagtcggattgacagatgtaccttgctaggtgacatatgtgtatatgtcacccagccaggcaaggtcagctggggccaggggtcacaaacatgacctggctggccgcttgctttgtaaatagttttatcaagctgggcatggtggcacgtgtctgtagtcccagctacttgggaaggcaaggcgagaggatcgcttgagtttgaggctgcagtgagctgtgattgcaccactgcactccagcctgagtgacggagcgagaccccgtctccccccaaaaaaaaaaaaa

SEQ ID NO: 50308 - DNA, 128 bp, Homo sapiens
ccgggccccccctcgaaatacttctagaattaattaacgcgggggagtcagttccgcggtagaggtgaacctgactctctgagctcatttgcattgtgaattgcccgcatttcatctgtctgaccatc

SEQ ID NO: 50309 - DNA, 428 bp, Homo sapiens
cgggcccccccctcgaaagtcttctagaattaattaacgcgggattgaaatggtaagcttttttgagagaactgtttttagacatttctattattcccacggtgcctcgctcatgcctagccaagtttaaatgctccttacagagcacttataaaatgtggtgaccaaagccaatcactctttcattcgacaaatgtgtatgagcacctaccatgtgtgctgtgctctgcactgggatcccagcaataaacaacacagaaacaagacaggttatactgtagagaaggagacactagacaaatatttgttggtcaacagaatttgtggaagccaggcaggactctaagtgaggacaaatgacaagaagagggagaatttagaaaataagatatcagtgaaacgactattataggaaaaaaaaaaaaaaa

SEQ ID NO: 50310 - DNA, 557 bp, Homo sapiens
  misc_feature 31: n = A,T,C or G
taccggggccccccctcggggtacttctagnattaattaacgcgggactgcaataaaacacaatgatgaaatatagcttccttaacactgtaaagacagtgggacagtgactcaaggcactggcatatattttattttgataatgtagttcacaatatagcagctgactttatccttaggaacacattttataaatagcagggatggatttttaggcctggctacacctaccaggaaaatgatgcaaccattattcacctcttccaactatggtttttactggcatcttctatgagttacactttggcgctcttctaaacatcatcaggccacaagctcagtctaaatcaaatatttttacaaactaaacaatccagtgctaaaaactacataagttacaaagatctaatgccatttccattccaaggaatggactattttatacagaaaaatgttcttactacatcaaaagaaaaaatggtactttaaaccaaaagaactgggctggccagagcatcagaaaaatcaaacctatactggctaccaactgacataca

SEQ ID NO: 50311 - DNA, 606 bp, Homo sapiens
ccgggccccccctcggggtacttctagaattaattaattcaaatgaaaatatttttaaaataaaaaccatctcttgactttctaaacatagtcttgctcagttaagattatttgttttattttactcggttaaataaaaataagtattattatacaagaattgtaagggcagacacagtggcttaggcttataatcccagcacttcgggaagctgagacaagaagatctcttgagcccaggagttcgagaccaacctgggcaacacagggagacctcatctctacaaaaaaaaaaataaaatacaaaataaaagtaactgtggttccagctactcagaaggctgagctggaataatcacttgagcctgggagattgaggctgcagtgagccgtgatcatgccactgcgctgcagcctgcgtgacagagaacaactgtctcagaaaaataataataataatagtgatacactcagaatgtgtcaaagtatgaaattcaactttgctttttatctatgcctatgaaataacactattcttcttgaatggttaagtatactgaggaacagactaatagtctacatgggtatttgaaacttgtgtgtata

SEQ ID NO: 50312 - DNA, 614 bp, Homo sapiens
  misc_feature 22: n = A,T,C or G
ccccccctcggggtacttctanaattaattaacgcggggcggggctaaggtaggagaattgcttgaaaccaggaggtggtggttgcagtgagccaagattgtgccattgcactccagcctgggcgacaaggctggagcctgggcgaaactccatctcaaaaaaaaaaagaaaaaatcttaatataaaattcagtcctttgtaaaataacatatttagtacaatcttaatactaatgggttttggaagtgaataaaattgattttatacgtaagaataactgtgtgacaatgccaaaaaatgaaaagatgtatggtgagaagaatttcttaccagatgctaactcttccagtaagatactgtaattaaagcagcatgaaatccaggaatgtgtgcgtacttaatgaatttttaaaaagatggtatttcactgtagaggcaagaagatggtttaataaatggagcaagtataattgtccatgtgcaagcaaaattagagccctactttataaacaaaaataagtcttttggaatacgaaaaactaaagaattaggaaatacaggaatatatgtttataacctcatcagtaaaggaaaccccaaagctacactctgg

SEQ ID NO: 50313 - DNA, 594 bp, Homo sapiens
  misc_feature 12, 25, 67: n = A,T,C or G
gccccccctcgnaaatacttctagnattaattaacgcgggttatacatttttctgaagcatacaatnggaagaattataaaaactgaccataattaacacatttcaaagaagtatcatcaaataaaccatactgacagaacacaaaagcatttataatggaagtcactcaatgggaattgaaaatacttggtgctgaatgcttaccacattaccacgtgtcaaaactacgggcatgcaaacaaaaacagtacttaggaatatataagtcttgaggccgcgtgcggcggctcaggcctgtaattccagcactttgggatgctaaggcaggcatatcaactgaggtcaggagttcaagaccagcctggccaacatggcaaaacaccacctctaccaaaaatacaaaaattagctgggcatgggggcacgtgcctgtaatcccagctactcaggaggctgagacatgagaaatcgcttgaacctgggaggcggaggttgcagtgagccgagttcgcaccactgcactccaggttgggcggcacagtgagaccctgactcaaaaaaaaaaaaaaagcggccgccacccgcggtggagc

SEQ ID NO: 50314 - DNA, 627 bp, Homo sapiens
  misc_feature 35: n = A,T,C or G
tgggtacccgggccccccctcggggatcttctagnaattaattaacgcggggttctatcctaaattatttttttccaatgaattctgtagagtttagaattcctacatttataggaaattaatatttatttttgacagtaattccaaatttcctaagatgataatgctatcatttaatttattctccagaaagcgatgctgcactataatgcacgtcattatacacgacgtgatgagtatcgccttttgccaccaccttagttgcttacgtatgttttaaaaatttgctagctatttaaatttttttcattaaggtggaaatgaatgtgtccttatatttgtatttctttatatgtgttttctgtatgtgtcatttgtttatttaattgttatggaattgtttagttatgaattgaattattcaattaccaattccagtcaacaaatgtctattaagaacctgtcagtaaattttcaggcctggcatggtggcacgcctgtaatcccccagcactttgggaggctgaggtgggtagttcacttgaggccaggagttcaagaccagtctgggcaacatggtgaaaccttgtctctactaaaaatacaaaaattagtcaggcatagtgg

SEQ ID NO: 50315 - DNA, 531 bp, Homo sapiens
cccccctcggaagtcttctagaattaattaacgcgggcctgaaatgtgctctgggaacagtgaatgtagtgtagtcacagtgccaggggacgagctggagtgaaaaagagttggggccagactgtgaagggacagcttctcacatggctattgtaggcatccaaccagtggactcggttagatttgcttttggtgaaagaaatgtggcagcaggctgggccctgtcgctcatgcctgtaatcccagcactttgggaggccgaggcgggtggatcacttgaggtcaggagttcgagaccagcctggccaacatggtgaaaccctgtctctactaaaaatacaaaaattagccggctgtggtggcgcgcacctgtaatcccaattgctcaggaggctgaggcaggagaatcccttgagccctagaggcggaggttgcagtgagcggagatcgcgccactgcattccagcctgggagacagagcaagactctgtatcaaaaaaataaataaataaaaaggaaaaaaaaaaaaaa

SEQ ID NO: 50316 - DNA, 228 bp, Homo sapiens
ccccctgcggggtacttctagaattaattaacgcgggagtttggaatggaaataagtgaattttttgcttaccaaatgacttttatgttttacttatcaatgtgtagtgtcattaataagttcagccattgtaatttttcataaggataaaatgattgcactaaatttctttgattgctagaagtgctattgatttaataacagctttaaaggagaaaaaaaaaaaaa

SEQ ID NO: 50317 - DNA, 631 bp, Homo sapiens
ccgggccccccctcggaagtcttctagaattaattaacgcggaaggaaaacctttacgttcacaaatgaagattattttctatttgactgaaaaattgctgacattctatcatatggtttcttctattaacttattttcctaatcaagtaactataattcattctgagttttgggacaaacaatgagtttactttgaaagtgagaagtaaaaaccaacaatcacatgtaagaaatgtcaacttgagaagaactcagttacatgataacatctgtataataagtctcaggtatctttagaaactttttttttcctactaaagtatctcactgataaaataatgttgatatattttcttttcctaagatattttgctcctcctacagataacacatggatttagtaaatttgttgcaaacagcttatgtctaatttttaaaatcacaaaaattgttttggaaggaaacaaagtataagttactaatttgtattcatatttgacactgtctaaagaattcttgggcatgactactatgaaattatattgaaggtcttataatttttagaagttagaaactgttatataattttgactctgaatactgtattatcaagatttcaactatttttgc

SEQ ID NO: 50318 - DNA, 236 bp, Homo sapiens
tcttctagaattaattaacgcgggggggttattctgacactaatagaactagaagaagacccagtatagttagctcttattccattaagccagatttttaaatgtttttaaatttttctttattattattattatcattattattattattagcaacgaggtcttgctgtgttgaccaggctggtcttgaatcttgaactccttgcctggggcaatcctgctgcctgcgacctccc

SEQ ID NO: 50319 - DNA, 572 bp, Homo sapiens
  misc_feature 28: n = A,T,C or G
cgggcccccccctcggggtacttctagnaattaattaacgcgggattgatacatcacgcaaaaagagactacccagtaaagaactaccagattcatcatctccagttccagcaaacaacatccgtgtcatcaaaaattccattcgactgacccttaatcggtaaaagcagtgcctcctcacttaagtgaacaagcaatcatttagtggcatagatgcagccacttgttttttaaatagaagtggctgtcatacgtgaaataaggtgaaagtgacagccttcagtctaataaccttgaagtggtttttgaactgtcaaactttgacctgtagatgctgtagcattctctcactgattgctacatacacttctctgaggatcacctgctgtcaaattgccatctacagtattacagctttgcatttgggggttttactgccttaactttcaatgcttgttatgggaaccagttcttagccacttggacactgataacaagtcctgaactccttttttgttttgtttttttgtgtttttctttttttgtcttatgttgtaatcattgtatagagc

SEQ ID NO: 50320 - DNA, 533 bp, Homo sapiens
  misc_feature 345: n = A,T,C or G
cccccctcggaagtcttctagaattaattaacgcgggctcttcctctcagacaatggcaccaagaaatacaaatggataggttacttaaggatatgtctcccttccttaaagaagaaaaatggctgcatttaaagagaatataagatttacttagaaaaaaagtcgagaggactaaaaataaataaaactaaacaaaggatgcaaatatatagaaccaatctaaaacaaatacagaatttaaagtgttgacatgtatatacatgcagaaaggctgaaaaattacttctaaaagatgagtcacaggactgtgagggtttatgtgtaagagaaaaagaaaagttcancttttcaaatcattaatatcttccctaaaagctgcatatattggaaaatatacttggaagataaccttattcctacagaacaggaagatgattcaacttctagaagaaatatccaaggtgtgaaaaaatttcttcctttgtcaggacatcagagtccatcgagaaagttctagaggaagcactctgag

SEQ ID NO: 50321 - DNA, 448 bp, Homo sapiens
cccccctcgagagtcttctagaattaattaacgcgggggggctccattcctcccaccagttccccaagactggccttctagccttccattaatgctgttatctttccaataaattttcttatggattaaggtagccagagcctgtttcttttgtttttgatctatagccctgactgatacatgatcttaaccataatgtgttctgagataataaatgtttaaatcatctgggtatcaatattttataatattttaggtataatattatctaataatccttggcccagatagtttttatactgaaagctggtataaaaatataaattcatttcactgatgcacaaacacaaaaccacacataatttcacagaaaggtcatgtgacgtacttctaagaaaagattataatctgagataggaaaatgcacctgctgcaaaaaaaaaaaaaa

SEQ ID NO: 50322 - DNA, 570 bp, Homo sapiens
  misc_feature 26, 547: n = A,T,C or G
gggcctcccctcggaagtcttctagnattaattaacgcgggctaatatttaattcaacaaaaacgtatttagtgagcatttatttatatgttaaatgacataataggcaaagaatgtgtctctgcaaattatcgcatgatgctcagtggctttattttaaactcccagtcttttcaagtttttttgggaagaaagcctgccatgaataagatagaatgacaaaatgacaggtggttcagctcaacttgctgggaactgccaggtacttctctcttgatctatacatttaaatgatgggctaccttacaaaggtactagactggaccttggtcatttatatttcttagctgttcgggctttttacattcatctctagtctgggtcctgaaccttgtttatgattctgcccatcgactaaaggtgacgccacctgaagcttttccttttgtttcctagaactcttgttccaggaacaggtttgacttcccaggcttccacagttgggtaaccccctcgaatgtcaaaaccttgaatctactcttttttnacacattgtaagtgagtgaacta

SEQ ID NO: 50323 - DNA, 583 bp, Homo sapiens
  misc_feature 12, 47, 59: n = A,T,C or G
cgggcccccccntcgaaatacttctagaattaattaacgcggggggngagagcattagngaaaaatacctaatgcatgcagggattaaaccctggatgatgggttgataggtgcaggaaaccaccatggcacatgtatacctatgtagtaaacttgcacattctgtacatgtatcccagtacttaaaataataaaaaaagatttaaatgagataatgtacataaaaaagttccttgcactccaaacattttagtaattttcactgcttttactatttgattaatatgcccttgcactattatatatttaatcttacactttaaggcctatattgctatcacgcataacatttttaaagttaaaaaagtcataatgtgctctttaggtctatgaaaaagcatactaagcaatatggatcttgtttaggacatgattcaaaatgataccaattggccgggcgcggtggctcacgcctgtaatcccagcactttgggaggccgaggcgggcggatcacgaggtcaggagatcgagaccatcctggctaacacggtgaaaccccgtctctactaaaaatacaaaaaa

SEQ ID NO: 50324 - DNA, 612 bp, Homo sapiens
  misc_feature 28: n = A,T,C or G
cgggcccccccctcggaatacttctagnattaattaacgcggggaccctcaactaagtgcctgatgctcattatctcccttgtgaagtaggtccttgtttgtcaagtgtagaaattcaggctctcagtgacttgtccaaggatacaatgctaataatcagggggttccaaagctgaaaagaaaacattaagacctctctatacaggaggcttggccttttatctgctaagttggatcattctctttagagccatttaaaaccattggaaaaagaaagaacttctgggcaaatgagaggtttggctgccttttaccattgtaaaaatgcaacagttgctggaggctgaaagcgtctttgaattgattcatttgttttgtttattctgcaattctccagtaggaaagaaccagaccttttctgcacaaataacttttcccaaattatgttgataggctggttgtgaaggatcccaagtgagtataagggtaaagaagaaaggagaatctaaaaaccttcacacccaaatccaggcttttgaggaaaaataggtggttgggatgggaagagctggggttcagggagagttgatcccagacttttttgctttgggc

SEQ ID NO: 50325 - DNA, 534 bp, Homo sapiens
cgggcccccccctcggggtacttctagaattaattaacgcgggcccaatctttttactgtctccataatttttgttagttttaaattttcacacagttttaattatttgaaaaattcatatttgttcataagtttctaaaaaatgcaacatagacatatataaagtgaaaagcatattttccttcccagtccccatgtccattccctccaggtaaaccctgtaagacaaaggttttaatagtgagattttgggactaaaatgacagacattttttagttaagtaagttaagacttgagtcattcaccattttgtcataaactttctaaatcaaaatataatctttattaagaataaaagtaggccagtcatggtggctcacgcctgtaatctcagcactttgggaggtcaaggtgggcagatcacctgaggtcaggagttcaagaccagcctggccaacattgagaagcctcacctgtgctaaaatacaaaaatgagccaggcatggtggcaggtgcctgtaatcataactact

SEQ ID NO: 50326 - DNA, 476 bp, Homo sapiens
cgggcccccccctcggaagtcttctagaattaattaacgcgggggaggctgagatgaggaaaaagacgaggaacaaaggattattcattatttattcaaaacactaaaaagtgtccattatcttcctatagatccaacaaaacggctctgccgcataagatagtatctcacagaaataaaaaagataactgtcatccaagtcattttgggaggccgaggcaggtggaacacctgaggtcaggagttcaagacaggcctgaccaacatggtgaaatcccatctctactaaaaatacaaaactagccaggtgtggtggcgcatgtctgtaatcccacctacttaggaggctgaggcaggagaatcacttgaacccaggaggcggaggctgcagtgagccaagatcatgccactgcactccagcctgggcaatacagtgagactctgtctcaaaaaacaggtacgaaaaataaagaaaa

SEQ ID NO: 50327 - DNA, 517 bp, Homo sapiens
  misc_feature 23, 35, 132: n = A,T,C or G
aattaacaaagcacctaatttgngcgaatcaatgnaaataacaaactcatattgccaagaacacagacagaaggaaataataaaaagaagttactcgtatcaaaaatgaaatgaaaatacagaggactactngaaatttattaacctttgcaagcttaatcaggaacaaaagtggagacaccaacagaccaagtaagaactgaaaaagggaacatcattataggcacaacagactttaaaatggtaaaagaatattagtgaacaaacacgtatgtagaaaaatatctagcaacaaaaattactcatgagggaatagtaaaactgactatctttctataaccatcaatgatattgaaccaatagctgaaaatcttccctcaaggaaataccaattcaagatcagtttgctgagaaaggtccaacgtattccccattacatagtctcttgtccagaatggaaaatggggtaatacactgcaactcatgtgatgaggccagcacaaatgttatgctaacc

SEQ ID NO: 50328 - DNA, 371 bp, Homo sapiens
  misc_feature 28, 309: n = A,T,C or G
cgggcccccccctcggaagtcttctagnattaattaacgcggggttgcaccgcgttagccaggatggtctcgatctcctgacatcgtgatccacccgcctcggcctcccaagtgctgggattacagacgtaagccactgcgcccggcctatgtatggtattcttttatagaaccagaagacagactaagacaatgaatgacaaggttggaagtacatctgatgattggatattgatgcaactccatgatgaatgcttcagcagaggtacaaagtcacggggtgaatgggaagcaccgaccaagctgccngaaaaaaaaaaaaaaaaaaaaaaaaaaaaaaaaaaaaaaaaaaaaggaaaaaaaaaaaaaaa

SEQ ID NO: 50329 - DNA, 592 bp, Homo sapiens
cccccctcgggagtcttctagaattaattaacgcgggggaccttcacacatatctctccacacttcgagagttttcacagaattttttttttctttaaacttaaatgatagtacacactatgtccaaaacaacccaggtttaatcttctgggagaaacctttggaatattatcgagtcttttacaattatgtttctaaatctttaaaaggtcaaacagttgaaaatgaagccttttagagtctacttgtgtgagaaaggagagtggcccagaaaattaatatttgcttccagctgcatgtacatgaagagctaagaaaactcactaatagaaaacgtggactgggcgcggtggctcatgcctgtaatcccagcactttgggaggtcgaagtgggtggattgtttgagctcagaagcttgagaccagcctcggcaacatggcaaaaccctatctctacaaaaaatacaataaataaacagatttggtagcacatgcctgtagtcccaactacttgcaaggctgaggtgggaggatggcttgagcccaggagatggaggttacagtgagctgaaatcatgccactgccctccag

SEQ ID NO: 50330 - DNA, 501 bp, Homo sapiens
  misc_feature 28: n = A,T,C or G
ccgggccccccctcgaaagtcttctagnattaattaacgcgggattgatgggtgtatactttattttgctaattgtctgttgatgaatatctagattctttttagtattttactattgtaagcatttctgcagttgaacattattgtacaaatgtctttgcattctcttgcaactatttttgtaggataagttttccataatggaattgctgagtatgagaattaagataaatattgctaggctgcctgtgaaaatgttataccatactcctcccatgcttggcaaatactagaacctatcaatcttttttatttttgcaaatgtgatagaaaaaagtgttgcagaagttcttattttagttacctatagaatcttggagtgtttcccttcatgccttggatatatatatattgttgttgtttgtttgtttgtttttgtttttgtttttgtttttgacagagcaagactccatctcaaaaaaaaaaaaaaaaaaaaaaaaa

SEQ ID NO: 50331 - DNA, 397 bp, Homo sapiens
cgggcccccccctcggaagtcttctagaattaattaacgcggggtgagtgcccaggcagcacaaccccagctgcctggcctgacacatgtctggatgtggtaggttacatcaggctgccagtccctgcacccatgtggggctgtctgttacacagatgcctctccccaactagaaacttctctgacccctcgtgtccaggatgaactctagactcctcctctctcacatctgccatacctttagtttatagcttcagcgcagaccacccagggtcctcgtgcctgctatgcgccacaccacactcatttagagcatgccatgcccgtcccacctgttctgcctcgtatgcctccctgacctgtgtggcctatggaaaagtcctaaaaaaaaaaaaaa

SEQ ID NO: 50332 - DNA, 576 bp, Homo sapiens
cgggccccccctcggaagtcttctagaattaattaacgcggggacctccttgtagaaagcattcattcttgaaaatcacctcgaggttgaagtcagtttctggggacctccttgtagaaagcattcattcttgaaaatcacctcgaggttgaagtcagtttctggggacctccttgtagaaagcattcattcttgaaaatcacctcgaggttgaagtcagtttctagaggacctccttgtagaaagcattcattcttgaaaatcacctcgaggttgaagtcagtttctagaggacctccttgtagaaagcattcattcttgaaaatcacctcgaggttgaagtcagtttctggggacctccttgtagaaagcattcattcttgaaaatcacctcgaggttgaagtcagtttctggggacctccttgtagaaagcattcattcttgaaaatcacctcgaggttgaagtcagtttctagaggacctccttgcctcaggctgcttctaccctacactcagctgccgtggtgaaaactttgacaaacttggggctgtctgcaaagccagtatctttgcta

SEQ ID NO: 50333 - DNA, 434 bp, Homo sapiens
  misc_feature 37: n = A,T,C or G
ctgggttaccgggcccccccctcggaatacttctagnaattaattaacgcgggcccaaaatcatctgttcatcagtgaggatctgcagatgtctctgctttgtcccatgcatatttgtcatttttctaaaaggttgattttgcccgggcacggtggcttatgcctgtaatcccagcactttgggaggccgaggtgggcggatcatgaggtcaagagattgaaaccatcctggacaatatggtgaaaccccgtctctgctaaaaatacaaaaattagctgggcgtggtggcgcatgcctgtagtcccagctactcgggaggctgaggcaggagaatcacttgaacccgggaggcggaggttgcagtgagctgagatcgcgccactgcactccagcctggcgacagagcaagactccgtctcaaaaaaaaaaaaaa

SEQ ID NO: 50334 - DNA, 583 bp, Homo sapiens
ccccccctcgaaagtcttctagaattaattaacgcggggtccgaggaatctgaagtagtgactcctatcattcggggcatttattttatcaagcttatcaaccttgcgctctgagcatttgtattctgtgcttatgttctattgtctagcagtaactagcataaatatgtaattatatggtttgttttgttggtaacagatttcaaaatactgtattattatggtgctgtttgaattgtgtttaccatatcggcataaacatataaattgagtcaaaatatttgcttggttaactgcaaaccacaagttattacagtgttgtcagtttaaaaatgttgcgtgacaataaaaccatttgattctctttgttcagatttgaatctcaaaaaactttgtcattgtttcctataatatattaggcacaacttttggagaaggcagttgatatattctgtagcaccttgcaagggccctacataactatttaaacacgtttcataatttctacagtgactcgtgccttattgtagtggataacttctgtttaatttcaaaatatattttccctttgcctaagcccctc

SEQ ID NO: 50335 - DNA, 596 bp, Homo sapiens
  misc_feature 23: n = A,T,C or G
ccccccctcggaagtcttctagnattaattaacgcgggggcgtggtgacgagcggagtcctttgaggtatggcaggaggaggacatgcattcgaattcgcgagaaaacttatttaaaagaaaaagaaacaagttttccgggccctgctgcagacttacctctcacactcactgggattgggcaggttatgaagatgagggtacgagacttgggtgtgatgacgtgcagtgagccctttttgtgcaacaggtgtgtcctcagccgatgtctcactcactgaattgtaagagatataagcctatgggttggggaagagtactctcgtttacagcgaaagaactgaggatccggccggacgcggcggctcacgcttgtaatcccagcactttggggggctggggcgggcggatcacctgaggtcaggagttcgagaccagcctggacagcatggtgaaaccccgtctctactaaaaatacaggaattggccgggcgtggtggcgggcgcctgtaatcccagctactcgggaggctggggcgggagaatcgcttgaatccgggaggcggaggttgcagtgagccgagatcgcgccactgc

SEQ ID NO: 50336 - DNA, 598 bp, Homo sapiens
  misc_feature 67: n = A,T,C or G
ccgggccccccctcggaagtcttctagaattaattaacgcggggagatctctgagtgttggggctgnacaccatggaaacaaaggagcacctggctgtggactgaggaaggtgtgtcccaccctgtcattgagatgagacattgcacctgtacccctcccaccaagactacagccaccggctcctctggagttcctgccatacccactaccatcagcagcagaggtcctttgtcctgggagaaggacggttctgctgtcgggtaataccaacagaggaaaagaggcggaagcttactgccatgagttttcttatgattaaatgtgaaacacacatcaacacactccctgaaattgtgtgaaagatctgaaagaccctctgaattctccctagttaggaagattaatttaggaagtggaaaaaagaaaagtggctcagggcccttttctgtggggcacagaggctgcctggcagccccagttcagagctggggacaggaaggaaggtcactcaacatggcaggtgcccagtggactcttaggggcagggatgcctttctgtgttccacattatctggcctcccaaaaaaccttcaggaa

SEQ ID NO: 50337 - DNA, 599 bp, Homo sapiens
  misc_feature 24, 42, 569: n = A,T,C or G
gccccccctcggaagtcttctagnaattaattaacgcggggnaaataggcaatttaaggtccatcccatcctaaaagcttttagcttgtgaaaagcttcttttcttgcttttaaaaccttcactctgcgtttagaataaatggcattcctggatctgttaaataggcagttaataatgccacagaaactacccaccacacacccaaccacaaaacttgctcagaggcaggatgtgtattggaatattctgtaatgatccaatgctgaaacattacaatcagccttgaccctgcaatctgcatttttaattgcagccttcatttacagtggggtattgatctgctttcagtttgtcctgaaggttgactggatctcgtaatctattcatgtcagactgcctgctaggaccagcatgaattcagctcttcagaggaagcattgtcatacagagaggactcggccgtttgtttcaccttgatatatttcccaatatatgcttcattctctggggtagtttttattcctcttctatgaaatgtggattataaggactcatgccccatggaatntctatagggtttagatgagataatacatgt

SEQ ID NO: 50338 - DNA, 618 bp, Homo sapiens
gggccccccctcggaagtcttctagaattaattaacgcggggattccttaggaagggaatctgacaggtcggctcatcttttcactctaaagaggctgctggtcagcttgtgatggcttttcctgggcctggagcacaccatggttccgctggctgtggccagggtcacttggtaggtcttgggaagataggcctctggccctccacatccccccttcatctcaaagctgctacaggcagtgatgggagagcaagcccgttcccggcctgggtgttctcagaacccttcctggaagaagggattgtgatgaggttgagttcccgcccctctggagcccgctgccaggggagctgagtgggaccccaactcactaagcctcacccccttacactcagtatgagactcgattattggatttttctcccctcctccagtcagtggaaaggacaaagcagttgtcctagatatggaatgtcatctgagaaaataaaaagggaggtacagcttctatgaaagtgcaagacagccgggccgggtggctcacaactgtaatcccagcactttgggaggccgaggcgggcggatcacaaggtcaggagatcaagaccatcctggct

SEQ ID NO: 50339 - DNA, 320 bp, Homo sapiens
  misc_feature 36: n = A,T,C or G
tgggtaccgggtccccccctcgggggatacttctanaattaattaacgcggggaggttttatttttgtttttttcctagattttagtgctctttaagatgatttttgttgcgtgtgttttttatttttaaaagaacatagaaacaagtaacaattgctcaaattcctaccactcagaattaattattactagaatgttgaaatattggcttctaattatgattgtgagcttggttgaaaatattatgattatgcaaaagaaatgtgaccatctaaaaaaatgtaatgtttttaaaaacacattccaggcgtggaggctca

SEQ ID NO: 50340 - DNA, 512 bp, Homo sapiens
  misc_feature 22: n = A,T,C or G
ccccccctcggaagtcttctanaattaattaacgcgggggtgctgggagtataagatggcctcagttaggactgcttggctgttctctagaagttctctcattttcacaatgctagcctggacttatttccattgccataggagggttctaacagagagaaagagagcggaagcaggcaatgcttcttaaagcctaggtttggaatgcacactgttacttcccacgtatggtattgaacagagcaagtgaaaacacctagtgccaagagtatgcatccaggaaggggtaaagaacaggactagttttgccatttattaaggtattattattaatccttattttagaagaaactgatatatagaggagttaagcaacttgctcaaggtcgtggactaatgaaacaatggcactagtatttaaatactgtcagtctggtttcattctgtgctgttaacttctacatggtgctgtcaacttctacatggtgctgtctctcagttgaaggaacgat

SEQ ID NO: 50341 - DNA, 414 bp, Homo sapiens
  misc_feature 27, 40: n = A,T,C or G
aaactgggtaccggggccccccctcgngggatacttctanaattaattaacgcgggggggggactggactgggtattgtagtatggttagtgagcctctatccactagttgcaagtggcactgcccccttcagtggtaataaaaaaattgtctctagaaactgccaaatcacccttgttgagaaccactactctagtcaattgtatctttactctctccttctttgttgggatttaagggtgaaaattcatcgcatgccttcctgagttggggccagttgagaaacaaaaacagaacttgaaaacatggccatcagaatataattgcactgttgctaaagctggccccagtgcacaagtgggaatgcttgtcctgggagatgttagggttgtgatgaacaatgtgtgaatgaat

SEQ ID NO: 50342 - DNA, 485 bp, Homo sapiens
  misc_feature 39: n = A,T,C or G
actggggtaccgggcccccccctcgggggtacttctagnattaattaacgcggggacctaagcgttctgctaagtaaccacgaagggaatcctgacaggtcacaccataatcatggggcaggttgcaaagcacaaacgctcctacaaaatcaggaagagtctggacttgacttcttgcaagcggttattaggcaataaaaaaagaactgtcactgaatttagaaagacgattaagaactgagtgtatcaatgttcaaactcactgaaccatgtccatttcacaggggaaatttcaggtagaccatcgccatggataatccatatttggtaacaaattagcaatatattcttaatagctgactaatactcctattggagattgaaaaacatcagcatgctgtaacaggttttgacggaatctgtagtgtttggtctgcagaggtgaagttaaaaggagacatcactgttctttaaatatacatgaa

SEQ ID NO: 50343 - DNA, 610 bp, Homo sapiens
cgggccccccctcggaagtcttctagaattaattaacgcgggccagagtggacagcaatatttcaaacacaagagagggatctcttgagtcagagatttttatataatacccagatctctcagaaaggagaaacaaaagtgcttgtgattcagtgcattcggcttcaagaaaaagaaaacccatatgtatctggtcctaaggttggtttgaagattcaacattgtcatcaagagtccagtttcttttcttttttttttttatggttctatccccagctgttggttttcatccttaggcacgtcacctttgttgctatattacggagtcagctcaaagtataaagagaaaacttggtttctatttctcttcctttatcaggaagaaaaaatgtcttggccagatgttcaatagcagactttttcttatatcccttggctgaaactagtcacctgagcactggtaacttcaaaacaggctgcaaaagaagatatatatatatatacacacacacattatatatatatatatataatgtgtgtgtgtatatatatatatagtatatatatgtatatatgtgtatatatatgtatatatgtatatatatgtata

SEQ ID NO: 50344 - DNA, 562 bp, Homo sapiens
cccccctcggaagtcttctagaattaattaacgcggggtcaggatttcaacatgtgaatttggaaggaggggtgcattcagtccatgatagtgactaacctcaactaatgaggttagggttatggtttacatacctagccagtcagggaaatctaccctaggactacagattacatccataacccagttagcaaatgttggctagtgtaggaaggttgaaggatgctagtggcttagtacaatctgtcatcacacttgaaaaatccccaaatacacattacctttgatatgcagcacagcacctgcatataaacatttggataggctgtctgatactcttagtgcactgagctggaagaagatagcaatccaggtatcaggggcatggttagaatgtacatcgtgaaagtgataccggcagggcctgggcagtggctcatgcctgtaatcccagcaccccgggaggtcagggcgggagaactgcttgagttcaggaggagtttgaaaccagcctgggcaacatagcgagactactttttttaatggaaaaaaaaaaaaaaaa

SEQ ID NO: 50345 - DNA, 507 bp, Homo sapiens
gggtccccccctcgggagtcttctagaattaattaacgcgggggataatagtgggccagcaccctttcatgtattaaaccatgaggataaaactcaaaatagcaattttacctatacctaagatattcaattttccattgctccaaagcctagaacttttatgaaaatgggacaagcaatattaacatttatgtgatgaattaaagtagccatcaatctgtgttgatgccagttatgtattagttaatttacgtatattctatcctcacaattactctgcaataaaagctttactaactagaaaagatagctaaggcttgagaattaatacatcgcccagggtcatacaattagtaaacagtaaagctggaatctggttgcttccaaagcccatgttatttctgctttttcaaaggttgcaaacttgaatctggtggcctttctgttgcctgcagacatattttgtctggttttcacagtgtactaacaagctttgtagtaattgcc

SEQ ID NO: 50346 - DNA, 570 bp, Homo sapiens
  misc_feature 17, 28, 489: n = A,T,C or G
ccgggccccccctcggnagtcttctagnattaattaacgcggggtgggaaggaagagacagggatgaggtaggaggtagataggcgcttcaactatatctcaaatactttattcctttttttttcttttttttttgagatggagtccagcctggcgacgaagtgagactccgtctcaaacaaacaaagaacaggtttttaaaaggaaaacagggtttaaaaagaaagggctccagtaattccttttttagggctataccctagggaaactctgatatatgtatgaagagatacttagaagaataattcatggccaggcactgtgacttgtgcctgaaatcccagcactttgggaggctgaagtgagaggatcacttgagtccaggagtgagagaccagcctgggcaacatagggagaccctgtctctacaaaaaaataaaaaaattagccgagtgtggtgtggcacatgcctatggttccagctttcangaggctgaggtaggaggatcacttgagccttggagtttgaggctacagcgagctgtggttgcaccactgcactccagcctg

SEQ ID NO: 50347 - DNA, 398 bp, Homo sapiens
ccgggccccccctcgagagtcttctagaattaattaacgcggggacatattaaaacaacaataacaaccacagctctgcagcaggcaaagcacaatgatacctgttctgatctgatctctttggccccaaactgagcatctctcgtgctgtaactgaggaagctttcacttagcaactcatacttccttctctatgggaactgcgtatctcagacctgcttactggtgtaataactctgtatccatacagtctgttctaggtcaaaaggagcagaggttctgacagtggcaaaagtgccatgtggcatctaactagtgagaattagcaactatccatttcagaaatgttacgctagtaatatttgtatgatggtaaggtggactatgcaaccagccac

SEQ ID NO: 50348 - DNA, 603 bp, Homo sapiens
  misc_feature 571, 585: n = A,T,C or G
cgggccccccctcggaagtcttctagaattaattaacgcggggaattcatactcttttcagttttatttagatagtgggtctcttcagtatttcctgaaaagagtatgaattccccaggtagcctctgttgtggtattttttagaaagagacacggtagtactgtggcatatccctccctacactccgcctcttggtgttccaattcagttgttttattcttatctatttgccactcatttatttattcagatatttactgaggttccttgcgctaggactttttataggtggcaagagcacaactgtgaataacacagataacttcactcttttttaatgagttcatattctaatggtggggcagacaaatatgcaaaagaataaatgaataagataaagttaatttttgatagccataagcactttgaacaaaaatgcttggggaggtgggaaatgacattgataagttgggtggtctagaataacatctctgacaagatttggccagtaaaacacaggagaatgcagagtagataaggaatgaattccctttgagaaggatccctganattagacaaagtangctgcatgtgatggtttg

SEQ ID NO: 50349 - DNA, 491 bp, Homo sapiens
  misc_feature 29: n = A,T,C or G
ccggggccccccctcggggtacttctagnaattaattaacgcgggggtgggaaattcctgaagaattattactactaactagccctcacagattgccacacaaaattcatatcaccttggtggtccaaaaaatgtcagttcatgcatttaaactaataccctcaggtatcaagtggaagcaaatgtaatccctctggagagaaatatactctcctccagggccccaaataatttctatgaataattttcctattattaaaattaacagtttctaataattaagcctatagggaaagaaaacccaacaggaaccaacaaaaacaaggaagagccgatccacaccttaagtgctttcaaatactggaattagtagatgtagactatacaatgactgtgccattataaagaaaaagtgagcctgaagatattttttgggaatagaaactaaaagaaaatgacctagcatattggagaggaaaaaaaaaaaaaaa

SEQ ID NO: 50350 - DNA, 436 bp, Homo sapiens
ccgggccccccctcgggagtcttctagaattaattaacgcgggctgcctagaagttggccctcaataaatatttgttgactaataaatgaagcaggtcatccccaagggacagatacgttgccatgaacatttacaaaaacctttggatttgctctaatttggatttatgcattgagaaataaagacctttgtggtagttttcacatcctcatgggtttttctctctacctgcagttttccactttagtgaatcctgaggcatacactcaagaatcctgcagccctttgttttcacagctgagttgcagtgattacaacttcagtgatgatagactggattctttctaacatctctttgttggagatagtatctgctgtagtatcacccatgagcaggaacaaaaaataagtatgccattatggcaggtgcatgaa

SEQ ID NO: 50351 - DNA, 488 bp, Homo sapiens
  misc_feature 470: n = A,T,C or G
aattaacgccggggatatggcaaattgagtctatttgtatatatacacagaagtacatgggcggactctttcgtgaaatcaactgctacaaaacaaggaaaagaaacatggttccagaggataagagcaaggcacagtagggttcgatttctgttcctgtccccacattctaattgctattttgatgattcaaactgagaatttttgctaacactactaaaatctgttgaaaagtatcaaataggatagatatctgtaagttttctggtttagtatagtgaaacaccacaggcaagcatttgtaaaacagaagaaaacagtaaagagggcgtatgccatcacatttcagactacactgaactgggtattcgaagccagtgagaatagaaatatcctcatcttctcccagtacacatacactccagctatgtgacatgaagcctgatactggacatttaacagatctacanattagtaaaaaaaaaaaa

SEQ ID NO: 50352 - DNA, 484 bp, Homo sapiens
cgggccccccctcggaagtcttctagaattaattaacgcgggcatcctcaaacataatagtgcggactaaaaccaagtaccttataattcttccctctccttcctctcttccctctgaacaggaaggggtggtgcttatttagcatccgggtcatggtctacggatatccttaatggctggctttgaaccatcttcaaggaatccgccttcttggcctggtgtggtggctcacgcctataatcccagcactttgggaggctgaggcgggtggatcacttaagagtttgagaccagcctgggcaacatggacaaacactgtctctactaaaaacagaaaaattagctaggcatggttgtgcgtgcctgtagtcccacctactcgggaggctgaggcgggaggatcacctgcatctgggacatggaggttgcagtgagttgagattgcaccatcacaaagcaagatcctgtctaaaaaataaaaca

SEQ ID NO: 50353 - DNA, 560 bp, Homo sapiens
ccgggccccccctcgggggtacttctagaatttaattaacgcggggtacattgttatcttcctctcaattattgctaatctctttacttttgtaaacagtaaaaaagggttgagatataatagtttaatttagttgcaaagattaaatagaagctcaaatatctgtgagaattacctccaattattcagcatgagaatgaggtcagaaacatagaattatttcttttttagtttgtctcacaaatatatatctaattagaagaaagcagtgatttgtatgtatttcttgtacatttgccccaggaaatcacaaacctctgaactgacctgtccatcatgagaaaagagagctgagaatagatgttaaacatattatgttcaactttttaaactgtgatacaagcaagactacaccaaggagaagaataacaaaaaaatgctttttacaaatgcttttagactgtgttgggggaaaagaaaccacaggataaagtgacctgtgtgtcaatggctttacagaaatatctacttaaaaacttgatgctctattgagtaaaatg

SEQ ID NO: 50354 - DNA, 584 bp, Homo sapiens
  misc_feature 27: n = A,T,C or G
cgggccccccctcggaagtcttctagnattaattaacgcgggggtgttgttctaacatcatttaattttaagaaaaattgaggctatattgtccagtcataattagaagttcatgaatgtagctcagttattttacttcattaacacgtttattaaagtgatagtcattgatttttggagctagaagaggcctttgaaatgatctaatccagtatctccattgtacaggttcggggttctgagtatagaggtaagaaggctgatcaaaggtcaaataggtagagccagagtgacacctggagatctggtctcctaagtactaatctagagttgtttttcactgtaatacaagactcagtgggaaatacatcaagagacagatatctaaagtctccaataacacacagctcaagaaaaatggatactatcacactttgtgctacagcctttgactaatgaatccaataatacaaaatcttagctcaatcctttctctttctaagtccaacagtaaacatctgacagacttccactgagtatagtgaaacctcctcatgtagtatctactcatcacatatgaagag

SEQ ID NO: 50355 - DNA, 575 bp, Homo sapiens
  misc_feature 532, 544: n = A,T,C or G
cgggccccccctcggaagtcttctagaattaattaacgcggggatgggcgggtgtggtggctcacacctgtgatcccagcactttgggaggccgaggcgggtggatcacgaggtcaggtgtttgagaccagcctggccaacgtggggaggccccgtttctgctgaggacgcaaaaaattggtcaggcgtggtggcatgtgcctgtagtcccagctgctcgggaggctgaggcgggagaattgcttgagcctgagaggcggaggttgcagtgagctgagatcgcgccactgcactccagctcgggcaacagggcaagactccgtctcaaaaaaaataataagaagaatttaaacatgataactcgatatgcattgctgaatttcctcttgattgaactaaaagaagagacatacaaatgtacctgttatcttatatagcttttctgggcattggaatttataataattttttctagttaaagatgtccctcattttctaaatttaaattttttaaattattgacaaatacgtntattttttcctnctaatttttttgcctactagtctttatttta

SEQ ID NO: 50356 - DNA, 445 bp, Homo sapiens
  misc_feature 25, 38: n = A,T,C or G
actgggtaccgggcccccccctcgngggtacttctagnattaattaacgcgggggtggcggaggaggaggtacgggggtagtgggaagtaaatctgtatgccttctgacctgaatacatgctcgcagattgcagttcaccaccactcactgacacattcttgggagaagagctaaaggctttatagacagcttatgcctggagacatgggaccagcccaagcattttcatctggcttacataaatgggatggagtctgatgcccctgccacagcctgcccacaatgccgacattggggcataggctcggcagacacctaatttgctcagccctgccaagacatgtatctactagcgcccatttcccttgccttctccccctgttcctgcacacaattttcattaaagtaaaacttggagactattgcgctaaagtgtacagtcaa

SEQ ID NO: 50357 - DNA, 612 bp, Homo sapiens
cccccctcgagatacttctagaattaattaacgcgggggggtgaaagactcattttccccaggccaagttttattataataaccaccatgtagaatgaccaaattctacgattaacactatttttcttctcctaagtgttttccttctgcctgcttcaacgtataaccaactaacttgtgtcaattcaccagggaataaaaatggaaggatctgttctagccacagcttagcaggtgctgtggtgggagataaatcaaagaacacacacaaaccagggtgaagacatttacaaatgtactttagccaataaaaattagcttgttattttataaagaaaacaggtgcctacagtaaaggttatcataaggtggctcacgaagtgggcagggatggtccacaaaacatctaagaaaatacctttctatttttgaaataaatgacttcaacttttccctggattattccaagagtctcctatctactcttgacctcctcaagtctattctagtatctaagaagaactgattaaatttaaatcttaatcctagtttgcagtttaggttacatgtacatctggatgtttattaaaggaacaccaagttatcattctt

SEQ ID NO: 50358 - DNA, 472 bp, Homo sapiens
  misc_feature 24: n = A,T,C or G
gccccccctcgaggtacttctagnattaattaacgcgggccttcctaagtcatacgttcactcatgattcagttatttatctagtgcttctttcgcatctcctactatgttccctgttctctcgtaggtgctgggaatacagtagtatgcaaaagggacaaatcttgacttcatgaagcctatgttttagcggagggagaaaacaagtaattaagtaaaatacgtaagatgccagatgatgcagcagtttggaaagtaaaggtcattgtcaaaatggtgagaagagtctaattaacttaatgtagttaataaagagcttaataaaggttagtaattaataaaacagtgcttaaagcacaagggatatgctatgccctggagctagtaacagggaggagctcttaacacctgaaagtaaagagagggagaagttactcagagaagggagctgaagggagagagctgcttgata

SEQ ID NO: 50359 - DNA, 537 bp, Homo sapiens
  misc_feature 29, 109: n = A,T,C or G
ccgggccccccctcgggggtacttctagnattaattaacgcggggggggtgagagctagttttcctgtagtagaagctgaagacagagtaaaaataattaactcatggngaaaaataaataaacaaacaattggactcagccagaggaaaaagatagttaaaaccaaaacatgtaacgcaacctagaacagtctgtgtaatctagcctctgctgtcaacttaatctaccatcacgtgccccattattcacggggctccaccttgtattccagttgttcctctctggaacattttatgtcttttctctctgagggactcagctcttggtatttgccttgctcagaaatctcttccatagatcttcacaatggccggcttgtcttaggtcttagttcaaatatcacccgctcagagagaccttgcccgacttccactatatacatggagggtttccagaacaaatgaaggtattgaacaaatgagctccataaaaatggaaacagggtgctctgcttggtttttcaaaaaaaaaaaaaa

SEQ ID NO: 50360 - DNA, 459 bp, Homo sapiens
gccccccctcggggtacttctagaattaattaaaatcacctcaatatcttacttctcttaaaagttggcaataaaacatttaacaactatttaatgtttgatgttttcaaatgaaattgtgcatttaattcctaattgttcataatgaaaggaaccaggcttcatgtacactacatgaaggggtgtagcctcgtctttcaaatgagaaagcatatcctctgtgtaggttattcagaaaatgcagcttcttaatttttatattctagaaagctaccagcaactgtgaaaattttcaaaaggaacatttctcaatcccctgttgcagaaggccaaagactgatttatattcataattctctgaggtatctagtatctcctcttgaaataattctgtaaagctctatgggaattgctaaaggtgctgagaaggaagaatccaaccttgtggatatggcacca

SEQ ID NO: 50361 - DNA, 495 bp, Homo sapiens
  misc_feature 31: n = A,T,C or G
accgggcccccccctcggaaatacttctagnaattaattaacgcggggaccaaggtgagggggtcgtaggtagggactggagggactttttaaatttttgttgttgtttttgagacagaatctctctgtcacccaggctgaagtgcagtgggcaaaagagcaagactccgtctcagaaaataaataaataaataaataaaataatatttattttacaaggggagagcaactatttaatcttgggttgggaaagatcattgcaacatataacatcaaagccagaaatcataaaggaaaaaactgatagatccgattgcataaaaatttaaaacttctacatgttgaaagatataagaaaattaaaaagcaaacaaatgtcaatgacaagggctgtgctatcactggccagagtgtatcctttatgtaggcagcttcttaaaccaaggctgggcataccgctggttcacgcccgtaatcccaacactttggggagga

SEQ ID NO: 50362 - DNA, 541 bp, Homo sapiens
cccccctcggggtacttctagaattaattaacgcggggggggtggtgacagggatgaggacgctctcaagccagatgttttcatcgtatgtgctcatattacacaaatcacctttgcacgttcgttgccttgtctcagctccgccaggcccctgctggtcacatgttttctgagcatctcactggcctcaggcagtgtcaggatgcagagaaataaatgactcagtcccagctttcaaaggcgtttataattaagctggggagataaggcatgaaatatatatacctataaatacttggcaccgtgtttattgaaagaaagaatgaatggtttggatggagagttgaaggcttggcgggattccggtgggaagaggtttggaattccaagcagaaaggtgagtctcagtgtttattggtgctgtcatcataattaaatgcccttatttcaaaatattgaacaatgcagtcactgaatgataccctggaaaggacagggggattatgtggccacagtcttctttgacaggcagggaaactga

SEQ ID NO: 50363 - DNA, 601 bp, Homo sapiens
ccgggccccccctcggaagtcttctagaattaattaacgcggggggtgcgtgatggtggtcattaaagatttgtacactgaatttttttaattgctaagagaaattaaagaaaatccaaataagtaggaaaaatatcttgggttcattgatgtgagacttcatatttattaagatgtcattacaaccaaaagtgatctacagagtcaatgtaatctctatcaaaattccaatggcttttttttgcaaaatgtaaaaatcaaatatcaaactcatatggaattgcaagaggcacaagataaacaaaacaatctttaaaaaaaattgaggactcacacttccctgtatcaaaacttactataaaactatagtaatcaaagcaatgtagtgctggcctaaggacagacataccaatgtaatagaattgggagtccaggaagaattccatatgtttatggtcagatgattcaaaaatcaagagggccaaatgactaaatgggaaaaggaaagtctcttcaaaaataatgtttagacaactgaatatctacatgcaaaagaataaaactggactcctacctcacaacatataaaaaattaactgaa

SEQ ID NO: 50364 - DNA, 584 bp, Homo sapiens
attaattaacgcgggatagacctatcccattaggaatgttggagctcacaggaagctgtgcggagataaactgcatctgatctcacccaacataatgacctcacttccaatagaatgtataattctttgctggttaagttgggcatttactttaaaagttaaaatgcttgtgggtgtgtactttcttctgacaaatatgaacccacctgacaccctgtggaattgaactgtgtttgtattttgagcaacaggcctcacaaatgacaaatgtttgaaaaacaaaaaaaaactcatacaaaggttaaacctgctgtaatataaaaatgggatatatgctgttatctataaaattctaatatcttgcatttcttgacaaattttatcaacagtatctttattgttgtttaaacagtctagtaacctgacttcaattgaaaagatagataaaccagagaaagacccagtgtagaccaaggagaaagactgcagcctgaagtaagagtgttcatgcatttattcaatgcatttaatcaccaagctttattaacagcctgttatgtgcctctgtgctgggtacagccaga

SEQ ID NO: 50365 - DNA, 605 bp, Homo sapiens
ccgggccccccctcggaagtcttctagaattaattaacgcggggatgggttgaactattttctagtgtcccttacatctttaaaattctttgatcctatgatctatagtgatataagttcctaattattttctctctcaaactccaaatcaatatatctggcaagctgctgggcacttcatttggatgttccattgtcatgcaacatattagccccagtttgtctcttccagacacctggtgactctacttggtttgagggtcaatgcagctatggccttaaagattaaaggcagaaaacattccttctaaacaattcctaagacatctggcttaaaacagaagactagaacccaacagaaatcttatctctaaaaagaattactctgctacttccaagcccaagtagaacaaagttccccaaattagacgaacttagagggaaaggaaggagaagaccacctgaggtcctcagtgttctcagaaatttttagcagcttactccacgtcaagctgggaagcaccaaaggggagccaaggctaaatgaattaatgcagaattacttgtagctctgaagtgttggaaataggctgagacaaactagc

SEQ ID NO: 50366 - DNA, 436 bp, Homo sapiens
cccccctcggaagtcttctagaattaattaacgcgggtctcaggttcaagtgatcctcctacctcagcctcccaaagtgttaggattatatgcatgagccactgctcccgacaaattaatctttaacagtatttcatgcaacacacttaggaaaacaagaaaaacatacagcaagcagctctgtttctttgcattagcaaattctggtttagaagttaaatgtgaatcgtgctttgcagctttcctaataaggtgtgatggagacgtggagctaccgttgacaccagcttgcagaggaatattgcctaaacaggaccaggcactttcctttacttctttttcaatatgatcccttatcttaaactggcctataaaatactccattaatcccttcaacaatccaaactctaacagagattgtcaaaaaaaaaaaaaa

SEQ ID NO: 50367 - DNA, 599 bp, Homo sapiens
  misc_feature 37: n = A,T,C or G
ctggggtacccgggccccccctcggggtacttctagnaattaattaacgcgggtaccccaaaggtagtcgtttaataacgatttgtatcaaactgttttgtgggtcatgaaatcaggcattttctaagacagctatactcatatgcctggtaacttgacaggaatgttggaaggttgaaaacaggtgtacgtttcttccctacatagtctcaaagtctctcgttggttctctccagcagggtagctggacctattgcatggaaacccagaacttccagagatcaagacagttcttttaaagaataggcccagaatatgcaatattattagtcatactcattattcaacgtagtcatttactagtctgattcaaatggtggggaaaccaacataaccactcattggaatgagtgtcaaataatttttgccatttttaatatgccatagttctcactctgttcataaattattcaattttctcatgcaactccttaactcctcacaggatcccccaaagtcttatcttattttaaaattgacttgatatccagtgtctcgttatctaaattaggtcagatgtggatgagactccctgaata

SEQ ID NO: 50368 - DNA, 614 bp, Homo sapiens
cggggccccccctcggggtacttctagaattaattaacgcgggggttctcaggtcagacacagcataaaccaaagaaggctggagacttctagatgcttcttacagcaagtgaaacaaaatcggttaatgtgccactacgatgtgatacgctttcaaggttctcccatgtgaagttttaggagaggccttttccccagggggtagggcaaactaacaaattttggggatatgatttccagaatgcttttttacttgcaattgccatcccactcccaaatgtaagaataacagctgtcattttcaacactgatcaatgtcactttatagacagcgaagtgaaaatgcagagtatcctgaagacagtgattgtggttatttcctgggtgcctggaagtgccaaggattgtcctaggtctactggatcgatgccttatcaccaacctcacaataaccttttgggagagataaacatcaccattctaaaataaagaaaatgagagtttaagtaacttgtccgaggacacatagtattaagtggcggagacaaattgaaacccaagtttaacttgttccaaaaccctcactctttccttcacattccactagttctcag

SEQ ID NO: 50369 - DNA, 541 bp, Homo sapiens
  misc_feature 12: n = A,T,C or G
cgggcccccccntcgaaagtcttctagaattaattaacgcgggccatcattaccatcaccatcactgtcaccatcatcaccaccatcgtcattaccaccaccatcactatcattaccatcatcatcctcgccaccaccatcatcacttttttttgctgggctaatggaccatgaccctagctttcatttctggcagggagtagctgagaaaatgcaacactccatggacagaaaaaacagaatctccgtggaaagaatgttgacatttcatttctcttcccaagtgtgctatgtccactcctccaggactgcgagctgaggagaccccagctcagccccttcctgtctttaaagaaaggatggaggggctgggcagcctctgtccagctgggctgtgcccccacttcacccaaagtttcttcctcccaagccatgatgccttcatttgcacttctctgtgcttctcttcagcaggaggggcagccagagggaacagaagctagctgggaacagaagcacaggggaaacagaagtcactggg

SEQ ID NO: 50370 - DNA, 602 bp, Homo sapiens
  misc_feature 28: n = A,T,C or G
ccgggccccccctcggaagtcttctagnaattaattaacgcgggttatttattttagatagggtcttactctgtcacttagggtggagtgcagtggcatgatcatagcttactgcagctttcaactcccaggctcaggctattctcctgcctcagccccccaagtagctaggactatgggcatgcaccattacatttggctaactttttgtttgtttgttttttggtagagacagggtcttgctttggtgtctaggctagtctcaaactcctggcatcaggtgatcctcctgtcttggactcccaaagtgctgggaatacagacatgagctaccatgcttggccaacgttaaaaaatagtcaaaacaaaaatataaatatccaagaaacatttcaaattaaaacatttttcaataaaatatgagaaaactttgaaactatgaaaaatataaaatcagaaaatattaattttaaataaaaattaacaaatttataacagcaataaatgctgtaagcagcaaacaggtgattttagaagactgttctgacaaattctcctagaactcatattaagataataaggaaaaatgagccaaaaaaaaa

SEQ ID NO: 50371 - DNA, 386 bp, Homo sapiens
acttctataattaattaacgcgggggggttataggacactcttctgtggtgctgtttttctcgtgctgggatccctacccagactgtgctctcctttccacctttgaaaattctcctttggtgtctcttgcattattttctggatttagggttgtacttaatggcgaaaaacagaaagagacaagtctatgctatcttaacatatagctttatccatgctatatgttaagactggaagtctcaccttcatttttaaaaacttattttcactgatgacgcacatttagaattttatcgattctgaccagaagtctgctgccattcttatctttgtcctctgtatgtttagcatgtctttttacctctgactaatttaagacgggttg

SEQ ID NO: 50372 - DNA, 628 bp, Homo sapiens
  misc_feature 22, 36: n = A,T,C or G
gggtaccgggcccccccctcgngggataccttctanaattaattaacgcggggtggtatcttgtctcatgtaaatacaggttctacctacacaattactatagctgtcagatatgaggtaggtgggtctaacatgcagaaaatgtaggcactgagtctagaaattggacccctccccattacagtatagaaaccagtcccgtgtaccactttagctctttattccccctgaaataggttatcattttacatcatgacctcttcagctttcctcaagtaaggggaaaaaattatcttaacacaaaatgcaagaatcttacctaggcatctaacctaagaataccgtcagaagttatttgtagaacgtgaaaactggagctaatagttattaaaggtaggccgggtgcagtggctcacacctgtaatcccagcagcactctgggaggcctaggcaggcggatcatgaggtcaggacatcgagaccatgctggctaacacggtgaaaccccgtctctactaaaaatacaaaaaattagccaggcgtggtggcaggcgcctgtagtcccagctacttgggaggctgaggcgggagaatggcatgaacccgggaggcagagcttgcactccag

SEQ ID NO: 50373 - DNA, 276 bp, Homo sapiens
ccgggtccccccctcggtgtacttctagaattaattaacgcggggctgcagtgagccgtgatcacatcactgcattccagcctgagcaacagagtaagaacctatctcaaaaaagaaaaagaaagaaatttcccacagtaaaaaaaccgtaccactgtccatttatagcatctatttggttaaatacaaggattttgctgtagatctagcaaaagccaataggctcattagttagtgtgtttttcgcacacatttatcctggggtttaaaaggact

SEQ ID NO: 50374 - DNA, 598 bp, Homo sapiens
  misc_feature 28: n = A,T,C or G
cgggcccccccctcgaaagtcttctagnattaattaacgcggggaagtctgaactttgttctaaaaataagagcaaccaaagagtttcaaacagggaaataattgattggagaaagtccagaatgattataaatagccccgactttctctaaatggctacattaatatacatggatcataaacatcattttatttgaattattctgggtagccagtctttcttcttttcatctcaggagcagagtcctatttgatgctgaggagtttactcaagaaagaaaagctatggaattcctcaaagtcattcatagctactgacttatgaagaaggtatacatttaatgtgtccttttattgtgaataggaaagacccttattacccaaagacaggagcttgcgtgcagtaaaactaaaggatgtaaaaattctggagtgttgctttttctgatagaagaaactttaaaatataatcttatttccagtagcaaccaaaaagtctaagggcaaagcccaagccacaaattctgaagcttcaggtattaaatagttttaacatttaccttcagggatggcttaagcgtattagaagaatggtctg

SEQ ID NO: 50375 - DNA, 390 bp, Homo sapiens
  misc_feature 32: n = A,T,C or G
taccgggccccccccttcggaatacttctagnattaattaaccgggccaggagcttttaatcacataaaagtaatagtggatacgctcaaagcttgggaaaatcctaaagagtatctagtttataaaataaggaatttggtccatgacactcctgcagttcaggtttgagcaaggccaaagacgaagctttcttgattaggtgtgatgacacagaatcgtatagtatgggatatcactatgtgttatcatgaaatcataatacatatgtagacttaacattggattcacatttcatcaagtttttaaaaactcaatgaattatacatatggtctattttgaatatgttaatcatgagtacatgattaccagtcctaaaaaaaaaaaaaaa

SEQ ID NO: 50376 - DNA, 328 bp, Homo sapiens
  misc_feature 27: n = A,T,C or G
cgggccccccctcggaagtcttctagnattaattaacgcgggtactgtcttaagaaatagtttctaaagacccatttcaggttataacgtctaataatgaaaggtaagaatgacttcctaactgtaaaaagtcattctcagtgtcgtccttactgtacaccaattcagagataaaaaaaggaagaaagcggccaggtgtggtggctcacgcccgtaactccaatatgggccaaggccaaggccaaggcaggcaggaggcttgtttgagatcagttccatagcagccagggcaaacagcaatgccctgtctccaaaaaaaaaaaaaaaa

SEQ ID NO: 50377 - DNA, 626 bp, Homo sapiens
  misc_feature 557: n = A,T,C or G
cgggcccccccctcgagagtcttctagaattaattaacgcgggcccacttgccttaaagaccaataaagagagcatcccaggcctcataaaagagtaggtagttcaacaaggagatgccataaataagtaattcactccaggtccaatttcttttgttgagtttaagtgttcaaataccaccttgttttattaatgcgggtatctcatttctattctcagtttcaaacccaatggaatcaaaaaacaaaacacaaaaaaactctgcatctgtgaataggccaaaatccatcaatttccccaatctccccaaaagtttattaattcaaaatattaaagaaaaaggttctcaggccaggcacagtggctcacgcctgtaatcccagcactttgggaagccaaggtaggtggatcacaaggtcaggagatcaagaccatcctgtccatcatggtgaaaccccgtctctagtaaaaatacaaaaattagctgggtgtggtggtgggtgcctgtaatcccagctacttaggaggctgaggcaggagaatagcttgaacctgngagatggaggttgcagtgagccaagatcgcgccactgcattccagcctggtgacagagcaagattctgc

SEQ ID NO: 50378 - DNA, 234 bp, Homo sapiens
cattccaggttgtaggtaaacatggtacccacaggcagaactggccatggcactccctatctggaagcctctgatggctcatgttggtatagaacaaaagccacactcttttgccttcccaatccagcagaagctccatcacttactactcacacctgagcacccaatatccagccacttcatacttcttactgccctcaaatcgcacgtcccactttcaatcttttgccccat

SEQ ID NO: 50379 - DNA, 599 bp, Homo sapiens
cgggccccccctcggaagtcttctagaattaattaacgcggggtcttcaaaagagagaagcagaatatcttcctctttaggcaaagatggactgggaaagattgcccagaactccaatgcagacatacttcaagcctctaaaatgcaggcattacctggaaggccaggataaggatatcaccccagccacagcagtagaatgagatgctggacagaaatggtttgaagaaagaaaggcagagttactccaaaaggttttaagtagaaaggcctggaaagcaaggcactggttcagaactctcaccccacagaagcccaaaagtaagaaacgctggggagaggtaagaggaagcatagatactgtgactctgaagctttgcagaataagcaagattgtgctcttggaaaacatctctgggtagaaaatataaaaactaaagaaggaaaaacatgtacacccgtttctcctataaacggaaatgccaaaatcctaaagaaaatactagcaaactaaattccacaacatgaagagattcacataccataactcatatattgtgttccaagaatgcaagataaagtgaatagcaggaaacccc

SEQ ID NO: 50380 - DNA, 571 bp, Homo sapiens
  misc_feature 550: n = A,T,C or G
cgggccccccctcggaagtcttctagaattaattaacgcggggctgtgcccaggcctctaaattcctgagctagtgcttgctccttgctaccatactctgcagtacagtcttttctgattctaaactgtcattggacttttgaccaaggcgtcatttctctggaaatttcaaacttacttaggagtgtgttgccaaaacagaaaggcatcttttcagactttgtcctgtcacactggattagaaaatgtcatgctctttctttaaggtgatccaagataaaatccagcctggatggatggaaaggtaaaggggagggaaacaaataaacaatacaacctgaactagaaggttgaggtcctggaaattagtcctcatgatgtcttttaccattatgtgatctaggggtcattctgtcccaccttggtctctagactaagcttccacacacataagatgagaagttttcaccaaatggtccttagtgttctgtgtccagggctccttcagtcaaagagtacccttggctgggcgcggtggctcatgcctatnatcccagccctttgggaggac

SEQ ID NO: 50381 - DNA, 599 bp, Homo sapiens
cgggccccccctcggaagtcttctagaattaattaacgcgggggacatgattacataagctattttttttcctttgaaaatttaaaactatctcataagtaaatgaaagcaaaagtattttactcttcttttgtcttgcatttgctcatccattatccagtttataactttctgttatctttttgtttattaactatcacttcattcattgggctacattctatgtaaattatttaactctgcaaagtgggaacacaaaatatttaataagactctgtagacagaaagcacaaggcagtgtgaacaccacagttagtttctgtccagttttttgaagtcatcttaaattcatttattattctctgtccactcaggcaggaattttaaaccctttctgacttttggtttcaaaacaatttttaaagcatctgaaaagccctgaaacaaagaatgataatactttatttgcacataatttttaagtggccaaacagaggtttttggcttttagttctgttaaaaagtcctccctcagagttgaaaaaagaacatgaacatcttctgccaaaaggttaaatcctttgaatagaaggcctttc

SEQ ID NO: 50382 - DNA, 363 bp, Homo sapiens
  misc_feature 315, 323: n = A,T,C or G
cgggcccccccctcggggtacttctagaattaattaacgcgggactttagtgaaaggcagttttcttatttttggttttttgttttatggcttttgtgtcttattagaatttaactctaagtcacaaatatttcctcatatattttcttctgggagttttatactttctactcttatatttaaatctatgatacattttgaatgaatttttatataatttcattatatgcttatcttacactataaaaggtggatgtctagttcttcttgttctcttttttaaagacaccactttttccctactaattgtgcatntgtacatntgttgaaaatcagttgatcacaagtgtattttcagtgcta

SEQ ID NO: 50383 - DNA, 587 bp, Homo sapiens
  misc_feature 27: n = A,T,C or G
cgggccccccctcggaagtcttctagnattaattaacgcgggcgtcccttcttatcaagcctgaaattcctaccattagagttgctaagggtttagatgacaaagaacggggcatgtttcccagcaggtcaccattaaagcaggcttcctgggagtggaagggaggcccttgagtctgctccttttagcacaaagagctaatacggccagaagctcagaggaggcaggggtggcctactttacaattttgcctcctactgagatgccagtcacttaattcattcatgcccatatgaccagggccctgaagaaattaggaagcaggctgtaaagaaaataagacaatgggcccacaagtaaagcatcatattctgcttctcctttgcagttccatttaggttttgcattttctcctcacgggaatctgggtccaagttggagaacttttttatgtgctcggggcagccaggcattagggtgcacccaaagccccacaggaccccccagagtttgttgttctccctaagttcttccccacttcttctcatcaccacttccccttggctaatcccaaaaaaaaaaaaaaa

SEQ ID NO: 50384 - DNA, 509 bp, Homo sapiens
  misc_feature 214, 493: n = A,T,C or G
cgggcccccccctcggggtacttctagaattaattaacgcgggcgagggataaaagactccacattggatacagtgtacaatgcttgggtgatgggtgcaccaaaatctcggaaattgacactcaataacattcatataagcaaacaccatgtgtcaccagaaacctgttgaaataaaaaataaatttaaaataaataaattgcctcacacagngaaaaataaataaatgatggaaactacttataatgtaataactgacactaatgccttaaaatttcaagccaggacacttggggtagttgtaataaatcaaaagtaaaatatgcttcattaaacaaaggctctcaaagagcctcttgaacctctagaaatggatggccagagggccttgcagctgttcgtgcatacaatgattcatggtctaaaatcctgatcaaatgtaggtttgcaggaagtaaagaaggcctgacaaggctctgtttaaattctatntctaggcctgattttg

SEQ ID NO: 50385 - DNA, 500 bp, Homo sapiens
  misc_feature 13, 479: n = A,T,C or G
ccgggcccccccntcggggtacttctagaattaattaacgcggggagcgcacgccggccggccgtaaaggcgttgtagctgctagcttgattagaaataccatcaggtcccaggcactgtcacaagctgcatcttgccctttttcttcttttgtccagagtcagaactggaaaggggcacgtttcctgcctcctgccgcggtgctgtgggcacaccaaagactggattccggttcgtgtggggcctcaacaaagacccaccagaggaaggccgggtgtcagaagatctgtgtacgtctgtcctgaggggagggtctgaggctttttgttgaaacaagtccttggaaaaaatgtgggaggggccccacaggcaggtgctagagggaaacagatctcagggaaaagggacctcagtaaactgactcgaaggccagtgccacggtgttcgctgctcagagaagccagggctgctggggcctngccgggtgttcccactgctgc

SEQ ID NO: 50386 - DNA, 619 bp, Homo sapiens
ccccccttcggaatacttctagaattaattaacactgacactagaaacgaaatacccattatctcataaggagctcacacaactctataggaaaagatctaataatctcattttgaaatcggcaaaagaaacaggcgtctctcagaaggagacacacaagcggacacacaggtatacaaaaaggtgctctaagatcaatgacacatcacaataaatgcaaatcataactacaatgaaacatcacctcaccccacttaaaatagcttttatccaaaagacaggccataattaacacatgttggcaagggtgtggaaaaaagagaactctaccacactgttgatgggaatgtaaattagtgtaagcactattttgagaacagtatggaggatcctgaacaaactaaaaacagagctaccacatgatccagcaatcccactgctaggtatatacccaaaacaaaggaagtcagcatattaaaaatatatctgcacccccacatttattgcatcactatccacaatagccaagattcggaaacaatctaagtgtccattgacagaataataaattaagaaagtgtggtgtgtatacacagtggagtgctattcacccaaaaaa

SEQ ID NO: 50387 - DNA, 455 bp, Homo sapiens
  misc_feature 29: n = A,T,C or G
cgggcccccccctcgagggtacttctagnaattaattaacgcgggtgttttagggagtgtagtactatcttaagccttatttgattgcttattttcccaccatactggataggaactcttactttctttctgtttctaaagcacaagtgtttgaataagacattattcccaatttgaaactagtacctgatacttcctcgtaataagagtgatcctgatattattgtggttttgttaaggaagacagcatgatctaggcagcaatagatagcctaggaagatatttttacagggatttagtcaattcataatatctcattctgatattgctgatatctgtgtcactgaccatatactcttagcagaaaatgggaaagtcagaagcatgtccagcttcattttgtagctaagagagtagagtgatgctttttctgtgaacccaaaaaaaaaaaaaa

SEQ ID NO: 50388 - DNA, 567 bp, Homo sapiens
cctcggaagtcttctagaattaattaaaaagtcattggtgattggcatttggcatataacagtttttatagccaaacagccttttcagtttatttatctaaataaatctgggtgtcttgtatctgtttcgctagttcgcatatttggattgtggttttcattaccaagcaaaacaagtttcttttggtttattggcaagcttttgtcatattaattcataactaatggaagattgatatttcaagtatttttgtaggataaaattgggctttctgttttctaagcctctgaaaaacatggtatatttttcactatgactttcttgtgaagggctattttaacattatagttattactattgataattaattttaatacaatggaaccttgctcgaaaacacaaagctcaagtattggtttactaaggattttttctaaggtttgtttctggaattctgtttagaaccttataattggattaaaaaaaaaggtcactaatcctaagtgttctcattattgttatcccgaaatctgctaagaacttctatcctctatctatctatctat

SEQ ID NO: 50389 - DNA, 598 bp, Homo sapiens
ccgggccccccctcgagatacttctagaattaattaacccgggaggggggaggcaggtgaatcgcttgaactcaggagtttgagaccagcctgagcaacatggtgaaaccccatttctagcaaaaatacaaaaattagctgggtgtgatggtgtgcacctgtggtctcggctcctcaggaggctgaggtggcagaattgctggagcctgggaagtcgaggctacattgagccatgatcacaccactgcactccagcctgggtggcagaacgagacccagtctcaaaaaataataatcaaataaaaattaaggccaggtgcagtggctcacacctataatcccaacactttgggaggccgaggaggctggtctcaaaatcctgacctcaggtgatccgcccacctcatcttcccaaagtgctgggattacaggagtgagccaccgcgcccgggcagattatttgaatacttttagtataccattttaatttatctattgggttttgattatatttcttattttaaaattgttttaacattttttccttgtcttcaggattctctaggtatatatttctttctatagagcttctgtacaa

SEQ ID NO: 50390 - DNA, 620 bp, Homo sapiens
  misc_feature 28: n = A,T,C or G
ccgggccccccctcggaagtcttctagnattaattaacgcgggccgggcgcagtggctcacgcctgtaatcccagcactttcggaggctgaggagggcggatcacgaggtcaggagatcgagaccatcctggccaacacggtgaaaccccgtctctactaaaaatacaaaaaattagccgggcgcggtggcgggcacctgtagtcccagctactcgggaggctgaggcaggagaatggcgtgaacctgagaggcagagcttgcagtgagccaagatcgcaccactgcactccagcctgagcgacagcgagactccgtctcagaaaaaaaaaaaaaaaaaaaaaaaaaggattttaagaaatggggtcttgctatgttgcccaggctggacttgaactcctgggctcaagagatccttccgtctcagcctcctgagtagctaggactacaggcacgccaatgcacctggcttaggaatttgatttttgtattacaaatttggagaaaaaaaaattacataacacatatatggacaagaaatcccccataaaacaccccattaacaatcaacaacattattattattctgcctccaattattattttgtcttcaatggaaag

SEQ ID NO: 50391 - DNA, 305 bp, Homo sapiens
cgggccccccctcggaagtcttctagaattaattaacgcgggcctgcagtcataaatattgcgctcttttctccttcacccctccctttctggtatggggtagtctgtttaatatcactatctccttgagtgctctgacatttactcagacaaacagcagaggttatgaatgctgctcatagatagtatcaggaattcttcatgattgccataatggtgaactcagcattcagaatggtaatacctagtttttatctaaccactaagtttggtctgtttaactttgctccaaaaaaaaaaaaaaa

SEQ ID NO: 50392 - DNA, 381 bp, Homo sapiens
gccccccctcggggtacttctagaattaattaacgcgggggaggagatattaacacgtctgtatttgacttttacagcaagcatgtattgatattgtgattctttaataaagtgaaaattttgaggagcatgggtttgagataaacagatggattataagctagtttttatcacttaatattcatgagaggtttggaattaataaattacctaacctcagtcttcatctataaaaagggaataacacctacctcacagtatataattaaaggaagtatacgaagcttgtaacattatccttttataaatgttactttctttttcctcccatataagtgatttggagtagaatattaaaataaatgcataatgcgttggctc

SEQ ID NO: 50393 - DNA, 606 bp, Homo sapiens
  misc_feature 592: n = A,T,C or G
cggggccccccctcggaagtcttctagaattaattaacgcgggagttagtgaagattggtttaacagcagtagaaatatagaagaagggataaatgcaaatattgtgagttcctgaagtgcaagtgtgatctcatttatctttgcatcctaagcacatagaatatagtaaatgcttaataattttcaatataaaaacttgatttttgattgttagaaatgccagaggggaagaagtaaaaaacaattccaaatttcaagcctaggtgattgaaaaataatactgacacaaatagattaatctgtagggtaagctgatttggggaaagataataaattcagttttatacattttgaagtttagctgaggagaagtcactgactaatctatattgaattaagtagaaaatgtgtcaacatacccatttcaacaacagaggaaggtttttgggaaaaatgctctccaaactatcttctctctgttaggactgaaatgaaaatttcagctagaaaaataatgttacttatctcaagtggcaatggtcactgattatgcatagcatgatgattgttttggttttatagaataattanttttacttaagttc

SEQ ID NO: 50394 - DNA, 603 bp, Homo sapiens
cgggccccccctcgaaagtcttctagaattaattaacgcggggcagtaattcagcacagaattgatgtgttaaaaacaaatgattgaaatggttcacatgatggcctccgtcttgtaccttgtagtatcttcattcactcacactttatttcaagtaagtgacctgacatgactggacctgtgccaaattcttatcaatattgggaagaaaaaaatgcccaacatgccgaccctgctgataaaggatgagtggggtcgtatctgcatttagtggaagcatcataccacccatattgaattgtatagcatctcacatattttaagtatacttgtagtcatatctagcatccataagaaatacatgaggatcttttttccgattttataggaaaagaaactgaagttcagtatttgccagtagggcttaacacaaaactcattcagttttggactcttcagcgcttcattaaataaaataccattttgcttggcacagataaggatgttttttacagtgttacagttttcgtacacactggtaactttcttaaaaccatcatgatgtgttacccagaatgttttaactttgaatattaggtaata

SEQ ID NO: 50395 - DNA, 451 bp, Homo sapiens
  misc_feature 17, 20, 33: n = A,T,C or G
gtaccgggccccccccncgngggtacttctagnattaattaacgcgggaacctattcttaatcaatcattagcaaagagaataggatattgcttaattgatttagcaaagtgcacgaccacgtggaagacaatgggttcaagacaacaataaattaggggctgggcatggtggctcacgcctgtaatcccagcaccttgggaggctgaagcaggtggatcacctgagatcaggagttcgagaccagcctggccaacgtggtgaaaccccgtctctactaaaaatacaaaattagctgggtgtggtggtgggcacctgtaattccagttactcaggaaactgaggcaggataattgcttgaactcaggaggcagaggctgcagtgagctgagatcaagccactgcactccagcctaggcaagagtgagattctgtctcaaaaaaaaaaaaaa

SEQ ID NO: 50396 - DNA, 567 bp, Homo sapiens
cggggccccccctcggaagtcttctagaattaattaacgcggggtgtgacgctgctcacctgtagtcccagccaatcaggaggctgaggtgggaaggaattacttgagcctaggagttcgagtacagcctgggcagcacaggagagcccatctcttagcctgatcagtataagatgttgagagagaaacactctaaattcaaattcaaataaacaatctgctgcttttctcatttcaaaaaacaattcaagccttactagtgatatttgttgaaaaggactaataggcgccgggcgcagtggctcacgcctgtaatcccagcactttgggaggccgaggtgggcagatcacaaggtcaggagatcgagaccatcctggccaacacggtgaaaccctgtctccactaaaaatacaaaaaaattagccaggtgtggtggtacagtcctgtaatcccagccactcgggaggctgaagcaggagaatcacttgaacccaggaggcagaggttgcagtgagctgagatcaccccactgcactccagcctgggcgacagagtgaggctgtctc

SEQ ID NO: 50397 - DNA, 557 bp, Homo sapiens
attaattaacgcgggtacagtaatgatgctggttcaaggctttacaagttaactccctaattactgcattattttcttctcttcatctttttctttccaactatttacctcattgttggtttattctccatatacataccaatattgagctccataaagaatcactgaagagaaatcaattattggtaataataaatgatggaattttgccctacattacaaaatgtcatcaccacttagcttttaaatgccataatggaatgaaatgaactagaaggtattaggaaggagatcacgggtaaccaaaaattatggataaaagcaactgtaatcactttaatgaagtgaaagtatgttaataagtttgcaggcatgaaacatggtcatggcttcttggagacctggagttagctctcctccctagcaagattttctatttagcattgactgactattacagatttcagtaaccctagaccctgccctgaaaccctgggtaggagtttggcaaataaagttctttcagattacaattttttttcaatataccagaagac

SEQ ID NO: 50398 - DNA, 576 bp, Homo sapiens
  misc_feature 37, 549: n = A,T,C or G
ctggggtacccgggccccccctcggaatacttctagnattaattaacgcgggacttaatattcttataatagcaataatctaaaaattggtctatagattcaataaaatcctgagcagaatcatagccagccatagaaattgacaagtaattttaaaattcatatgaaatagcaagggaccctaaatagtcaacaaaattctgaaaaagagaaacaaatgggaagaactctctctcgctgatttccaaacttactacaaggtaactgtaatcgatggatggtattgtactcaggtaacggtagacgtaaagataaatgcaatagaattgagaatccagaaataaaccaacatgtctatggttgacttagacaagggtgtaaaaccattctgttcgggaagaaactttttaacaaattttagcaaatggttcttggatgactggatatccccatgctaaagagcgaagttggactcttaactcacactacatacaaaaaacgactcaaaatggatcaaacaccaaaatataataaaaactattaaatgtntaaaagaaaactcatgctttaattttt

SEQ ID NO: 50399 - DNA, 615 bp, Homo sapiens
cgggccccccccttcggggtacttctagaattaattaacgcgggctgcctgtcatggcacccaacttgcccaagccccagtcctgccatcttgttacactaaagaggccctaaatgtgtttttggcccagttgccaccccctgccccccaggctctgcttgaccctgctccacggaccccaggtcttgctcctgaggccattggaccacacggcccagccccacttcattagacttctttgccaatttgccctcctctgttttacatattcagcggctgttggttgtccagcagattcaaagttggtcccagaaaggcagaaaaggagcgttgcgccgaggcacggtggctcacgcctgtaatcccagcactttgggaggctgaggtgggtggatacctgaggtcaggagtttgagaccagcctggccaacatggcgaaacctcgtctctactaaaaatagaaaaattagctgggcatggtggcgtgcacctgtaatcccagctactcaggaggctgaggttggagaattgcttgaacccgggaggcagaggttgccgtgagcagagattgcgccactgcactccagcctgagtgacaagagtgaaactctgtct

SEQ ID NO: 50400 - DNA, 488 bp, Homo sapiens
  misc_feature 28: n = A,T,C or G
cgggcccccccctcggggtacttctagnattaattaacgcgggggctggtctcaaactcctgacctcaagtgatctgcttgacttggcctcccgaagtgttggcattacaggcgtgagacaccgcacctggcctttttttcccctcgttttcaatgggattaagaaaaaactggattggcgagacttatacaaagagaaatcaactaaataatgcgaaatgtatcatccctcttgctctttaagtctggcttttccccgctaggtacacactgccatttctcacctctttgagttttgtcattctgtccccttacctagaacactctgactccctttcttcttctagctaactcacccctcaagactcagctttggggtagctcatttgtttatttatttacaaaatatttatgaagaaccaaattttgtaccagacaccacatcaggcactagaaagacagccatgaagaagattacctatctgcgc

SEQ ID NO: 50401 - DNA, 526 bp, Homo sapiens
cccccctcgaaagtcttctagaattaattaacgcgggagcaagaggttgcaatgagctgatactgcaccattgcactccagcctgggctacagagcgatactctttctaaaaaaaaaaaaaaaagaatagcacagataagacatacatgaagggataattaatgaagtggaagataggttaccttaaatgtggtacatacaaatgtaaaacataaaaggagttttaaaatgtagcacatagaactagaaggtctaatagatatttaatgagttactgaaggagagactagaaaaggacaaggctccatcctaagagctaatggttgagagttttccaaggttgatgaaaaaaatagagtcttcaagtaaaagatgtactctgaatctgcagcagagaaaactagacaaataggttaatacataaataatcccacctcttttttttttgagacggaatgtcagcctgggcgacagctcaaagactacacatggggtacagtgtatactacttgggtgatgggtgcac

SEQ ID NO: 50402 - DNA, 594 bp, Homo sapiens
gccccccctcggggtacttctagaattaattaacgcggggtggggagtggagtgtggtacaaagctaaagaaggtgcagctaacattcaaatgcaacatcacataggaacagtagataaaataagaggaagatctggaaaatgtgatgtaatgggatgggattggacttaatatatagaaaaaagaagtgctttaggagccagatcttttgaataagatgtatcattgaactaagcagtatacattttagtttaaaaaaataaacagtatatctttaagcagggttattaataacagaatacttgaaggtatatttgtatcatattatgaatacatgcttttcattaacttactgcctgtattgatttgaaccataatgtggataaaccaaaaggagaaaaacaataatacacaggccttcagtaggaaaaacggtaatatacatgttgagagaagggttagaaaggacgtcttagtaaaacatggtctgatttttatcaatctagagtgggaagactcttattctcttttctccacatttagcccagaaatgcaggttgggggaatagaaatgatgcctaaggctccttgctg

SEQ ID NO: 50403 - DNA, 624 bp, Homo sapiens
  misc_feature 13: n = A,T,C or G
ccgggcccccccntcggggtacttctagaattaattaaccggggggcgcaaacgaattactagtgctagtgttttactctagtggctgaggtctcctaaattaatgagttaaacaggacaggatatagcatcagaagagagttcctgctgtttacctacaatggttgcatcctcactaaaaaaatatgcactgccctctgctacaaagacacccaccagttcttttgtctttgaggactgtttccccttgtgctctgccagtctatcacaataaaatgatttcagtgatgtggtctcattgcaggaaatgtttaatgagtctcaagaaaactataaataaatcttaggtcattgttacaccgaagaacatcttcaggccttagataattaggatgtcccgcctaggtttattacgagaaatcttcattcaaagaggtgcatgcttgatactttattttaatttattttattctgggctttaaattgtcctgtctcagtgcggaaaaggaagaagtgtcaagtctcttggcgagtagggaggttgtcatttttaacaatgtccttataagatggaggggacattcagaggttggtcatcttgtccatctccagcctgcaaatatt

SEQ ID NO: 50404 - DNA, 453 bp, Homo sapiens
  misc_feature 414, 441: n = A,T,C or G
gggccccccctcgaaagtcttctagaattaattaacgcgggccctaaccccccatactaggttaggtccatctactttacattcctttgtacatttgtaattgtttacttttatgtcattatttatttatcttccctgctacattatatgcttaatgggagtggggataggacctgtcttgctcatctttgcagcaaaagcacctagagaagtgactaaactggctcactggagaggctaaatcaatatttcttgctcttatgagtaatttacatctagtaaatagtcatagctttactttaccatttaaaactgaaacttggtagggtgcagtggttcatgcctataatcccagcaatttgggaggctgaggtgggaagatcacttgaggccaggagttcaagaccagcctgngcaacatagcaagaccccatctctaanaaaaaaaaaaaa

SEQ ID NO: 50405 - DNA, 390 bp, Homo sapiens
  misc_feature 359, 362: n = A,T,C or G
ccgggccccccctcgaaagtcttctagaattaattaacgcgggggattcagatctgatataaaaaccaattgattttgaaatggttccaaacactattgctaggaccagatttttaaaatattttgtggggaaaaaatatttcaaaaaccccagcctgggcaacatggtgaaactgtctctacaaaataaataaataaatgaataaaaatagccaagcctgatggtatgcgcctgcagtcccagctacttggcaggctgaggcaggaggattgcttgagccggggaggtcaaggcttcagtgagctgtgagatcgcaccactgcactccagcccgggggacagaatgagcccatctcanaanaaaaaaaaaaaaaaaaaaaaaaaaaaaa

SEQ ID NO: 50406 - DNA, 566 bp, Homo sapiens
  misc_feature 12, 25: n = A,T,C or G
gccccccctcgngggtacttctagnaattaattaacgcgggtacactaaaatcaattcagttgtgcatttaaatgagtaaattggtatgtgaattgtacctcaataaatctgttaaaaccatagtaattaggatattgtaatactggcttagagatggaaaaattgatttataaggaatcctgattgtaaggaatcttgacttatgtcagagatggcattgcataccagcagggaaagctagatcatttcaatagatgacgctgcatattcatatgggggaaaaatgaaattggtcctccctacctaacaccatacagaaaaagtagtttcagatgactttaagatgtaagtgtgaaaggaaaacatagtaaaccttcaaaagaaagattgcaaaatatttttatgatcttatggtagggaaatgtaatatgtataaaggaaaacatgtatgtccaatatgttaaagttaaaaacctctgttcaagactccataaaccctcagaatagcggttaatttcagtcatgcccaggaaacatacaagatgagcctggaataccttgtgca

SEQ ID NO: 50407 - DNA, 577 bp, Homo sapiens
  misc_feature 529, 530: n = A,T,C or G
cgggccccccctcggaagtcttctagaattaattaaggcagacattctgaattgaacacaagggtatctgtgattgttgtgtaatactgtgtgatgtaaatatattgaaaattaataactgagtcaagcatcaagtcaattcacaacctttcactccttagagctttgggcactcagtaaagcaattaacactttggaggtctgtggccaaaaggtaccctttgggaaacacacaatcaacagggctgtgagtctgttgagcagttttagaattccaattaaacatttcaaagaaagtcaatttaatttcaaataactgtattggcaagactaggtatatgcaaactgacaaagtcaatatatattacatgccatggggtaattttcacaattgcaagaacatatataaaaagaaaaatattgttttctccataacttcaaggccattgtaaacaaacaggcaacctccttcacacaagacattttctttaaagtttaataaggcccacatttcttttccaagatacannaatttatttatcctcttatctctgggcttcatacatccagttgtata

SEQ ID NO: 50408 - DNA, 587 bp, Homo sapiens
  misc_feature 9: n = A,T,C or G
acttctagnattaattaacgcgggtatctaagaaatcattgccaaatccaatgtcatgaagcatttccctgtttgcttcttagagttttatagttttaccttttacatttaggtctttgatctatttgaattttatttatttatttatttatttatttatttatttatttattttgagttgcagtgagctgagattgcaccactgcactccagcctgggcaacagagcgaaaactctgtctcaaaaaaataaataaataaacttatttacataaaatttataatgtctgtattggtctcttgtgcacaaacaacatgtcagtgacatataatagtaaatgtttatttgtttctctgtggttcagtaaagccaggcctttggctatctggagcagcttttatttaggctagagattgactggggcagttctgtttcaggctgcctattcactggggtgactttgctcaggctgtgtttcagctagggtggctttgttacatatctcgttcttgggactataccagaggagcagtgggctgcctctgggtattcttctgatggagacaaatacacaagaaggcaaacta

SEQ ID NO: 50409 - DNA, 590 bp, Homo sapiens
  misc_feature 23, 558: n = A,T,C or G
ccccccctcggggtacttctagnattaattaacgcgggggtggcaataaagaaatacagaagtaattttaagatgtaatttagagatagaattgacaagattattccaaatgcaagtcgtcctttctatatgttatctgtcattcatccgtaattttgcatgaatttgtggagggttttttaatttagaaaataatcatttcaggttagaaatgaaaacatcttgaaacaagaggagacatttgtaattcaaccaatttgcaatgccatagcaaaagctattagggaatctaagagactttcaccagatgaaaatcatgctttaatcaaaatttactgtagcctcataacttttatggtacttgtattaagctactttcacagtatatattttcaaaaaaaggttttttaaaaaaaatagcgagtgaaaataccttattgtgtcacttctagggatatgacatatacttgtctatcaaagaaaaaaaaatcttttaatggttactaataaagacttagtgtgtgtgtgtgtatatatatatatccatccatgaattgnggtatggcactgtggctcatgcctgtaatccc

SEQ ID NO: 50410 - DNA, 568 bp, Homo sapiens
  misc_feature 32: n = A,T,C or G
taccgggcccccccctcggaggtacttctagnattaattaacgcggggagacaggcgtatttaaaagaacaacaaccgagtcgatttagcctttcttcctctgtaggtacattatttctgaaagaaaccaagtaaaggaagaaaaactccatactggagagaatttctaacaacactggctatctttaagtctttgctacaaaatttacacttcttagattatctattcaccattgacactcaaagacaggctgcatgccaaagccctgccatgaagatgcgggagacctcattctgtaaatcaagattccaaagaagaaaatgatctgtgtttttatgaaaaatttacctttgaatttgaacatagttatatcatatatgaaatacccatatttaaatgtaatgcacataaaattacaccctatttccaaaaataaaaaacgaaaaatctgtactcagacaagaatttttaagaagattgaaatatttagaaaatgatgcattttcataaaacagtaacatagtaaaatctataaagctacacagtatagtcccttaccccttagtt

SEQ ID NO: 50411 - DNA, 487 bp, Homo sapiens
ccgggccccccctcggaagtcttctagaattaattaacgcgggcctatttggacttcagaactactttctacttaccctgcagtgagtctgtgaagtgaggcctggagctgcagaacatctccagggggttccatcacagcttcacacagttctctgaccagccagggaattcggaagcagctgtgctagatatttcttcccctcccttctgcaaagatgttcactgtttgagacctcaataaccattatttagcactgatattaacatatagcattggcagcttagaactttccagaaaataaaatctgataaaagacagtgtcctagacacaagataacagacatacaaagagggacatttttatattagtgggataacaaagggtgagatgaagccaactttgttggagcagagcaggggcactcaaagaaaagtggtatggagctccaagtgaacagccaccacaggccactgactggcgtga

SEQ ID NO: 50412 - DNA, 441 bp, Homo sapiens
  misc_feature 37: n = A,T,C or G
ctggggtaccgggcccccccctcggggtacttctagnattaattaacgcggggggggggtagaacaactgcccagacgaggacgtgtgaaaggccttccactgagcctctggcccactgcctgaatctagtgcgaagctcccttacatataaagctgtcaggcctatgtgaagtgctctattataaatagcatcagagatccaaagaccaccagacacttgaggaatgccttccacataaaaaacatgagctaaaatgcggatagaggaaaaagagtgtactatcgacacaaaaatcatgtggggttcggaataaaactgcaaaaactcacacaaaagttaacatcctcagacttaaatgacaaggtgatgcatctatgacacgagaccgaagtactgccaaaataatgagtagggtaataagcataaaaactcatcaatt

SEQ ID NO: 50413 - DNA, 391 bp, Homo sapiens
  misc_feature 17: n = A,T,C or G
ccgggcccccgctcggnagtcttctagaattaattaacgcgggcaattacattcttcaagtatacgcattgtgttgggatcagagaaagattgttattgtttatttaaaaaccagatggtgacaccccacacatcagcattttaccacattgacacttacatgaaagtcccaaagtcccccacaaaatattctatgatatgaagcaatagagaactgtaaattgtatatgagtacatacattagagatgcagctgtcatctttttccccactttaaggtgattgaaaaccctttctatttggatacaagatggaaagaattctgagttcacttactcaaatgttgaaatgtatatagatgtctccaaggaccagatacaacctggtggctc

SEQ ID NO: 50414 - DNA, 514 bp, Homo sapiens
cgggccccccctcggaagtcttctagaattaattaacgcgggggcaacagagcaagaccctatctcaaaaaaaaaaaaaagacagaaaactctgatagaggatttgcacttatttttcaaaattctagaggttaagaacaaaaagagtaccacctaaacaaataaaatattcatcattctctctaagacacacaagtcataagacaggagaccaccaacaaatcattacaaatttcacaaaataatgtctcagaacagctgacttgatcactgctacctagaacaacatcaggagcttaaaatgctctaaaaaatatttggagggatcacaagcaagctggcaagaagaaaggaggcaacctagcagccagatctatttctgccagcaaaattaacatcaatactgagatactaaatttttttgcaagtaatatcaccaaaacctctaagaaaataagaataaaaggcaaaataagaacttgaagccctttatttatccaaaaaaaaaaaaaaa

SEQ ID NO: 50415 - DNA, 581 bp, Homo sapiens
  misc_feature 23, 46, 483, 551: n = A,T,C or G
taattaacgcgggctgcctcagnatctcctggattgtctcccccanatcctctttcataggagaggtggcctcctcccttctcctcagcattctctctgttgtctgtaatttctcatttggtgatttacccactcacactattattacttttgtgtctgacagaatgtttcctgtcaagtatcctttaaagccactgaccaatttcatttataaattaaaatgcaggccgggtgtggtggctcctgcctgtaatcccagcactttgggaggccaaagtgggcagatcacttaaggccaggagtttgaaaccagcctggccaacatggtgaaatcccatctctacaaaaaatataaaaattagccatgcatgttggcacatgcctgtagtctcagacactcgggaggctgaggcacgagaatcacttgaatccaggaggcgaggttgtagtgagccgagatcacaccattgcactccagcctgngtgacagagagagactctgtctcaatagatagatagagagatagataatagagagagagagatagatngatgatagatagatagagatagatagatga

SEQ ID NO: 50416 - DNA, 614 bp, Homo sapiens
  misc_feature 600: n = A,T,C or G
cggggccccccctcggaagtcttctagaattaattaacgcgggtcttgatctgaaattacttcctgtgatataaccacttaattcaaatgtgactacagttctttctgttgttgttgttgagacaatgtctcgctttgttgcccaggctggagcacagtggtgcaatctcggctcactgcaacctctccctccgaggttcaagtgattctcctgcctcagcctcccaagtagctgggattacaggcttgtgccaccaagcctggctaatttttttgtattgttagtagaaatggggtttcatcacattggccaggctggtcttgaactcctggtctcaagtgattcacttgccttggtctcccaaagtggtgggattacaggcgtgagccaccgcgcccagcccaaatgtgactataagtctttatcttaccttgttggcaatgctgaagtagtgggagattttttaagagtagtgatgaaataattttttagctttgaatccccaaatcagtgcctagaaagtcataatccctcaattaatgtttactgaattgaatgtgtttgaactaacttgagttaaatacataaggaaacattcntaataaaacaagat

SEQ ID NO: 50417 - DNA, 546 bp, Homo sapiens
  misc_feature 32: n = A,T,C or G
gtaccgggcccccccctcggggatcttctagnattaattaacgcggggaggccatcttagcttcagagatttctacgggtttcgctgaggcctttattgtgtttgcatcactgcacaatttcactttcttccttatcccacttcctttaccttccttctacaggtgttcatcaaagagtatctactaatatacacctagcatgctaatctgcatctcatagtttacttcctagagaatgtaaccagtgatggttgaccagaagtggtcttgcagatgctaaaattgaattttggagctggatcacttaccagctagctggccggcaatgagaaccccattactgatggttaatcaagcataaagtagcagtgaaacactttcactggggcaatctgggatggtgtattgtttaatgggaatgcactaattgctgcaaggtatcagccattgggaaaaaatgaaggaaatagaagctctaaggagagtggaattgggtgacctattgctaaactattgctaagcttgatggatgcctttgggaaaga

SEQ ID NO: 50418 - DNA, 495 bp, Homo sapiens
cttctagaattaattaacgcggggtcacagtggataaaaagaggatacctctaaagcaaactctgcaggtaagaaaacaagtcagagggcctgaaaactagaaatattcatgatgattttggctttccaaaggagacaagattgttacaagtagggtaataaagcgaagagctattttctcatttcaaaaaaacactgagggccgggcatgctggctcatgcctgtaatcccagcactttgggaggctgaagtgggcggatcacgaggtcaagagatcgagatcatcctggccaacagggtgaaaccccgtctcgctaaaaacacaaaaaattatctgggcatggtggcgtctgcctgtaatcccagctactcgggaggctgaggcaggagagtcgcttgaacctaggagacggcggttgcagtaagccgagatcgcaccactgagctccagcatggcgacagagcaagactccatctcaaaaaaaaaaaaaaaa

SEQ ID NO: 50419 - DNA, 343 bp, Homo sapiens
gggccccccctcggaagtcttctagaattaattaacgcgggctgtcacctactgatagccaggatttatttggcctgtgagactatccccttgcttccttgtcattccatgtgctgtgctcacttgatcagtagaggacattcacagcctcactgcccctcaagaacataaccgtgagacattagctagtagatttgcagatctgttcacaaagatttctagttaaagaatgcaaagtaactaaatttactagatttcacttcaaaagttatctatacctatactgcactccagcctgggcaacagagcgagactgtatctcaaaataaaaaaaaaaaaaaaa

SEQ ID NO: 50420 - DNA, 471 bp, Homo sapiens
  misc_feature 23, 34, 462: n = A,T,C or G
tgggtaccgggcctcccctcggngtacttctagnattaattaacgcgggcaggtcaaagatggtagttatgtgaaattttctttgcaaattgaacgtattgcttggctaacacatggtgatgtgatgtttgagtactggcagtagtgtgtcttccactcttgctaagggacaggtcttttcttagcctaggtcagtttcattaggaaaaattgcccttttacccacttcgagcagcttaaacaaattatctcaaagaactgcagggcttaacccatttaatgaattttaataaggaatacatgaatcagtcaaaaaccagaaaaaaagtgaataacattgaactagttctcatggaaattagctcatgactctgctggcttacatttaccaaaggctaaatttttgatggaaagcttaggtctgttttccaggctgtgggagaatgggaggatctttaaatnaaacatgaa

SEQ ID NO: 50421 - DNA, 350 bp, Homo sapiens
  misc_feature 17, 269, 299, 330: n = A,T,C or G
cgggcccccccctcggnagtcttctagaattaattaacgcgggtactaggttctttcatgggtgatacatgtgcattaaacaggattcttatgaaaacaatgaatcagtcctagagactgaaattacaagccctctgtgaaaataataaaagtacttttgtttgagggaaggacaattgttgattgattctcatatcacatttcttgggtggcaatttgctgacttgtaaagttggctctctgactttttaagtgaataaacacatatntaatcaatgaatcagaaagaagatgctctncaatgggcaatggggagaaatcctatggagncctgaagatataaaacacat

SEQ ID NO: 50422 - DNA, 414 bp, Homo sapiens
  misc_feature 33: n = A,T,C or G
gtaccggggccccccctcggaggtacttctagnattaattaacgcgggccgagagtgacagctgaagtctccccaccaactaagctactcgcgggcggagtggggtctgcgctggcaagcccctgggcgcgcgggtgcccgctctggctcgcccccagggctgacctacccaagccacaggaaaactctgggaagagggtcgcggattccaacgcggaagtggtgggggattgagtctgagaggttggggagtcctaccttccattgccacgagtgctagttctatctgccagtttcttccttgaaatgtcttgtggcaaccagtgacattgatggtttcatgaatggacttcctaccggtagaccctgcaagagcatgaactccactgtatcattcatccaaaaaaaaaaaaa

SEQ ID NO: 50423 - DNA, 594 bp, Homo sapiens
cgggcccccccctcgaaatacttctagaattaattaacgcggggacttttattctgttttgttctctacgatatccccaaaaactaaaaacaagggatggctgttacaagaaactcaataaatatttatttaataaataaataggcttaacttttttaattggcttaatataaaacccaaattttgttatggtaatgtatttagtcattcattctatatctagtaaatgtacacttattgattcatatatggtttatatattgaacttggcattgggcaattcaatatattgttcttatattgaacttggcattggggaaacaaaatagaaaatggtctctattttcaaggagctgacatcctgatgtgtgatagaaacacacaaataaaagttattgctacagggaatttactatacaagtgtcctggaagtacagaggaaattgcttaacacttcctaggaaagcaatgcatattttgacaaaacatgacattttaattaggtcttgtataaataacatttcatggttaaagaattagaaaagctagtatcatctgaagatgcctacagtgggaatttccatggtcttaatc

SEQ ID NO: 50424 - DNA, 608 bp, Homo sapiens
  misc_feature 83, 84, 85, 86, 87, 88, 89, 90, 91, 92, 93, 94, 95, 96, 97,98, 99, 100, 101, 102, 103, 104, 105, 106, 107, 108, 109,110, 111, 112, 113, 114: n = A,T,C or G
gccccccctcggggtacttctagaattaattaacgcggggaaggaaggaaggaaggaaggaaagaaagaaagaaagaaagaannnnnnnnnnnnnnnnnnnnnnnnnnnnnnnncccagcatatctcctgcattcatttgttccagtgccaggcacaatgaggtactgttccaatcctaagagccgagatcatgccactgcattccgcttgggtgacagagaaagactccatctcaaataaatgaatacacaaataaataaaataaactaccctcctattgacgttgactagtctacgtctttctgggtagtgccttcactcctctctgacccttagtgaacacctttagcaatctgtaatcaatatatttgtaacgaatcaccatcagctgtccatggtcccagtcgtgactcccattgaatttaagggtgaagatgcccctgttttctgagggatctcttcctccttgtgccttctgtaccaaatcaaaatgtccaatctcaatgccagggctgggatcattgatgcttaccacgtgggtttctaacatagactgtgggttgcatttttctaaaatacatggtccaacagcgtttaaggtcaccgt

SEQ ID NO: 50425 - DNA, 613 bp, Homo sapiens
  misc_feature 50, 51: n = A,T,C or G
cgggccccccctcggaagtcttctagaattaattaacgccgggtgatcanntcctaattagaaaacaaatattaaaattctcttagtgtttcccagctggcttcaactggagcataattattaggtgtgaggataataaattacaatctatagaaaagctattaatcagattaagaaacaggttgacacaatatcctttctctgatgaagctgatgagtaacttctgcctatgacactttgattcttgtcacataatcttactattctcaatcaatactctagtacatttttatccaaaaggtgtatgacatttatggttgaatttccctcaggttttaagaagaaaaatggagtttttaaattttaaaaaattgaaaaagtgttaaaaagccaatttcaaatctaaaagatccattttctaaactattttgctattttaattataccaagctgcaaaaattagggtttgctcttccttccttcctttcttccttcctttcttccttccttcctccctccctccctctctctttctctctttctccctttctcccttcctcccttcctctcttcctctctctctttctctctttctctctttctttctttctt

SEQ ID NO: 50426 - DNA, 568 bp, Homo sapiens
  misc_feature 538: n = A,T,C or G
cgggcccccccctcgaaatacttctagaattaattaacgcgggggaccacaggaacagttaaattcatggcatggctggtctaccacacagtgcggggtgaattactttaaatagatgcctgtcactctcttggcccatcaatgggatttccttctcgaactgctgattcgttcaggtacacaacagacgaaatttcagttaacctttgttacaccccaggcaaaaatctggctgaaagtataaaatgaatagattaaaaaaaaaaaataagcagctcatccacagggccattctctgagtgtccacagcagcttaagttaaacagtaaatagggcagtggaatgtttcattcccaatggaaaattcaagcacaatctagaacttgggaatctagttagtcaaagtttattttgatgactaaaccaaaccaactgtcctttctgttttaataaactggaaaatttcccttctgataatcttataagagtcagaattgttgttctcttatatcaccattattactatgatctaactgangtgcctataacaaaactgcgtactaattct

SEQ ID NO: 50427 - DNA, 616 bp, Homo sapiens
  misc_feature 10: n = A,T,C or G
cccccctcgngggtacttctagaattaattaacgcggggactcagtagcctcatcttttaaatggaaacaataattagacgagcctcagaaggtcattgtgaaaactgaaagagatgataacatgcaaagcatttaaaagtgtctcacactcagaaaatgtgagctgttagtattatcacttttttccatcagtgggaccatggaagcccccttctaggccatgacaaattgtggaccccacgtagatgctatatgcaggaataacttagaacacaagttgtcccgtttgaaggtcaaaccaaaattctacaaagaaggtgactctaaatcccccctacccccaattcttatgcataccttctttgcatgagacacttatttttgatcaaattaaatcaaaactgatttcagctgcagcacatagttttaaaaggtaaagcagaagagcaggtagattttgcctgcttgataatttcccttggttctctgaaaagacaggctgagtctcagtctgccagagagaccaaacgtgtagaaacgaaaggaagaacagaaattttcaggctgctgcgcaatccatacagcaacgaaaagaccccaagtctaactggtgat

SEQ ID NO: 50428 - DNA, 617 bp, Homo sapiens
  misc_feature 45, 453, 490: n = A,T,C or G
ccgggccccccctcggaagtcttctagaattaattaacgcggggnaaaaagactatgagtgatttcatagtactcataaaaaagtgagttcaacttgcccacttcaaactgtagactaagatctgtttcctttgaaaactaaattttattttaggaaaaaatgccatagacagtgtcagattgaaggactaccacccctgggctcagtggctcacacctgtaattcctgcactttggggggctgaggcgggtgaatcacttgaggtcaggagtttgagaccagcctggctaacatggtgaaatcctgtctctgctgaaaatacaaaaattagctgggcatggtggcaaacgtctgtggtcccagctgctcgggaggctgaggcaggagtatcacttgaacggggaggcggaggttgcagtgagctgagattgtgccactgcactccagcctgngtgacagagtgagattcagtctcaaaaaaaagaaaanaaaaaggaactaccatggtagtaatatatttagaaaatagtggtaactttaaataatcccaattaaatataacctatactttaaaaaattgttacacatatcaccataaaatgttgtgatgcctgtc

SEQ ID NO: 50429 - DNA, 578 bp, Homo sapiens
  misc_feature 550: n = A,T,C or G
cccccctcggaagtcttctagaattaattaacgcggggaatggatgtggtttaacatggagaacagtaccagcaattaagggtttgtatttaatttttacaagtaaaagtaaacgttgaagaaagagagtaagccctaacaatctgagatcatttttcctttatctttcacaacatggaggcacaagaagtcaacaacttttaacttctcagaaggctccctgtggatcaactcaatcaatgtatctgggcctcactccagtaagccccaacattggctttatttattagagagataaatagctctgtgagttcacaacatggtgaaaattttcttaacaaaaaccacagtctttaattggcttcgaagttagatgaagaaataagttttaatattggcattacattggatacttttcaagagttcagaaatattagtctgcttaatctccccttaagatctcagaagcactgcaaagggagttatgtttatgaaaacattaaaactgatttttccctagtgtaacaataaccatgtatccttatgcatntgtagtgtcgccactttttttctttatc

SEQ ID NO: 50430 - DNA, 607 bp, Homo sapiens
cgggcccccccctcgaaatacttctagaattaattaacgcgggaggcggaggttgcggtgagccgaaggttgcggggagctgagattgtgtcattgcactccagcctgggcaacaagagcgaaactctgtctcaaaaaaaaaaaaaagaaagaaatgaggtatctcatctaaggcactgcttccgtccattagcacaggtagaaccttaactattagagctctcagggacctcagaggtcatcaagaattgatccttacaggagcttatataactgcatcacttacctgccttcttctggtctttgggaaactcgagattatatttcacattagctggatacttttagatcatgaaaagttgcagggatctaagaggtgagacttcagatccacaaaacctcatttttaccgttcagttcagctgtcaaagctgttaagcatttaatgagatgattgcattgtatttttctgcactcagtgctgccaagtgtgtgttattttatagacctcttttttttggaggctgcagtgagccattagtgcaccactctactccagcctgagtgacagagcaagaccctatctcaaaaaaaaaaaaaaaaaaaa

SEQ ID NO: 50431 - DNA, 616 bp, Homo sapiens
cgggccccccctcgaaagtcttctagaattaattaacgcgggtcatggttggaaagaccaactctgtaaatgatgataagccaaagaaaagcaaagacaacagcaaagaaagtgaatttgccaacatgttaatcgtggtgcgtcctctacttttctctcaagttctggcattggatttgctccgcctttgtcgcctctgccctgtgttgcatccagctctctgttgaaactgaaacatcataacaacaatgaggataatagtgtgtatggaatcttcatcagtatatttgaccttagaatccacccgtgagcacaagagagagcttaggcttgacatatttccctaaaatggtgtgtctgttcactcacatgcaaacatgtgcaccctggccagtcatttttattaccttcaaatgaactgtcatgaagtggagtgaggtctgaatgtgctttggtgttttcagcttggtatgtctctgccaggctctcctggttctaaggcattgacacagagctgtctcacctccagtcccaaatacagctccacagaattatcaggggccctgcagccacgattctctaggctattatgataacttcactactagctgcattg

SEQ ID NO: 50432 - DNA, 509 bp, Homo sapiens
  misc_feature 28, 46: n = A,T,C or G
cgggcccccccctcggaagtcttctagnaattaattaacgcggggnactcaaattacaaacaatacttctttgcctttaccctgctagccagaacctaggtgacctacaaaggttagtaaacctgtccaaatccaattgctgcacctttttgcttctccttgcctgactcaaaccagcaaccccgggaccaagaaactcctctctgacatcatgggataaagttgaagctctgctgttagctctgtggccttgatcaatttacccatcattctttcttgtactttcttgaacttttctgctctgcctcacagacttgagagagaagccccagttttcataatagaaaattcctcctacccgtggatgaagttttcatttctttctgcataaatatacattttcttggtcacctctgaaatatttcttcatcagtcctcttagatttttattttgttcaactgttttcctttactttagctgatcttacagatcttacaggcgactcatt

SEQ ID NO: 50433 - DNA, 539 bp, Homo sapiens
  misc_feature 9: n = A,T,C or G
acttctagnattaattaacgcggggactgcttccactgctcccactgttctccttaccaagagcagccttctcaaatggctattcaaaacatccccatatccttgacaatactgacctcttctgagcaacccatatcactccactcattcatatcaagacacatttcatattctgggtgctggagcttcaaagacaaatacaacacagtatttgcttcaaaggatttatatgctaagtaggtaacagaaatacaacacctaaaataaaatatggtaagtggtacagtacattataaaaagtaagtgctacagaaaaagggaaaatttttgtcttgaaagttcaaggtcattatcacaattagtccaatctaactagaaaacagggtttttacagcagtggttctgcctacttctgcttagtggctccactaggaacatgagtaactgtgggtatctagtgcagtaattcccagaaaaaaagaaaggacagagatacagatcagaaacttgttagatgggaaacacgatgtgaagaaaga

SEQ ID NO: 50434 - DNA, 601 bp, Homo sapiens
  misc_feature 24, 55, 583: n = A,T,C or G
gccccccctcggggtacttctagnattaattaacgcggggaggagaagggtatangaaaatcagtatatgactgacaaaagtaaaaactagtaatttcttacatctttctttttcttttatatattaattacttaatctcaagagcataataaattaaaatcagagacctcaggaaaagatcttccactgaaaaacatgcttttgattttatagactttataagcctttaaatatcctgaacttttagtacactgtctgttttctaaccattttattcaaagctattagtgcagcaaataaacagcaatgctttgatctcattaaattacaacttatagttcctgcagtcataaatattgcgctcttttctccttcacccctccctttctggtatggggtagtctgtttaatatcactatctccttgagtgctctgacatttactcagacaaacagcagaggttatgaatgctgctcatagatagtatcaggaattcttcatgattgccataatggtgaactcagcattcagaatggtaatacctagtttttatctaaccactaagtttggtctgtttaactntgctccaaaaaaaaaaaa

SEQ ID NO: 50435 - DNA, 583 bp, Homo sapiens
gccccccctcggaagtcttctagaattaattaataaaagcatgtacaggaaagtaagcaatagaccaaaagagaatcttaagtgcaggataactgcacttaaagatcaggcatggggacggattaaggagtttaagaaagaatgacccattagatatgaggggaataagttacttggtgttacagaagcagagttaagagacgtagaaggaattagtcaataaagttagatgctgttgagattaagtaaaattggagtttaaaagattctttgtattgtatattgttatttccatttatagaatattattttgtattatcttcacaaaaatcaataaccttactttgattttctttatttattttcattgacatacagcccagtttttctaaggcccaaatcctcatttttatgaggatgacttttaaactagggagatgatttgggtttttgatagaaacaagtcttaaattaaatctcagttctctcatttcatatctgcatgctcttggaccaatcatttaatttaaggcttaatttttcatctgtacatctgtaaaatggttctaatcatttatatttt

SEQ ID NO: 50436 - DNA, 462 bp, Homo sapiens
cgggccccccccttcggggtacttctagaattaattaacgcgggtctaaattaaaacatatatatgcaatttttaattagaatatgtaaagcaaaagctatgcaaaaatcaaatgccataaaaacaaaagtaattttttaattttagttataaaatgtgtctttaaacatcagaaactcttaaaatacaccatgcctatttgtacacttaggtatgattgctattttaatacgctctctaaaaatttaagaattgccatatagtgttatgaatgttttatctctcagatataagtgtaggtgatatcattaaacaaatcaaattcagtgctaataaactatatttatttcagaattgtaaaatgctttaatcttttaaagcaaaatcaatacgagaacggtaaaaatccacctggattctgatgttaagtatatacaactggaaacactaaaaaaaaaaaaa

SEQ ID NO: 50437 - DNA, 520 bp, Homo sapiens
cccccctcgaaatacttctagaattaattaacgcgggctctaatggtttatacattagctcattgtgaaccaaatgtccaaattctgaaaactagaatccaaaggcaagatcaaaaagtataaagatgaattacttccaaataataaggaacaacctaaaatgctacataaaatgaaacagagaaagcatggaggtgaggagaggcaggtttagatgcataaaagaattaaacttgatgatactccatttgtatatatttggttaagaatgccacttatcactgaaaattgttatggtgtacatatgagaaacttatcacaacgataatatatgaatacaaatattaaaagcactattttttgtttaccttactaaaataagaatttttaatagtagataaaagcagcaaaatgtttctgcagaaaacataaaggacttctttatatctttccagagtagatagcacagtactattataggcatttttattctaaaaatgttaaattcactgaacatgga

SEQ ID NO: 50438 - DNA, 292 bp, Homo sapiens
  misc_feature 10, 47: n = A,T,C or G
cccccctcgngaagtcttctagaattaattaacgcggggcactcaanaagcttagaacttgcagaagcggttctgctctgacatgtcagatgtcagacagcaacatgtgatgggacttttgggaaaggaggctgaatcatgaacagcttcacagaagagggaagcatttgaattttccttgaagcacaggtggatctgagcatgaaagggtgggaatagcaatgaacccgccacagacccaaaggttgggttgatgttttgtaaaggctaagttttttaccaaaaaaaaaaa

SEQ ID NO: 50439 - DNA, 543 bp, Homo sapiens
  misc_feature 30: n = A,T,C or G
accgggcccccccctcggggtacttctagnattaattaacgcgggggtaagaaaccaaatactacgactagttcctaactatgatgaccttcgaaaaagatactatatatttatacttcatttttcactgctgtaaagttaagatttacctgcctcaggctaccctctgggagcaagataatgaatgaaatattaggaattgtcaaaggctggtttactgtgaagcgtgtttcaagagcttcttataccagcttgatctaagactctatacttaattttaagtgagaatttatttatttatttacagacagagtaatataataccctgtctctctaaaaaatgaaacttttttttaaatgaaaaaaaagttgtagtgcaaaatgaagatttcacaaacccagtcaaatattttagaatactttgggatttatgtagacacatcgccaccattcttatactggacttaattgtcagattcatgtgaggtgccatctttttctgaagtagatgcataattgatttcaagttgctggcctcatatc

SEQ ID NO: 50440 - DNA, 587 bp, Homo sapiens
  misc_feature 545: n = A,T,C or G
ccgggcccccccctcggggtacttctagaattaattaacgcgggtatacactcaatgctgcatacttttactctttgcatgtctttatttcaacaagcaaattattaggactacaaaggcagggaactaaaaccccagacctagtaaaagtaggtacatatgagcaaccaatgcatatgtgaattaaatatttgccatctgcttaggacacatttggcattggcttaaaaactcagccatctctgagttctatcaaactttatctaatactccattacaatacattacccataaatgccaaaatagtaaaaccatcttgtatcctgtccctctctcagaggcaacgttcttggacccagaggtacaatcaatccatgtgttatcttttttgtataccccaaacataagcatggcttttgtcatggagaagtcagctgatatttgctgaacttcacttccttggagtatcttattattgtgcattaatttaaaaaaatgcatagtaccctcttggaagtcgagtttagaaacaataaattactgtncaaaaagaaatgaataatacagaaaaggaagaaacaaaaatt

SEQ ID NO: 50441 - DNA, 606 bp, Homo sapiens
  misc_feature 25: n = A,T,C or G
ggccccccctcggaagtcttctagnattaattaacccgggagcactggtttagacagtgagggatagctgaggtagtttaattataaagtctgtttgtcctttgctaactggtcagctgcttctggattccctgaacttcctccttttgactcttttttttcctgaactccgtagatagattcagtaagtaacacttcaatttatcccaaggaagtggcaggaatgacttcaacagtccttaattcctatttggatactgacttaatggccatagactaccacatgacaaaggtagattcagtgctgatcaaagtaagagaaattgcaaagggatgatcaaagagttctagaatctccaaatttgtgcaagtttcctgatctggtagagttatattctagaacactgacaaaataaaatattaaattgataaatatagtggtctctgaagaattgcagtgaatgagatgacagggaagtaagaaattgtcatgttttgattcttcagaaagagagagagagagaccagaaagagaatgagaactgtttccaccaatatcacagcagtgccttaattttggtttcttcataagtaattatgtgattg

SEQ ID NO: 50442 - DNA, 603 bp, Homo sapiens
cgggcccccccctcggaagtcttctagaattaattaacgcgggacatctctttaatttgaaccctagaatgtgggtgattttaatgactcttaagtacctcgacaggaaagagcacagtaaactagagagtgtccatgagaccctaaaaggagaactgaaaagctatttaaggattaggaattatttgtgttttaccaatagatgtttatttgcaggctttgggtttacatgggttttaagattgataagattattttatgagggagataagattccgttaatgcatgaagatggtggagtggtcctggggtcatttctcttctcattgtgatgctccatttaagtctgactcatgttaatcttattaatgactttcatacatttgtacataagtggcataatcggaaataaatctagaaataatctctacatgtacaagaaaaggatatacttatccttaagtataaggatatataattctttcttaccatttctctgtttgagtcccatattacttgggtagtaaatattacagcctcatatgagaagtccccaggctgaaaatagttgttctttaaaacagcttaatgtgttctttaaag

SEQ ID NO: 50443 - DNA, 417 bp, Homo sapiens
  misc_feature 44, 67: n = A,T,C or G
cgggcccccccctcgaaagtcttctagaattaattaacgcgggnaatccattaattacatattgggngaaaaaaagccttttctagcactttctaaactagtacattccagtagctcttacgaggagagaagttacgtttggttgtttttgtcttgaatagtctatcacattgttgtgtagaggtcaattattgcatacttaaattaaaggactttataaagttaagtaagagatttcctggctctgaaattgcaaacttatagtccttataacaagatgaatgttttttttatctactctttaacaggaaaagttaggttttagatatatttctattttataattatctttgaattaaggatttaaaatagctttaattattatcttaattcataacttacccaaaaaaaaaaaaa

SEQ ID NO: 50444 - DNA, 360 bp, Homo sapiens
ccgggtcccccccatcggggtacttctagaattaattaacgcgggggtctggcctctatgttgttccctctgtctagactccttaagagaagaagccaagaccctgaagagtataccctgaacttcctgtcagcctcttcctctactggacccccacacagtccttggctttggccaaattacctaattttccttgggctttcctgactatttatttcactctgcctttccttgttttggacagctttttccctacttttgcctatcatggttttgtttgtttgtttgtttgtttgagatagggtcccattgtgttgtccaggctggggtgctgtggcactataacggctcactatagcc

SEQ ID NO: 50445 - DNA, 604 bp, Homo sapiens
ccgggccccccctcggaagtcttctagaattaattaacgcggggtgtcttcatactattactgttatatatggttttcagaaacaggcttgactacaaagaaaattgtattgtctctgcagtaaaggtttcaatctttttttctcttttggtgaaaaaatatctttgtcaagcaggcagaagtactgataatccttctaatgttatcattttcacatccagatatactgctaccaagtaacctagcttctgtgatctggagttattatcattacattttaatcacaaaggaatctcatcaaaatatggctttttcttttttgattgagaagaaaaatgactttcacatttccatcatttttttctagatcttctaataatatgttgagcaaattatttatgaaatagtgtcttcccttgcctaaaacaaaacaaacgagtatgcaagtgtatataaatgaataaataatttctggcaaaataattcaaacttttcatggcaccaataacataaaatatataatgatgtttattctctgaacatgttttgtcactttccagtggagcaaaaaggataaaactggtttaagaagatgcaacttgtg

SEQ ID NO: 50446 - DNA, 588 bp, Homo sapiens
ccccccctcggggtacttctagaattaattaacgcggggacataaatgtagggggttttcaaataaatttagagctgtacagcagggcactgtggctcatgcctgtaattccagcactttgggaagcccaggtgggcggatcacgaggtcaggagatggagaccatcctggccaacacggtgaaaccccgtctctactaaaaatacaaaagattagccgagaaagtttgtgtcgatcttaccttccccttcttatggctgatttcaggagtagactggaagggagatcttagaacagagaaaaatgatgaacaaaataaaagaggttaggaaaagaagcgagtgatagtgtgagaataaaattcaattgaagaaaatgttaaaaagtgctgagaatatattatcataatgcagactgagatagtctgcagcttactcatcgcaagtgtaacattatttgtacatttttaataaagccaagtgccatttcctttttttttaagattgtataatggaacagttactaaatttggagtcagatgagctagaatttggctctcatgtgatccgatatgtgatcttgggcaag

SEQ ID NO: 50447 - DNA, 406 bp, Homo sapiens
ccgggccccccctcggaagtcttctagaattaattaacgcgggacacacacagtaaatagacaagcacatttaaacttgcatagcacactgaattcttggtagatattgaagtacagctaatgaaatactgatttaaactttttagagaatagagggtgcaggaaaaaaacttaaggacattctatgtgtgtattttaatagtcatttttatattgataaaggggcaattgtatctctgtatatgtatgtctgtgtctatctaataaaaataagtaaattttatgtggtgctttctttgtgtgagaaacccttacacactaaatacaacttgccatgggcttacatagtattattatgatttccattgtatagactcagaatggtttccatgctttgctgatattg

SEQ ID NO: 50448 - DNA, 589 bp, Homo sapiens
cccccctcggaagtcttctagaattaattaacgcgggtaagtgtaacttaaactagataccatcattcacacactcattgattctccaaagacgtactgtatacaagagtctgtgttatttgctgcaaggaatatgatgatgaataagacccagatcctaccctctttcaactctaggattttaggaagcagtccgcagtacataaataactataataaaagatagaaagtgaaatatgccagaaataagttacagatggaatgctatgggatttcaaatgactgcaattgttattagctaagaaaattaaagcagggctaggtgtgatggctcatgcctataatcccagcactttttaggaggccgaggtgggaggattgcttgagaccaggagttcaagaccagcttggccaacatggtgaaacccctgtctctaaaaaaaaatacaaaaagttagctggtgtggtggcatgtgcctgtagtcccaggtgtgcagggggctgaggcaggaggattgcttgagcccaggagattggggctgcagtgagccatgactgcactactgcactccagtctggatggcagagc

SEQ ID NO: 50449 - DNA, 471 bp, Homo sapiens
ccgggccccccctcgaaagtcttctagaattaattaacgcggggagcaatatggcaagatttcttaaaagttctcaaaatgggtcgtctaatcaaatttagtgtgatggggcaaattgtcttctgtttttttttttacagttttttttactgtaaaagttttaaaagtacaatgaaaacaatcaaaaaacagttcaagaaacttggctttgtataacaagaatgttaatgatttatcacttactgattctactctagtcaatgaaaatggaagggttttgtttaatttttatttgtttgttttttgagacaggctttccctctgtggcccatgctggagttcactggtacgatcatggttcactgcagcctcaacctccagaaatcaagtgatcctcccacctcactctcctgagtagctggaattacaggttcgtgccaccatgcctggctaattaaaaaaaaaaaaaaa

SEQ ID NO: 50450 - DNA, 575 bp, Homo sapiens
ccgggccccccctcggggtacttctagaattaattaacgcgggcccttcttttgagaacctagcagttttctaccttacaattccatgttctaaaaaaggaattcattttccaatcaaaataactctagaagtagagtagttacaaagatatcaaccagcataagagcaaaaagtttaaactgaactaaactcagacctgatgaggttaactctctgagtgcctcatttacttcgtactctaaaataagcttttacagaaaaaggagaactcttcacatcaataaagttctacaaaagagcataagcaaggaaacccttacagcagtgtctgtttttaacaaggtattttccaaaaacatgacttcagtgttcatgtcttctccccattggaaaaaggttgttttgagaattttgtagaagaaattacaagaatatactccaagatttttgtgcaatttatcaatctgaaaagaatatccctaaatctgacagaatctataagagtactgtatgcatgataaaagcatatttaaaacttgtacctttggccaggtacgccgtggctcacgcctga

SEQ ID NO: 50451 - DNA, 375 bp, Homo sapiens
cgggccccccctcgagaagtcttctagaattaattaacgcgggctatgggtattttgcttttactttctaattctgtatatattttctataagaaataagggttacaatgacagcagataaaaatatttatatattaaaaaaaaaaagtgggctgggcacagcagatcatgcctataatcccagtgctttgaaaggctggggcaggaagactgtgcccaggagtttgagaccagcccgggcaacacagtgaggacctggattgaggtgagagcatctcttgagtccaggagtttggggctgcagtgagttgtgcttgtgccactgcgctccagcctgggtaacacagcaaggccctatctcaaaaaaaaaaaaaa

SEQ ID NO: 50452 - DNA, 529 bp, Homo sapiens
taattaacgcgggatcactgtgcatcagagaaatgcaaaacaaaaccactatgagataccatctcacggcagtcattatggcaattattaaaaagtcaggaaacaatagatgctggtgaggttgtggagaaataggaacgcctttacactgttggtgggaattttaattattttataagatccattttcctaagaattactgatgtttgcttcattttgttttcacagagaaataacagaaattcgtaacactcaaaagggagctcccatggctgggcatggtggctcatgcctataatcccagcagtttgggaggctgtggtgggcagatcacttgaggtcaggagtttgagaccagtctggccaacatggtgaaacatcgtctctactaaaaaaaaaaaaaaaaaaaaaaaggggagccccctttttattcaaatcattttttttcttttatcagaaagcaatattaagtatttgaagtgcttgagggggaaagcaagcattactcaaattgagatgataaaacata

SEQ ID NO: 50453 - DNA, 606 bp, Homo sapiens
  misc_feature 28: n = A,T,C or G
cgggcccccccctcggaagtcttctagnattaattaacgcggggggggacaaaaggaggggttatctgtataaggctcagtataataagcaagagggatggtaaagcctgatggcatatgtctcaagggagcaggggatttttaggaaggaagaaggtgcaatggcctggaagtggcaatgacaagcacagacagcatccactccaccttgaccatgtggtttttttctttttttgagtgatgaccatgtgacagtcactgaacttggcggtgatatgcacaatattggcaaaagcacagctactgcaaaatagctgcgtcttacagatagaagaaacaggttaaaatccttgcccaggtcagatagctggtcagtggcaacccacgtccagctgcagagctcctgctcttatctaggactccacagagtcttctatgtagatatctttaaatacttctaagtagtgtctcagaacaatagaagaaagatgggttattcactaaacagttttcagacaaatagctataggtggggaaaaaataggctgggaaaaaaagattaggctagtttcctaacaatgctaagagtaaaactactattttacc

SEQ ID NO: 50454 - DNA, 524 bp, Homo sapiens
ccgggtccccccctcggggtacttctagaattaattaacgcgggtccacacactaggcagcagtctggaggattttcccctcccaaatgctgtttacatgtcaaacaagaggccatgatcatggtggagtctcagctgtgttcagtgcaaatacagtgatgtgggcaaaataaacaacagaatcacagaggagggtgcaaacaaacagtgtggttgcacatttctaagtaaaatgccccagttatggaagtgcctgagaggttaaaagaccgtgtatcagccacctttgttcactccccctaaaagcataattgtgacagggttaaagtaaattcacttttcaaggaagaagctgtaaccttcctttatgtatatgttatattagtcaagatcaagatgaatccaggccatcctattgctaaggtggaatatttgattaacttaaacatcttactaagcctcagtcacaaatgtgacccaataatcttactgttgggtatcacggagtagcctcccaaagacgt

SEQ ID NO: 50455 - DNA, 606 bp, Homo sapiens
ccgggccccccctcggaagtcttctagaattaattaacgcggggaagtcatcctgaaagtcaaattatataaaacagtgcataaaatatatatagagagaagggtaattttggtgttaaagattatttacatttaacatttttataaacattctccaattgccttccagaagctgttttgacttatactcttaccaataatgattagagaaaatagacaccattgatgtgtaacatagatcatttcatctcccagaacacagaggatgcaactagaggaacagacataaatttatcttgcaaggaggaactgggttaaccttgggagaaattgaccatgtcattttagagttcctgatagtctaagggaacagtgaaggtgctgtttggaagactcaggttctacaaagctcttcagaggctgaaaagataagcccaatctaggctgatgagatatcaatagagattgatgtcaatttctgcatctgggctcaagtaaacaatagcattaacacatggtgggaacccagtgacttcaacaccacgaggtgtgaaaaagaccagggagctcaataagaatcagcagtggggtgtgcctccatcaatg

SEQ ID NO: 50456 - DNA, 549 bp, Homo sapiens
  misc_feature 532: n = A,T,C or G
ttctagaattaattaacgcgggccctataataattgataatgttctttaacaagagtatgaaaaatatctgtagtctcactactagcatattcatttttgaatattccctttgagttttttcccagatgcacacatgttacattatttgaattcataatatgtcttctaactatttttacctaagattataaaaagtattcaatataatcataattttaaaaacaaatgaatattctataagattcttcttagaatttgaagaatagttaaataaactttatttcttctaacaaatgtttgctaaaaccagtgttagaaattttatgcatatagctttgtgttttatattggcagtatactactaagtgatatatcttttaaaaaatccaatgagattattcaaagcagatgtcttttgcacaggactgctgtgcagtgaggcacatgaatatccaacacaacccaggaaaaattgcagtgctctgcctgcctctgccttcttgatcctgatgacacccaggcctgcagcanaaatctctgagtttcga

SEQ ID NO: 50457 - DNA, 556 bp, Homo sapiens
cgggcccccccctcgaaagtcttctagaattaattaagcaagctaggctacagtcaaactgcaagcaacccactgaggtagcaacagctaggtttatagaaagaggtatttaataagaataatgtgtgttaggcatgctgaaaaatggatttaaggctgagatgccccttggtctcaatactgttatgtttgaatcttgttggctttatggaaacaataactataaagtgtctttcacattaataagaatttccagcacaaccaacatccaagtgattcccaacaaattatcagacacagaaatctgatcatttacaaaagtggtttactgtacaaattcagctgcctgacgcacctgtctataatatctaaaaccaaatccaacctatcccagtttttccacaactaggttgttccaggactggtgaggtatcaaggatgagtcacaacaccagagctggactctgccatccacactccatgttcatgggcaagagaatgctaagcatatttcttcacagactgtactaaacagttctacatcacataagctaaa

SEQ ID NO: 50458 - DNA, 480 bp, Homo sapiens
  misc_feature 28: n = A,T,C or G
cgggcccccccctcggaagtcttctagnaattaattaacgcgggggaagggaattttcattgtaggtcaggacacttttatcctactactctttgggctggtcttagactttaggaattgaggggaaaacttccttcttatcttccttcttattcctcaaagcccatcaagttggagttcttagcatagttgaggtgcattatgacatacagtaacattttcccaaatatgttctttgtaacattcgttcttcaggatgatcagtgtgaaagagataaggagtcagataagtttgagaaatatcatatgttcaatcccactttttgtcacaatgcacattagtatagtatagtgaagactttacaaaatactgtagtaagcaaatgattgtctctttttaaaatctagtgcttgtcgatcttatttaaatatagaaatgtcttcccccataaaatgttttaatatcccacgtatctggca

SEQ ID NO: 50459 - DNA, 599 bp, Homo sapiens
  misc_feature 31: n = A,T,C or G
taccgggcccccccctcggggtacttctagnattaattaacgcgggtatccctgtctgcctgttagctgttaatacctcctaagccaggatgttccactactgtgctgtgccaaacagctgtgacccatcaccacctcctgtgagatacattctttttaccctgcatcatgctaaagatgttaactcttgactagaaccacttcttggggctgtggttgtacttttggaggcccgtcatggactgggaccagaaaactggagacttgaatatgaacagagatcaatggactagagacttcattttgcgtctccgagtgttggatgaggcatcctgagtccctccactgtacagacaggattgggcttagctactcagggggactgaactttcaagggaagatcaactagcctcagttctggaggaaaaaagataaagagtggaacaaacagcgcctaattcaaataaggcatcacattccctatagtcatgacatcagaacaggctgcctttactgatggcattccctggagagcctaaggtacattgtcattcagcctagaagacctcagaaggtccaaactcaagcctgatgtatag

SEQ ID NO: 50460 - DNA, 608 bp, Homo sapiens
  misc_feature 32: n = A,T,C or G
gtaccgggcccccccctcggggtacttctagnattaattaacgcgggggagtgtgaacattcaacgggtattcaagcattggcctaagtgaatagatggtgccatccaaatttgggaatcctcaatgtcataaatccaagttttccttttagaagattagagtccattccttcttcaaatatcccatcttacttcctgagtgggcatgtgcatgcaaccttcaggagtggaatcccacaaattaacatctctctagtaccatggagaaggattcaaagttaaaactaagaggtttcatttctgtaatcttggaggatctgggaatctagagatattctcagaatttgggtgttttcaggacacagagctctgctaaattgctcacaattacttctgtgagcagttacggaaacccaggacatggtattgtaattagttttttaatggcaaacgtttacctccagccaaatgtcagccacatcgtgtacaatcatcacgagggtcccactgcgaatataattagcacaccaagagaagctcatcagactaatagcagccaggtggtggatgatatgagctagaaaatcctgtaagatgagggaaaatgg

SEQ ID NO: 50461 - DNA, 412 bp, Homo sapiens
  misc_feature 48: n = A,T,C or G
ccgggccccccctcggaagtcttctagaattaattaacgcgggggggngagaaaagaaaagaaaagcctattccataattttgataggctttagtaaaaattatataaattaatttgttttattttgctgggtaacgaagcaatgattcaaacaaatgagacataaaattaagaatcatttgggccgttcacgatggctcacgcctgtaatcccagcactttgggaggcccaggcgggtggatcacgaggtcaggagatccagaccatcctggctaacatggtgaaaccacatttctactaaaaataaaaaaacttagccgggcgtggtggcgggcgcctgtagtcccagctacacaggaggctgaggcaggagaatggcgtgaacccgggaagcagagcttgcagtgagcc

SEQ ID NO: 50462 - DNA, 539 bp, Homo sapiens
cccccctcggaagtcttctagaattaattaacgcgggctattactgactgatacagaatcttggtttacaggcatagaattctgctcaagataaaattaccatttacaaattactgattttttaatctctaaatcttaaattcatgggaaatgacatagaactatacaacatatccttataagatttctacaataaaatgaatttatagattagcattttcagtcaattaacattgaagtttttgagctttaaaattctgtttaacgttagaataaatgaagtatgcatcagaagcttcagatggaaataccgtgttaaactgagaatcagaacaaaatcaagtaacacatgatcaaatcaataggaaaatacatcttcaattaacaatgctgacaagaagttcaaaaaaattcatctcttcgatattttccatttacccttccttgggtatatggacgaaggattcagtagaagcattctttatcaacagatacaaaaatgagaattgttatcagagaaagatccagaaagtaggtag

SEQ ID NO: 50463 - DNA, 494 bp, Homo sapiens
gccccccctcggggtacttctagaattaattaacgcggggatgccagatactttcataagccatttttttgaatctcagaagccctcgtgaggagaacaatattacccccatttaacagacaaacaagtgaagctcaaggcagttaaatcctgaggcctttctgacttagtttgaacatccagcttcctagatgctaggtagataatcttagggaagttacctaaattctgataatgtttataaaggcccaagcacagtgcctggaacacagttggcacatgacaatgctatcatcatcatcatcactattataaatattattatcaagcctcagtttccacataggaagatgaagcaaaaataatacccacttttttagactttttatgagaatttaatgacagtgcatgtaaagcatttaagacactaatcaatgatcctttgaaagaatataatgaatgatgagtggtgtagccaaggctgaatctaggcc

SEQ ID NO: 50464 - DNA, 476 bp, Homo sapiens
cgggccccccctcgaaatacttctagaattaattaacgcggggatgcatgtaggtttgagtttcatttactgcagacagtgagtggaaggtaaagttaaaaagtgcatgttgcagaaaatttaattggaaagaaatctactataatggcagtcactttatactgaagttttctgttatattattataatacactcaaaatgaaaatagtgttgaggtcagatgttcaacccttggtgtttttattatctgaaggaaatttctatgagcaaatatagtattaaagtccagaggaatatataaatgctacatctattcctgcagccttcaagtttgttctccacccatagtcttttattcaccaaaatatattaattgatcactaggggtgagactacagatgtggcccttgcctttctagttcttatggtctgtcaagagagacagacaagtataccatcagaaaaaaaaaaaaaaa

SEQ ID NO: 50465 - DNA, 581 bp, Homo sapiens
  misc_feature 28: n = A,T,C or G
cgggcccccccctcgaaatacttctagnattaattaacgcggggcatgccttgtactaaggttgacctcctagttttgatatgtaagccataaccattgggaaaattggatcaagggtacatgggaatgctctgtattatctttgtaacttctcacggatctataattagctcaaaaaaaattttttttaaaaaaaagatgaaattttaaaataaaaagtatttaaaatttattttaaagtttttaaataaaatcttggtttttgaaaacatgaatgaaacagattaaacctccaacaaggctgaacaagggggagaaagagagattatggaaaatatacaagtaggaagaagaaataagatattaccccaactacagctgatactaaaagtaagagacatgatatacacaattcagtgacaatacattcagaaacttagggtaaactgatctactatgggccagacacgtttttaggtagggtctcctggatattcacataatttttgctcacggaataccccagaagcaccattcccatagaacacaatggaacccactagaaatctacaggggggagt

SEQ ID NO: 50466 - DNA, 611 bp, Homo sapiens
  misc_feature 39: n = A,T,C or G
gactgggtaccgggcccccccctcggaggtacttctagnattaattaatgaaatttatgaatgaaatttcctgttgtacatcatctatgataagtatgcagaattttgtgcttaaaacctatgtatatgtactattattcaataatactattgcaactattgaaactttaatgttgaaattttttaatacgttctaatcacataatttgccttttttcttttttttttgagacagggtcttattctgtcacccaggctggagtgcagtggcatgattgtagctcactgtaaccttgaacacctgggctcaagccatgctcccaggtcagcctcctgtgaagctgggaccacaggcgcatgccaccacacccagctaattttttttttttttggtagagatgggatcatgctgtgttgcccaggctggcctctaactgttagacccaagccatcttcctgtgatggcctcccaaagtgttgagactacaggcgtgagccacctctcctgtccaatttgcatttttttttttttttttattgagacagagtgttgctctgtcgcccaggctggagtgcagtggcgtgatcttggctcactgcaagctccgcct

SEQ ID NO: 50467 - DNA, 249 bp, Homo sapiens
  misc_feature 24: n = A,T,C or G
cgggcccccccctcgggggtactntctataattaattaacgcgggggagggaagttgaagatatcagaagacacgttctctgtgggtgataggttccaggatggaataggaacagtttgttcatgaggcatttagttcgaagctttattagaatgctttccaatttagcattgcaattacctgtaaaaatcaagtcagtagttggttggttgcttataaagtttagacatccattaaattgtgctaggc

SEQ ID NO: 50468 - DNA, 518 bp, Homo sapiens
ccgggccccccctcggaagtcttctagaattaattaacgcgggggggggggtaggaatcccaggagatgggaaatgggaaagagtccccaaaagttgcgatgtggcacacaccctggggacgagaacagcggtgacacgtggcttcttccttctctccactatacaacaaaagccatcatctgggaacagtggagtggaaaggaggtagtaagcacagcaagccttagggccttgatgaaattctgaaattcattgcagttggggagaggaaagtgcgtgcacgtgtgtgtgtctactttgtcaggaatatgcggggcccacaactgtagtttagggcaggaggttagataactgatacagctatatcttcaagacccaagctgacatgtgactaaagctgagccttgctcagaacaacagaggattgatctgggcccccaaccatttctcaccatcaaactaacagggttctaataataattaacagctgctgggttagagacaggagaggaaaaaa

SEQ ID NO: 50469 - DNA, 413 bp, Homo sapiens
cccccctcgagagtcttctagaattaattaacgcgggccccccggtgctacctctcccttctgcaagctccggggcagcaggctagggacctgggggtcccgagagacccgggccagggcaatggagcctgcccataccctgccccaagcgcctcctagaggcggcaattctccggtggaagaagcaattcccggatccaggagaccccaacccaaatggtctccatgcgctggaggtgaggatggtgctatgaaaggtgcccttcctgatcctggccttccagaaacacgaattctaggctggacttgggcgccctgccgcttttagggttctgggaggcggcgccttccacctctgaggggctccactggagcccaggcactactgtcgccccatcaaaaaaaaaaaaaaa

SEQ ID NO: 50470 - DNA, 614 bp, Homo sapiens
  misc_feature 39, 596: n = A,T,C or G
gactgggttacccgggccccccctcggggtacttctagnattaattaacgcgggatattcaagaggtccaaagctgggagccttggagtggaaggggatggcgtcagaaatataccaagacttttagagacatctttagtgggtacttaccctgctctgaaatgtcagacatgggtttcccaaatccccacaatccccatggtgccacgtctgttttcccattttgttttatcctcacaatctgttcatctcccatgagtttgagaaccagggaattgcaaaaaggattcagagttgctggaaccttcagaatgagtgctcaagaaggtgattctggaaagaagagacttctcctagatgtctttaattttagctgagtttttccttggcacaaaccaaatagaatctggcttattaaaaactataagctgattaagggtaggatttatgacaaattccttttaaaaaaaatcctgcacagcccgtagatctgtgccttgaacttaatgggtacctagtacttatttgcttaatgaataaaattaataagtagatgaatatattgtcattactcccaaatatttttggagtatctngtcactcttgatttacct

SEQ ID NO: 50471 - DNA, 530 bp, Homo sapiens
  misc_feature 16, 43, 463: n = A,T,C or G
cgggccccccctcggnagtcttctagaattaattaacgcgggnacctttagggaaaaagaatataaaattacaaacacaaaactaggcacaaattaggtgcattttagaatgagaaagggaatcacaagaaattttcagtcttggagatttcttctgagacctcccatcagaaatgcttaataaaacgtttccagattgcaacctgactttccctgcccgcttagaatgcaaccagcagctcccacatcaccagggctgctgcaagtgaggggccctttatcttatgaaaaagtgttcaagaataaagtaagacttttgcagttcttactgacttttacaagcctttgaatggggctgagtcaaactatttgaatttagaagactgatgttaggttgggtgtggtggctcatgcctataatcccaggactttgggagctgatttgggaggattggttgaggcncagagttcaagaccagcctggccaacataaggagaccctcatctccacaaaaaaaaaaaaaaagcgg

SEQ ID NO: 50472 - DNA, 558 bp, Homo sapiens
cgggccccccctcgaaagtcttctagaattaattaacgcggggtgttctagctacaaggaatcttgaaggtcatcgaacctggtattttttcttgccttttaaacaaggttacccttgatgaaaatgaaatcttgtatggaatcctaaaacaaataaaagcagaacttcactagtatatatttacttcatgagttcaaatatgctacgtataatataaaatatatcactgctggctctaagactgatttgattaatgtaaaaactttgaataattacatacatattatcctcagcatccaaagtattatgttattttcacttagtagcacaatatttagaaaatactcattcatctagctaagtagttggaaatggcaacaattttgttttaaaacaacttgtcttacaacttggatttctgttcaactaaatttacccagaagcttgcaagaaaagtagtaggaaatatctgtttcaaagttgaattgttggtaacacctaataaattcttgcatttctaatcataaagtcagaacggatcattcattctagctctt

SEQ ID NO: 50473 - DNA, 379 bp, Homo sapiens
  misc_feature 40: n = A,T,C or G
ccgggccccccctcggaagtacttctagaattaattaacngcgggaacacaaaactaaataatgcatattctcacttataagtgagagcttaacaatgagaacagacagacacaaagaggggaacaatagacactgcggcatacctgagggttgaagatgggaaggagggagaggagcagaaaaaataactatcaggtactaggctttgtacatgaataaaaaaatgatttctagaataaacccaccgagtttacctacataacaaaccagcacatgtactctgaacctaaaataaagttaaaataaagaaaaagagaacgataatttcaaaaatgtcttttttttgaccatatattttaagtgcgcacctagcactac

SEQ ID NO: 50474 - DNA, 581 bp, Homo sapiens
  misc_feature 13: n = A,T,C or G
gccccccctcggnagtcttctagaattaattaacgcgggggacccattggtcctactggcccacttccagaaagcaagccatcaacctgcttaatataggaagtaaaacaaaaaggtcgagaaggccttgaggtgggaaggaagctgcttctctgatggtcagttccaggagcggtctcttgttgagcgtgcaggattcacttggagtctgtggcttggcagctggaggtgagaggctggggcgagaggggatgggctgaggacaggatctgcatagatggtttccgaggtcctttccagcctcgctctcaggagccctttggttttgtaacccacgtgattcatcatttcttcaggtgtgagtcacccctaatggaggtgggagaacaggaggcgtggtgggaggccccatcccaacaggccacatccatgttcacaagggcctcctgccaagggcccatcttggaacctggagatcaacgtcccacacggccttcgctttgctacactagatgtaaacttcacctcctgcgttccccctggcagtggggtcagctgcttgggccgtcacttcagcctgc

SEQ ID NO: 50475 - DNA, 333 bp, Homo sapiens
cgggcccccccctcgggggtacttctagaattaattaacgcgggggtctttgccagatgggctgagtcagggagactaagattttcaaggtcaaattgtatattgtttaaaattgtgaaaatttgctttgtgcattgaatctcattttcaaaataaaattatgccttaagtcagatcatactgatgcagattctgcagatgttaagaggcttccatgattgtatttgccagctgcaggtcaggcagtggtggatggtggtaagaagtaacctatacttttggctgggagctgtggttcatgcctgtaatcccagcgctttaggaggctcaggc

SEQ ID NO: 50476 - DNA, 488 bp, Homo sapiens
  misc_feature 19: n = A,T,C or G
aattaaaatctccaagggnttacttaaggggaaaaaaatttttcaactacagaaattttcatcacagaaattcaactatgcagcaaatctgactgatccaacaagtaataaaaaaaatcacataaccatcatgaatattaaaactgaaaaatcgggccgggcgtggtggctcactcctgtaatcccagcactttgggaggtggaggtgggtggatcacccgaggtcgggagttttagaccagcctggccaatacagagaaaccccatctctacttaaaaaaaaaaaatacaaaattagccgggtgtggtggcgtatgcctgtaatcccagctactcaggaggctgaggcaggagaattgcttgaacccggtaggcagaggttgcagtgagccgagatggcgccattgcactccagcctgggcgacagagcaagactctgtcttaaaaaaaaaaaaacctgaaaaaatctaggacttctacaacaaatg

SEQ ID NO: 50477 - DNA, 539 bp, Homo sapiens; identical to SEQ ID NO: 41247

SEQ ID NO: 50478 - DNA, 477 bp, Homo sapiens
cgggccccccctcgaaagtcttctagaattaattaacgcgggggaggaggagggagggttaggcaagcaactgagtgtgatcccatttggtcagtttgtgctgcagagtaaccacaggcattctcctggcttctgacaaatatttaaggggcctgcatggcagtcgctgaatgatgtagccctagccctgccagggacatgtacaatttggctagagcaataatagttccccatccttcatggtcaaagagacaaatgtaaaatatactggcatgaggtttcccagagactgggtgaagtaaacattgttttcatagtttctggatcatttctgaggtgtgccttgctaaatctcccagtgtcaagatttgtccactatgaggcttagagcttagccttaaactcctgaaccagagaagtagaaatggcttaaatatttgaatgggttggggaggggaaaggaaaaaaaaaaaaaaa

SEQ ID NO: 50479 - DNA, 579 bp, Homo sapiens
ccgggccccccctcgaaagtcttctagaattaattaagaaattaatcccttaattacaaaatcccaaattaaaatttaatccacgatgatcacctgcatcataactgcccttttaccctttattcattcacattgcatcggacactttctatttcatattgtttctttgcttcaggcctgtttttaaatctttaccaagtatgacagatcctgaatacccatctttgtaaattcaaagcgcatatctttaaaaaaaacagttggttttagctttttctgttcactttttaagttttattttattgtatcttttggagacaaggtctcactatgttgcccaggctggagtgcagcaactattcaaaggtgtgatcataccacaccacagactcaaactcctaggctcaagtgacccttctgcctcagcttcctgagtagctgggactacagacatgcacaccacgcacagcaggcttttcctttttatgattgcttttccctcccaaatagctaactagtgaatggaagaggataagaatcatgtcttcaaaatcatattttataatagatatatttatg

SEQ ID NO: 50480 - DNA, 395 bp, Homo sapiens
cgggccccccctcgaaagtcttctagaattaattaacgcgggacatcacaatcagtttgaggaatagaagattcaaattctcatactagaaaggcaaaaaggcaacagtttatccattttccaagtcatgccaaggaacataccatttctgttgtagacatggaagaatgcaattttccttgcaaaatatcaaatccacagaatagcaggagaggtttgtagcaaaattcttccttgcagaggaagacatctggctaatgtgttaaccacaactaaagcagtgttgatgtttactaagcccattctccatctcagtccccccaaataatactttttaaggaaaaaaaacctgggaaattgagagacattggctatcaactaaaaaaaaaaaaaaa

SEQ ID NO: 50481 - DNA, 407 bp, Homo sapiens
cgggccccccctcggggtacttctagaattaattaacgcgggtcagaggccaacataaacccagaggtccattgttaggactactttttttacgagttactctttaggcattactctttagaattacaggcgtgagccaccgcgcccggccaacccattcttattctattaataactgaaaatgttatcacttctagcactgattggttctggacaaatctgcgctggatttgtggggaaacacactggtggctttacttaggactaaaataattgttactgaggtttatttatataagtaacaggcactgggctaggcgttttgcgtgtataggcatttaaatcctgacacgttggctatgatgtaggacctgggactcacatttgacgagggtggatatgggact

SEQ ID NO: 50482 - DNA, 616 bp, Homo sapiens
  misc_feature 35, 72, 158: n = A,T,C or G
tgggtacccgggccccccctcggggtacttctagnattaattaacgcgggaactatataaaataactgaaanatatagcgtgtgttctctgaccacacagtggaatcaaattagaaatcagtaagataaaaatgacagaaaaatatctaattacttgngaaaataaacaacacacttctaaataatccaggggccaaagagaaagtctcaaggaaaataaaaatacagataaactgaatgaaaatataaaatacaacatattaaactttgtaagactcagctaagcagtgctgagaaggtaattagtcgcactaaaaacacagcttagaaaaactcccaaatccctaatccaaattcttattgcaagaactataaaagaaaaaaacaaaaaaaaaactaaagcaaacagaaagcaaaaaacaagaaaagtacagaaatcaataaaattgaaagaaaaaagaacaaataatgaaagagccagttctttgggaaaataaaattgaaaaagactgactaaataattgggagtttcagtaggtacaaagagtcactgtcattaaacatcaaatattactatgaactcagaattcatcataaagataataaaagttactac

SEQ ID NO: 50483 - DNA, 571 bp, Homo sapiens
  misc_feature 29: n = A,T,C or G
cggggccccccctcggaaatacttctagnattaattaatatcttaataaattctagtttagtattcttttaaatgaatatcataggtaatggatacctaggagatgaaagtaaatataacgtaattcgagcaaattcgaaagcaaatcaacagtaaggttggaaaaaggaacgtaattatgatacagaatttaccatcaggggcaataacacatggcaagttgacgttgctagcactgtggtaaaaggaatttattttgctcaaaaaagagaaatgaaattgatggaatgagggctaggacgaggtaaattatggttgaaggagtagaatactctggattaaatattggagcctaccgccaggtgtggtggctcatgcctgtaatcccagcactttgggaggtcgaggcgggcggatcacctgaggtcaggagtttgagatcaccctgaccaacatggagaaaccccgtctccactaacaaaaaagatacctatgacctagctgggcgcggtggcgcatgcctgtaatcccagctactcatgaggctgaggcaggagaatcccttgaacct

SEQ ID NO: 50484 - DNA, 619 bp, Homo sapiens
  misc_feature 42: n = A,T,C or G
gggccccccctcggaagtcttctagaattaattaacgcgggnaaagaaagtaaaagcagatccacagagaaaagcaagataataatgactggaaagcacgttttctaagtattatataaagaaacaaatgtcctaatatttctagacaatatagcagaatgaaaccaggagttgcttttctgacaagattaactagaacatctagcaaatctaattaaggaaaagtgagtggaaatccataaacatcactgatgagtaagaaaatggatagaaccacaaaagttataaaatttttttcagactttaacagaatactgtatatagatcttaccaaaaaaaaattaaaaatgataaacacagcgcagacagaaacacagactgaaagagggatatgaaaggagaaagattggaagacagagagaggggtaggtgcaggcacactcaggttgccatactgttaaaatggtctaatggtataaaagtagaaacagctgcggcttttttttttaagccagcaaaatcttgatactttgagaagggaagactataactagaaaactgcagaacagtcttcagtttaacacagtaattaacatacagaagtgcttgaataaaaact

SEQ ID NO: 50485 - DNA, 636 bp, Homo sapiens
  misc_feature 587: n = A,T,C or G
cgggcccccccctcggaagtcttctagaattaattaacgcggggagatcaacctgggcaatatagcaaaacccctcctctataaaaataccaaaagaaaaaaaactagcagggcatggtggtgcacacctatggtccctgcgactctagaggcaaaggtgggaggatcacttgagcccagaaggtggaggttgcagtgagctgagatggcaccactgtactccatcctgggtgatggagtgaggctctgtctcaaaaaataataataataataataaagtaattctatgcataaagtagttttaatttaaagagtataactaaaactacgggactaaatatgagaattattattcactttataaaatagatttttaacatataaacattcacatttcctaaatccctctctttggaatgcacttaaaacactataaaggactaaaaggggaaatgcacactatttattaatatctcaagactataaaatggcaacaatcccatttcacaaactccctgcttaaagcgaactaattggacaagaatgccaatttcaagacatgtctcctctatttatgatcttatatntgtgggaaacaagtagaaaagttgattgggtgtggtggctcatgcctgt

SEQ ID NO: 50486 - DNA, 585 bp, Homo sapiens
ttctagaattaattaacgcgggggtatgctgtcttcaaaagacccatttcacatgcaatgacatctataggctcaaaataaagggatggagaaaaatctactaagcaaatggcaaagagaaatcagcaggggttgtaattctaatttcagacaaaacaaactttaaaccaacagagattaaaaaagacaaagaagggaattgcataatgataaacagttcaatataaacaataatttattgactattgtttttcctgtcataggtactgactatattacaatattgttgtaaaatgattctttacaaaatcagaaaaatgagcaagttcatattgatttaatatttttacttggtatctgcacacttgtttcattcaacagtcatttgatcatcttctacatgcctcagaaaattctacatgttagatacatgttacaaaacaaagcccctgttctctaagagcttatgaatggggatgggatagagaaaacaaggaacgtagatcattaacaaataaacaaaataacatttcatttggttacaagttccttgaaagagaataaagcatgataaggagaaaaact

SEQ ID NO: 50487 - DNA, 454 bp, Homo sapiens
  misc_feature 9, 347: n = A,T,C or G
acttctagnattaattaaacgcgggcattctcttagaaagccagtactgttagagataggtttggttgaaatgctgttaggatttttctagcagtttccttagcaatgcaaatactgtctattgtaatttactaaaataacagctaatgctcatggttcattatcacaatgctgataataccactctctaacattgtgacttgttttttcgaaggatgatatgatagaaatcgtagaatatgatttctatgattgctttaataataaaatacaaattctatagtgtttgagtaactctttggcagtccctgcctctgactccccaacttctcatcgctacatcctgngatatacaaggttcagtgtcgctcactttattgagcttttattgataaaggcaggaatggttttgcctttatctatgatctaaaaaatcaacaaagattgaatatac

SEQ ID NO: 50488 - DNA, 604 bp, Homo sapiens
cggggccccccctcggaagtcttctagaattaattaacgcgggggcgtttttcagctgtaggtagttggccgtcttgcctagaactcttttttatattcttaatgatgtctttcaaagagcaaacccttgctattttgaaatagtctaatttatcagtatttttcttcattttatgctttttgtgttttatctaagaaactttttctactctaagcttgcaaagatttactcctgtattttcttctagaagttttgtaaatctagctagtttatttctatatttgatcttagttgcactgtatcagtatgatctatatatacagagaagaataatttgtagaaggtaatattagaaagatacaggctgggcattgtggctcatgcctgtaatcccagacttggggaggctgaagtgagaggattgcttgatcccatgagtttgagaccagcctgagcaacataatgagaccctgtctttaccatagaaaaaaattagctggggatggtggtgtgagcctgtagttccagctactctggagggtgaggtgggaggatcacttgagccccagagtcaaggctgtggaacctgatcatgctactgac

SEQ ID NO: 50489 - DNA, 614 bp, Homo sapiens
  misc_feature 27, 552: n = A,T,C or G
cgggcccccccctcggggtacttctanaattaattaacgcggggggcatgtggggactgacaccaatgaagcgaagaacaagagtcatagctgtcctctctggcttcctaggggcatatggcacgatgagtggaccagctgcccacgttgacattgctcagagtgttcattgttctcttgctctccgtatccccatcccctcttagtttaagttgaaaacatccaggtagtcagccactattgctgagtatacatgatgcaaaggtgcatggaaagggactggagggaccaggtctgagggccctctgggaagtaaagagagaagtgggaaggagtcacattaggacgggactattttgctaaattagctagtgtaggctttgaaataaagggaagccaatggatggagtttcaagcaagttatggcatgataggacctgtgttttggaaagattaccctggctttattgtgaagaatggcctggcggctgtggggattccaggaagggggagaatgcagacaagcaaggagactacaggcattattgtctntacatctggcttctttttcaggtcctccttgagaggccaagcatcacatgaattggacatga

SEQ ID NO: 50490 - DNA, 216 bp, Homo sapiens
  misc_feature 28: n = A,T,C or G
ccgggccccccctcggaagtcttctagnattaattaacgcgggattggagatcagatttttatttagttctattaaaggtttgtaggttctcaggagataaaaatcaatccctttagttaaaaatcatacagaatcttcctttaactgttccttttgtttttaagttagaatcattttagccagtagctttaagtctcagcaaaaaaaaaaaaaaa

SEQ ID NO: 50491 - DNA, 601 bp, Homo sapiens
ccgggccccccctcgggagtcttctagaattaattaacgcgggacacctcattatacttaattttcaaagaagtgcttttaatatactaaaattttcttcaatttcttattagttttttaatattagtaagagcccatatattatctttctttttaataggaactcttattaaaaatgtttcacataatagactacacaaaaatttacaagacattgttttaaaaagcagatttacttcactcataatcaagttgcgtcatagcttgtttaaacaaaaattctccaggcttaacaatccataataaactttaaacaaaatctccctcactaagaactatatggaaaatgtaaatgtctattcttctcaacccagagaggctaatatcagatatatgactggtttgagtaagcgtgcaggccttttctattagatagttgggtagtacttttgttttcctgcagtaaataaatagtcatgcattcatttgtctaatatgcaatttgtctaattaggtagatggctctaaaagggacaattcagatgtacaactctagtattcacatgcaactaacttgtctcttcaactaatacaaaacatt

SEQ ID NO: 50492 - DNA, 567 bp, Homo sapiens
  misc_feature 537: n = A,T,C or G
cgggcccccccctcgaaagtcttctagaattaattaacgcggggacctagtcctaatgtcatttccattatgaaacagtcattccagaacctgcatgtactgctccctcctctgtgctcccagtgggattttggatactctttgattcactcaatagtcaacacaacttattacacttttagaaactgtgttacttacagcttgaaatataatcaggaccaagacaccctccatgagctcaagggagagaagtaacagccagttgcaataaatcatccataagctcaagatatacggccatgcaagaagggcatcttctttgttgggttaaggtcatgacccaagcagaaatagggaaaaggcaaaataaaaagattttatatcattaggaaatcgataatcaatgctttctcttgtcagaagaacatatttttgaggaaaactacaggtagaacaaattggtttaaatatagaattcaatggtaagaatagaattaaaaaatagactggataattaagcataggtcagtacgtaanagattaagaatttgtattttcttaccaggc

SEQ ID NO: 50493 - DNA, 619 bp, Homo sapiens
  misc_feature 536, 538: n = A,T,C or G
cgggcccccccctcggaagtcttctagaattaattaagtgatttcataaaatgtttgagaaagtggtaagttatataaaagtgagatcacatctcttttggtaagtttggaaaattatgtgatacatatatctggaaatacacaatcttttaaggcaattattatccataggaagagcagaaaggaaatgtaatcatggtaaaagactcatacaatatttacatagcttttcataatacagcaaaaatattgatttaataaaactcatagcattaatttagaaggatgggggaaagaaacaagagtagtaattaagattaataattattcgattttcataaaatggagtcagtagataatttctgaagttcatacttcaaaaatagcagtaaaagatacaatttttaaatattgaaataaacagaaaaaatattttaaaaatagatgaaaacatttgtctgtagggagtcagaatgggataagtgaggcaagagagttctaataatctattatagccttgtaggactagttgactntntaaactatatgcatttattactctcagaagaataaaaatgcttaaaagattaaacagaataataagatcagtaggagtaaa

SEQ ID NO: 50494 - DNA, 438 bp, Homo sapiens
  misc_feature 12, 25: n = A,T,C or G
gccccccctcgngaatacttctagnaattaattaacgcgggtctcatactatttccatttatgaaatttctgtacccatcagtatggttgactgccagacctcagaaatgtcctgttccctaaaccactgagttttgttttcatggtctcacagcctgcccaaaccttgtccattctgaaagacccagttcaagaaagaggattcaccatgttgaaaacagcaagaattgagaaacaaatgttaaaatgttcatattgtgactgcccaggctgggtggcagcacaggaatgggggcaggtgggttaaggaggatggaagagcccatggacttggtgagatggagggagagacagccttgcacatgggaggctgaggtcagggagggtaggatctgaatttaaggagggtgcatactttgaggctgaaagtgtctttga

SEQ ID NO: 50495 - DNA, 367 bp, Homo sapiens
ccgggccccccctcgggggtacttctagaattaattaacgcggggctagctgcacattcccagatttcctgtggttgttttctcactgagtattgggagaacagactatttatggaggagctctgggtattaaagcattgttgcgcaaattcaaacagcacaggggattggcgtctcatctcagctagcagtaaagaatacggactctggaaatgagccaaaattacacagggagcaatttttttttttttaagtaaaaagtcaagagctggcaagtcagtgatgcataattcatgtcttacaaatacgcaactgtcactgtgggaacctactatacatctactctgaatatgaaatacttggctac

SEQ ID NO: 50496 - DNA, 445 bp, Homo sapiens
ccgggccccccctcgaaagtcttctagaattaattaacgcggggcggatcacaattcaacccataagggctaataatgcatgtcacatagtaggtattcacatatttgaataaatggaaaaacagtctacatgtgtattccataatttaatagtacctactttgcgcttatgtttgtcaacatatagcggcatcctaaagttgttccctgcatttaatcatttgaatttaaagaagtctcctgctgtatcactgcctagttcccattctccctaaatagtctttcatttgtattttaaagcttttgatctgaagccgactgctattgtgactttgctgttataggcctgagccaagttcatttaatcagtattagaattggcccattaatctatcttattacaaatcatggagaaaaaatcaaaccccaaaaaaaaaaaaaagcg

SEQ ID NO: 50497 - DNA, 483 bp, Homo sapiens
  misc_feature 13, 67: n = A,T,C or G
gccccccctcggnagtacttctagaattaattaacgcgggacttctgcacttcaacttttgtaacantcaaatggaaaatttcttatatagatgcacagtttctggccagagttaccttcttgagagtatttttgtgaaacatgtccgggcctatctctctctagtgaccctgatctcttcttttcataacgtgcaatgaacttcagcatttgttttctagaaattggatcaatatgaactggacgatattgtaaaacagtcttatgtaaactcagagcggtattatagtctttcagagtcttgaacatcacaaaggcatatcttgttctattttcatctttatataaaaacctaatctgttcatcagtcagatcagtacctctaaagaaatttcttaaatctctttcgtcaatactgagggacagattttttaagtgaacataaaatccaagaggggaacgagaacgtgttcttctgggaga

SEQ ID NO: 50498 - DNA, 594 bp, Homo sapiens
  misc_feature 523: n = A,T,C or G
ccgggccccccctcggaagtcttctagaattaattaacgcggggactcaaaccaagtgctggcacacgcaggaataagcatgaggagcagagatggagccccacatgctggcagctgcctcctgtccaggagggctgagacgcccaaacactaactgagagcctcacagggccacctagacacaggcgggaaggactcagcaaggacatgccagggcagcctctgagaaggaaacacattggtgggggtctttttccaactggccatacagcagagagaagtgaggatgctgctgaagtatattagaaattcagggttgggtgcagtggctcacgcctgtaatcctaacactttgggagtccgaggcacgtggatcacctgaggtcagacgttcgagaccagcctggccaatatcatgaaacctcatctctactaaaaattcaaaaattagccaggcgtggtgatgtgcacctataatcctagctactcgggaggctgaagcaggagaatcgcttgaacctgngagacagaagttgcagtgagccaagattgcgacactgcactccaaactgggcgacagagtgagtgagacta

SEQ ID NO: 50499 - DNA, 604 bp, Homo sapiens
  misc_feature 9, 553: n = A,T,C or G
acttctagnattaattaacgcgggcctccccttgagtgaaacaggtgctaagagaagaagcttgactctcttgttccttgctgaatctccaatattgagtttcttccttgtgatatatgagcattgaaatagggatatcaataaacatgcattaaataaataaatgaatggataaaggatctccagtctgaactctcttagagtctgacctgagatttaaaaatataataaagcaaattgagcaattaccatgtgccacagtattgtgttaaatacatatcgaatttccacaatcagaatccattgagataagcaggaatttgatcttcttaatagaaaaagtatctaagccttagagtaaatatttatcttataataaaaagccattaaataggagatcttgaatttagccaggttatctcagtccatggaacatgaccactatgcaactggccaccctttccatagaacgttggcaccaggatactgtcatagctgcaggtaaactgggctgaggacagatgtatgaagggctccacacaaagtatatcgnattgtccgtgtgcactataatgatgaattaacttataaatcttacttaata

SEQ ID NO: 50500 - DNA, 550 bp, Homo sapiens
  misc_feature 11: n = A,T,C or G
ccccccctcgngggtacttctagaattaattaatactaaatacattttatgtgcatataactgtgctaatttcataagggaaaaagagtattgcgataagccagttcctgcccaccacccacattattattcagctaagatgtaaagattttatccatattatatttagaaacaaaagaggaggatagaatacaactaaatgccatcatgataaaaataaataaatatcaatttacaagataaaattcaatatgtaggtattcatatattggatctcccaaaaagcccagattttggatagaatatacattgtatattgctaaaattctggttcacaaggagggcaatatattacagagacaatataactaagaatataaataggtatatatacagtaatacaatatatatggaatatatatgtatacacatacacatatatacatatataattaaattaacaaaagtgtatgtatcccacagtcaactgtgggaggcacagtagctcagtcagaaataggttagaattgacttggttattctgggctct

SEQ ID NO: 50501 - DNA, 572 bp, Homo sapiens
ccccccctcggggtacttctagaattaattaacgcggggggtggggtgcaagagctttaaataaagtttagttaacactttaagttgggtaagttcacccagatacaaccagccacattaaaaatattctgagggctgcatctgatcaagctcccagcacttacgcagacaatggctctggtcctgcagatctgttggccctttcttaacttggcagtctaagtcagcttctgctctgcctcagacccccttctaggcagctgtgtctacaagcctagaagtttagattgttagacaattaggcatcctacaatcttcatccctagcatgctcacgctcaaagaatgaaaacattttgagcagaggagacgaggagggaaacttatcagcaatggatataaacactgcatcaggtcaagtcaattctcatctcatccacttggtccggtaggtttctcacatctgctttcccaaggacccaacataagcagttaaaaattcttggtgaatgctgtctgccgaaagttaaattcttttgctattcccagcttgtgatcatttaaaaggatttt

SEQ ID NO: 50502 - DNA, 608 bp, Homo sapiens
  misc_feature 577: n = A,T,C or G
cgggcccccccctcggggtacttctagaattaattaacgcgggcacctgcaggtattcagggatttcagttaccagtccagagatttaaatgtgcaataacacaatgtaaaaaagtaaagaggcatgaatgtattgagtctacagaaatatagttaaattcattgtatgcatggaagaaaacccagaaccggagaaggaagtgattaatcaacgcatgtataaaaattggcccaggtgggaagatcacttgagcccacgtatttgagaccagcctgagcaacacagtgaggccccgcatctaaaaaaataaataaataaataataaaaataataaacattaaataaattagctgggcatggtggcgtccacctgtattcccaactactcaggaggctgcagcatgaggattgcttgagcccaggagatggaagctgcaatgaggtatggtcatgccaccgctctccagcctgggcaagaaagcaacaccctgaaaaaaaagcatgtgtaaatatggacataaaattccttatttctgtcacagatctgagacacatcctccactaagggtgacatangactgtctgttcccaagtttctggatgcatg

SEQ ID NO: 50503 - DNA, 579 bp, Homo sapiens
  misc_feature 28: n = A,T,C or G
cgggcccccccctcggaatacttctagnattaattaaccgggaggttcaggaacattaaggaagctcccttatcccaacagagggatagaatcctggaagcttttaaaactgtaattgaagactgaattctgggactttcttccaatatggttgtgttgctataatcattcctcttgtatttcatctcccattgcatgatgaaacaagctaaataatcacgtgcatgctatctgtaattttagcagttggagagagctccgccttcagtgagagctgtgataaatcactggtaactttctgttcatgagaggtagggaaattattcttcgcttctccagggtcacaaacctttgagaacagaaaattgaaatcttcagccaccatttttacctgcaggaaactctccgttacctaaatacacagattgttaaaaagggcatgataaaacatgagaactatgctctcttgggtttccatatgcttagccctaggaggggcgatgaagggtcagggaagagggagtgactatgacctcctgcgatcatcccaggataaacctcagccctccaatggcagca

SEQ ID NO: 50504 - DNA, 359 bp, Homo sapiens
cgggccccccctcggaagtcttctagaattaattaacgccgggagtgcattagtgtagacaagtgtgatatttcttctcttgtaataattatttcctattttaatttcggagttgtatcatagcttctaacgtcgtcccccagcccttgagcataaagatttcccctggactcctagcaatgttacatgcaaaacaaatgacatcagcagaatagaacagacttgtagaaagatcttctaggaagaaagcaaataggaagatcagctacaaaccgagacgggtggatcacgaggtcaggagatggggaccatcttggccaacatggcaaaaccccatctctctcaaaaaaaaaaaaaaa

SEQ ID NO: 50505 - DNA, 505 bp, Homo sapiens
  misc_feature 456: n = A,T,C or G
gggcccccccttcgaggtacttctagaattaattaacgcgggctctagcctgggcaacagaggaagaccttgtctcaaaaaataaataaataaaataaataaataaataaataaataaataaataaataaaaattttttaaaaaaattacaaatgaaagtgatttgcacaaaatacaaaaggaaattgaaaccaggctggcctataagagaaaggtagtttattgacttaatggtaactaaaactctaaaggtaataatttcaggtgacatttgatccagcagctcaaaaaatgtcaccaacagcctgccttctgtcctcaatctgctttatatggtgttggctttatccacagattccacaaggtggccccagaggctgctccaggatctcgattactggaaaaaggctgtagctgctccaaaattcaccattcgggtaaaaagggtggtctctntttcagagctactataaaataggtttattcttcccaaaaaaaaaaaaaa

SEQ ID NO: 50506 - DNA, 142 bp, Homo sapiens
  misc_feature 9, 10: n = A,T,C or G
ttttttagnncactcagtaaagggaaaaaaaagggttgaaaaaaaaacaaaataattgctaagccgagtctagaaatcaccacaggttccctggagctttttatattagagtatcttcttcaggactcagtatgtgaattaa

SEQ ID NO: 50507 - DNA, 560 bp, Homo sapiens
  misc_feature 547: n = A,T,C or G
gccccccctcgggagtcttctagaattaattaaaagtcctcacttacaataattactttgaatataaatgaattaaacttcacaattgaaatacatagagtgcctgaatagatttttaaaaataaagatctaactttatgctgtctataagaaacccaccttagctttaaggactaacacaggctaaaagtcaagagatggagaaagatatcccatgcaaactgcaaaccatagagagcaggttagctatacttgcatgagacaaaatatatttaagtaaaaaggtgttacaaaaatatgttgataagttttatttagttagttcagaatgtatacatgtttgaaaacatcatattgaacataataagtaataactttcacaggaaacaaagaagattatataatgataactggtcaattcatcaggaagataaaacaattacaaatatataggcacccaacatcagagcacctaaatatatacataaagcaaacatgacttatatgaagggagaaacagacagaaaaaaatcacagcaggagattntaatactccactt

SEQ ID NO: 50508 - DNA, 592 bp, Homo sapiens
  misc_feature 22, 90: n = A,T,C or G
cccccctcggggtacttctagnattaattaacgcgggggggtaaaaccaaatctttaaagtgctgcagaagctacattaattaccatggnaagacacatcaagcttatagcagctgtacacatgatgtaggctctgaaagacatggaagtgaaactctttagttggcttagaattaaaacagcaacaaaaacaacaaacacacaagaagcatgaagaggattttgtacataattttgaatttcactactttcaaatggaataatgatgacagagtcatttttgtaatttgatggaaacaaaggattgcattggaataggaaagctttcacattctaggaggcaaactgaaaagattttataatgttctgctgggaataggatgactttattatctaggggcattgtacaatcctaacttgtagatttgcataaataacatagctacataaaattaaagaagtagagtagctccagggcacatttttggtccactgctatactgtctaaaatggtagtactagactcatgtggctattgaacacttgaaatagggctagtttgaggcaggcggatcatgaggtcaagagatcg

SEQ ID NO: 50509 - DNA, 498 bp, Homo sapiens
  misc_feature 479: n = A,T,C or G
ccgggccccccctcggggtacttctagaattaattaacgcgggggagaaaaggaggaataacttcttgatttcaaaatttatgatagagctacaataatcacaacagtgtgaaattgttgcaagggtagataaatagaccagtaggatagaactgagagttcagtagtaaacccatctttctatgaccaattgattcttgacaagagttccaagacctttccgtgggagaaagactagactcttcaacaaatggtgctgggacaactggatatctacatacaaaagtataaagctggaccctcaccttaacactatatataaaaattaactcaaaatagatcacacacctaaataaatataagagctaaagccataaaagtaattatttataacggctatgaatgcttagatttgacaccaaaagcatgatgaactaaacaaagtaaacaaattaggaattatcaaaatttaaaaactntaccaaaaaaaaaaaaaaa

SEQ ID NO: 50510 - DNA, 219 bp, Homo sapiens
  misc_feature 28, 194, 207: n = A,T,C or G
cgggcccccccctcggggtacttctagnattaattaacgcgggattgtataatattttcttccataaaactcataggtaggtttaagtattgttttcttatatatttcacagcaaagtttcataattcgtatcacataagttctaagcattgccttctaataactcttatccaatcacctaaagatattggttntgaaatttaacanaataattataca

SEQ ID NO: 50511 - DNA, 447 bp, Homo sapiens
  misc_feature 404: n = A,T,C or G
ccgggccccccctcgaaagtcttctagaattaattaacgcgggtccttataaagaatgtgccaaatcatgaaagaaagaccacgataagaataggaaactacaaggcacatctcccacattctctttggcctttgccactaactccttttaaaagatttccccaactgaaaaataatcaaacaaataaaaacctttattttcaatgttaaatgggcaaagttatacttaccacctacaatttaggggcattgtaagggggctgatcggttgatatcttaaccttctaacattcttttatcagcatttaatcactgttggggttttctagcacacagaggacttaatgggcagaacatagtgggtggtgctgatgatatgtggaaaggaagatagagggaggaanacgatgcactttccatggcagtagaaaggagcagaatagactg

SEQ ID NO: 50512 - DNA, 314 bp, Homo sapiens
attaattaacgcggggagttggttatagattccagcagcgaatgctaagaaaacaggtaggggactaagaaaactctaacccagacaccaacctcttaagaataactaaacataagaaatgaaataacagcttcactgtaggcttgagcaagtgccagctgacacacattcccagtggaatcttccctggagctgtatcaaataatcactgagtaaagagggaaactaaaccctaaggcaactccatttagacttgctatacataattcattgaaaagtttgacaaaaacagatgcaacgtattggatacaggc

SEQ ID NO: 50513 - DNA, 449 bp, Homo sapiens
  misc_feature 17, 104, 105: n = A,T,C or G
ccgggccccccctcggnagtcttctagaattaattaacgcgggtatcagtatcactttgtgagggtactgaatattctcaacaacagcaaagaggtgagtaatnngccccctgaaaacttcagtgacatctcatcttcatttgttgaaaatctatttttatatccagtcctttttcaaaatagttggtggtcatttttataacagtcattcatattttaggaacataagaaccagcttagagctgggtgcagtggctcacgcctgtaatcccagcaacttgagaggtggaggcaggaagatcccttgaggccaggagttcaagaccagcctaggtaacatagcaagaccccatgtttctacaaaaaaataaaaaaattagtcaggtatggtggcacacacttatagtcccagctactcaggaggctgaaggaagatagcttgaggccag

SEQ ID NO: 50514 - DNA, 592 bp, Homo sapiens
  misc_feature 13: n = A,T,C or G
cgggccccccccntcggggtacttctagaattaattaacgcgggggtgagccaagatggtgccactgcactctaaactggatgacagagcaagactatctcaaaacagaataaaacaaaataaacaaacagaaattgtctataatcataaagggaaataatacagtctacaagttccttattgtttcaggtaagatactccttaaattttaggtttaattgtcttcaccaaagtcctacctttttcatactctctaagccacacttacctttcaatctgtgagactatctatctactttcttcttatgtttgtaacggcttcgggtcaattttttgcctggagaacatttgccctaataagtagctgcgtcattccttccatggttctctcactgttttatataacaatttgttaatgttctctagttcatctggagatgaccacaccacaaagattctggcattttcagggaagaagctcaaaaaaaagggttaattgaaggtgagtttccttagcaagataatgtattcaaacatgagcttacacatagtcacttattaatcctaaataggagcaaaagactctgcacat

SEQ ID NO: 50515 - DNA, 604 bp, Homo sapiens
ccgggccccccctcggaagtcttctagaattaattaacgcgggtggtcttggtcctttatgtagtagcccagtatttatggtgccacttgggaaatttatctatgataagaatgtacctctgaaaagcatttattttacaaagcttggatgcgggaatcatatattacataaaatctctttaattcttttaacatggattcctttttctaccatggagtacactaagtcactcatttgatggttttgtgtttacaatcttaattgctcaggacccattttatttgggctttggaaatgtttgaatcaagttggaggaaaatttacttttgatccatttaattctaacctttcttgcaagctcaatttttagaatctagttcaatgggctgaaagaaaaacatctcgcaacagacagtttatttcttgtgcgatcagaaatgctaacagtaaatatgagcatatttactttaaaaatttagatttgaaatacatattgtttagaatttcagaagtttttaggagaacaactatcttacataccaagaatatactaggcatatgtatgcatttataaatgttgttgataaatactattttgtggca

SEQ ID NO: 50516 - DNA, 362 bp, Homo sapiens
  misc_feature 35: n = A,T,C or G
tgggtaccgggcccccccctcggggtacttctagnattaattaacgcgggcatccatatccttacatgtttcagaagtctgttccttttttattgctgaataatactctgctgtgtagatgtaccacaatttgtttatctgttcacaagccatgtccggtgactttgagctgtttccagtttttagctattatgaatgaatgaagccactatgaacattcatgtatttttaggaaattcagcagtctggctggtgataaacaggctgcccctctgagggggggaggagtcaagtagttgagccaagttgaagagcaagcaaccagttttgtaaaaagcatctaaagccaaaaaaaaaaaaaa

SEQ ID NO: 50517 - DNA, 530 bp, Homo sapiens
  misc_feature 32, 35, 52: n = A,T,C or G
ggtacccgggccccccctcggaaatacttctnagnattaattaacgcggggnaatatcattaccttagtcatgaagaaaaacaaactttcttttattaattaccaaatattattaattagtttagctcttgatatgatatttaatatgagtatttctcccaaaagttataaaacatttctaatttttcatcattcaatatttccttaccttttcaggacttttttaaaataagaacttctatttgactttctgaaataagaccatattttatttttatgtgttttttattgacgtaagtatacgtatttattgtagaacattttgaaaatttgggaagatcaaagaaggatgctaaaagtattataaattcacccacaacggattattttattttaaatttcactttttgggctgcaaacaaaaattattttggaaaaaaagtggaaaatcccacatttctggcaaatattcaacagacaaaaatttccattataatgcacttcactataaagcgtatacatgcacacct

SEQ ID NO: 50518 - DNA, 386 bp, Homo sapiens
ccgggccccccctcggaagtcttctagaattaattaacgcgggacctgagagttactaattaagcaggataacttcacacataaattttagtcagaaatcccgaccaaataaaacatttgcatcaattaaacagctcttgaactggaattatattatccaagctgagttaaaaattaaccttagattcataataaaatggtgtatgggataatataaggtgctggattgtgagtagtccagactgcaattaaaaataaaagaccagctgggcgcagtggctcacgtctataatcccagcagtttgggaggccaaggtgggtggattacctgaggtcaggagttcaagaccagcctggccaacatggtgaaacccaaaaaaaaaaaa

SEQ ID NO: 50519 - DNA, 594 bp, Homo sapiens
cccccctcgagagtcttctagaattaattaacgcgggctttccttacactctttacaattatgatagtaagaatgaactaacactttacactttcacctgagaaatgacagagcttcagaatttgatttctttaactgtagagtattaatgaaatccaagatggtattttgaatgaaagaaccaacaggaagaaacagccattttggtgacagtctcatgaacttgtcagtggtagaactagggaagataatacaaaagttttgacatctcagttgcttgccaccctatctgacatggcactagcttgttcttttagaatataggaaggaggggctgggtgcagtggctcacgcctataatcccagcactttgggaggccaaggtgggcagatcacctgaggtcaggagttcaagaccagcctggccatcatggtgaaaccctgtctctactaaaaaaaaaaatacaaaaaattagctgggtgtggtagcgggtgcctgtaatctcagctactctggaggctgaggcaggagaatcgcttgaactcgggaggtggaggttgcagtgagccaagatagcaccattgcactccagc

SEQ ID NO: 50520 - DNA, 526 bp, Homo sapiens
  misc_feature 40: n = A,T,C or G
agactggggtaccgggcccccccctcggggtacttctagnaattaattaacgcggggtatagacctcacattttgaaagtgcatttaattgaagatgttctctttggcaaatcatacctctttggacaatgagacctacaaaacagtgttttgctatcatacctccccaggttttctatgacagtgagaggacgctcgatgctgccctcacttgaccttgcggtgtgggagcccttggcttgtgatgtttcttgtctctctgaccagggctgtctcattcctgccttggccttcctctctaattcttcctctccccactcttttcatggctttcatttgacaagtagcttctgagcacctatgtgtccatgatccagggatctggagatggctaagacagagatgttccctgccctcatcctagcaggaaagatagacacaagacaatcaattacataattaatcatttatcctatgctgagtgctatgaaagttaggcattataaagctttaataaggagatcgt

SEQ ID NO: 50521 - DNA, 599 bp, Homo sapiens
cggggccccccctcggaagtcttctagaattaattaacgcggggcggtgaagccctgtctctactaaaaatacaaaaaattagccgggcatggtggtgggcgcctgtggtcccagctgctcgggaggctgaggcaggagaatggcatgaacccgggaggcggagcttgcagtgagccgaggtcgcgccactgcactccggcctaggcgacaaagcgagactccatctcaaaaaaagaaaaaaatctattggtaaaaagcagctgacaatatcagcatttgtttattatcttggatttaatctgttgataacaaggtgaatatatctgtcccagcacacaaggataagagaaaacttcagtctgatattggctagtgaaaatttcagcaaaatccttttagtataacatctgccttaataaatggcattaaaagcggggaggtaaagaggatggaggcattctctcttccaaatgtaaatatactgctgcttacctgtcaatcttatgttttctaagttaattcttcctaaagttttttgtttttaactatttgatgagaagattacactgctacaggccaactaaatgggatgtattat

SEQ ID NO: 50522 - DNA, 616 bp, Homo sapiens
  misc_feature 523, 588, 591: n = A,T,C or G
gccccccctcggggtacttctagaattaattaacgcgggcaaatacaagcaaaagacagaaatgatgctggttatagcgtttaataaagagtgattatttctggcttgagtgagctggaaaggcttcagaaggaagtgaaatttgaactcagtcttgaagaatgggtagttttgtcattagtggaatagaggggatacagtggaagaacattcccagaaggtggatcaagaaagaacaaagaacagagctggaaggtgactcaaggatacactcaggcctgtttgttccagtagagcttttacattgggaagtaacaggaggaaattttgcaaagtggacaagagtgtctaagaaaagaccagaatggcagtagtattaaacaggactcattagtttgtagtgggtaaagataaaactaatgacttagcatccttcgggaaaacaaaacaaaacaaaacagaaactctcaagctttaggaaagtaaggggaggggagaatcatttagcttggcacacactgangcagttcaaggtatcaagagaaccctgagagagggtgtaatagggattcagtggctctcatactncanactgccatctatttcttttactttc

SEQ ID NO: 50523 - DNA, 404 bp, Homo sapiens
ccgggccccccctcggggtacttctagaattaattaacgcgggtcacatttctttagaagctgagtgcctagaactcaatagaagctttttgaataaatgatgggagaaattttcttttattgaaattaagggtttttatgtttgctttcctaccataaaattagagtttagtcccttgatgctgtgcccttctctttttaatcatactccttattttgaaaataagtgtatattatatcccagtgaattaaatatcttttccctctttactatagttcctggaaagagtatattgatactgtaataatatttgttttcaacagtaataatttgctggtaaaccttatatttgcgttactggctttacagtgtatcttgcaaaacatttgcttcaggatcttat

SEQ ID NO: 50524 - DNA, 593 bp, Homo sapiens
cccccctcggggtacttctagaattaattaacgcgggggagagagagagagaggcaagagctaaaaaactacctagtaggtactatgctcactaactgggtaatgacatcattcataccccaaattttagcatcacacaatatactcatgtaacaaatcagcacatgtacctctgaaactaaaataaaagttgaaattataaagaaagtggtaaattagaatattgtttaaaattgatttacttattaaaaattaaaatttacaaaattaaataatgtatttagcagatattaattgaatgtctacttttgccaggttttgctgaatactagagatgcaataataaaaaaaaaagttcctgtcctaagggcaaaataggcaataaacaaataaatctatagttctattagggaatgagcaacattattaaaaaaaaatcatgctacaaccctatagtgggttgggtccaaaggatgattaggccagcttcataccaatttggtttacttatatctaggccctcttggtcagtctggcctactctgtcataatcattgcggtgttcacttaagacgccctactgtttttctctg

SEQ ID NO: 50525 - DNA, 560 bp, Homo sapiens
ccgggccccccctcggaagtcttctagaattaattaacgcgggggcatcttaatctaaacaagtacttagcattacatctcacctgggtcaacagtcaagggtatcagagttaaactgtgttactgtaaattaatggaaaatgtaactgcactttgctgaaagataaatgtccaataaaggctgcataataaaaaaaaaaaaagacttaaaaatgttatagaagctggtcgggcacggtggctcatgcctgcaatcccagcactttgggattacagacatgggatgagccaccacgcccagctaaaacatttttaattattaaaaaccatatgtattttttaaagtacattttacttcatgtcatttgtatttatattcaccccaaactgtaagcacagaacatctacagttcttcatgaaatatcttttaactctgttaaagaatgatgtttgagtaagtgggatgacgtaaaaggcaaagatcttgttttcacttcactgaaaagctaatgcagattacaaaaaccctatcctaaagctagtggattaaattgctact

SEQ ID NO: 50526 - DNA, 491 bp, Homo sapiens
cgggccccccctcggaagtcttctagaattaattaacgcgggtctgtggagggagccaggcgatttgatcagcaggaatccttgtctttcattttccgtgaaactggattgtggctttcctaacagggatgaagtaagagcatgtttgattcttaaatatgcgtaaaacttcaaacaccaccaaactgcagttcaccaaatggattattgtcatgggaatttttccttatctctcacttctggaaagtgaattaattctcagtgggagcaagccctccccacagagctgctgttagggagagtgtcacatgttcaccacagggtggagagtggttcacctttggttactcagaagcaatctaaattttttagcagcgtttttggtattacagtggttggcttagcattgttttattttcctggtcaattttttttaatggagttaactttatgcattcatgttggtcagtcccaacctaactttattttac

SEQ ID NO: 50527 - DNA, 616 bp, Homo sapiens
  misc_feature 37: n = A,T,C or G
ctggggtaccgggcccccccctcggggtacttctagnattaattaacgcggggtgaccgctagattggtaaattggcatttgaaagagtgtcttgttggttttgaatcttgttagcatttgttgcagagttcattctgtttaagtccattttctattttcgtgattaaggattgacagagacgcaaaatatgaccttaaccccataactttttcagttgaccaaagttttcaaggattagtctttttaaagtgaatattatctaaattaacccaagtgaaagttaacagtttatctaagttaaccaaagtgacagtgaacagtttttgttgaatcactgatttctttcttagaaaagagaatgtggcctatgaggattgaaaatagggattttgaaataatgttccactttttcatgatttttataaccctcagcaactgtcttttgtgtctcaggatcttcattttgttatctggaaacttgcccacagaaaattatctgtaggtaattttgtatttacttaaagttgtggtacagagcgttggaagaacatataccatgatccatatttaactgtaatttgcttttggacaaaagatgggtctagccatggagt

SEQ ID NO: 50528 - DNA, 403 bp, Homo sapiens
  misc_feature 28: n = A,T,C or G
ccgggccccccctcggaagtcttctagnaattaattaacgcgggggttgtccaagagggagccctaataatgactgaaattcaatgttttgctagtctagtaggttggaggcttgtttatacacattttgacatcacactacactgttgaacataaattcacagttcttgacttcaatgaatgtataatcaatttagaaagtaagttatacataaatataaattagcagttcatgacagcatgtaccagtgtcaaagaaggacagtaagtcatatagttttacagttaaaaaactctttgttgtccccacaacacaattgtcccccttttagtgaaactgccttttgattccactctataatagaggagctataaaagtgtgcaaaatgtcaagggtcactat

SEQ ID NO: 50529 - DNA, 601 bp, Homo sapiens
  misc_feature 565: n = A,T,C or G
cgggccccccctcggggtacttctagaattaattaacgcgggtgggggagaagagatttgattaaaatacaaaatacagttagaaggaataagatctagtgtttgatagtacagtagactgactaaagttaccaatattgtatagttcaaaatagctagaagagaggaattgtgatgttcccaacacaaaaaaaagataaacctttgaggtaatggataccccaattatcctgatttagtcattacacattgtatgcatatataaaaatattacatgcatccccaaaatatatacaactattatgtatcaataaaaatactaagttggtactacactatattaactgctcttctaatttagatattatatatgaaatttaaattgttctaatgagcctggatgaaaatggcctatttagttcatattactttggatatatatggatatatcataagaatgattaatcataatttgctgattaatactttattctacttataacttagtaaaactgacagatacttatttgatcagggatacaactttatatttcacaaatatgtnttaacactagaaatctgagctcaaccaattcattag

SEQ ID NO: 50530 - DNA, 478 bp, Homo sapiens
cgggcccccccctcggggtacttctagaattaattaacgcgggggaatatatttgtggtaatacacagatttatctggtacaacgcctccttacaatgggtgacagttacctactttcaaaatgcagttactgttgaacctgtcaatcagcatacttctgtttcctctctcccacttttcatgctcttttggcattcatattacttttaaatatgttacattccccagaattcattgcaattttattactcaagatcatttcacttgcaaatattataagcccaattcaaacttagttgagaataatctaaaaggaggagcaatatataaacctccgtagtgaaattgttgcctggccgtaggtggaatgagctggaagcagaaactcaaataccgtcaaaacgctctctctacgattttcctctcttttgcctaaattgtgccatgtggctggacttacgaccaaaaaaaatgggga

SEQ ID NO: 50531 - DNA, 486 bp, Homo sapiens
  misc_feature 36, 53: n = A,T,C or G
ctgggtaccgggcccccccctcggggtacttctagnattaattaacgcggggnaatcatctagtaaaagttccacttctttctttctgcaggcccaagccttgcacagtgcccaacactaagtaaacacatgtgtttatcaactataaggaactatggaaacattgtcagggatacaaaggtaaattgagagacctgagtatttaagaaagaaacagaatattaaagactggaaacatttttaaagatctctactgcagcctccatggattgaaggtttgaaatatgaggctcagagaaactgtgtgctgctcatacatttgatgaacctgccttaaacaccctgttatttgttattccaataagcccctaaatgttattaatcttttgttgttgttgtttctattagcatttctactaataaaagcttactgttttgttgactaactttgaaagctgctattttacatttataacatatgtggga

SEQ ID NO: 50532 - DNA, 579 bp, Homo sapiens
  misc_feature 540, 548: n = A,T,C or G
cccccctcggaagtcttctagaattaattaacgcggggacatcatagagagacactactgtctctcttaacctctctattgaaaaggcttgtcctgggctggggaaaccacagtatggcacagtaaaacattcaataaaattgaagtatccccagtttttatcttctggcataccatttcagagaatcttgagggaaaaacaatgacagtgatattgcttgaatattgtagatgattagtcagaatgaaataattgaataatcaaaaaggtctggattcaaattttagctctgttactttctaggtgcatgactctagatgaattacttaatccctctgagttttagttcttcatctataaactgtgaaaaattactcatcagagttattggaggagttagaaacaatatatatgtagtatattccatttattaggtgccacatgaaatagagaacccggatttatgttcccctgaagaggatttctgttgtgttgtgacttctgcactggggtttaaggagatagcaactcttcagctntgagagtntccctcctattaatgcctcacaaggacgcga

SEQ ID NO: 50533 - DNA, 585 bp, Homo sapiens
cgggccccccctcggaagtcttctagaattaattaacgcgggagagtatttatcacagaatattataattgataaagtatctatcttcaggtcaattgtgggcaccttgagtttaaggaggctgtctttggtattttagtttttctaatatgtagcacataataataacggtttaatgttcattgagtaaactaacgaatgaatagaaacattttacttatatgatcaattgctgctgcatcaaattccaagaaatccattcagatttgttggttctctggaatagttttgtatatcaaatactgattaaaagacatgagataccaattaggaatttgaaaagctattatatcccaatggaaaatgggaaacaaaagtcataggcaatgcatcaaaataaaaccatacattgctagtaagcatggaaagatgctcagcttcactaggaacaagagaaaggtaaattaaaatgagatatggggccaggcacgttggctcacgtctgtaatcccagcacttcaggaggccaaggctggcagatcactcgaggtcaggagtttcagaccagcctgaccaatatgtggc

SEQ ID NO: 50534 - DNA, 585 bp, Homo sapiens
ccgggccccccctcggaagtcttctagaattaattaatgcacttatgataataccctgtgaagtaggtaagcctgcaaagcctacatttttaacctcactgctattctatttataaaagattggatgcctacgcctatattgacatatatacatacagagatttttcccaacatgtgaatggaagtttcctctgggtagtggcattttcataatttttactttctcctatctgcattttgaattttctgaattttgtttttttgcaaagagcatgtatcataattagaaagagtaaaacaaaaattctgctgcaactttgcaggcaagagcaaagctgagttaagctctgtgataagcgacgcctaatgacgagggtaattaacttgaatctttgtattacactattttgaactttgctctgacttcaatagcatgtgttattatgtaaaaattagaaatcaatcaaaatatgttccattaatattattaattgtgttttgtgccaaatgtgttggggagaattctgagctatgcactagtatctagcttttttttcaagcccgaccaaagcctattttctgagt

SEQ ID NO: 50535 - DNA, 308 bp, Homo sapiens
gccccccctcggggtacttctagaattaattaaccgggcttctatgaaacttgactgaccttacaataattataatgattaagcacaaagcaaaatcctgtcttctagaaaatatctgagcatacaataaaatttcattagaaatcaaatgaatttctgggcatggtagctcactcctataatcccagcactttgggaggccaagttgggagggttgcttgagccccggagttcgagaccagcctgggcaacatggcaagaacccatccctacaaaaaaaaaaataaaaagaaaataaaaaaaaaaaa

SEQ ID NO: 50536 - DNA, 530 bp, Homo sapiens
ccgggccccccctcgaaagtcttctagaattaattaaaattatattctaaacttaatgctaaaatgtatttgttattcaatattgtcaggaataagtatgagggttttgcaaacctgtaacatactttccaattataggtttttgtttaaaagttaacatttataatttgaaataatttagcatactctttctgccccttgtggtctataattcatatactgagaataattatcccagagagtagaatgatctggtagtttttcatattggttgttagtcagtttgtcctggtggtctctaaaggagccaattgagaagggaaaaagaatttgttcaaattctctttccatgctggctgatggaatggttattcttagtattcaaagggtgttaaataaaggcttggtactgtcatgctctgaacattcttcttcaggtttgatgtgactggttgcagatccagtgataatgatgctcacgttgaatacagtggctccccgatgttgattctccccttgatcactgttcc

SEQ ID NO: 50537 - DNA, 520 bp, Homo sapiens
  misc_feature 35: n = A,T,C or G
ctgggtaccgggctttccctcggagtacttctagnattaattaacgcggggtggatttattaatggcaattattaggagagagaaccacccaaaacacattggaaacctaacaatataaaccaaagtctggcagcagaactcctaccgttttgaagggtaatgaatacttttatgacatgagttagttccacagtccaagactaaggaatggaactgttctttacttgttattagttatgagcattatgtatatatacaagagcaaactataaatacaagaaacctaaagaattgagtcctctggatgggaagcaggggaaaaagagtgtgagtagagcaatgaataccacgtgaggactaatttggtaaaccgagtgctgtgcaatgaatactgagtaccttccattaagacgattggctagtatatagcagccatagcagtgttccatgatgagcaaatacaactatgagtgtgaatgtgcttgtacataaaaagcctgctgctaatagtaaatgatg

SEQ ID NO: 50538 - DNA, 501 bp, Homo sapiens
  misc_feature 27, 434, 455: n = A,T,C or G
cgggccccccctcggaagtcttctagnattaattaacgcgggggaagggtggtggtgcccagtggtggaacctgctgatggatatcacccccactgcctgaagaactaccccaccagtgcacagcaacagtgaggtgccactgatggggctcagccaccccatgcctggtgccaaatgcactcaaataccactcctgaaattatgtgcatctagaaagtcctaagtcacacagccatgctgagctgcaagcgggggtcaagagtcagctgacacacacacagggcacggcacgcaatctccccccaccctcaagggctctcagtaatgccacctggtaacactttcttcattgcatttgccaagcaaagctcaataaagttcagacccaaattagaggctaagcccccaaagccaggagcagagctgtgagctntgaaaatcaggttggatgttntaagaaagttcaataaagacgagctgcttcaaaaaaaaaaaaaaag

SEQ ID NO: 50539 - DNA, 438 bp, Homo sapiens
cgggccccccctcggaagtcttctagaattaattaacgcggggctactcataagtgttcatagccacagtgggctttggccaggaactccttttcttcttctacctacacaagctactcctgtactccgtctgcttttatgaatgaacgcatttggaccttgcttcctacattaatcagattttatccccttctctccacagcaacgtagtatccaatgatgtgaatttctcttttcccttaccttatctccagttctaattacatactgccttagttaccacccccctttatctgcctatttatttaaatggtaacttttcattcatggaaaagtagtctactttccctcccatcccaactgacaatttggaaattttcagtgtggaaaattaggcataagatagaagttttcttggctttaaaaaaaaaaaaaaaa

SEQ ID NO: 50540 - DNA, 354 bp, Homo sapiens
cgggccccccctcggaagtcttctagaattaattaatgggtctctaatgattagcatgagcatgtagaactcaatgtttactgattatttgacactctaaaattccggtccatacccatagcagaaataaagggtgaacaagatgatgagtttaaaaattcagctgttttaataaagttcattgttaattttttttaagaaatgaggctttcagccaggcgtggtggttcacacctgtaatgccagcactttgggaggccaaggtgggcagattgcctgaggtcaggagttgcagaccagcctggccaacatggcaaaaccccgtctctactaaaaatacaaaaaaaaaaaaaa

SEQ ID NO: 50541 - DNA, 355 bp, Homo sapiens
  misc_feature 9: n = A,T,C or G
acttctagnattaattaacgcgggtcctgctttgtcctaggcaacgtcccttcttgttaggaggcccctgaagatgattaatttcatccattatgcattaatttcaggaggttaactctcaaagggccaggtcctttctttttgtttgatactcactctagctctctactcagtatatgtgacatttaaaaattcttatttaaccacaaggtagaataaagcatttgctcattaaaataccttctccctaaatgggatttattactgaatgagaataatggacctattgttattatttctgctccattttcttgtaaagaatgtatttctttgtgttagccaaaaaaaaaaaaaa

SEQ ID NO: 50542 - DNA, 576 bp, Homo sapiens
  misc_feature 24, 26, 37: n = A,T,C or G
ctgggttacccgggccccccctcnangatcttctagnattaattaacccggtgtatacctaggattacaactactgggtagagaatactgcatcattttttaaaggtgaaatggggccgggcacactggctcatgtctataatcccatcactttgggaggctgaggcaagtggatcacctgaggtcaagagttcaagaccatcatacaacatggcgaaaccccgtctccacaaaaatacaaaaattatctgggcatgatggcggttgcctgtaatcccacctactcaggaggctgatgcggaagaatcacttgaacccagtacgcacaggttgcatccagccaagactgtgcactccatcctgagcaacgaaacaggactctgtctaaaaaaaaaagtgaaatgggattctattgtatagatgtactatatcttgtaaaatcactgtgtcattgatgggctcttacgttatttccaaattcttgcttttatcacaatcttgtccaatgatcctctcacgaaaaaattcctaaaagtacaagtgctggatgaaaagagtgatgtggccgggcgtggt

SEQ ID NO: 50543 - DNA, 417 bp, Homo sapiens
tgggtaccgggtccccccctcggggtacttctagaattaattaacgcggggatctgacccaaaagggctgaatcatggagctgtgcagcaaaaactccaggagaaatccttattatggacaaaggccttgttttctgtctctttcttatctttttttctcacccagtctagccctcaggccatgcatatggaaagatctcccagatctactcatgaattaagcaaggtgtagtgaagtgtacacagtgtgttgccatttgtgtcaaagacggtggtaataacacatatttggattaaaaaaaaaaaaagaaagaaaaaacaaaaactccattgaggaccaactgcagtggctcacacctataatcccagcatttttgggattataggcttgaaccaccaatcctggcttttgacaca

SEQ ID NO: 50544 - DNA, 602 bp, Homo sapiens
cccccctcggaagtcttctagaattaattaatgatcaatttgcctaatgatctgttcgctcaaaagttctattaatcatatttacatctcatacatagaagaaaggttttttccttttgtaactgttaacgtatctttcaatttttgaacctttcatatattttaggccactttatactaactaactcattaactttattttctacaatttctaactcacatagaaagaagtatttacattctttaaacacaagattatcccagatgaagaaaatatttttccttgccttttaagcctcctctgaatcttgaagttgctcttcttgactttttagaagctgagctcttctagctctgggtcctagcatagcacagagtctggaagagtagcaaatgaattcatcaacaggaaaggcgtactaatatatatttgttctcctaattataaatgaatgactgtttctttttttgcacatgtccaatttttgatagcctcattttcctgttagatcacagtagctcaaaatttgatttttcttaaaattaagagagaaagtgtataagattaattatctgaaaaaaaatgcattactatttaaaac

SEQ ID NO: 50545 - DNA, 511 bp, Homo sapiens
  misc_feature 30, 463: n = A,T,C or G
accggggccccccctcggaagtcttctagnaattaattaacgcgggggcggatggaaatagaatagaatcataatgaaatttcaaccctgcagctgtatttcacctataacattctgttcataggatttttctcttccttaggcttctaactagctgaaaggaatatagacgataagctttctaagacagaaactttaattttcactgaataaaatcattcatatttagaagtatatataaatattaaaaattttgctttttaaggagttaggcatcttaccaagcattattttatataacaacatgctacaaatatgttagcatatgtaatgatccttttaatatagacagaattttgtgtagtagtatagggcttgttttctaggcaaaatatgaaaaattattctctgctaattttaatctctttttcataatacaaactattatctagtagtataactntctgatatttggaagttaatgctacaaataatgagaatttggttttag

SEQ ID NO: 50546 - DNA, 370 bp, Homo sapiens
cgggcccccccctcggaagtcttctagaattaattaacgcggggatctgaggtggtgtccgtctccctcgcaaaggccaacatgtcttcttatgctgttagagcagagatgggcatcctctacaagatctatgagatccacctgatctgagccattcccaattccccacaattgtcaccattttctatctcccatgccccatggccaccccatgtgtgctcccactgaaagaatctttaagtgctttccagaggctagagcgggtgtggtgagggaggacactgtggaagaagaggctgtgagccagacagaggctgcacagcaagggtcaacatggtaaaaccccgtctctactaaaaaaaaaaaaaaa

SEQ ID NO: 50547 - DNA, 398 bp, Homo sapiens
  misc_feature 40, 57, 73: n = A,T,C or G
agactgggtaccgggcccccccctcggaggtacttctagnattaattaacgcggggnggagtaagcatacagntgttatagtatgcacaatgaggggcatactatacgatctaattttatgtgctgtattgtcacacgtaactcagaagagtggaattgaaatgttcgtaacagcaaagaaatgataatacttgaggttatgaatatcccagttaccctgatttaatcgttacacattatacttgtatcaaaatgtattgatgtggatcccataaatatatacaactactgtttactataataattaaaaataaaaacattttgaaaatctttggacaatgaaaaagtcttgccagtgggagctgagttatgccaaagcataacttaattgacttcat

SEQ ID NO: 50548 - DNA, 263 bp, Homo sapiens
  misc_feature 17: n = A,T,C or G
ccgggccccccctcggnagtcttctagaattaattaacgcgggcgtgggttttctctggcactgttgtcagtagtttaagaaaacaatccctacatataggttgggtaaaatcctcttttcctcgtcccctttgctgaatagaaggtggaaatttgggacattttgtctgcagagttctgtgctctgcaactccctctcttttgtttctcagaataagggaatcactaaaaggttaaaactctctccctaaaaaaaaaaaaaa

SEQ ID NO: 50549 - DNA, 543 bp, Homo sapiens
ccgggccccccctcgaaagtcttctagaattaattaacgcgggggagagagagagagagagagaaacgaggaaaggaaggaaggaagaaagtgaaagaagaaagtcctcttgttggtgttaaaatgtgtctttaaggggaaacttatcatttaggttactaatggtttctttcttcatcattttaatttccattaataaaatgtgactttgaaaggatgcagggagtttgggaatagagagttttatttttatttgtttatttttttccccttctcccagcaaaatacacaggtatctgactatgtagagacacgaagccacctatcctgaccaaacttggcagtggtcaggggataggaggaagtgtagtgccatgggatgggcaccagccctgatgaactcgactttctttccatttctctcctgcatccaaatgttgaggagactttgagtagtagtgtagcctcttttccttttaaaaatctgcaccctgcttatttccaatacagatatgaggttggtacccactaatcttaacagga

SEQ ID NO: 50550 - DNA, 552 bp, Homo sapiens
  misc_feature 27: n = A,T,C or G
cgggcccccccctcgaaatacttctanaattaattaacgcgggggttgtctttttaatcattgcaatgctgtagctaaaggcaagtgatcaagatgataaaagtatttccaagcatgttttattcatttgaccaaaatgttttattgcttaaaatattaggtctgtctgttatttgtaaaataaacaaatgatctaattgggatttaattacatattgcttttatacatactacttcacttcttgtcttgctatgagtagtatatttatatacacatccctaaaattacaaccaagacaaaaattagaaaataaaaataaaaagatggtagtagcaacagatttgcaaaagtgattgagggtttaatgattcataatgacttggcaaattcatgagtagtaatttaatcaaaacgttattgctgacataattgtgtgctcaattaactttcataatatgaataaaatctgtttgctttgtacatttctgatttgttatcttaactgacacatgattctgactgaacgtttctgtaaaaaaaaaaaaaaaaaa

SEQ ID NO: 50551 - DNA, 326 bp, Homo sapiens
ccgggccccccctcggaagtcttctagaattaattaacgcggggaccgcaggccgagtacactgtgtctgcctaggcctggccacttccaccacattctgtagggagacttgggttcagattctgctctgacacttggtcaattcactcaatctccaagcctccctcatgggaacacggaggtatcaaaagcgcccaccacgcagtggctcacgcctgtaatcccagcactttgggaggccgagacgggcagatcacgagatcaggagatcgacaccatcctggctaacaaggtgaaaccctgtctctactaaaaaaaaaaaaaaa

SEQ ID NO: 50552 - DNA, 539 bp, Homo sapiens
  misc_feature 522: n = A,T,C or G
taattaacgcgggtgtacagtttttttaaggatatcttcctcatcaaagtagtatgtaataagcactcagtaaatcatacttgttattttcaatactattaccaatattaataactactaatagaaactgtatcattgtatgacagtaacaatcccaaacttgccccaggttaggatttaatccacaccaaaatcaagatcctctgctaatgctgtagctttactctctctatatagtacaaagtctagaaaaaatgtagctactcttgcctttaccattgcaggctctggtgagctcacactcatatcccagctgtggttgttttcaagcatgccagatggtagggcttgtaattaatgtgcccatcaacaatcagaattaaattcctgacagatacagttcagggcatggccaatgaactatttgcattttattcctgactaaggtttgtgtcccaaaactttaccagttttcctaaactgctgagttgagccaaacacaaagaaacctcaaggtccttnttttctcttctcctcta

SEQ ID NO: 50553 - DNA, 141 bp, Homo sapiens
aattcatccaaggaaatagctaggaaaaaacagacaaacaaacccaaaaccacaaacgcattcaataaatcgataaaaggaaagcctgcaggctgacaggattctcactggtggctgaattcctggaggaagatctaatga

SEQ ID NO: 50554 - DNA, 604 bp, Homo sapiens
ccgggccccccctcggggtacttctagaattaattaacgcgggggagaggagagagtaagaatacttcctaactcactctttgaggccagtattatcaccctgataccaaagccaaacaaagacgtaatgcgaaaattacagaccaatattccttattaataaagatgcaaaaatcttcaacaaaatactagcaaactgaatctagcagcatatttaaaggaatatgcaccatggccaagtgggacttattcccaggattgcaagggtggtgtagtacaacacattaatagaatgaagcggggaaaacccccacgtgattgtttcaattgatacagtaggcagttgacaaaattcaacagctgttcttgatagaaaggctcaaaatcaggaatagtagggaactttttttttaaacatttcctcaacattcagcgtttatgaaaaaacccacagctaacatccaactcaatagtaaaagactgaaatccttgcccttatgatcaggaacaaggcacggatacccattctcaccagttattcaagttgtagtggaagttatagccagagcagtgtgacaagataaagaaacaaagacatacagat

SEQ ID NO: 50555 - DNA, 426 bp, Homo sapiens
  misc_feature 13, 45: n = A,T,C or G
ccgggcccccccntcggggtacttctagaattaattaacgcgggnatcttggatatgcaatgttagcacattgcatccatcgaaccttaaatataacagagtgatttacattaacacctacttaatgtattttaatgggcatacctgccaccaaacctgtgatgcacttcatctaattgaatctcatggtattcctggcacgtaaatgcttttatctatattctacagaggagaaaattggctgactaaggttatgtgaggtacaaaaattctaccttttgtaactatgtgtttcatgtattcagtaaaactgatgtataatatttctagtatcttttgcactctagtcttttatttataaaaataactggcgttttaatgaatacagatatgaatgtatataattatgtatacatgtatgtgttt

SEQ ID NO: 50556 - DNA, 453 bp, Homo sapiens
  misc_feature 17: n = A,T,C or G
ccgggccccccctcganaaatcttctagaattaattaacgcgggcacctaccctacatttcagttttatggtggtcaattccagtacatattccattccctctgcccctctgctctagattggattgatattctttcagctgccttagctataagaattggaattgtgtaatgaaaaataaattggctatcattctaaggtgcaccctgttgaatggggagatttttaaattaaattgttgtttctaacttttttccaaacacctgtaatttctgaatttaagactcacatgtagctctgctctaactttcaggatagcttggtgaagtgatgaaaagtttaaataatccctcagatgaaagcccagaaacctattcataagacgtaacagcttccttggtccaaggaaagaaagcagaggggagggtggatagaaatgggaattaggaaata

SEQ ID NO: 50557 - DNA, 528 bp, Homo sapiens
ccgggccccccctcggggtacttctagaattaattaacgcgggatgccagagactagctctgggaagaaatgtgttaaacaatgacccctttcctctcttgtctcccgctctggcattcatcagccatagtaataggctatgatagagaccacaatgttctgttatatgtacctctcatactgcaggcataaagcaaccgagtcatgattgaataattatcagacagtaagaatacttttcaggagaggatgtttcctgactttttctaaatagcaaataccttcccaacctcagaaaagaggtatttttatactttacattataaagtgtaaaaatatctgaggacattaagaagaaatcagaggctgggcatggtggctcacgtctgtaatcacagcactttgggaggctgaagcgggaggatcacccgagggcagaagtttgagaccagcctgaccaacaaagcaaaaccctgtctctactaaaaatacaaaaattagccaggcatggtggtgcatacctgtagt

SEQ ID NO: 50558 - DNA, 210 bp, Homo sapiens
  misc_feature 21, 34: n = A,T,C or G
ggtaccgcggccccccctcgngggatacttctanaattaattaacgcggggaaccagggagggacagtttcctaagggtagaaggaatttcatggagacagcaacccgtggatggtgccaaatctcatcatgaattgacaagagtccttggacttaccttcctgggagtcggttttatagattttgcacaactttgtacctaaatcattc

SEQ ID NO: 50559 - DNA, 547 bp, Homo sapiens
  misc_feature 32, 527: n = A,T,C or G
gtacacgggccccccctcgaaatacttctagnattaattaacgcggggacttggggctgtctcaaggaaattcatccaaggaaattgctgggagaaacaaacaaacaaacccaaaaccacaaacacattcaataaatctctaaaaggaaggcctgctggctgacaggagtctcactggtggctgaattcctggtggaagatctactgtctgtcaagagtctaagatgacatcatcttcaatgtcacaatctctttttcacttggtttgaaatatctaccgtaaaagtcatcacttgagtttctacacaaaagaagtcaggaaggggaaagccttgcctttagaatgccactattaaaaaagcagtgtggccagagaaggactagacctatctccatccccattcttgaaaatgttttcttattggctcatgagcaccaatgccaatggggtttggaggttgcttggttttcaccttggtcgggatgaaaaagataaaagggagaacataagaaggcgtagatcctgnggggagtttgttaaaaactg

SEQ ID NO: 50560 - DNA, 374 bp, Homo sapiens
cgggccccccctcgagagtacttctagaattaattaacgcgggggagaaatcttgtaggcatcaaaggctcagagaacactatataattgcactcattaattttaacttagaattaatgggcaaatatctgaaaagccacaaagaatcaaaatgcaaccaaaatgaaatagacaatatggatagtcctgtaagtgttaaatgaattgaatttaatccgggtatgatgtcatgcacctgtagtcccaggtactcaggagtctgagatggcaggataacttgagcccagaagttagaggctgcagtgagtgaagactgtgccactgcactccaacttgggagacagagcaaggctctatctccaaaaaaataaaaa

SEQ ID NO: 50561 - DNA, 522 bp, Homo sapiens
cccccctcggaagtcttctagaattaattaaaaatactacttaagaagcacttttgagaatacgtttaaaacaagaacacatattattattttttgcccccgaatgaggctgatttatagtaatttactagtgacaattaaaagtctcagttggaacacacatgtgtaagtaccatttcataagagatataacatttcattttctaaaaatatggaagacgaagaaaagcaaaacagttaggaattaaaaatagatcatctcaggaattttttttctccaagttagtccaggaataaaaaaagctgattctactagttctgaggcaagccatactacagaggcccctgtgggatttggcacccaggggtgctaaatgaaaagtgatgctaaattcaacactattttataaaaatccccatactctctaggatattcaattcttcccaaattaatagggtaccccattcctgcaaataaatgccttctgtaaagtagccaatggcaatgagcaccccgctccc

SEQ ID NO: 50562 - DNA, 565 bp, Homo sapiens
cgggcccccccctcggggtacttctagaattaattaacgcgggtcttcctcagtggttttaagttcttaagcaagcatggatttacttcatccatgcctttctcacccctgtcatgcttaagagttacattctaacatctcctacatcattctcctcatttaaatacaaaggcatctgacctaatactcccgaaccatctcaagagtatgactcatacagagaaattcctactatttcagcatctcacccctgttggatgaccgaactaaccttatggcaaattcagctttagtgaatgatatttcttagggttgttttgtccacaaagactcctactgccagaaatacgaaaatggaaaatatgagctttgcctagtagtccatcaccatcagtttcacaacagtgacaaaacattcttttctcaaaaagcatcagccacttcctcagaggattacctggtggaatctccccccatgcccacccaacctacactaactgactccatggcacaaagggtaggctggtatgaatccacccaccctttttcatgctcaccgacagct

SEQ ID NO: 50563 - DNA, 544 bp, Homo sapiens
  misc_feature 35: n = A,T,C or G
tgggtaccgggcccccccctcggggtacttctagnattaattaacgcggggggctgagacaggagaatcacttgaacctgagaggcagaggttgcagtgagccaagatcacgccactgcagtccagcctgggcaacagagcgagactctgtctcaaaaaagaaaagaaaaacaaaagtgcttctactcctagcaactctcaagagttgatgctcccacagtattgctgggttacccacaactatactgaaatattttatttctatttctatgccatgctcactcttattaggccactgcatgtgtttttcttgtcctggagtatctttctcagttcactctctctttgccatggcttattcctactcattcattcctactcatcttaggtgccactttacccagaaagtcttttttggtccccaaatttgagttagattcttcctaccaaaggtatttttaaaaagtatactctctcattgtagctatttgattcttagtaactgcttccttactaaacaccctgactagactgtgatatccat

SEQ ID NO: 50564 - DNA, 586 bp, Homo sapiens
cgggccccccctcggggtacttctagaattaattaacgcgggtaacccagtatggaggtcacaactggggaggggaggaaatggccaaaatgaaaggcgatgtcattgaatgcaggaagaatttttttttttgcaaccgggtcttgctctcttgcctaggctggagtgcagtggtgtgaccatagctcactgcagctttgaacgtctgggctcaagcaatcctttcacctcagcctcacaagtagctgggactacaggcacatgtcaccatgcacagctaattaaaaaaaaattgtagagataggatctcactatgttgcccaggatggtcttgaactcctggccgcaagtttaaattaaatgttaagaatggcattgggaggctgaggcaggagaatggtgtgaacccgggaggtggagcttgcagtaagccgagatcatgccactgcactccagcctgggtgacagagcaagattccgtctcaaaaaaaaaaaaaaacaaaaaaaaccggcaatacttcactttgtagttgaagtcccaaagagcagaactgtgaattctaaaaacagaactttaaaaatagct

SEQ ID NO: 50565 - DNA, 422 bp, Homo sapiens
  misc_feature 16: n = A,T,C or G
cgggccccccctcggnagtcttctagaattaattaacaaattgcaatgataaaaaaattgagaaagagctggaaggagaatatgatttaaagagacttaaaacattcaaaactggcaaaactaagccatatcattcaaggatgtccattaagtaataaatcaccccctcactctggggagagggagagggctttgattggaagagggcatccggaagcttgtagggtgccctgtgatgtcaatagtatattatcataaattcattaagttgcatatttgtttcatatagtttctgaatttgtgctacattaacaataaaaagttgacatttttaaaaagaaaagaaagttgttactatgaccttatttgaggaaccaaataaaaacactaacatatggtgggtatattgggaaactgaaaaa

SEQ ID NO: 50566 - DNA, 554 bp, Homo sapiens
  misc_feature 9, 22: n = A,T,C or G
ccccctcgngggtacttctagnattaattaacgcggggtggctcctctttcacctccttcaaagcaagtcactttctcaggaagtcccttcctgaccatctcatttaaaattgccaccccgccccaacctttccatttctgttttcctcctttgctgtgtttttctccataatgctggtgaccttctaatgtaggacttattttttctaaagacctctccttacaggtatttccccttaagtcctgtgtctttgagtattggttttagtttaaatgaaaacttcccagtgcttctcatctgtagccagcattgggaacctttgccatagacgttgcttcattaggtgttagttttgagagttctcacagaggcaggtttttaagtatcaagaacgtatttttaattcttaatagtagcttcaggcaatatttttcatatagtaggaccattctcttgcattaaaccacatagtggctcagcattgttccccactcatcagaaagcttccctgcagtagtgatagcagcatactcctatatataactgatcttga

SEQ ID NO: 50567 - DNA, 598 bp, Homo sapiens
  misc_feature 17: n = A,T,C or G
cgggcccccccctcganagtcttctagaattaattaacgcgggggggggggaggaaagaagaatcaaggatgatgtctaggtagatggtgatgccttagctgtgaagtggaagacatcagaataaatggttttggggtggttttggaagaagaactgactaagtctttcccctcctttctctactttttcactgcttattttccaattgctgcctcacaacagtccaacaaataatttaatagaaatagattattgggctggtggaaaggcatggggagtgagaaacaaggggttgtggtctctcttttttaacctggtcacacagtattaaaaagacagttacattttatacaaagaatgggttcttaaagacctttcatatgtaaaaaaaaatgataataggtatcatcttggattacatgtctaaacccacgaataagtgaagaaaaagatacatgttggtgcttaggggtataagagtgaaaaaacacaaggattcccaggaggaacaacaacaaaggtcaaaccacttttacaaggaggaaatcattctcattcagcttcttgctaattacttcttcttctataacctcttaa

SEQ ID NO: 50568 - DNA, 437 bp, Homo sapiens
cccccctcggaagtcttctagaattaattaacgcgggcctgtctctatgttttcagacaagaaaaatgtgtgtacctaaatttcttgatttaagatagatatagccagctctgctcagatttggaaccacaagttctaaggcagctcaggcctacaaataagagagcctgctgtagccctggcttggtttcccgactgtcttccatctagctcaagcctggattttactgaacaggagtctgaccctctgcctgagcttttgttactatgcagccagcaagcaaaggatgtgtcaataaagtgtcccagctcacctcgtttctgagcaggcacatctagcgatcttaatgctcagcatacagggatgctatgaaaatcaaattgttttagttataagtccctgtgctccctcttccaccctcccaaaaaaaaaaaaa

SEQ ID NO: 50569 - DNA, 528 bp, Homo sapiens
  misc_feature 9, 486: n = A,T,C or G
acttctagnattaattaacgcgggtcactacattttgtaacctttacacattaatacatcttatcctgtttcttgtatagtcaaaaattaatatggttaggactattatatacttacaaattagtgattctttaacttttagatatgcttaagttcctatttgttcaacttccagaaagtctttcttttaagattttatcctctaaatctctttaatagttcctgatagcaaccttcaggtgataggcaaatggactaatcttaaaattaaagcaaacaagccaataaaataactgttgcaaattgtacaaacttatgcataattgacaatcatcctttatgttacacatgcttactaactcctatttaaacctctgtccatcctaagcatgggtgccatactgcacacaagaacatgcctcctgtttcaatcagatggaaatttaaaacaaataaacaatgatgtgcagacatactttataacanaaatacactgcgtgtataccgtgtaacaataagttgggctca

SEQ ID NO: 50570 - DNA, 537 bp, Homo sapiens
cgggccccccctcgagatacttctagaattaattaacgcggggcagcatataattggcattaatagcgacactgcctgttcaacgaacacgcagaagtctcacattccctgtccaaaattcatagaacattcatcacaaaacatcaggtgtctggcatctgtaaaacaaattttgcctaatttaaaagaattgaactcatacacaatgtgttctctggtcataatagaatcaaaacagcaatgcgtaacataaatctaacacaaaaaattcttgactctaggaaactaagcaatgcatttctaaataattagtgggtcaaaaaggaagtctcagccgggtgaggtggctcacgcctgttatccagcactttgggaggcccaggtatgtggatcacctgaggtcaagatttcgagaccagcctggccaacatggcaaaaccctgtctctactaaaaatgcaaaaattactcgggcgagttggcgtgcacctgtaatcccagctactcatgaggctggggcaggagagtcccttgaacc

SEQ ID NO: 50571 - DNA, 475 bp, Homo sapiens
cgggcccccccctcggagtacttctagaattaattaacgcgggcaaagatatttttattactattattgttaaaatgaaaatattaatgttatttaattataacattactatttaatagtaatgtcaagctgctttatacacgtcttctgctaaaagttaaatggttagccaggcgcagtagctcatgcctctaatcccaacactttgggaggccaaagcataagaatcacttgagcccagttgttaaacaccagggtggacaacataaaaagatcctgtctctaccaaaaattaaaaaaaaaattaggtggtcatagtggtgtgtgcttgtagttgcagctactccagggactgaggtgggagaatcccttaagcctgggagttgtgcaatcagggctgcagtgagtcctgattgcgccactgcactctggtctgggtgacagagatcctgtctgtcccaaaaaaaaaaaaaaa

SEQ ID NO: 50572 - DNA, 609 bp, Homo sapiens
cgggccccccctcggaagtcttctagaattaattaacgcgggcgtgttggcaggcacctatagtcccaactactagggaggctgaggcaggagaatggcatgaacctgggaagcgaaacctgcagtgagccaagaccgcgcctctgtacttcagcctgggcgacatagtgagactccgtctcaaaaacaaacaaataaaataaaataaataaaataagagttcgagacctgcctggccaacatggtgaaaccccatctctactaaaaatacaaaaattagccaggtgtggtgatgcatgcctataatcccagctactccagaggctgaggcaagagaacagcttgaacttgggaggtggaggttgcagtgagccgagatggcgccactgcactccagcctgggaggcagagcaagactctgtctcaaacaaacaaacaaaaagtattaagtcataagaaggaaaatattcttttgaataacaaaactctttcgttttgccttattgcagatatcaggtatgattacaagtaaacttaaaaatctgttttttaagatttaagccactggtttctttttctttgtagagatgggggtctcactacgttgct

SEQ ID NO: 50573 - DNA, 384 bp, Homo sapiens
ccgggccccccctcgaaagtcttctagaattaattaacgcgggcactgcatctggcctaccattgttattttaaatctttcttgacctgaaccctcagttcatttttaaaactcttcctttggcaggacaaaggaacatggtggctcatgcctgtaatcccagcgttttgggaggcagaggtgggcagatcacttgaggttaggagttcgagaccagtctggccaacatagaaaccctgtctctactaaaaatacaaaaattggccaggtgcagtggctcacgcctgtaatcccagcactttgggaggctgaggcgaggtcgggagttcaagactagcctggccaacacggagaaaccccatctccactaaaaaaaaaaaaaaa

SEQ ID NO: 50574 - DNA, 592 bp, Homo sapiens
cggggccccccctcggaggtacttctagaaataattaacgcggggatctttccttctcttttgattccatctctggagtctgtaaattgcttttacttaaaaaaaacaaaacaaaacaagaacaaaaacaagaactaaccaaacaaaaaacagccaacaaaaggaataaaagaaaaggaaagaaaaacagacactagttctcctaaataacctgtcttctttttctttttaaataaccatgcttctttaagcataacccacactattctctgcttcttcatctcccatgtattacattaagctaattaaacaactttctactactgttagtctactgaaactgctgtgacagaagttaccaacaccaacttctctaggttctttggaatcattatcttccgtaacattttttactaactatatgattcatgaatcatttttcttcctttgtttctgtggcacttcactggcctaatgttttctttatccttttgtcattttttaagtctttatggtttctctgccactcttttagaatttgatgtttctcagtaccttgtcattagccccattaccatctctttttatattc

SEQ ID NO: 50575 - DNA, 601 bp, Homo sapiens
  misc_feature 23: n = A,T,C or G
ccccccctcgaaatacttctagnattaattaacgcggggtgggggaaagtgggagggatagcattaggagatatacctaatgtaaatgacgagttaatgggtgcagcacaccatcatggcacatgtatacatatgtaacaaacctgcacattgtgcacatgtaccctaaaacttaaagtataattaaaaaaaaaagaaaagaaatggctattgcagtctatgatcctcatgtgtataggattaaattataccaccctgcccacagtttttgccttctttttttttcccccaggaaaagacattgccctgctcccaagcactgttgggatttatatcaggagtccttataaatacaggtggtatgctgggccatgtgctgaacacattacttcatcaaataaaacagcaagttgtctgtagtggagtctcgtggcattcctagaacactccaagggtacggtagcaaagtacaaatcagtaaaaattattctacaaggagtcaagcaatgaagttccagtacacagctctctgacagcctgcctcaatccagggatgagaagtaaaaagcaaccaaaacttttcttcaaatttctacactgc

SEQ ID NO: 50576 - DNA, 509 bp, Homo sapiens
  misc_feature 25, 38: n = A,T,C or G
actgggtaccgggcccccccctcgngggtacttctagnattaattaacgcggggacaacaacttgatttcatttctttgaataaagcataatgctcaaattcctgctgaatcttcatgattattctagggactgtaactccaagtttgaaagctaaaggattgttgtatggattatttttttcatttttctacaagactttacaatagaagttattaaagtgctgaacctttctaatcatgttgacataacaagggaattgcatcacatagcacttcacatgtaacatttctagtgtcttgtcagactgactaaatagattatattattctatttatttatttatttatagattatttattgagatggggtttctttttgtcacccacgctggaatagtggaaccatcatggctcactgcagcctcaaacttctgggctcaaccgatcctcctgcctcagcctaccaagttactcggactacacgcatgcattaccaagtccagctaat

SEQ ID NO: 50577 - DNA, 576 bp, Homo sapiens
gggccccccctcgaaagtcttctagaattaattaacgcgggccctgacttagcctaagacatttgctatggagcaatagataactaatagagtcactaagtcatctagttctctatatacatatggcaaacaggtacaataatgctaattctgtctacttcatagataaataattaaaccaagtggggaaatgtgtgtgattgcactttagcaactgtaaaaatgccatgcagccataatgtgctatttttacatttaaagatatcatttagttgattgtttcctttgctgtgcagaagctttttagtttgaagtaatcccatttgtctatttttgcttttgttgcctgtgcttttggggtcataaccaaaaaaaaatcattgcctagaccaatgtcatacagcttttcccttacattggtcacgggttaggaaggttcaatgagacagaaggaataagctaaagagagctattgcaaaacatagtgactatagttaataagaatatattgtcggccaggctcagtggctcatgcctgtaatcccagcactttgggagactgaggcgggtggatca

SEQ ID NO: 50578 - DNA, 579 bp, Homo sapiens
  misc_feature 23, 34: n = A,T,C or G
gggtaccgggcccccccctcggnagtcttctagnaattaattaacgcgggtagggacaggagacctttggaaattgtgattggaagctaactgttccagggtccctgggtgcctgtgtcgtatgggagaaggcactggtgtttcactgcaggtgagtctgtgcacacagcataggtcagcttgttggaactttcttgtgtgtctctcctgaggaagcaatcagttagtggccacgaacccaggcctgttcacacataaacttagatgacagtggtgcagtagggagcttgtccagaatgatttattctcaagagtggtgaagacataacttcgattctcccagtcgacttgaaaacaaccgttgttttctttacaccttctgattccagaaggtacagtttaaacctccctcatttgcagcaggctgaattaaaacacagtgctttgggatctatttattgctatctgtctttaagctttcagaagccaaaatgaaaagagaaatcagaaagcagtgttggtcaatagactttccccccgtacttacctccttttgacttggggagctgtaaaacagta

SEQ ID NO: 50579 - DNA, 454 bp, Homo sapiens
cgggccccccctcggaagtcttctagaattaattaacgcgggcagtgttctgacattcagagtttaacctggacaagtgtttgtaggtgagataaaggggcatctctcccctcactcttcagacctagacatgattgacagttagaaagacagccttgaggccaggcgcagtggcttacgcctgtactcccagcactttgggaggccaaggtgggtggatcacctgagatcagaagttcaagacaagcctggccaatatggtgaaaccccgtctctactaaaaatacaaaaattagccgggtgtggtggtgggtgtctgtaatcctagcaactcagcaagctaaggcaagagaattgcttgaatccgggaggcaaaagttgcagtgagtcaagatcatgccactgcactccagcctgggcgacagagtaagactctgtctcgaaaaaaaaaaaa

SEQ ID NO: 50580 - DNA, 555 bp, Homo sapiens
  misc_feature 32, 488, 549: n = A,T,C or G
gtaccgggcccccccctcggggtacttctagnattaattaacgcggggctagagaaatggcctctggtcacaggggctttgaaaagtaacaccagccagagattattgagtaaattagggcagtattttcccctcagtgacttgcctgtctttccatctaggtcttggttatatagaatgtacagttgacttcagatttgatgagtcctaagtgtcacggagtgatgagtatacactggaagtcaagaagctaaacagttggatgtgctcagagcatcaaggaattgttagaactagaaggatattcagggatcctatagttaaagccttttgtttctataggggagaagttggaagccatgtgaatgaatgtgatatacagagctggttacagagcagagaggggaactgaggaagtctgacttttctgagacacctggcagcctaccagttgccattactcttttccaacttgccttcaaagtatntaaatcccgccagaaagctgtaagcagatcttaaatgttctcaccataaaatggagccaanaaaaaa

SEQ ID NO: 50581 - DNA, 477 bp, Homo sapiens
gccccccctcggggtacttctagaattaattaacgcggggccctaatctgtttgtattcttaatagcaagagaagtaggaccttaacccatgtttatgcttagactattcgatgtgtataccagtgttttagccgcctctctctcaagccacagggtgtctaaaatttaacaattgagagttcctaaaatatctagcttaatttgagcatacttttagtagtttcatggccctggaaattgtccaactgacaatgatctgtagttgtttatttaaccaatggactaaaaatgatttttaatgagaatttagtcaggagaaagaaaatggatctttaccatgaatatatttttcaagcaacagtggcataattttttaatgaagatatcacactggttgtcttctttcttctttagaaaagtaatgatttcagtgttgccttagtgtccatattaattgcattacctgacacatcaat

SEQ ID NO: 50582 - DNA, 600 bp, Homo sapiens
  misc_feature 555: n = A,T,C or G
cgggccccccctcgaaagtcttctagaattaattaacgcggggctgcagtgagccatgatcatgccattgcattccagcctgggtgacaaagtaagaccctgtcttttttttaaagaaaaaaaaagggaaagttttttacctcatgctaaatttgttagcataaatttccatcccaaaatctatccaaaataaatttcatatggattaaagaacttaaccatatatttaaaagtttatattcttcatatatattataataacaaacttgtggtagggaagtccttcctttttctttgtgacagggtctcactctcaccctgactggagtgcagtggtgtgatttcagctcactgcaacctccacctcctaggtttaagcgattgtcctgtctcggcctcccaagtggctgggactacgggtaggtgccatcaggcccagctaatttttgcatttttagtagagacggggttttgccgtgttggccaggctggcctcgaactcctaacctcaaggtggagggagcgcttgagcccaggagttcgagactagcctgngcaacatggtgagaccccatttttacaaaaaatagaattggctgg

SEQ ID NO: 50583 - DNA, 469 bp, Homo sapiens
  misc_feature 25, 404: n = A,T,C or G
gccccccctcggaggtacttctagnattaattaacgcgggcctctgatatccctaaagcacctgtaagttttaagtccatacttgtttatgaatacaaatataaatcaccaaaggccacccgtagggcatgaaaactacacatccctagggcagtcttgagtcttctcatgattgacttgctctattatttcacatagaaaacatctctaatgtggaagagaaaactttggttctatggaactgtgctatcttttcatcgggagcacttctcatactcagagccaaagagagatttatatctaattctgggtgacaaaggcaagactacagtcacccaggggaaattaggcttaaatcttccactgtttttttcataatagtgaacatggtcgaaaacacttangcttttaaaatgtcagatgctatttcaatgtaaaggtacattgggaatgtacctgtacctcatgt

SEQ ID NO: 50584 - DNA, 507 bp, Homo sapiens
  misc_feature 13: n = A,T,C or G
gccccccctcggnagtcttctagaattaattaacgcgggaaaatatttttgatgtgttttatatgacttgatgtcgagggataggtctttattctgattgaatggtattttcacatatttaatactacagaattaaacaggaatattttatgtgcttgaatttaaaatctgctcttggagttagtgtaacactggatatctcagatgtttctcagctgacacatgattagtatttctatccagtacactacatactttgtgaggatattgactcttaagactttgttctggctcttctagtctaaactatacctaaatcaatccaaaagaggcaacggaaaggtagtacctggtgatgaactgtcaaattatatcatagattttaaatggtatccacttaacaggtttaaaagatggtgccacagtctccggttaaatattaagatgtaagacatgcatttcctctgctcattctcacaatctgactaaggcacataaaaaagtcaa

SEQ ID NO: 50585 - DNA, 598 bp, Homo sapiens
  misc_feature 27: n = A,T,C or G
cgggccccccctcggaagtcttctagnaattaattaacgcgggtgtttctctaattcttttctttttttttcctgctggtccggtccacactcagaattgtcctcagctgtgtctagcgtctcctcattctagaccctgtcttactcattatttttctggaaaataaatctccattctcccgccagaaaaatatatgtgtatgtggaaaggtcagggggcaagtggaggttagttgggagtgatcattgctggttgcgccagatactggggaaatttttcaggtttagatctcgtgtaccccatagatgtacgcacctactatgtacccacaaaaattaaaaagtatttttaaaaacccagatttacatgttctttatacagactcttaatcttctcattttccttcttaccggtcaaactcatgctttcagaggaatctggtccctgaaattccagagctttttctggggtcctgataggtaaatcattctgtttcttgttggcttccccaagccatttaccacacaactttcttggaggaggcagggcgaatacagcacacacacagaaaattatggatataggaactattatttt

SEQ ID NO: 50586 - DNA, 398 bp, Homo sapiens
acttctagaattaattaacgcggggatttcaaaaacaaaccgacaagcaaaacaagactaggtgggagggtgaagaagagttctttacagagaatgctagccgaatgttgcagatgacggagtttaaaaattatctggtgaaaggttgttgggtcacaagatagtcatataaagtttaacctcacaagtgacttactgattgcaaaagagaaagctatatttacattagaataatctagtaaacacctttttaagcagtcatcagatagattgggataatctatctgtttcctgatgtgatgcactgagaaagacacaacaaaacttgtcatattcttgccaatatgcgtaatgagaatgtaaatatgataaaacaatacagtttttatggaaaacag

SEQ ID NO: 50587 - DNA, 601 bp, Homo sapiens
  misc_feature 530: n = A,T,C or G
cgggccccccctcgaaagtcttctagaattaattaacgcggggggattacttagtccttgaatttctcaaacatcatagtacctcacatcaagaggagtcttgttttctggctgggcacagtggctcacgcccataatcccagcactttgggaggcagaggcaggtggatcacctgaagtcaggtattcgagaccagcctggccaacgtggtaaaaccccatctctactgaaaatagaaaaattagccgagcgtggtggcgggcacctttagtcccggccacttgggaggccgaggcagtagaaccacttgaacctcgaaggcagaggctgcagtgagctgagatcgtgccactgcactccagcctgggcaatagagcaagactctgtctcaaaaaataataataataattgttttctttttcatacaatccttcgaatctaaaaatattaactctaaataacagcaacttatggatattatattatatatacatttagaaaaattacagaaaccataacatagaaactntagactcaaatgaaagatgacatacatacaacatttctaggtcatttgtaacacaataaattcacaaattg

SEQ ID NO: 50588 - DNA, 569 bp, Homo sapiens
  misc_feature 24: n = A,T,C or G
gccccccctcggagtacttctagnattaattaacgcgggtcttccacagccagaccctaaagaggcatcttttgaaggaaagagcatctttggattcctcttacctttggatctgccaacacccagtgtgatatggaaacaacacccactgtcgttctggaaaacaagagccgcacctcatcaggactcagaagaggctgacatctttggaaggcataagctttggggaatgtgctggagtggccccggatggggaagggaggcatttagggctgagttctctggcggacaggaagcccattacctggagtggttgaagcagggggtaggcaaaggaatagtaatgaagatttcctctgcgtcagacccaaggtctggtttcctaatagctctctcgtgtaattctctcggcaaccccaggaaaccataattgtctggatgtccaacaatcagagaatgattaagtaaactatacaaccaaatggaatattatataaccatgtgcgatgaaaattattagatgagccatcttacattcaggaagtttggcaaaatatctcaagaatctt

SEQ ID NO: 50589 - DNA, 605 bp, Homo sapiens
  misc_feature 505: n = A,T,C or G
cccccctcgagagtcttctagaattaattaacgcggggatacagagggacgaatatatttagccctaatagttaataatagtttttttgtttttgcttttgccaaagacattttaaagaagagaaaagcagttcttgtttaaatcatcattaccctgccaatactgtggctccaattcaaagggctgtgttttcccaaagaacacttaaaaactgcggactttatcacactatgagagcagaagctggtttctctcactcctggtccctgaggagagtgaattgctccagaagcccttatttgctgctgtcatttggatggtgaagtggtagagcaactcccctgcccctccccacatcacattaagaactaaaatgggctgggcgcggtggctcacgcctgtaatcccagcactttgggagaccgaggcgggtggatcacgagatcagcagttcaagaccagcctggtcaatatggtgaaaccccgtctgtactgaaaatacanaaattacctgagcgtggtggcaggcacctgtaattccagctactcaagaggctgaggcaggagaattgcttgaacctgggaggcggaggttgcagtgagc

SEQ ID NO: 50590 - DNA, 592 bp, Homo sapiens
  misc_feature 19, 32: n = A,T,C or G
taccgggcccccccctcgngggtacttctagnattaattaacgcgggggtatctttttgatataatgatttcttttcctttgggtagatacccagtgtgaaatggttagatcaaatggtagttatatacttatttctttgagaaattgccatactgtttcctatagagattgtactaactgaacatttccaccaacagtgtataagtgttcccctttttctgaatcttcattaacatctatttaaggtttttttttttacttttgaagactaaggaactcaaagaactcaacaacaacaaaaaacctcactaaaaagtgtgcaaatgacacaaataagcatttttcaaaagaaaacatacatgtggcaatctagcatatgaaaaaatgttcatcattcatgagataaatgtaaattaaagccacaatgggatatcttacaccagtcagaatcccaagcaaatactttttaactcttcaggatagcacaactaaatagttaatattatatatttaacttataaaaacacaggcacctttttaaaagtttaaatgctatatagagtgataatggaaatgcaattactaagaaaa

SEQ ID NO: 50591 - DNA, 540 bp, Homo sapiens
  misc_feature 16, 28: n = A,T,C or G
cgggcccccccctcgngggtacttctanaattaattaacgcggacatcaatacagcattataatatgattaatactatatcaataaaatagatacttagtcctaatgccaatgtcttatttaatagaaaagcactcgaggcattgtcattaaaaccaggaaaaaagataaggatgtccactatctctgcaactattcatcttatactagaattatcagctaatgcacttagacaagaagaggcatctggtctggtgcggtggctcacgcctgtaatcccagcactttgggaggccaaggtgggcggatcacttgaggccaggagtttgggaccagcctggccaacatagcaaaaccctgtctgtactaaaaagatgaaaaattagccaggtgtggtggtgcatgcctgtggtcccagctactcaggaggctgaggcatgagaattgcctgaacctgggaggtggaggttgcagtgagcaccactacactgcactgcagcctgagcgacagagtgagattcggtctccaaaaaaaaaaaaa

SEQ ID NO: 50592 - DNA, 590 bp, Homo sapiens
cgggccccccctcggaagtcttctagaattaattaacgcgggtcccttttgtataaaacctgggattttagtgatttgcagcaacatgatttagaaaacattttccatcttgataaattctttcatttttctttcttccacattttaaaagagaaaaattcagagtatttaaaacagtgtgtttatctacgtcaattgggaggagtgtgtagcaaaaagccaaattcagatgccaattttgctgaccaaagtacctctaaaatgcatatggggttacgcagttaaactgagaaaacatcctcaagaacaggaggttctgcagtggattaagatcttcagctactactgcttccaaaggagatgccctttttctagttaactctcaaaaaacattcccacatcccaataacttttactacagagactcagcactacaattttatccatcattttcttcttgtatctttgggagagtagtcacaacatgaactgattttacatgtctaatacttgtttcagctcacctatggatctggtagaggatatctaatttcgtgataaaactttgaaaacaatgttgtgtatgtctg

SEQ ID NO: 50593 - DNA, 557 bp, Homo sapiens
ccgggccccccctcgaaagtcttctagaattaattaacgcgggttgcacattatgaattacttgacccttttttgaatatttcaggcagtcagaataaaacatattacctatatattaaaataatttgttgatggaataaggatcaacttgggttaatctttattcatataaattgttcttctcaaaaaaaataaaggataaaaaacatttgaaaaagggtaagcaatgggattcaagtataattgaagagtttgcttgaatatattaatccattgatatcactttgataaatatcaaatattgtatttaggaaaagtgtaaaaaagagtaatggttgaaatgcaggttttcaaatcagactcttgagttgacaaatctgcctctaactctgactaactgttatgatcttagatcattcataaagtcccactagggtacattttaatcaggcataaaacacaaataaaataacatcaagtgaatagagttgtcatgagaaaaagttaataaatcttaagagtttaaactttgccttgaaaatcaagtagtttgaaaa

SEQ ID NO: 50594 - DNA, 597 bp, Homo sapiens
  misc_feature 566: n = A,T,C or G
ccgggccccccctcgaaagtcttctagaattaattaacgcgggtgagacataaaagcaatctctgttgtcatgaatgctgtgaaagaaactctgggttgagataagacaggagggtgaccagaatagcaaggggcttgccagaggcggtaccattgatcctgagtcccaaggaggctggaaggaggagtccctatatcaggaagggaacatgagaggtgactagagatgaagggtggaatgtactgaggatgtttcagtagcatgtgcaaaggccctgaggttgcaccaagctttatgttgcccctttgaggcactgagagaagagcatttaattagaacactttccaccccattcagtattctgagaggaaatcagaaaggtaagcaggttggctgcagttgctcatgcctataattccagcactttgagaggccaaggcaggaggatcacttgaggccaggagttcaagaccagcatgggcaacataggcagatcctgtctctacaaaaattttaaaaaattggcttggcatggtggcacacacctgtgttcccagcaacttgngaggctgaggtgggaagactgcctgaaccca

SEQ ID NO: 50595 - DNA, 337 bp, Homo sapiens
ccgggtccccccctcggggtacttctagaattaattaacgcgggttcctgtaaggagcttgacttaaattttttttctgtagctctgttgtttttgcctgtgtacctctttcatgcagttagcaagggggaaatgatctttgccacgctttgaaactattatgagcgacacaagtttagttaatgtgtggttataggattgggattttgtattaaagtgaagctgtcaaactaccttcatgtatttgaagtgactccattataattgtttttagcagcagcatccaggcagcaacttttctagcaataactaatttttggaaggtgtgagttatcca

SEQ ID NO: 50596 - DNA, 473 bp, Homo sapiens
attaattaacgcgggggtgaggagagataagatacttcctaactcaatctttgagccagctgaccaccctgatgaccaaacccaaacaaagacttaatgcaaaaattatcacaccactcttcctgtatcaataaatatgcaaaaatctacagcaaaatactagcaaactgaatctagcatcatatttaaaggaatatgcaccatggccaagtgggacttattcccaagattgcaagggtggtgtattacaacacattactcaaatgaagcggggaaaacccccacgtgattgtatcatttgatacaatatgcagttgacaaaattcaacagctgctcttgatagaacggctcagactcaggaatagtaaggaacttttttttaaaacatttcctcaacattcagcgtgatatgaaaaaaccctcagctaacatacaactcaatggtaaaagactgaaatccttgcccttatga

SEQ ID NO: 50597 - DNA, 552 bp, Homo sapiens
ccccccctcggggtacttctagaattaattaacgcggggcaggaacagttctgacatgtcctaaaggcaagagggacattgtgtgccaatacacagttaatttacatggggcgctgggaatctctggacacttcctactttagcagtactcaaagaatagatattacggccacaatttcatatcagcaagacttaaacagtgtgcctttttctcacgacaaccaatattatttgccagaaatctcaccttactcaaaaaaagttgtcagagagctatcaacagacaagttatcccccaacaagagggaagacacttgttgcaaaagaaaaggactctgagctcaagctaaagttccctgaaactctaagagcacttgcacctttcagactgtattcttggcaattaacctgtgtttaaaatgcttcctattccaaacaacccaggttcttccctgtcccacaaatcggaagacttgtttaaagtctgttgagttaagtgatatggagaagaaatattcaggacatccatacacaatctactttaaaaaaaac

SEQ ID NO: 50598 - DNA, 422 bp, Homo sapiens
  misc_feature 24: n = A,T,C or G
gccccccctcggggtacttctagnattaattaacgcgggtacctcctgtttgaattctgattgcttatgaaggagaactcagtagcctcctgggccagtcccttttatctttgggaaactgactattagaaagttcttctctgagttattctgagtctataccatatgctgtctaacagtgcttgtttggaccaaggataaaaggatcaatgtaatgctgtaatatgattttaaaaacaacattaaaattatactcttcagaaaactcttacaaaatgacatttattaggtgcctactttccccctgattgttatcttacttataagtaaaataacttcatttattttagctttttagttttctgtgaatttttaagttctttttcttgcttggtggaatctcttccaaaaaaaaaaaaaaa

SEQ ID NO: 50599 - DNA, 505 bp, Homo sapiens
  misc_feature 32: n = A,T,C or G
taccgggcccccccctcggaaatacttctagnattaattaacgcgggataggtcccctgacaggtcacttaattataagggtggaaggaatctggaagcatgagtatgtatttttatcaaagcaatgggtgatctgagagtactggtctcacccacacacactgttaaaaattatattattactagcgtaattaattttggtaatgtgagtgtactttatagaccacagcagggtgggggctctgaattgaaagagcttctaccactcatgaaactactgttgctaggacaattcaaccaagatccatgactagaaggaatatggagccatcaatggtagacgtcttgatccattgatgatggcaaatggggaatgagagagagtggtcatgaatgtgttcaccttcaagagggacatcaatttctgctcccccagggggaagcagcatgaaagcaatggtgagacatggttcatcaacatgtatacactctcctggggcatgtc

SEQ ID NO: 50600 - DNA, 541 bp, Homo sapiens
  misc_feature 460, 497: n = A,T,C or G
cggggccccccctcggaagtcttctagaattaattaacgcgggggtgtggtaactttctttaaataattgtgcttattgaagaaaagtgaattttattctgtgatgctctagagagccaaggttggatccgtgggtggaaggcacaagaaggttcaaaataaaatgaaactttcaaatagtaagacttggagcaaaatgaaagcagctgtttgtgggatagccacaaattagaccatgtatgattagaccatgtgatgctgggctagaaatattgaagcaattcctccactggtgcaagctttatatagtagtcttaaaggcactcccttaccaccaaattgctagaaattttatgaatctgattactatagagacattatttccatttcaataaaaagtagattaagaagataattatgcaagatgtttgattgacattatacataagaaagccatttnctactaagcaagggtagacagatttggaaatacacanagttcctgggaggaaagagttggcattacatcattcctaaggag

SEQ ID NO: 50601 - DNA, 601 bp, Homo sapiens
  misc_feature 581: n = A,T,C or G
cgggccccccctcggaagtcttctagaattaattaacgcgggggtgactatatttaatagtaatgtattatatacttgaaatttgctaaggtagatcttaagtgttctcaccacaaaaaaataagcctgtgaggtgtagatatgttcatcagcttgatttaatcatttcacaatgtatacatatatgaaaacatcacattgtacactgtaaatatatacaatttttgtcaattataccttaataaagtcggaggaaaattatgttctcagctatgtcaagtcagatttgaaatcatttactttaggtatgggctcaggtcagtacaatttttctgtcttctgtatctgtcatgttagtggttcctagacctagttgaaaaatcggaaaaacctggggggattctaattatgttagtgtgtttggggaaattctgacaattggccaggtttgggaacctcttcctagtactgcattaaactattctcagacatagcaacaaccataacatgaggaacggacagaaaatacgtgacaaaggatttagttgatgaaggtcatctgaaaatggtaaggcacctgngtcaaaaaagggcgggaaca

SEQ ID NO: 50602 - DNA, 556 bp, Homo sapiens
  misc_feature 30: n = A,T,C or G
accgggaccccccctcggagtacttctagnattaattaacgcggggaagaagacgagccttctcaggcctgtgggtggatttctttctgccacttgaggtggcagcactcacgctgtagccaagagaataatttttttgcgagcactctgctgtaggtggtgtattttgaatagagcttctaaacagttttgagagtaaagagcaatgaatcattcattttacattttgaaggcacatctcactctgaagtccagtgctcagagagctgacccacgtatttacttggggtaacacccacttcagaatttaacaaccccctttaaagctgtattttctatttcctttcatccttcctctgcctccttgtggctgactatctatctgcatctctctcctcactgcatccttggtctgctgttttttgactttattattaaaaagtatcctctgttcttatgtttgaaatctggtgaattaagtccttgtacatttctctcttctcttagaacagccctactgagttgactttgaaatttacgggtgacctcaaactga

SEQ ID NO: 50603 - DNA, 441 bp, Homo sapiens
  misc_feature 400: n = A,T,C or G
ccccccctcggggtacttctagaattaattaacgcgggggatgactataaacattcttgaatgggccgggcgcggtgctcacgcctgtaatcccagcactttgggaggccaaggcgggcggatcacgaggtcaggagatcgagaacatcctggccaatacggtgaaaccccatgtctactaaaaatacaagaaattagccgggcgtggtggcaggtgcctgtagtcccagctattcaggaggctgaggcaggagaatggtgtaaacccaggaggcagagcctgcagtgagccgagaccgcgccactgcactccagcctgtgcgacagagcgagactaattactaagaatagaggaaacaacagaacatgttctgacatagttaacaaaatattgacaaanattaaaggctattagtgtgaaaccattaagttactgctgta

SEQ ID NO: 50604 - DNA, 594 bp, Homo sapiens
ccccccctcggaagtcttctagaattaattaacgcggggagacactattataaaagttagttttaattacaagttttgattgtgaactgatcatctttaaaatataattactagtgctcagtacctttactaaaacttagctcagcgaaaaggatgtggcctgtcaaaagttaatcccaaagccttaaatgttcacaacgattgttttaatgggcttgggaaaaataaaaacattattttttatgttctaatcctaaataatattaagatctttatctttcgtgtatgaaacctcaaataaccctacggtttctcaagttcttcagttctgtggtttccagcatagctgacctctggaactgattcaagtaaccaaacttttcttatggaaacttggcccttctctgccatcaatctgagtactagcatcacctcgaggtggtgtacccaacttgtgcaaatgcccacaggagaagtggtttggaaccacttatgcttggttaggttaaatctatcgctccctgaaatttgatagcattctgctcaaagccagctctgacaggagcttcattacttgcacaggcgttaaaaccc

SEQ ID NO: 50605 - DNA, 606 bp, Homo sapiens
  misc_feature 28: n = A,T,C or G
ccgggccccccctcggaagtcttctagnaattaattaacgcggggtcattctcatccgaatctataacactcagaactgcaagtacccactttataactcggcacccagaagtcactgttaccaatttcattaccagtgtaccacttatttccagtaagaaccaaatggatctcgccctgtcaagcatctccttgtcccctgcaacacattttgcaggttttaacgaaattacacaaagtaatacatgctcactaaataaaccaatacagagaagcaaaaaaaaaaaaaagagaaaattacttataggcccaaatctaccccccgcaccaggcaagtaaccactctgacaccgaatcttggggaaccttctccctgtgtgtgtgtgtctcatgtaagtgaagccactcccaccggctcccagacacgccccctccgcacctcacctgacatcagcccttcttctggttcattagcagacaccacacgctctccctggtcaccccaaactccaccagccctcaccttctgaacatctggcaactaagcatctggcgatatcccactgggatgtctggtactgttacctaacttttcccatgtacgcc

SEQ ID NO: 50606 - DNA, 598 bp, Homo sapiens
  misc_feature 508: n = A,T,C or G
cgggccccccctcggaagtcttctagaattaattaacgcgggatagaaagaacagaaagcaaaaattaagcacctgcttcacacatctaagtgcaatacgcccatctcacattgcagaaaaaacaaaggcacgacgttaagtaatacaacaaagctatggaaggagaagcagtgataaatatatagaccaagttgtgcacaataaaccaagagacaaattggctccattagccatctttgctaagagcacaaaagtagccattacaaatcagtaccaggcactattggtcaaccactaatccttcagctatactcacgtaagaacagaaagctttttaaacataaatgacaacatatattttataggtatatcccaattatttaaatcagacttaaaaaatcctgttcacccttctcctattgttccacctttactcccatcctcctttccaggaactcatctatccaaggatgtacagtaaatggaaacacctgaaggccccaaatntccctcatgtctgtctaatgcagggatctctttttctctctttgggtcatcttttaatcttaaccaggcagggcatgctgactcacgcct

SEQ ID NO: 50607 - DNA, 391 bp, Homo sapiens
  misc_feature 28, 255: n = A,T,C or G
cgggcccccccctcggggtacttctagnaattaattaacgcgggagactgaacattacacattatctaaattttatttccccctcagtataaaacacaaagaacttgtgacggcataaatcattcttaagctttgctttaaagttttaatatatcttgaagtcatgaatatcaaaactacatcttaacactaactagaatactcatcatgccaaaatgtcatctttgccagaaaactgctgaggatgtagctcanatcaaaatcaaactgaaatcaatactgacatcagaaatgtctgatgtattatttttcaactgttctaaaatagggtttacagaaaagttctaattctcccgtttactccagttaacaaactttccaatattaactc

SEQ ID NO: 50608 - DNA, 581 bp, Homo sapiens
  misc_feature 38: n = A,T,C or G
ctgggataccgggcccccccctcggaaatacttctagnattaattaacgcggggatgaaataacttcaaaacacctgtcttgctacaaacacattacagaaattcattcttattgcctctctcaagtagtaagcaaaataagcactgggattattttgcttgtatattatgtaataaaacttttaaattcaaatattcagtcaaatgccaagtgaaatataactttcacactaagtcaagaatcccaatgcatgcatctatttgtttaactgaatgatgactcaaagtaacatcccttgtcataacggtttttgaaaatacagtcaaatgccattagaaagtgtcttgctattccacaggttcagttactctccaaatctgggcacatcccctgtgaactaaggatacagaacacatatcacaaacatgaaaaactgtcagatgtctcattagtcctagaccatgacagcaatggtgaaatagtgcatctctacaggagactggatgtaactgataagaaagcattgacaagatgaaataaaaaatgtataaaaaagaaaagaaaccattagcactaatca

SEQ ID NO: 50609 - DNA, 527 bp, Homo sapiens
  misc_feature 23: n = A,T,C or G
ccccccctcggggtacttctagnattaattaatgctcattcatttttattagaaagttgtgtctcctgctgtctccttccatgtgttaactataactcactaacacaagcatcctgtaaaatgctatgtatgttcagactatcagtcatggtagaccctgccatcctaaataccttgcctcaatcatcagtcctcttccattccaatcaggaggattgcagccaagattatattcacagcaatgagtccttttaaagagaccgatccttttatcttttataatctaaaagaatccgtttccttaaaaagactctcatccatcaaatagttccagcctcataagtcagagactgaagcagttggtggaaaggtgtctcctcgagctgagactttggtgaacttggctaccaatcaagaagatgcagattcctctctggctccaggtttgggaagtggtcactgtttctagggggtgcagctcagctggtccttctaggccatgttattgaaacaagctgatgcccctc

SEQ ID NO: 50610 - DNA, 579 bp, Homo sapiens
cgggcccccccctcggggtacttctagaattaattaacgcgggcaataccaaggacaaaggcccttaggtttgagtgagcttgttgtatagaatgaaatttatgatggataaagaattaagagctttaactgagaggataagggcatgtctactctaacattattgattttaaaataagtcacttcctattttttaaaaaatagatgcagcagaattcactgttacagatgtaaaatgttcaacatcaactgtcaatggaagagtaatgcattttgtgtcaagttttttaattattattttaattgacaaaaattgtatatatttatggagtataatatgatatctttaaatatgtatatattgtggaatagctatttaataaatcacatgaattaatatatgcattacctcacatacttaccttgtttttcgtggtaagaacactcaaaatctactctcttaccagttttcaagaatacaatgcattgttattaactatcgtccccataatatccagtggatctcttcaacttattactcctgactaactaaaatttttatcctttgaccaatatctc

SEQ ID NO: 50611 - DNA, 597 bp, Homo sapiens
cgggccccccctcggaagtcttctagaattaattaacgcggggtggggaatttctgaggtgctggccatgctttctttgtgcaaattcatttactttgtattttctttgtaaaaataatgttgcacacttatgactatatattttgtatgcatattaggcttcaataatgagcttaaaaaattaaaaagaattctgatttaattggcaaacattagtatgttctagcaataaaagttaagacatgccctgatgtaggcctgaaaactacttcacaaaaccaccatgggtggagaaactaaaccctctgaaccaaaaaaagaagtgagttcctaacatcaagttagaaatgaaaaacttgatgtaatcaagtattttaaaatgtgctgaataagaattggggtaagcaattctcagaaacaaattaacttttacaattaacaatctggcagtgatgttatccaaatggggaagaaaaccaaacaaacctgcaaggaatgcctaaccaaaccacaggcaacatatggatgagggaatactggtgtgctggaagcaaatatatgcaccagttgacgtggcacacactatctgatctacct

SEQ ID NO: 50612 - DNA, 604 bp, Homo sapiens
cgggccccccctcggaagtcttctagaattaattaacgcgggcccagctatttgggaggctgagacagaagaatcacttgagcccaggaatttgaggctgcagtgagctatgatcgtgccactgcactccagcctgggtgacagagtgagatcatgtcaagaaaaagaagatagaaagagataaagatataaagaaagagaaagaaaggggaggagagaaaaaaaagacgaaaagaaagaagaaaagaaagaagaaagaaggaatttctaataccgacacataatactggaacttcagcccttaagtcatcacacaggaggtcactgtctctctccgtgagtgccagcatatcctcagctctagagcaactatgatgtcctgtgtttttgaaactgcttcctgcactccctgtattgttcgcttacttgtggcctgcgtttatgcccttagtgtctgtttaaactggagccatattccaaaatctgccattctctctttttcaaaaaaataataaccttattgagatataattcacatagcatacaattcactaatttgaagtttaccattccattgtttttagtaaactcagagttgtgcaac

SEQ ID NO: 50613 - DNA, 179 bp, Homo sapiens
  misc_feature 12, 25: n = A,T,C or G
gccccccctcgngggtacttctagnaattaattaacgcgggtatataacatgtgaggttttaagcagcggatggggatctcttggtatattcaattaccgtcatctgtaagctctaatacctaccttgcagacatggctggaggtaacgcatgtaccgaagtagcacagatctaggcac

SEQ ID NO: 50614 - DNA, 490 bp, Homo sapiens
cgggccccccctcgaggtacttctagaattaattaacgcgggtatatagttctgcaatgttcttattaattgttcttttttctctttccctcactagaatgtaagttttataaagataataaacttgactatcatattccccagcattttactcatgctaaacataaatcctgacccatcctcctgccaaaatagttgctaacatagagttatcaaactaattgaagacctgtactttattttttactagataaataaataacttttggctaagaaacttttgacactcccaaagccacacatcaagaatgtctgtcttgtttttcaccactcccactcccactactggtcccatccatagttagataacataaattccttgagaaagtctcaaaggtttgacaatttttattatattttcacttacctttttatactttttatttaaaatagttttaaaataggccaaggtgagaggattgcatgaaac

SEQ ID NO: 50615 - DNA, 369 bp, Homo sapiens
  misc_feature 13: n = A,T,C or G
ccgggcccccccntcggggtacttctagaattaattaacgcggggggaggtgctgtcagtgccacataaaggattgtggcttttatccttcaagccagggctcttcacctgggtccatggagaggctctagagggcctgatattgtatgtagaatgttgtttgttggtacagggaaggttcgtggtattcaccagattttcaaaggggtttctgtcttaaagtggttaagaattattagtgttaggctgggtgcggtggttcatgcctgtaataccagcactttcggaggctgaggcaggcaggtcacttgaggtcaggggtttgaaaccagcttggccaacatggtgaaaccccatctctactaaaaa

SEQ ID NO: 50616 - DNA, 606 bp, Homo sapiens
gccccccctcggggtacttctagaattaattaacgcgggtggcctgtggagaagagtgcggaatagctcactgtaaaatctctcaaaatatgatgaaataatttaaattccaccaagtcaagaatcacacaggcccttttctattatgtacatagtatgatgacaaaagatataaaatagttatgcaaggagcaaaatgtaaggaagtgagcacaattacactggtggttaaaatgtaaatccataacaattttttcaaagaagcttttgaaagacctaacagattttaaaactgtatgcatttgacaggaaaattctacatctaaaaatctaaacctaagaaatataccagtccacaaaggttctaaagaaagttcattacagatttttttgcaattgcaaatctcttgttcatcaagagatgaaaaactgcataatatatgatacattaacactgcagccattaagaaaaaatttgcaaatatgaaaatatcaccacaatctagtaactgaaatacacaaattgccataatgtatttatcctatgatctcatgtaaataaaggaaacctaagtgtgccacctcaaaatatacttctccggcata

SEQ ID NO: 50617 - DNA, 396 bp, Homo sapiens
  misc_feature 20: n = A,T,C or G
cccctcggaagtcttctagnattaattaagtttctagaagagttgcttcattttgtggcatttttctctttctcatttacaaatatggtctaagaatactacctttaagtaaataaggcattttgaatcaaagtacagtaaatgtgtatcagtgaattttcctcattattagtcttgcaaatgctgctgattttaatataggatgctatcctttaagacatcttatgtctataaacattaatattttaaaacatgctacagaatcacacagctagagaaatctcaggaagcaatcatgtatatctttttaacctaaagaaaaaagtctgccacaaattgaaacaggccttcaaaaggtactaggcctttattaaaatgcccaaaaaaaaaaaaaaa

SEQ ID NO: 50618 - DNA, 545 bp, Homo sapiens
  misc_feature 45, 47: n = A,T,C or G
cccccctcgagggtacttctagaattaattaacgcgggcaccagnanagaaagaaaggcaagggagaaaaagactaaaggaaatgaatgaatattattttgccaaaataatagctttaaggagaaaaaaatagagctaaggactatgtcaatgccagaggccatttgtgtctttaccaacagtatatgaaatctcaacccagatcactttccactacttttctttcactctcctaggaagtcttgacagaattttcctttcagtttttgataacattgggaagagctctgggtaaagcaataaataatttgctgcttactaagataatgtacaccactggtaaatccatcaacttgtattatttatttaaagtaaacagaccatggcttattcattctaaatgcacaacgggtgtccactgataggcttcagttctcagagactatgctcattagataaacaacgatttattattggatgtattataaaagtaatgatttatagaacatttgcactgtcagcattttgcaagatactttggagtg

SEQ ID NO: 50619 - DNA, 428 bp, Homo sapiens
cgggccccccctcggaagtcttctagaattaattaacgcggggctatacttttccatatgaagctttacaaattatatatgatgattttaaaaaactataatatttctgtgatagactgtgtttgatgaacacaatataatagaagtaaaaatgaataatagaaaaacaataggaaaatgtctacatggcaattaaatagcacacttttaaatattacatgtgtcaaagagaatgtctcagagaaaaaatatatatatatactctaacttagtgaaaataagacgcaacatatcaaaatatataaaatgcagcaaaagcaatgctttgaggaaaattcatagcattaagtgctaacattagaaatgaggaaaggtctcaaatcagctaatctctaaatgtctacctcaataagttcaaaaagaagagc

SEQ ID NO: 50620 - DNA, 455 bp, Homo sapiens
ccgggccccccctcgggggtacttctagaattaattaacgcgggtataatagaataatatatatataaattactccttgccaggcatagtggcttatgcctgtagtcccagctacttggggggctgagatgggtgaatcacttgagcccaagagttggaggctgcagtgagacattatcttaccactgcactccagcataagtgacagagcaaaaacaaacctcaaaataataataataatagcaataataataattactcttaatgtgaaagaatattaatacaaataaataataatgtcaaaacatacatattgccattcttgatttacttcattgaagtgtttatcacagttatgtgcttttataaatgtgtattaaaattactgcattgaagtggttatcacagtggatgtgcttggataaatgtgtattaaaatggcgctggtgggcctg

SEQ ID NO: 50621 - DNA, 589 bp, Homo sapiens
ccgggccccccctcggaagtcttctagaattaattaacgcgggggttattgctcttctgaatgtgtatttaaacctgccttccaatgaacttattgcaatggtgctaacttaacactcttgccaacagttctagtggcccttagcagcacctactttctatagtcatagcacagattttatggaggattcagtctaaatttctgagatgaatttctatagacagaaaatgtattggctttaaaaattaagaggtttgattctgttttgaatttggatatcaaatgaatgtgaacacatgacattttaatgccgtttgtcttttcaaatagatttaccttctaatgcatgtgatgacaggactttgctcatcagctagaacatacatttcagaggagttgttacctaaaatattatcataaggcataagaaaacacacgatttaagttgcctttcatgaacataattaagaattaataagccagtaccagtggctagtccccagaatttccactgttttgccttttgtgacctgtgttattaaaagtccattatttttacagactttataaaattgaatcttattaaagc

SEQ ID NO: 50622 - DNA, 298 bp, Homo sapiens
ccgggccccccctcgagggtacttctagaattaattaacgcggggaggattccacagtggttcctgctgggttctgcttgcccttgggtgttctaagatcgtgacttagcaccttcttttgtattatcttcttttatagaggtgtgatttacatacaggaaaacacacagattataagaaaaatctagttcagtgcattttgacaaatgtatatacccacgtctccaactgcaaataagatattaaacccttccttcacaggccaggtgtggtggctcatgcctgtaatctttgcacc

SEQ ID NO: 50623 - DNA, 587 bp, Homo sapiens
  misc_feature 564: n = A,T,C or G
cgggccccccctcgaaagtcttctagaattaattaacgcgggaggtgtcagtcaagggttataaagttttagttaacaggataaataagttctgaagacctgttttatagcatggtgaccataattggcagtaatgcattgtgtgcttgaaaattgctcagagaatggatcttaaattttctaaccacatacttacacaaactgtaactatgcgaggtgatggatatgttaattagcttgagtgtggtaatcatttcacaatatatacatgtatcaaagcattacatggtacaccataaaagacaatttttatttgtcaattatacatcaataagaaatgttttaaattaatacaaataaaaacatttaacttctctatgggcagatacagaagagccttcattggttattagtagattgtgttgcttcttctaagccaaatctttcttaattatgtagtagtggcatggctgacttccacttccacttgtgtcttctagagagccaatcatagcattagtgtcagacacagcatgcaggtggaataggagaacaagaacacangttttatgcttacaaatgcacct

SEQ ID NO: 50624 - DNA, 256 bp, Homo sapiens
cgggccccccctcgaaagtcttctagaattaattaacgcgggcattagagaagtggacttaaggggaaaaccacaaggcaggtacgaaaggcccacctttctattcttcctaattcttgacagaattaaattcttatcatttgcaactttggttgatgtagattctccctacagtgccaaaatgccacaagcatgcactacttttctccttttctatctttagtaccatagctaatgtctaggaaaaaaaaaaaaa

SEQ ID NO: 50625 - DNA, 543 bp, Homo sapiens
accggggccccccctcgaggtacttctagaattaattaacgcgggggggggggagaagataaagaaaaaggaaaaaaaagccagcccaggagttgggagtgtaattagatattatgagctcaggcatgaatttggcccctttatctctgttgaaatttgtgtaagaacatgaagtgcggcccattctgacactttaatcataggtcattcatagccataattgttgttgaaaagaacagtggttggatttatttttacctggaagttgcccgttaaacacaacatgttattaaaatttatttttccaaaaagtatacttttcagtatacatttaacagattgaagctatacatgtttaccatgaaagtctgtttcacctgaatgaattccggtgttgctgtgttagatagctatagcatggttgtggtttttgtagagcctctactaagttttatatttcttaccattcacaatttttgccagaaaagtggtagaaaaaagagacttcataatcagaaaggtgatagagaaacctcatagtca

SEQ ID NO: 50626 - DNA, 581 bp, Homo sapiens
accgggcccccccctcggagtacttctagaattaattaacgcgggggagtgtgtctacatttcacacacgttagttgctatgtgttctagcaaaatgagaaaaaaaaaaaaaaccaaaaactgtggagtcagagaacctatatagtttaaggataagctaaagaaaataccattaatattattttgaaaggaataattcaattgcttgacttgccagagtggagaaacattcatcaaggagactcagaaaatttctaaagaagatggaaaataaatgggagataaagaaaacaaccttattttccacagtaatgaattctatgataaaatgtaaaataagaacataaaaaaattggaagcaaatagattgcttctttaattttgaagtgaagataaaatctccaaagagaaaaactaagggggaaaaactacctaaggaaacaactggtagattttgtaacagtctaatgattactactttactattaattactattttaaaaatctacacatcagaaatacagtaagcaaaattataaagacctaaatttgtaatatatatccacttacatatcaatata

SEQ ID NO: 50627 - DNA, 485 bp, Homo sapiens
ccgggccccccctcggaagtcttctagaattaattaacgcgggtcacccctcacctcacaaatacaggaaccatgcaacagtgtaagtcattgacctgttcctctgggcccctcattttgtactgttgtttcatcttctacatatataggtattcaaacctcactttatgacgttattctttttgctttaaaatagccacctgtaggccgggtgcggtagctcccacctgtagccctagcactttgggaggcctaggtgtgggttagttgagaccagcctgggcaacatggcaaaaccccatctccacaaaaaaatacaaaaatcagctgagcgtggtggtacacacttgtagtccctctactcaggaggctgaagtgggagaattacctgaacctgggaggttgaggctgcagtgaggcacaattgcatcactgtactcaggtctaggcgacagagtgagatcctttctcaaaaaaaaaaaaaa

SEQ ID NO: 50628 - DNA, 471 bp, Homo sapiens
  misc_feature 31: n = A,T,C or G
taccgggcccccccctcggggtacttctagnattaattaacgcgggtgccattgtacacaaagctttgggcatttctaagtattctcttggaataactacctcaaaataaaattgctgtgtcaaaggttttggacaaacgtttttcacatgttgtcaacttgcccatcaaaaagtttatactggccgggcacggtggctcatgcttgtaatcccagcactttgggaggccgaggcgggcggatcacgaggtcaggagatcgagaccatggtgaaaccccgtctctactaaaaatacaaaaaattagccaggtgtggtggcggacacttgtagtcccagctactcagagaggctgaggcaggagaatggcctgaacccggcaggctgagcttgcagtgagccgagattgcgccactgcactccagcctgggggacagagcgagactccgtctcaattaaaaaaaaaaaaaaa

SEQ ID NO: 50629 - DNA, 550 bp, Homo sapiens
cgggccccccctcggggtacttctagaattaattaacgcgggagtttagttaatttggttttaaatggtggccttattaaggatttggtatatttttcactaataaaagatgtttgaaaaatagacacagaataagatgatcccagttgtaatagaaggaaggttgtgaaaatccactctaactttgggtattcagaaattttcaaagctgttttcatttcagagtatttgtaataggctgggtgcagtggctcacacctctaatcccagcactttgggaggccgaggcgggcggatcacttgaggtcaggagtttgagaccagcctggccaacatgacgaaaccatgtctctactaaaacaaacaaacaaacaaattagctgggcatagtgatgggcacctgtagtcgcagttacttgggaggctgaggcaggagaatcacttgggcctgggaggcagatgttgcagtgagccgagatcatgccactacactctagcctgagtgacagagtgagatcacttcatctcaaaaacgaaaaaaaaaaaaaaa

SEQ ID NO: 50630 - DNA, 605 bp, Homo sapiens
  misc_feature 28: n = A,T,C or G
ccgggccccccctcggaagtcttctagnaattaattaacgcgggtgtgcatgtttgttatataggtaattgtatattggtgggattgggcttctaatgtacccattatgcaaatagcgaggattgtacccaataggtaatttttcagttctcccacctgttccccttttgaagtccccagtatctattatttttgtcttcatatccatgtttacctattgtttagctcccgcttgtaagtgagaacatgtttttttttctcccaaccccgagttagttcatttaagataatggcctccagcaccatccacgttgctgcaaaggacatgatttctttctcttttatggctgtgtagtattccattatgtatgtataccacattttcctgggaaaaattttttcaggtacttttaggtagaaactctgtgacctttgcctggattcctgtagcagccagcctttactcttagggtaaatgtagctttctctccatgtatcctctaaaatgcctgcagattaatatttctaaaaccgtaatccttaccctgcttcacacaaaatcaaaaccaaccaaacaaaacttttaatttatttctgttgcctta

SEQ ID NO: 50631 - DNA, 315 bp, Homo sapiens
  misc_feature 29: n = A,T,C or G
cgggcccccccctcgggggtacttctagnaattaattaacgcggggaggtttctttaggtttgactcagtatttgctacttaagagggtatgttttgggtaatacatcaataacttgtatagctagtaaatttcctagaatatttaaggacttcaaattttaccttcagtttatgtgatatcacacctggctataatttatatgatatttaaaaatctgtttatgtatatatatgagaaattattcaaatacaggggaaatttcttagttatcttaacattgtttatccttgtaaaacttaaatggatcaaacat

SEQ ID NO: 50632 - DNA, 511 bp, Homo sapiens
  misc_feature 36: n = A,T,C or G
ctgggtaccgggcccccccctcggggtacttctagnattaattaacgcggggtgggctgtgctgtcaattcagtgcattagcactggtagcttaaaaaaaaaaagttttgctgagttttgctgtgaacttaaaactgctctaaaaataaagtctttgcaatacatgtagtagaaaatatttgaatgcataccatctaataaaggcacatactctatcaaaaaatttctgtcgggtccggacacagtggctcatacctgtaaccccagcactttgggggaccaaggtggttggatcacttgagcccaggagcttgagaccagcctgcgcaacatgcaaaaaccctatctctacaaaaaatacaaaaaactagccaggcatggtggcacatgcctgtggtttcagctaccagggaggctgaggtaggaggagaatctgagcccaggaggtcgaggctgcagtgagcagtaattgcgccactgcaggcttccgcctcccggattcacacaaact

SEQ ID NO: 50633 - DNA, 471 bp, Homo sapiens
cgggccccccctcgaaagtcttctagaattaattaacgcgggtaccaaaaacgcctttgtttttacttattcatcaaacttaaaaaattgatgtccttcccatatcagactgtagagtccacagaaacttgtgtattgagtcaccagtcacacggctggctgccagccaccacgcgtctgctgtcaccagagccttgctgatctctgaaaaccatcaggaattatttctctgctcctgaaaaactaaacgttgcaattttaatgatttgttcaaatacctgctctgatctagaactatgttctggttaaaggggttctgtactttctttgacagagtaaacttccgagtacttaccaaccgtgcctccctccccaccccacatttcctttcaggtccatcctggcagatagtaagtcatccagtacaaaatgcatccaaataacatttttaaggggaaaaaaaaaaaaaaa

SEQ ID NO: 50634 - DNA, 521 bp, Homo sapiens
cgggcccccccctcggggtacttctagaattaattaacgcgggcatgctgtgaggaccagtggaatgtcagccctggtcagaagtcaccttcagcacagtacccgctgccttgaacttgcatgtaaaattaaatttagggttgttgcaagcttaggctctggttacccatggcaaccttgagttctgtctgcattatagcatattttaaacagtgtcaagaggctgctagaaggtgttacttggaaaaatgactgcaggtagtgatgtatgtaggagatggtagatagaaagaattgccaattgtagcttgatactgtagtctctggggccatttagcataagggtcctgcctaccttaatatgctcaaaggtgcctgacgctctgtgcatgactggatatatattaagaggtcgtcatcaccatgacttagagacattaaggaaaggtgaaattatactcagcttgctgcttaaaaagccagataagcatgtaatacactttagaatgatttcccttacc

SEQ ID NO: 50635 - DNA, 605 bp, Homo sapiens
  misc_feature 592: n = A,T,C or G
cgggccccccctcggaagtcttctagaattaattaacgcgggtatgtttctttcaatactgaacccaattaatttcagtgactcataaatgctagggtgaaaattagaatattaaagctccatttttttaagaaagaaatcattttgcttcttcataatagacttcctattgttttggacataaatttctctctgaagttaggttagagaatcagtaacactaatgaaagtttcattcccccactttattgaaacaattttcacccaacagatgacaggctgcagcttgaggaagagctgatcaccttttaactgaaggtgatgattatgactaatacttattaagccctttcatgcaacatacatcttgttgaatttctcacaacactccaaggtaggcacttttaatccccattatacagatgaggaagataaggcttgtgagggtcagtaactcgccaagttctctgtcaagggcaaatgagtgacagaaaaggcatcccagtccaggtctgattgcttgcaggtcatcacccgcaaaaatccaccactgaattctaccaatgttaagtgtgagaaccataggtacaancctccatacttac

SEQ ID NO: 50636 - DNA, 577 bp, Homo sapiens
acttctagaattaattaacgcgggggtgttctagagtaaactctccctccttatgtaggaaattaacctttattgagcagttagtatttactaggcacttaaattatatctttcagaaggggattagagtaggtcaataatttatacacgtttatatagatagggaaggtgttgaaattcaaactgaggtgtgacttttaagtaaaagtaacttgtatcactctttccagaaattttcttgcattttctgattctatattctttgctcatctatgttaaatacttaggcccctcccacggtctacagtggatgggctactgctttgaatctgagttgctaatgctaactccaaagagttgtcatgctgtctatttacaattgtaaaaagctagttgcagtgcaaatgtattgtctgtgcaaaacagtagtccactttttttttgaggaatttctccacgtttttgtaggagctgacagtcttagatcttgccctaaagaattagcttatgacggccagatgcggtggctcacgcctgtattcccagaactttgggaggctgaggcgggtggatcatg

SEQ ID NO: 50637 - DNA, 340 bp, Homo sapiens
  misc_feature 29: n = A,T,C or G
cgggcccccccctcgggggtacttctagnaattaattaacgcgggtaacaacagattgaaattaaactgccttcctagctgtttctattttttaaattgtaaaaatgacttttattattctctatctaaaagtcactaaaagagaataatgcaacttagtttctagtcctagttctgtcatttaattggctccatgaccatgggtagttcattaaactctgtaggccacttttttttatttataaatgtagacagttggttttgatgtactttaaagccctttccagttcttgtattctagtactccacatggtggctccctggcttatatagaagtacc

SEQ ID NO: 50638 - DNA, 614 bp, Homo sapiens
cgggcccccccctcggaatacttctagaattaattaacgcgggcataataatcatgcatatttatggagtacatagggaggtgattatacatgatgtatagtgatcaaatcaggataattagcatatccagcatctcaaacattcatcatctgtttgtattgggaacacttaatatcctccttctagatatttgaattctatatattattattaactatagtcattctacagtgctagagaacactagaacttattcctcctatctagctgtaattttgtgtcctttaacaaatctctttctatactgcccttctcccgccccttcccagcctctagtagcctcttttctactttttacttcagtgagatcaacttttttttttaagcttccatatatgagtgagaatacatggtgcttaactttctgttcctagcttatttcactttcaaaaacaagatttttaatgtttacataatattctatctagcagatggtccagagttactccatagctggattttgagaatatctccaatgtcttactggcaaatatgtttgtatatacaaatgttttaaaagctagaataactatgttatagtcccagaattgct

SEQ ID NO: 50639 - DNA, 336 bp, Homo sapiens
gccccccctcgggagtacttctagaattaattaacgcgggtttgggaaggcaaggttctaggcacaaatggggattaagtggtacatacactgtaccgtcatgtagtacacgcactacatatgctataattgtacggcataggccgaggtgaaccaagacgtaaccgaagcctcacagatctaggatagcaaaaagagggctatagacatgtaattgaccttcactgtaaaggaagatgttcaaatggccagctagcatatggaaaaatgctcaacatcactagtgattagggtaatgcatatctaatccaaattgcatacaccatcttataactg

SEQ ID NO: 50640 - DNA, 592 bp, Homo sapiens
  misc_feature 522: n = A,T,C or G
cgggccccccctcggaagtcttctagaattaattaacgcggggacagtcagcatgaaagcaactggggactgggattgccatagctcaacagcctgatgatggcctgaggttgttgccaagagcagctcctaggaactgctccttctctgagccaccctctgggaacagcagagctgtcagagaagatttaattgttttgatcttcctgccttcttgatatcccattgagagtcacccttcagggagaaggagatagagtcgtcattttgtattaagcaatgacaagaaagaaaaaaacttttaagatgaaatcctgatgggattgaaaatcaattaatcaatcacacagacctctgattcctggtcattctggctcagaattacagacataagtgtgtgacactgtgttaccttaaggtatatggacttttagaccagtagaattttatggagagaagaaacagtaaagatacattagttcaatgtatgcattagtgtttaaagtaataattttggtgcanaagcagaatgggccagatagactagtttgccaggagtttatggatctaatgaaatagtttcagttgctca

SEQ ID NO: 50641 - DNA, 454 bp, Homo sapiens
  misc_feature 28: n = A,T,C or G
cgggcccccccctcggggtacttctagnaattaattaacgcgggtatcagagcaaaaatattctcctttgttgaatagcaaataatatgggaggagaaggaagaaacaggatacaggtatctttgttgaggttcaggcacagagataatgtaagtcagccagctgctttttatactagcagcatgacatggaaaaatgaaaataaaaattcagggacaataaaagatattttctcctttgctctcttgaagtcaaactgtgttctgtgaagtatcagtacaacttgctattactagctatacctgtctaaatctccatgactattagggcaaaactgtgtcctttttaattttttaaatgctggttgttaaactccttcagctaatgggggcttagataaattgttacatgctactaaagggactgtgtaactcaaaacatgactacctaatct

SEQ ID NO: 50642 - DNA, 598 bp, Homo sapiens
gggccctccctcgaggtacttctagaattaattaacgcgggggaggggggaaggatagcattaggagatatacctaatgctaaatgatgagttaatgggtgcagcacaccaacgtggcacatgtatacatatgtaacaaacctgcacattgtgcacatgtaccctaaaacttaaagtataataataataataataaagaaaatccacttggtgagggaccacattggaattggctctgggcttgatgttctgttggaaaagctgctcatgatatagcaactcttgattcatcttctggtgaatgaatcattcctataatttcagcactaactatgcttgctctttgtgtttagagctttcttcattcaagtcttattcttaggagttatttcatccttaaacttttcacagttttcctccagggtccagatttatgatggttcttcctctgggctagtattcttcaaagatgactacagtttttcatactccttttgaaaagggataaccctgccaaggaattcatgcttttttctgaattaatgttagtaagctttaggacaaactgtttttctttttaataaaaagctggctcttg

SEQ ID NO: 50643 - DNA, 527 bp, Homo sapiens
  misc_feature 27: n = A,T,C or G
cgggcccccccctcgggagtcttctanaattaattaacgcgggcatagacttagctttctattttaaatgtcacaattgagtcaataaagtaaacagagtttatgagtgtttacagttccaggaacacacaggggaatcctttattctgttttaaattaaagcgtcattcaaaaagaacaaactttcttaaatgttgcttttacatctttggctcagaacacagtatttctaactttgtttttcttattacttaggaaactagagaaatttctccttggaaatgtcagggggaaaatacagtatttcggattaactttagaaaactcaggtttaaggcttattgaccagaagacctctttcttatccaagtgtagggcaattcattgcaccttgaggtaggggaggagcaaaatcaggctggcaggggtccacggcagggcaagctctaggagctggtgagtctagaaggacggactagagagagctggcattggaatggacaatcgctagagggcgccggagcact

SEQ ID NO: 50644 - DNA, 349 bp, Homo sapiens
  misc_feature 31: n = A,T,C or G
taccgggcccccccctcggggtacttctagnattaattaacgcggggggggaggaaaattgggatttgaccaccacttaaattgaggggtggttcttcactgtaggaaagtgttcacataactgctagtaccctggtgttgaggtgtgccctgactcccacagcctggtggcactcaagaccaagaaggaggctgggcgaggtggctcacacctgtaattccagcactttgagagcctgaggagggtggatcacttgagcccaggagtttgaggctgcagtgagctatggtcaccactgcagtccatcccgggcaacagagtgagatgctctcaaaaaaaaaaaaaaaa

SEQ ID NO: 50645 - DNA, 284 bp, Homo sapiens
cgggccccccctcgaaagtcttctagaattaattaacgcgggcttgtgaaaacatatcactgtggttctactgctcccgtgacaaactgaattcctacatcggacccctccctggttactgctttgaatcttggttaaaatgcccaccaaccatttatgagaagtccagcaaccatttagatgtatgtgcgtaaagtgactctcaggtgcatcacatcaagagcataggaagtctttgctattgaaactacagtaaaatgtggaagaagaaaatctacccctta

SEQ ID NO: 50646 - DNA, 500 bp, Homo sapiens
  misc_feature 471: n = A,T,C or G
gccccccctcggagtacttctagaattaattaacgcgggatataaaattatttttagtaaaaacaaattagcaaaactgctcagtgaatgattcccgagagaccatatcccatgaagccccattttcctgctacagggttcctgggccataaaggtggacctggaacaggataaaacaaccattgtgctacagtctaccctcatcattcagccttttagtgaaaaagacaagcagccgtcagggtgattcagacccttcaccaggactgtgactaagctatgagaaagatgctctccccttcctttctgtttgtaatgctggcaagtttcaaatccgaaacagtttgtagtcatggtcccagtcttgtggaaacagagcttgctgatgcaaatgatgccaacagtttctcatagtgggcaaagtaagtatgaattgcatttgctaagtgatattccagggatgtccttcangcagtggtcataaaactacagtgtactta

SEQ ID NO: 50647 - DNA, 536 bp, Homo sapiens
  misc_feature 37, 87, 88: n = A,T,C or G
ctggggtaccggggccccccctcggggtacttctagnattaattaacttctcaatacctcatttgtaaagtgtgcctaatactagtnngcctagctgaaaaagttatcaggaagataaataagaatgcaggtaaagcacctagaacagtgcccagcactaagaatgttgaagccggtgttactgatggtgatgcttgtaatgggaagcacctattacaagtgcagacataacaatagtgacttagggtattgacaacactgttgcacatagtggagcaaggtgaggctacctggggggcattagccatgagcgagggtggaacatatttgctgagcagcctctaggaaagaagaataaaaattgatgcagagaaagtaacagcagtgggtaagttgaaagatgaatttgttgtttttaatataatcttactcttcttagaaaacagattctgtttttggcatttgcaacatgaaaataaattggtttctctaagtgtttgcatatttctgtcctaaagaaagagttgtacagtgat

SEQ ID NO: 50648 - DNA, 455 bp, Homo sapiens
  misc_feature 414: n = A,T,C or G
ccccccctcggaagtcttctagaattaattaacgcgggaataaagagagacactagctgagtcgtcaggtgggatcaaggaagttttcatttattgtttagttgtttttgctgttagttgttcttgtggtttgctactgcttttcaaacgataaagacccgagcagatttaattgttgatgtgcacaatgcagtaaaaaaggacaattcactttgggaggccgaggtgggcgggttacgaggtcaggagattgagaccatcctggctaacacggagaaaccccatctctactaaaaatacaaaaaattagccgggcgtggtggcgggcgcctgtagtcccagctactcgggaggctgaggcaggaggatggggtgaacctgggaggcggagcttgtagtgagccgagatcgtgnccctgcactccagcctaggtgacagagggacactctgtctc

SEQ ID NO: 50649 - DNA, 592 bp, Homo sapiens
  misc_feature 586: n = A,T,C or G
ccgggccccccctcgggagtcttctagaattaattaacgcgggatatacactatactttacttgtttaaaagtaaactcttaaaaatcactccttccattatgttgtgccttgaatttggcagaacatgtactgcttcatttatatttagaagtaaatatatcaaatgcaatttttctcttatcccttttacatttcctttagaggataatatttggtgcaggaatagttttaaaatttgaaaatgactgccctgcccacaaaactaagagaaatttgactccactgagtcactgccatattggatagaaatgatagctaattattaagaataattttaattagaactttggtcaaattagctacttttattgtattataggtgctgcttctgtcttatagagtgaaagaaagcagatggtttattcattatgctaggggtgtagagcactgaagagcttgggagataaggggaaataaccattagtttgacgcatgcactgtatattgtatatgatagctatactgtctaaagaagactgcaggtcccattgaaccacatccactaccactgtatgaaacacgtnagagca

SEQ ID NO: 50650 - DNA, 494 bp, Homo sapiens
cgggcccccccctcggggtacttctagaattaattaacgcggggggggggaagtctgctctgctggctgctggccctgcctgggccgcatcctctatctcacgttccttgtctacaaaatagaagtaactttctgctcacggaggaggctctgagcaagggtcaatccttttcctgtctccctgagatccgccggagaggtgaacacacgggggtctcaggctgaagcttataaatcaggggtgaggaactgaggttggaggagagggttgcgccatagggtcaggccgttgaacagtggtaacattgccgcatttagtgaaaaaaaagagaaagtaaaagaaaaatacagccaggcatggtgtctcatgcctgtaatcccagcactttgggaggccgaggcgggcagatcacttgaggtcacgagtttgggaccagcctgaccaacatggtgaaatcccatctctacaaaaatacaaaaattagctgggtatg

SEQ ID NO: 50651 - DNA, 137 bp, Homo sapiens
ccccccctcgagagtcttctagaattaattaacgcggggtgttgccgggtaactgaggatgtgccactgcatctgccgcctgagcgacgtagcaagactgtgtcttctacgccgatgaatatgatagtgagctggct

SEQ ID NO: 50652 - DNA, 563 bp, Homo sapiens
  misc_feature 11: n = A,T,C or G
tgggtaccggngccccccctcggagtacttctagattaattaacgcgggggtgttaccgattataatccagttccatccaaaatatatgtttttaatggtagtgtcgggatggaaattgaagattttgtgtccctacttcccaaaattcttcctataatatcactcagcagtggaaactttcttgagccaaatgaagctgctttggagaaaattgttcatgtagccaaattctggaaatctaggttcttttgcaatgtttgctggtaagtagctgtttcatattgaggaagtggtagaatcttaaaggctgcacctcaaaactaaacaaaatcgaaactcaccagtacaattcaagaggggttttcacattttttaaaaaggaatactgctgtatttaaaacattttaagattgcaaaaattcatcattataatttttattatcatcactggcatcaccatgaccagtgtcacattgtttggtcaaaagctggaatggaaatgtgatagttatctttgccatattatatattgagagatgcgttgaaaactgttccggagata

SEQ ID NO: 50653 - DNA, 595 bp, Homo sapiens
cgggcccccccctcgaggtacttctagaattaattaacgcgggtaggtatttcatttaatcttgggacaacctagaagatttgtatcctcattttaggtataaaaaaaatctaggcttagaaggtttaaataactggctcaaggtcctgcagctggtagaggtaaggctggggctagaactcaggcctgagtggctctgaaagctgggttttctagttacaccacgtggtctccccaaaacaccttttgataggaactgaagtgggattcagctcagctgagaacaaactaggcaacagccggcagtacaaattcattcttgaaggccacctgggaaactgaccaacttacgtgctgaaaatatttacttagggctgaatcaaggagtttgagaccaaactccgtggagggcacatgctaaaagcctccattctgaaacaaactaaatagaggaggaaactagacatgatatttgagtgccttctccatggaaggacctgggctggggaatttgtaatctccacttgattattctctatctcatctctatcaggtaggtatgaatctctctatttcacagaaggggaaactgaag

SEQ ID NO: 50654 - DNA, 378 bp, Homo sapiens
cccccctcgtgggtacttctagaattaattaacgcgggggagtggttgagggaaaatgggaagttacttttaatgggttttctttctggggtgctggtaatgtcctaaaactgactgcagcactgaagtaacggttgtgcaatcctgtgaatatattaaaaaccattgaactctacactttcagttggtaggtgaattttatgtagattttattgtatgtgaattatatctcaatttttaaagtttttaaaaaataactattaaaggaagttcttcagactgttagaaaatgaaacaatatgggccaggtgtggtggctgaggctgaggtggacagatcacttgaggccaggagtataagaccagcctgacctacatg

SEQ ID NO: 50655 - DNA, 598 bp, Homo sapiens
  misc_feature 27: n = A,T,C or G
cgggccccccctcggaagtcttctagnattaattaacgcgggcacttctagtggtcaaaataataatgaagtgcgaatatgaagtgaaatgcaacattaagggttggttaaccccaaattctttcatcaaagagcaatatacaagaaattggagagtttttttttttcatactaaaagtaaccattaagggtaaagaactgagcctggcacggtggctcatgcctgtaatctcagcattttgggaggccgaggcaggaggccaggagttggagaccagtctcggcaacaaagcgaggccctgtctctacaaaaaaaatttaaaagtaactgggcatggtgatgcatgcctgtagtcccagctacatgggaggctaaggcaggaggctgaagtgagccatgatcacgccactgtgctccagcctgggcaacagagcaagaccctgtctaaaaaaaaaaaggaggctgggcacggtggctcacgcctgtaatcccaacactttgggaggccgaggcatgcggatcacaaggtcaggagatcaagaccatcctggctaacatggtgaagccccgtctctactaaaaatagaacgaattagc

SEQ ID NO: 50656 - DNA, 466 bp, Homo sapiens
cgggcccccccctcggggtacttctagaattaattaacgcgggcggggtgggggcttacagctgcatggtctcctgcagctgcacgccttcagctactctctggctcgacttcttcatctggagaaaacacgaagagtaataccagcctacctcatgggattagggagcagctcaaatgtactctttaaggcatttatgaccaacaggtcacctgtgagtatgatgcttgtacacagaaagtgctccataaagttcaagaccagcctggccagccccatctctactaaaaatacaaaaattagccgggcatggtggcaggcgcctgtaatcccagctactcaggaggctgaggcaggagaatggcttgaacccaggaggcggaggttgcagtgagccgagattgtaccactgcactgcatcctgggcgacagaccaagactgcatctggaaaaaaaaaaaaaaagc

SEQ ID NO: 50657 - DNA, 454 bp, Homo sapiens
ccgggccccccctcggaagtcttctagaattaattaacgccgggggaaccctaattttaaaaactgaacacaataaaaatctatagacaaacaatggaattacataaattagctgagacagttcttagactacataaaaataatttcttgaaagtaaggtttcagtagtcagcaaatcctttttttttttttttttctttttttttttgagaaagagtcttgctctgtcaccccaggctggagtgcagtggagcaatctcggctcaccgcaacctccgcctcccaggcacaggcaactctcctgagcccaggaattagagcctgtagtgtgcagtgatcaagtctgcaaatagccactgcactccagcctgggcaacaaagcaagaccccgtctctaaaaataataataataatagtatcagtcatagaacctacagctaagaaaaaaaaaaaa

SEQ ID NO: 50658 - DNA, 367 bp, Homo sapiens
ccccccctcgtgggtacttctagaattaattaacgcggggtgatcaattataacattggggtgggattttaaaagggcctatcctctgcctgttttcctcctctcaaacgtgtctctaccatgaaccatgctgttaaaataggtcttttaagagaagatgtgtatcataatatcagtgtttcagtttggaacctgatggtagctgatttcaccttcacattcatttcagcttaaaggcagcattacccacagagtaccctcttttttcctcactaggtctaccttccacgctctatagtaaatacactgacatagtatcaagtctcattcatcatctggccacaggcccagccatcctttgcatcta

SEQ ID NO: 50659 - DNA, 603 bp, Homo sapiens
gccccccctcggaagtcttctagaattaattaacgcgggggaaatatacctctattgaaatggacccttaaagcatcaccatccatcactgacaagtgaggggactgggaactttgcaaaggtggcagtttgtagagtattttacatatgagagcaatattgcacaaatttacaacagaagtagcactctctgtggaatgtcctaagaagtgcacagtggtcctatttatgcgtaacattaagtgccaataaagaggtgacttctcagtatgagacttaagaacacttcaggtagcacttcaaagccaggtttcagtcgtctgaaaaacaagatactgactgaatgaaagggtctaataatcataaaatggttttaaacatagtggagtttaaaattaataagatactataaacatgtataacatgaagtattattaataaaatataataagaaattcaaaattgttgcagatttggcataaaatgtcttcaagcgatctcttaatttcctgtttcttaatggtcgatttaaagtcatatatgcatatgattgtgtctttattatacttagcatcttaatctaatgtgtagtgaccaaagact

SEQ ID NO: 50660 - DNA, 602 bp, Homo sapiens
  misc_feature 37: n = A,T,C or G
ctggggtaccgggcccccccctcggggtacttctagnattaattaacgcgggcctggaggtgttagttccgaggtgccatctttccagactgagtgtggatctagtgtttaaaaacacgtgtgctgctgggcaccgcggctcacacctgtaatcccagcactttgagaggctgaagcaggaggattgtttgagctcgggagtttgagatcagccagggcaaaatggcaaaacctgtctctatcaaaataccaaagattagctgggcatggtggcatatgcctgtagtcccagctacttggggggctgaggcaggagggttgcttgagcctgggtggtcgaggttgcagtgagctgagactgtaccactgcactccagcctgggcgacatagtgagaccctgtctcagaaaaaaagagaaaaaaggccgggcacggtggcttatgcctgtaatcccagcactttgggaggcagaggcgggcggatcacgaggtcaagagattgagaccatcctggccaacatacaaaaattagatgggcatgatggcgcgagcctgtggttctagctactcaggaggctgaggcaggataatcgcttgaacct

SEQ ID NO: 50661 - DNA, 552 bp, Homo sapiens
  misc_feature 11: n = A,T,C or G
cccccctcggnagtcttctagaattaattaaagtattaattacacataatagtaatcagccaggttacacagcagaatgcaggatttgctttctttaataataacttgagagttcaaacaaatgtacttgaaatcggtctcttccaggggttctcataaacccacgggaggtacaacctcattctcctctgatagaagcagtaatccagagagaagagatattttttgctctttctatttttttctttgagatggagtctcgctctgtcgcccaggctggagtgcagaggtgcagtctcggctcactgcaacctctccttcctgggttcaagaaattctccttgcctcagcctcccatgtagctgggattacaggcgcctgccaccacacccggctaatatttgtatttttagtagagacggggtttcgctgtgttggcctgactggtcttgaactcccgagctcaggtgatctgcccgccttggcctccaagtgctgagattacaggcgtgagccactgcaacccgcttgagagaaaggttgttaaaacac

SEQ ID NO: 50662 - DNA, 557 bp, Homo sapiens
ccgggccccccctcggaagtcttctagaattaattaacgcgggaagctgtccttattaaaggagaagcagattggtagtaaatttcacatatacaccctcatggttgtatgtcatacgtattgtatactggcaaattcttgttaaccttttaatagtatagaatcagttcttcttgactagtctttataaaaatctgaattatgcaaaacttttaaggagttggcaaagaagtaggaagacccaatggggatttcaaatctggtttcatctcccatctggagaaactaggtaagccccacactcatacacaaatacacagtaaacaggatgtattgggtagcaaagagggtcagcacatgttgtaagtttaactagagacaatctacattagcaggataatcaacgtggagatgtggaataacccatatttcaagtgacagtctgaatggattttttctggtccttgtttatcattgtttgtcaaatccctagagtaagctttaacaagcaagaggtttaagacttgtgtcgttcttattaactttcacattgcatt

SEQ ID NO: 50663 - DNA, 598 bp, Homo sapiens
  misc_feature 16, 31, 32, 40, 41: n = A,T,C or G
cgggcccccccctcgnaaagtaccttctagnnaattaatnntaacgccgggtgccaaataagggaagaacatgcaacaatgtttaagttatttaatcctttaagcttttaagactgtttctgctgcatttttactttctgaggaattacatagtacacatcaagctccaatgaaatcaccacattatgttcccatgttgtaaggttttataaaagagaataagacttcgttcaaatcccagaatattagatgttcttacctttttttctattgtgatgcttccccttgttaaccaaaaaccacaactgaacaagcggataatgcacattaaaggcttatattaagatgacaaaattgtatcttgaactggaatcattcctctagtatcctatccaaggatctccactcaggagaaggttctgtacttgctgctacctctcttcagtaagctaagcagccacatattccctatggcaaaagaacatattctgcaaataatcaaatgaaaaaaatcactcagatctcaacatgatacaaatagctcattttgtaagcttttgggcagttgtatctcacaaagtcagtaatgagtcaccag

SEQ ID NO: 50664 - DNA, 610 bp, Homo sapiens
ccgggccccccctcgaaagtcttctagaattaattaacgcgggtgtgtggggtaggggcagagctggtggacactggcaggaaccaagcgtcccagcctgaccagttctgggatcctccatggcatctgggttttcattgttgttattgttgccgttttataaaatccacatctctagaatgagcagctcagaagtttgtatcttaatactgctgagcaagtcacaggaggcccagtgtctggagacaaagcaatcctcagaccacccaggaccaagccccagagaaggctccacactgtcccggggatgctgacatgcctttcattccagtcagcctgcaggccacagagggcggtgctcacaacatgtcctgtctgtgtgtcatcaacttcaggaaagctgaaggctggggcgcagtggctcacgcctgtaatcctagcagtttgggaggctgaggcaggcatatcacttgagccgagaagtttgacaccagcctgggcaacatagcaaaaccctgtctcaaattaaagaaaaaaaaatatgtgtgtgtgtgtgtgtaaaattttaaaaaataaaataaagaaaaccttaatcaatacagtaagtgtg

SEQ ID NO: 50665 - DNA, 533 bp, Homo sapiens
  misc_feature 456: n = A,T,C or G
cccccctcggaagtcttctagaattaattaacgcgggatgtgaaaggaatgggacatttcagttaaggagatctccatgtatagatattattttcaacactgcatatcctgtttcttcttattgaatagaaactaaaaattaatcccatgactcttaacactaggaatctccaataacagtcccccaaacacatttccttacaattaaaaaaaaaacacatagagaaaattcccagcatttatgtacttacattttatgtactttacacaaactagagctcaaaaggaactaataggaaaggtgtgcttatctttacctcaaagagcatctctcaatgctgcttgttaagtgtttataaaagatgaagatccaagttgcaactcttgcaagaccaatagcatcaggaattgccctattgatttggcttattaaagtatcttctcccacctaaactntcaacaagcacagggaaatctataataagtaggcataaactttgctgaaaatagcatgaaaaatgacacacatgacg

SEQ ID NO: 50666 - DNA, 359 bp, Homo sapiens
  misc_feature 7: n = A,T,C or G
ccccccntcggggtacttctagaattaattaacgcgggtcatgggggagggaagctaagagctaattacgagtttgggttaaaccatcaaagtgtatagatttttacccagcaacacaatttctaacctaaactacttggggagtgagctcctggtgcctatggaaagtccaccttctaattgttatttaaagcactgggcaaataagccagaactattttaaagaacccaaacagctcacatccttcacctgctgggtatgctgctaacaaattggcattagcacacaccttcctctgaatggaagagaacaaataaaaagaacaaatgttatataatacttaaaacataaatgccct

SEQ ID NO: 50667 - DNA, 419 bp, Homo sapiens
ccgggcccccccctcggggtacttctagaattaattaacgcgggtacctcctgcaacccacaaaggcatccgatgtagcagatactctttttatacctattgaatgcacaagaacattgatgcttggataaattaggagttaccctgtgtttgctagccacagtagtagacagcagtcgactgtgatttgataagtaagtgtagataagaagcaaagacatggccgggcccggtggctcacgcctgtaatcccagcactttgggaggctgaggtgggcagatcacctgaggttgggagtttgagaccagcctgaccaatatggagaaaccctgtctctactagaaatacaaaattacccaggcatggtggcgggtgcctataatcccagctactcaggaggctgaggcaggagaatcac

SEQ ID NO: 50668 - DNA, 627 bp, Homo sapiens
  misc_feature 23, 574: n = A,T,C or G
ccccccctcggggtacttctagnattaattaacgcgggtgaggcgggagaatcgcttgaacctgggaagtggaggttgcagtgagccgagatcgtgccattgcactctagtctgggtgacgagcaaaactctgtcccaaaaataataacgggctgggcacgttggctcacgcctgtaattccagcacttggggaggccgagacgcggagcacctgaggtcaggagtttgagaccagcctgaccaatatgatgaaaccccacctctactaaaaatacaaaaattaggcgggcatggtggcatgtgcctgtaatcccagctacccaggaggctgagacaggagaatcgcttggacccgagaggtggaggttttagtgagccgagatcttgccattgcactccagcctgggcacaatctagcctgggcaacaaaggcgaaactcccatctaaaaaataataaaaataaaattgaaacatattgtctattctagtaactaatagccatataggtttattagcaatttaaatattgctattgttcattgtattgagagaaactaatgaccttatagtcnaataactaaaaaattgcttattttggaataaataaagctaagtttgaaaattc

SEQ ID NO: 50669 - DNA, 537 bp, Homo sapiens
  misc_feature 43, 504: n = A,T,C or G
cgggccccccctcgagagtcttctagaattaattaacgcgggnggagagcatcagaggaagaatagctaatgggtgacagacttaatacctaggggatgggttgatctgtgcagccaacaaacatgacacacatttacctatgtaacaaacctgcatatcctgcatatgtaccctgggacataaaataaaagttgatggaaaaaaaataaaagaaattctataatgtttctatggtgtatggttaaggaaggcaagtaagactcaaattacaagaattaaatggaaagaatacaacataaacacccttttatcaagtgagcatctacatattatttgtctagaactatggtatgagctttaaggctggacgtggtggctcacgcctgtaatcccagcactttgggaggccaaggcaggcagatcacctgaggtcaggagttcaggaccagccctgccaacatggtgaaaacccatctctaccaaaatacaaaaattagcccggntgtggtgtcacatgcctgtcgtccctgctactc

SEQ ID NO: 50670 - DNA, 602 bp, Homo sapiens
  misc_feature 22: n = A,T,C or G
ccccccctcggggtacttctanaattaattaacgcgggtaattgtaaaagtcatgcaaaaagaaaagtctatgttaaagaaactgattattcatttaaaaacttaaaaaaaaatctagaatgttgagtaatcacaaatatttgcattccccaaatattcagatttcccattcaggtatcataaactttaaaaagtaaatgcagtggttatttttgtagaccatcattatatgagcacagaaattaaatatatgcatagcaacatctatcatgacgctttccagttcctaggagtggcattaattccatggcttcactgcataatattagtttcgatcatatactgtcgaagtttcatacagagtatacatctaaatccatataatattgagagtagctctaataaggttataccgaatttaaatttgtgagaactaagggaaactatgttggagttgcaactgagtgtggcactcacagtgagaatgtggtctgcctgactaagcaggtagggctatccccagaaccattgttttctgcagcttagagagaaatatttgtttaaattctgctaacaaaattttttaaaattatgtgtatgtg

SEQ ID NO: 50671 - DNA, 240 bp, Homo sapiens
  misc_feature 17: n = A,T,C or G
ccgggccccccctcggnagtcttctagaattaattaacgcgggcctatgaataacatctgagactcacaagtccactatgcagctatacccgcatatctaatctgctgtagcaccccctctcactctcgggggctgtctacaatggtatcctcttacatgaacatgactgcctgtcttttaggctactaaatacaattgagtttgctttactacatgtgtaatgcatgcaacctttgaaa

SEQ ID NO: 50672 - DNA, 614 bp, Homo sapiens
  misc_feature 543: n = A,T,C or G
ccgggccccccctcggaagtcttctagaattaattaacgcgggcccaaggctcaggtgatcctcctgcctcccccacaccgagtagctgggactacaggcacctgccaccatgcctcactaatttttgtatttttagtagagacagggttttgccatgttgccagactggtcttgaactcctgggctcaaataattcacccacctcggcctcccaaaatgctgggattataggcatgaacctgggagtgggcccagctgtatgatgccaatattatttacacactcacgcatgtcacatatacatgtgtgtgcctgtgtagtagcaaaaaatggaaagacatttgccaaaatgttaattgtggttatatctgaaacacagtgacttttatttacttccttattcttctggaaataaggatatattcttcatataatctaaacaattcactaaaaaacagaaaacctattctgttaatatattttaaaacattaaaatgaaaaagcccaaagatcctctaaaggtcagtgtatgttcatagcangcctactggaagctggcagtagaagacatgctaagtccagagagccctaaaagacacttttaaggaaattg

SEQ ID NO: 50673 - DNA, 375 bp, Homo sapiens
  misc_feature 15: n = A,T,C or G
cgggccccccctcgngaagtcttctagaattaattaacgcgggccatcatctatggataagaccaaattgggatgaggggatgacactgactgtggggaaggaactgttgtggtagaactaacactgaccccccggcttacatcaaacagagggcaggatgctgctgtctagggatggggcccagtggtatttagtttgatgcgaaattaactgtggtttttaccattaaaaataatggcaggctcaggctcagtggctcacgcctgtaatcccagcactttgggaggctgaggtgggtagatcacgaggtcaggagtttgagaccagcctgaccaacatggtgaaaccctgtctctaccaaaaaaaaaaaaaaa

SEQ ID NO: 50674 - DNA, 547 bp, Homo sapiens
  misc_feature 28: n = A,T,C or G
cgggcccccccctcggggtacttctagnattaattaaattttaataaagcccatcacaaaatgcaaattcctaagcatctgtttgacagctgactattattccattgtatggatgtaacacaattcattttcacagatcccttttcatggccatgtagatttcttccagtaatttgctattaaatgaaaagctaagttaacattcttatacacatatctttgcttattggtgtgaccatatatttatcctggataaattcttagatggtaacttactgggtcaaatcaacatgtagtaatgttgaaatgtatagacaacattggtgagaaaatatgtaacttgagttttagtaactaaattcattatagctcaggagttaccatttcaatagatcactgaaaataattacatttgtcagttcaaagtgtattggtcacctcttgtttaaaattcagtcacttttggggacgtattccacaattatgggattctttctccttcccccactcccctgctttcacactgtgccatagatcatctacattc

SEQ ID NO: 50675 - DNA, 521 bp, Homo sapiens
ccgggccccccctcggaagtcttctagaattaattaacgcggggggggggcggacctgcaccatcctttcacggattcactgagtttaatcaagatgaatgcaatcattcactctctgaggatggactgtcctcaacatccctctccccacgtttatagaaaaacctggcctcgcttggctcccaaaaccaccgtgaagaggtttcatgcaagttttctaaagcgtcagtgaaaacaggacttgtttgctttatcatttaaatttcaaaatacatctctggccaaagagaaatataaacaacacagggcttgtgcttccaagaagagaaaaggagaggccactaagcttcaccatccagctgaaaaataaaagccccatgatttagggcagaagatgcttcttcttctaattattgttgttgttatttgcagctaataataagtctcacctactcagaactttacagagcctctccttcggaaacgtcacatccactctgggcctcagtttccctcacctg

SEQ ID NO: 50676 - DNA, 615 bp, Homo sapiens
  misc_feature 19, 32: n = A,T,C or G
taccgggcccccccctcgngaatacttctagnattaattaacgcgggtcatttcacacaggaatgcttgtggtttctctagcaaggagcaacgcagtctacgtggaaatgcaaaaaacggaaaagcaaaaaaagcctttccagctggttggctgggaaagaagatctattgccttctaagatacgaaagggagtattttttaaaagtctctatcttgatgatgctgggacaggtcatgttacaaaagagcaacgtttttcaaaggaatagatacaacacatccagaaacaagtgaaaatggaacaagcagaggtgtgaggttcccaggataagaagaggcaaatgtataaagaaatgtaagggacagaataaataaatccagaggaaaatgggaaaagcaaagatgggtgaaaacagacatagaacacgcaggagcagaaggagaaagtgaaattatctcacggcaaaaacagcagaactgtgaggtgactaatcactaagtagtggaaaatgtccacaggcagtgtctctcaggttgctcaagaaagcaggtgtggccaatgcagagaagcctcggctgtaactctgtggaatcaaatccagactcaaccgctg

SEQ ID NO: 50677 - DNA, 478 bp, Homo sapiens
cgggcccccccctcgaaagtcttctagaattaattaacgcgggaggtattaggagaagagccccaaaagacaggctgtctatattttagaatatatttgtagctgaaatcttttttgaaacaaatactggtaattcatctgtttgatgaaattccttgcatattttaatggccaacgtgtaaagtttattgttataagacttttataggtcctttttacaaagctgcaatcacacttggttaacaacaatttcttcagtttcaattaaaaaaaaatcattatgggcttattacaaaagaaggacaatgtttcttgctagaataaattaatgaaattatcaacatgattatgcttttacattaaattttttttttttgccttcatccccccccgccgccccccatccccgactctctgctgccccttcctggcctctggtaaccacaattcttctacatcatgagacgcacttttgcag

SEQ ID NO: 50678 - DNA, 610 bp, Homo sapiens
cgggccccccctcggaagtcttctagaattaattaacgcggggttttccctcatctctaacttctctactgagtaaaggcacatgtttttagactccaaaatacatatactttattatttaaaaaaattttttgagatggagtcacactctgttgcccaggctggaatacagtggcacaatctcggctcactgcaacctccacctcccaggttcaagcgattctcctgcctcagcctcccaggcagctgggatcacaggcatacaccatcacacctggataatttttgtgtttttagtagagatgggatttcaccatgttgcacaggctggtcttgaacttctggcctcaggcgatccacccacctaggcctcccaaagtactgggattacaggcatgagccaccacacctagcccaaaacatatatattttaataaaacatatctcaaatatttcagttcacaggttagatataatgggaacaaaactgtctcaatttcaactgtaacatcaaatcatcacatgaactgagacttgctgaaagcccttgaggatggaagaaatggtaaattatattacagaatactctaatgctgggagtaaaaaaaaa

SEQ ID NO: 50679 - DNA, 471 bp, Homo sapiens
  misc_feature 27: n = A,T,C or G
cgggccccccctcggaagtcttctagnattaattaacgcgggaggacacctctggagatagttcagcaaaaacccaatatccagaaataaattgatttaggaggaatagtaaaagctcataacaggcagcaagggtgcagtaaggatttatgggttggaactgttatgggggaaaaatagaattgcttagctagaatgactttttgggaacacatataagaagattttattcatgactttagatctttcagaatatacttttatataaatgcaaaatatacaattcagtcaaaagcaggaaaagaattaccggtacctaaggatataaaaaaatctcaagatagggctgggcatggtggctcacacctgtaatctcagcactctgggaggcagaagagaggattgcttgaggccaggagttcgagaccagcctgggcaacagagcaaaaccttttctcaaaaaaaaaaaaa

SEQ ID NO: 50680 - DNA, 611 bp, Homo sapiens
cgggccccccctcggaagtcttctagaattaattaacgcgggagttatgacataggatattaaaaaaattcctcccacttagtgagccatacaaagcccaccacacatcagtagtgtccatcccatgtttaatcttcagaaggtgtgtgaggaataacatgtttgcttttgaaagatgccttgtagactgtgcgcagtggctcatgcctgtaatcccagcactttgggaggctgaggagagcggatcacctgaggtcaggagtttgaaaccagcctggtcaacatggtgaaaccccatctctattaaaaatacaaaacttagccaggcgttgtggcgggcacctgtaatcccagctactaaggaggctgaggtagaagaattgcttgaacctgggaggcagaggctgcagtgagctgagatcatgccactgcactccagcctgggcaacagagcaagactccatctcaaaaaaaaaaaaaaaagatgccttgtcttcaagcaaactattattaaggatgagttgcttatttgtattaaaaagagggctggaggatagcttgagcccaggagttcaaaacctgcctgggcaatatagtgagaccccattctc

SEQ ID NO: 50681 - DNA, 604 bp, Homo sapiens
  misc_feature 28: n = A,T,C or G
cgggcccccccctcggggtacttctagnattaattaacgcgggcctcattgagaatcacaggaacaactggctccaaatcatcttgtcttagactctaaatctttttaacaatggtggaagagggttgccaagaggaagactagaaaagagatgtgggaagaactaaaagaaagaacctgatttctacttatggtaatttgtattttctgaagccacacctccctgttgttcaatgaaatgctgagagcagtaaatgagaacaggttctttaacacaacaccacagtgccagaagctctttaacagtactctctgcttactgttgggctcaaagtcaaataaattagttgagaggcagcaataatctgatcagccagcacaaactctatctgagtggaatgctgtggtcatcaggtctaccttgctaccagcaattaaaaattaaccatggcattttcaaaagaagaacatagcaattcatatgcagcttcttttccacttgacatatgtctaaacagcatctgctttctcaagtcaagacagatacacgcaatgaacctcttgtgtgtgcaatgtgcaaagctaggtcattaacacacctgct

SEQ ID NO: 50682 - DNA, 598 bp, Homo sapiens
  misc_feature 30: n = A,T,C or G
accgggcccccccctcggagtacttctagnattaattaacgcgggctctgggccaagaagagaaggttaatggaaatttgcactgcagttactgtaatttaccatactgatgggaactctatattgatttttttttacctgtcttgggtaaaaatactattttagacaatctattattttggctgaatatattcaggttaataggagaaaattggaataacattaattcccacctgaaatataaattcagaaagaaatatattacagtgcttttcaaacagaaaatgtgaccctgcattgtttttagctctccgagaaggaatacacagctcacacacagtatgttaaaggttaaatattctacagcgtttgttagtacatgtaattaccaaatcccatccaaaaaattaatttttaaaaaccctaaaagattttgtttgggaattttgtcttagtccctgggaagactcagtaattacttgccttgtacctcagagcagatttttcaagcaaagaagtctagtaccaacataatggagacctatatggaagatttatgataaaataaacaaccttcaaggtcttttctgtttttgat

SEQ ID NO: 50683 - DNA, 598 bp, Homo sapiens
  misc_feature 24: n = A,T,C or G
gccccccctcggaagtcttctagnaattaattaacgcgggacaactaaaaactctgaacaaaataataatacctaacatgaacgtgaatactaataaatactagggtactctatgctgggtaatcaaatatgaagaatttactcacctggggaaataaaggccaaattaagacatcctctgattaaagaaatctaagagaattttttatcatgagacacactgcaaaaagtgctatgaagaaaattctccaggccagagacaaactgttagatggagaattatactctcaaaaggaaatgaagtagtaacaataatgatagtaactatctgtataaatataatacacctccttttctcatttaaattatttaaaatgggtccagcatggtggctcacgcctgtaatcctagtactttgggaggccgagggaggcagatcacaaggtcaggaaatcgagaccatccgggctaacatggtgaaaccctgtctctactaaaaatacaaagaattaacagggcatggtggcaggcacctgtcgtctcagctacttgggaggctgaggcaggagaatcgcttgaacctgggaggcagaggtta

SEQ ID NO: 50684 - DNA, 598 bp, Homo sapiens
  misc_feature 23: n = A,T,C or G
ccccccctcgaaagtcttctagnaattaattaacgcgggaggagaattaaaatacctgttcatacttgtcccttgatttgccacccgcttgtacgccattagctacagtcgttttttatcattctgcagattttaattgttttgattaacggcacatattcttcaaatgcagcacattaaaaaaactataaaatgatgaaaaaagaattctgcacaatcacctcaatatattatttatcagacctgtaaatcaaatattttacaccaagttgtctccaggtcattcagagctggaatttaaaaaagcaaaggtagtgataaatatatctaaattgactttacatttatcatatataaacatgatatatatggacaatatagaactgggccataatcccaaaaggcacaatcccaaacattgaaatctcaaaagatcaaaatcctgaaaatacggccaggcatggtagttcatgtccgtaatcccagcagtttgggaggctgaggtgggcagattgcttgagcccaggagttcaagtccatcctgaacaacataatgagaccttgtgtctacaaaaaaatcaaaaaaattagctgggca

SEQ ID NO: 50685 - DNA, 523 bp, Homo sapiens
tgggtaccggggccccccctcggagtacttctagaattaattaacgcgggggtgtgagaaggttggcttgagctttaaaattttgaaacttagggaggtttttggaatcaccaagccaatagcaccaatcacccaagccccaaaagtgctgaggtcctgtagggatcctcagccacactcattgtttccatggaaacaatagaactttctgatataaaatagaaggcaacctatagacatcacacttacaaaaatagagatctggttttcatctctgcttcttgggctagggccagcttttcctgttgtctcttttatggaatttgaaataaggagccgaagaaaaactcctaagtggggaaaaaagacttcattccctgagtccgaagaaggagtcagtgaacccatttcaaattagcaagttttgactagcatcttccctgcacgacattggagaccccacactgagcttgcttttaagtgagcccctgagttcttcttgttttccagtgtcggaacttct

SEQ ID NO: 50686 - DNA, 580 bp, Homo sapiens
acttctagaattaattaaaataaacccaaatcctattaagaactttttcaaagactgataaccatgactacaaaatgctttgttgtcacatttcttttcatgccataaattaaatagactcttctttgtctctaaaggctttttaaacatattatgtttcccaggaaaggctgcagttaaatgttggcattttgtccttatgttcctatagtttcctgttgtagcagtgtagaatgaagttatgccagaataatttccacataaatattgaataaagtggacttttcatggttcaaagagttttgtgccaatatgtttcttttcttaagcgttcaatgtaaatttatgaaattttaatattctctcataaacacctaagtgtagttgccattaaatacagattcacattcatgttagaactgctatttttttgtttcatatgatttgttctttattttttttttttgagaaggaggcttgctttgtcacccaggctggagtgcagtggcgccatctgggatcattgcaagctctgcctcccaggttcaagccattctcctgcctcagcctgccgagtagc

SEQ ID NO: 50687 - DNA, 609 bp, Homo sapiens
ccgggccccccctcggaagtcttctagaattaattaacgcggggtgaattcctccttcacatttgcttacaagtgctccttttttgagtgttgggagcacatctgtgtatgaaggacatcattcggacgctttccagggtggtgggaagcagcctcccttagcccggctacgtctcatgaatgtgcgtggaccccgcctggccttctgcccgacatgtactccaccccgccttctaccaggagccaaggctgtgaccattgtgatctgaacaagccgttgagagtgtgctctgttgtcagtgaattagttcagagagtccctcctcgtgttatagttctcatgaccactgcgcagtgttgctgtgctctgcctctgacgggtggctgccaggcattgaaaaaataacatcgtaagtccttactgctaacactgacttttaaaaacatttaattgtgtgccttttaaacttttgttctccgtacaacgtcttcccgatatttagattttaacttttaaaagacagttacaaattatttctaaagtataaagtctggttgttgttttttttttgatggagctgtgaggaggaaaaaaatgagatatagaat

SEQ ID NO: 50688 - DNA, 608 bp, Homo sapiens
  misc_feature 43: n = A,T,C or G
cgggccccccctcgaaagtcttctagaattaattaacgcgggngcgagtgaaaataaatcaaaataggtgagagtcagttatggaccatatttgatctgcgttcccacagaccaaataccatctctaccattgatggaaggaatgtgtgtcctagacaggtcccgctcatagcatgcaccacgggaccagggttctaacccattgtggcctctgcttgctgcatgacttataagccacctcaattcctttgtgaaaggaagcaagggtgaagccatacatggagagcatggcacttagaataggcccatgcatcccaagccctgttgggtggacactgctagctggataactctggatgcatgacaactcccttcccaaccccctgcactaagagacttaacgaaactccaccacagtttctatcaacataaggccctgtcccttggataacaccatcccctccctaatatgcctgcctaagaaggctcaaccttgccaaacaattttactatttgttctatccaacacatccctgagaggtccctgacttctctttcctgatatacttactaaacaagaactgtagattgtaaatatatagctcttg

SEQ ID NO: 50689 - DNA, 520 bp, Homo sapiens
  misc_feature 28: n = A,T,C or G
cgggcccccccctcggggtacttctagnattaattaacgcgggtccaacccctccttttcttttcttttttttcctataaatctaattctttctcttctgttcaacatttttcattactccaagcccccttcctttctttgtgagacattcttaagagtagattctagtctcctgtctactcacttctgcactgacaacatttggtctattttggaagtgaaattacttatagtaccttttggccttcagttcttgccttattacgggttagtccataagagctagaaattgaatgaaatgatgcaggcacaagacctttcctttaattttggaaggtctaaaacacattcatctccgtacttctttttttattaattcttttttaaaaatgtagtagaggctgggcatggtggcccacacctgtaatcccagccctttgggaggctgtggcaggcggatcacttgaggtcaggagaccagtctggctaacatggcaaaaccccatctctactaaaatac

SEQ ID NO: 50690 - DNA, 413 bp, Homo sapiens
ccgggccccccctcgggagtcttctagaattaattaacgcgggaaaatgctcaaactaaagaggtatatgtcctaatagtatttacaaacagctcccttttgggaatgtaattcttcctcggtcctgtattttgtatagttctgactctttgccctcatgattctgacatattgcaggactaggccctgggtttgtttcatcgtcactcttattttatgtcaattacattttaatgttattattgtatatttaaatgcatataaccatctgattatgccttattataaagtgttttgtcatcatcactctttttaaaataagtaccagaaacatacctttaataacacagggttttaaaaacagaaaatgagaaccagaagacaaagtgtattttgatagtacgcttagtttt

SEQ ID NO: 50691 - DNA, 508 bp, Homo sapiens
  misc_feature 26, 39: n = A,T,C or G
actggggtaccgggcccccccctcgngaatacttctagnattaattaacgcgggcacttgcatataaacaagggggagatggcatccttacaaatgcttgtcaacatttggtgactaatggctcacagtgaaaatacaatctgaagcaattgaattgaaagcagattctggagctaactaatatcacatgcaaaccatctaaagctattatggcaagaggcattgaaaccacagatcaggtttttctggggagtgggggatgaggataattttgttaggtagagcaatactattttttttattaaataaagtgaatccctgtaatgagatattacagctgctgtactttcaccacatgatggaggaatggataccccactcctacagcaaacagtaaccacatgctgcagtgattcaaaatgttgactttattcctaaataaatacatagcaaggactaatataaataggtctttaaaaaataggggtttaggggggatgtcctgagc

SEQ ID NO: 50692 - DNA, 609 bp, Homo sapiens
  misc_feature 540, 557: n = A,T,C or G
cgggccccccctcggaagtcttctagaattaattaacgcggggtggggagtgggaatatacttactgtgtttgattaacagcaaagtgagtgttactggagtcaataggatgggagggtaggtgagttcagagcagtagtgggtggccagactttgcctttttacctgctttcagatattaccgtttctttgatgtctccggggttgcctgaggccttattagtcgttggtctatggaaagcagttcaatgaatgttataatttgaattgattggaataattgagtgcttttctaaatgcttgttccatgagattttctagaataagatgtggttttaaatagtcgacttcagcttatactcaaatagtgtgtctctcaacagggcactattgttattttggtcaagataattttttgttatacaagattgtcccatgcattataagttatttaataacctggccatcacatattaactgccaagtcctagtgaaagctgaaaaaaatgccttatacatttctaaatattccctagattntatgctctggtggacantatcatcatccttgagaataaattcgttatgaacaactgatatatcctttca

SEQ ID NO: 50693 - DNA, 548 bp, Homo sapiens
  misc_feature 28: n = A,T,C or G
cgggccccccctcgggggtacttctagnaattaattaaaaggtatatgtaatacttatagaattgatgatctgtatgatcttttctgtgtgtaattttaatattccccaattggcctagctcagaagcatatgtgtgccaggaataaatatttaggtgaataagatatatgattaaaagtcaagattgaaaactagactttttgaaaataagattaccatttttttttttttctaaaaaggaaacttctttacagcatggatgttacagttgaatttttgggaggctattatatcagttatcatcttaatgctactagaagataatcatatacaataacttgtgataaggattttttatcgtctctttgagtcagacactaaattatagtattagaatccaagacatgctcttatgttttatgaatgtagtaatattgagaaactatttctaaatacagaatatttcaaattatgtaggaaaactcttaaaggattaaaattgcccaataatacgtctgatctgacatattctgggaaatagctagct

SEQ ID NO: 50694 - DNA, 452 bp, Homo sapiens
  misc_feature 23: n = A,T,C or G
ccccccctcggaagtcttctagnattaattaacgcggggggagagagaacataagacaagggatgttacgtgccaaaatcaaagaactttatatacaaacactctacaatgcttccatagtttttaggaccattaagttaagagaaattgaacttaaatcctgacacactctggatgaaggaagagcaacacttgctctatcatactactttccatacatttagaagtaaaccctatgaaagcacactagaaatcatcaaaatactcctggataattataagtaaaagaaacaagttgggtagagtggagaatttgaacattatgaacattagctttatacacacatacatccctaacccattttattattctttcttcttaaaatactctcaagaatcaaccaaagtagtatgaatttcatatttttctagagtgaccaaaaaaaaaaaaa

SEQ ID NO: 50695 - DNA, 607 bp, Homo sapiens
  misc_feature 568: n = A,T,C or G
gggccccccctcggagtacttctagaattaattaacgcggggggagataattactttgtataactacattcttaaggagctttttgttttagaaacatatacttaaaaaaagtttattgcactatcatcaaacaagaaaaaaatttcttataggtacagagtgagatgtatgcttgcttctgagtatgaacactcatcatcactgaacatcatagtgcatccacgagagccactttgaagagctataccatggagctggatgtgttgattgtgtatttctgtgacattatttatgaatgtacggaatggcctgaagttcacaacagatctggtatgaaaggaaaacgtgtgtatgtgtggggatgccaagtttctagaagaaaactggagtgaaggggcaacaactcctatttgtgtgtcttttaattttatcttttcaaacaaacatgccttttctagctttattaccagaaagaagaactaccagtcctcctcctctaccaccatatatcactgtccgtgagacagtaaacttgagtggtattaaatttaacaaaaaaattaaatntggaatatgtctaaactcagatattagaatgtcacatca

SEQ ID NO: 50696 - DNA, 607 bp, Homo sapiens
  misc_feature 28, 469: n = A,T,C or G
cgggcccccccctcggagtacttctagnattaattaacgcgggtaaaacatttctctggtccatggatttacttatttaaccaatatgtttacatagcagtaggtaatgtcaggttactcaatatgtggcccatcaacctgtgcccatctatgaactgtttttaccagtgggaaatgagaagagaacaggaagtaagtgtttagatatatttacaggactttgagagaataaatgtacatctattgactatcataaagagacatttggaggccaggtgcagtggctcactcctgtaattgcagcattttgggaggctgaggcaggcggagtcaggagttcaagactagcctgtccaacatggcgaaaccccgtctctactaaaaatataaaaattagccgagtgtggtggtgagtgcctgtaatcccagctactcgggagactgaggcaggagaatcgcttgaacctgngaggcagaggttgcagtgagccgagatcgcaccattgcattccagcctgggcaaaaagagtgaaattccacctcaaaaaaaaaaaaaaaagcggccgctttttttttttttttccttcaccaaatcgcactggctcct

SEQ ID NO: 50697 - DNA, 453 bp, Homo sapiens
cgggccccccctcgaaagtcttctagaattaattaacgcgggttcttcagtgatatggtttgaaaaaaataaaatatagaggagcatatcatatttttattatctaaatcatattaaaaatttcaagagtcattctactttacaaagttactttaaagtgttagacacatagtgggtgcttaatgaatgttaaaattttttgactaaatagatgaggcttattttgatcaaaattttggtataagttaggaatcatgcatgtggaaataagatcttagtgattaaacatttttaaccagatgaaagtctttgtaaatataactaatgtacctagatgaaaaatgaacaggttttgaatattgaattaatgggtttgagctgagaaaagaattataacacattccacatttgtataccacaccacttcccaactacctccaaaaaaaaaaaaaa

SEQ ID NO: 50698 - DNA, 553 bp, Homo sapiens
  misc_feature 501: n = A,T,C or G
ccgggcccccccgtcgaaatacttctagaattaattaacgcgggatggttattattttatgtccagttgttatctgatgttacatgtttcttaaaatcttaggtagtcctgtactctcaaaggacagggaacttactgtatcctcaggcaggcccacatttacttctttggaaatttttcctcatgctcctttcctgccttattatacatttcttcccagaggtttttactgtgctctcactggtcactcttaaacctacatccctctgtgaacatttaactgttagaagtcagtggctgtattcctcttagatcctctctgttgcctaaggccctgctgttatgccatctcatcattccagttaatttcctacagacaccttccagttaggatcataataactaacatgtgtataaagcaatggaatttgcaaaatgctttcacttacattgtctttttaaatacccttttatccctattttgcaaaaaagaacactgangatcacaaaggcgaatccaatttctgtttggttatatagctaataagctgat

SEQ ID NO: 50699 - DNA, 595 bp, Homo sapiens
ccccccttcggaagtcttctagaattaattaacgcgggggaggcgggcgggagaatacgggagatggaggttgcagtgagccaagatcacatcactgcactctagctggggtgatggagcaagactctgtctcaaaaataaaaataaataaataaataaataaagatatatatatgatgaaaaataaatttatagtttgttagtaagcatgcccttatgcctacaatgtagttagaataaaaaattaaattaaaattatgattataaatatcataccagtttatttccttttttatgctttcaaattttactaagatttaataataccactgtcttttttcttatttatagtccattatctatgcctataaagtattacaaaatactctcaaatatagaaaaccaatacaagttactggccgggtgcagtggctcacgcctgtaatcccagcactttgggaggccgaggcgggcggaccatgaggtcaggagatcgagaccatcctggccaacacagtgaaaccctgtctctactaaaaaatacaaaaaaaaattagccgggcgggatggcaggcgcctgcagtcccagctactc

SEQ ID NO: 50700 - DNA, 602 bp, Homo sapiens
cgggccccccctcggggtacttctagaattaattaacgcgggagactatatttttaatgaatttaaaggtattatgttttctctcttttacccatgtcaatcattgatgtatttcccaaattgctattctcctcaactgttagataaatatccctaccttttaaagctgtatataacagctggaaattctccccaggtaagatctgactaaaatgagcttaagacaaaagaagcatattggaattttgtttcccatatgcctcactgttatgaacaactaggagaattgatttaatgagaagaaaaaaacttaggcaaattaaacatagtgaatatcaatctagtaaaaataagacaggcaaatcgataatgacagtagttaaggcagtcagctacgtttaatggctaatttaggaccaagtcaaattgtagaggagactaatgaaccataatgcaaatcatacaatacagtgaaagttgcaaaacatgtgcaattagcacacatgttggggacatcagtctgagattcctaaatataatatgaagctgttgtcaagagaagattggaaactggacttgaatgcccaggtatgcagctaaat

SEQ ID NO: 50701 - DNA, 614 bp, Homo sapiens
cccccctcgaaatacttctagaattaattaacgcggggtcttaatttcttcttcatttttgaggagggagaggaagtcccaggtagcagaggcttctacagtgatgatgggaaagtgaagagaagagggaagggaaaacctaatgtgatatcttgactgacaaatactggatggaaagttgtatgttgggtactgattgcattggtaaagggcttcaaagcagaaagtcttggcttggaatcctacaacattggtgggagaggggtgaatgaatatggctaagggacagttttaagaaataaagttgatagtgtttgtcagaattgatatggagagagctgctatatcacattcatggggcatcagatattaaaacctttggcttccctaaagttgtaacacataacatacatgttttacctgtaagatgtaccatttctttgcccgtaagaaaaattgtgcacagatcttccatttttactttacattcttttaaaaagctcttatttttaattgtggttaaaaaaatttaccatcttaactgtttttcagtgcacagttcagtagcgttaaatgtattcagattgttgtacagcagatctgcaggatttttt

SEQ ID NO: 50702 - DNA, 521 bp, Homo sapiens
cgggcccccccctcggaagtcttctagaattaattaacgcgggggcaccctaacaacaattacaataatttaaatgtaaatataaatacatataaagggaaatcgaagagatatatatgaagtaaatggtgttgtagtagcaattctgtgattctgtagttgcaagtacctatttctagtcctaacagtttgaatattttatatagtttatttcacacacactgtctgtatacatatgtatacacatatacatacatctatatattcatgaagatgatgatgacactttgtacaagttcatacattaaatacattgcatgaatgtggtgtaaacaatatgaaaacgtactctactttgcatttatttgaaatataaattttaaaactgacatagtgtcacaagaattagaaaaaaatgtactcttatgactaactgcatttcaagacggtgtggctataaaccctaattgagaatgcagattgatttccacctctctgctgaacatagaggagttcctgat

SEQ ID NO: 50703 - DNA, 508 bp, Homo sapiens
  misc_feature 21: n = A,T,C or G
ccccccctacagagatacttntagtaattaattaacgcgggtgcacaagaaagttgaattttatagtgaacactcatatactctaaccacctagattctacaattaatattttgctttagcatatcttcctatccattactacttttaaatcctgcttgtagacagacattgttactatgatatgaagaatgccatctttgttccccaacaccatgataaagaggatttatttctacatagtgtttgttttctatattatttgaacatatgtatatacatgccgtttcagtatcctcagagtgaagttaggatcagattccatcattccaggttttggttagcaacttacctgagtgcattgtaaatcagtgcattagccccacatctgttaaatgacttgagtttgctgaatctggtgtctcagaagaaactctaaagtggttagatggatattgatgttgatgttggttttgttaggtgtaatttatgtgaaactcctaaattcct

SEQ ID NO: 50704 - DNA, 551 bp, Homo sapiens
  misc_feature 23, 538: n = A,T,C or G
ccccccctcggagtacttctagnattaattaacgcggggcttgacactttataatggaaattggaaatcaaatgtgctctcaaaatttcaactggaaaaagagcattggcttagaatctagcataattggattcttagctcagtagatacttataatcctacttgatcaagagttctgtgaaaacacagaccttgttacattcagatttcagtttcaataatgctcatctacgatgttcttagcacacaattattacaatgtgtgatacctatagtaaaaaaaacttcatctcttggcctaataagttaacacttctaaaaagttgttttccttcttatttttaaagaaaatttaaaaataaatattaatgcatacatacacgagggagacatagtattacaccatgttgcacaaacctggcattaaagaaaatttttcaagtttgcaattcttggcacagataatttttgttttcttttcaatagagagcatatgcctatttctggatatgcagcatccatttctaatatcacccanattacctgtttag

SEQ ID NO: 50705 - DNA, 466 bp, Homo sapiens
  misc_feature 15: n = A,T,C or G
cgggccccccctcgnaggtacttctagaattaattaacgcgggaggcggaggttgcagtgagctgagatcatgctattgtattccagcctgggtgacaagggcaaaactctgtttgaaaaaacaaaacaaacaaacaaaaaagaaaaacaacaacaataatactacattactctatatgtgtggttcataagatgtttagctcacattttcaaatcatctttattttttaaattaaataattttttatcgaaataaacatgtcagaattaaaaatctaccctcaagcataccattatgcttatatatactacctttcagttttgaactactttcagttatcaatatatttaattttatggctagtaactaaactagcctgagcaattttatgtaattcttcataatcaagtgtaaacataagccctcattttttatctttctaatgctaaaataaatttctaggta

SEQ ID NO: 50706 - DNA, 608 bp, Homo sapiens
cgggccccccctcggaagtcttctagaattaattaacgcggggcccgagctagattgcagtggcatgatcacagctcactgcggcctccaaacatctgggatcaatcagtcctcttgactcagcttcctaagtagctgggactacaggcacacacccaccaccatgtctggctttttcattgtgcattcattactcgctgtttttaaaacttgttgcacatacagttggttctacttattgttatctattgcttaatttaatgtgattctattgacagagcagccatctttgatccagaggtttacattacatgactgcatgtaaattcaatttcccccaactttccttcatttggtacaatacagaatttgttcatatagcaaaccatgatttcttatgaaagaaaataaaatggaaatcacatacaaatttgggtactaaaatttcatgacagagcttggtgctcaatcagatgatctaaaacacaattaattacaatattagggttatcactggaatgaaaacataaaattaattgaaattctgatacagaatttctggtataaatagcataactgctgtatgaatagtatatattgcaatagta

SEQ ID NO: 50707 - DNA, 497 bp, Homo sapiens
  misc_feature 448: n = A,T,C or G
ccgggccccccctcggaatacttctagaattaattaacgcggggggggggtacctttaaaaatccagaaggattccaattcagatagctaagcaactattccacttaaagggacagaccatgaaaattatgtataattaactaaggatgtggtttatactaggatcatgaggaaagttaagttaatggacccgatatacgcaaggaaaagccctgacctttcatcaaaaagttggcaaataagctgggtgcggtggctcaagcctgtaatcccaacactttgggagaggccaagcgggcggatcatttgagctcaggagtttgagaccagactgagcaacacagtgaaaccccatctctaccaaaaatacaaaaaattagctgggcatggtggtgtgcacctgtggtcccagcttactggctgaggcaggaggatcatctaaccctgngaggtagaggctgcagtgagctgagatcatgccactgtactccagccta

SEQ ID NO: 50708 - DNA, 436 bp, Homo sapiens
gggtccccccctcggaagtcttctagaattaattaacgcgggcatgttttatttacgttattgaaaacataaagcaatttttagagagatgcatatatacaaacaaataggtgataatattttaaaagctgcccgacatttatttttattcactagattcttatgttattaattgggggatatctttataccttaagtaagactaattacttaaggcatatgcatttaaagtaatttaatgcatcagaaatattatttttctctacttaacaatatggaagtatttagatttccactgaataaaaaaatttcttgggtgatatagccatacatttttatccctatgtctgtgcacttaaatgtgtggcaaaataacagggtgagtatgataagtagatatggagatggggggaggggcgcgggactgggggggggt

SEQ ID NO: 50709 - DNA, 255 bp, Homo sapiens
acttctagcattaattaacgcggggatgtcctcatttcatttggaaaatccccatggactgattgacaccctcacagcaaaatcaaagcaaaaatggattcgctgggcaaaacagtatacaagctttggactaatagagttatgctaattctctaagatgtattgttgtatcttgttttttttttttttattttttcttttgtttttttttttctttttttcttttttttttttttttttttttttttttttttt

SEQ ID NO: 50710 - DNA, 599 bp, Homo sapiens
  misc_feature 18, 31: n = A,T,C or G
accgggcccccccctcgngaatacttctagnattaattaacgcgggtagtatgcattgtaattgaattccacaacccacatgttatcattctccttaggttgcaaactctttcagggagacagtcttaaagctatattatttattagttgtttcatttattcagcaaatatttaacattaatagtgcaataaacaccaagctaaacattactgatgactgaatgtgacacattctccatcaggcctatccctagcatttgaggcattcaaaacaagcgtacaaatggaggcccacaaactgtatgtgtaagtatttaaagttatacatcagactaatggaaataaggattatccccttatcttgaaaaatattccctccaaagaattcaggaagccaggattccacataatacccagactttcttatcagaatttaatggccaatgcagaccacctgaatcctagccaccattccatcctgcaactcatggagtcatttccacattcctacaaagacccttactctaaatatctcttggtcctcggagtgtgtacactgaggtattctgaccccaagcagacaaacctagggaagagat

SEQ ID NO: 50711 - DNA, 607 bp, Homo sapiens
  misc_feature 549, 574: n = A,T,C or G
ccgggccccccctcggaagtcttctagaattaattaacgcggggtggtagcaggcgcctgtaatcccagcactcaaagggctgaggcaggagaatcgcttgaacccaggaggcggaggttgcagtgagccgagatcaggccattgcactctagcctgggggacagagcaagactgtgtctcaaaaaaaacaaaaaaaattgacatgtaaaaatacttattcgctaactcattttaaaatgagctgagatgtgccactgcagtccagcctgagtgacacagtgaaactccatctcaagaaaaaaaaagaatacgaaaattgccaggcgtggtggtgcacgtctgtagtcctagctactcaggaggctgaataaatcagtgacatgttaatataaatatttttatgaaaataaaaaaaactgtcccaaaagaaaaaaaattagaagactgaatttttagttttccatatctctttgaatgtagaagcaaatatgaaaatccagcttctgtctttttatttttttgagatggagtcttgcactctagcctgngggacagagcaagactgtgtctcanaaaaacaaaaaaaattgacatgtaaaaatactt

SEQ ID NO: 50712 - DNA, 594 bp, Homo sapiens
  misc_feature 27: n = A,T,C or G
cgggccccccctcggaagtcttctagnattaattaacgccgggatataatgttcctatgcaaataaatttcaatcacttggcataatgtcctaattgtcttagaaagaagaaataaaacaaggctatttacttaaccaggaaggtcctgcatcacagactgctcccttccctatgaatatctgggcgtgggtaggacaggtctcgccctctgaggctcccaaacccactacatctgccctaaactcacctctccaggggataagcagagctcagaggattgtgtgtgtttccaatatttctctgcttaaaagtttctttcgggccaggtgcagtggctcacgcctataatcccagcactttcggaggcggagatgggcagatcacttgatgtcaggagtttgagacgactttggccaatatagtgaaaccctgtctctactaaaaatacaaaaattagctgggtgtggtggctcacgcctgtagtcccaactacttgggaggctgaggcaggagaatcgcttgaacccgggaggtggaggtttcagtgagccaaggttgtgccactgtactccagcctgggcaacaaaagcgag

SEQ ID NO: 50713 - DNA, 603 bp, Homo sapiens
  misc_feature 28: n = A,T,C or G
cgggcccccccctcgaaagtcttctagnattaattaacgcggggaagggtgagagaggggtaacagataaaagattacaaatagcattgagtgtatactacctgggttatgggtgtaccaaaacttcacaaattaccagtaaataacttactcatgtaactaaataccacttgtaccccaataacctgtgggataaaaaagagattgctccagtgagatgcaaataaatacctataataatggttcccctttacagactttttgaaggctgtactttgatgacagtggttctcaaacctacagaaacaaagaataattttctgtaatcctggtgaacgtgttatcaatcaggatcttacaggccacagaggacactcaaattgggacaatgtgaggaggttttatttagagagagagaattgtgggcaagaggtaggggtaccatgaactttggtgtaaaagccaggcagagtgttcccacagccaagactcaaaagacaagactatggagagggctcagaaagaaagtcacagagtcccagagacagtttcttttagaagagcaaaggttttgttgaggacttagccaggacaaggaaccct

SEQ ID NO: 50714 - DNA, 545 bp, Homo sapiens
  misc_feature 15, 39: n = A,T,C or G
aagctgggtaccggngccccccctcggagtacttctagnaattaattaacgcgggtagctaaagaatagtaaatttttccactacattagtcatctgggactcctctctgtggtcagtacctgcatggaaaaaggattaaaaaagcattttcactgataacagtccttcaaatatattattttttcaaagatcatcaaaccacaaagatagttccagtcagacatccagatgtttactctgagtcacagagtagctatcaaacactgtggtaagggattccctaagtaggtaaccgagttttctgtagacagcaaaggctcttagacatggatttgagtaatcaagttttatttagtttgctgactttcaagtttcattccatggcttttttgactactctgtataaaatttggagctatgttttataataaatacaatgcagaatagagcagagttcccacaatgaggtagtgcatagatgcatcatatgtgcttaagaaactataaaaatagctaaacacctatacacatggtaatgagcact

SEQ ID NO: 50715 - DNA, 130 bp, Homo sapiens
aataataacgcgggggtgtgttgattttggaccttggttaaagcaggtgatggcctgaaatgaatactgtgtaccttgccatgcctggattgggcactagtggctgcctgagagaacaggcgtattcaaa

SEQ ID NO: 50716 - DNA, 324 bp, Homo sapiens
  misc_feature 29: n = A,T,C or G
cggggccccccctgcggggtacttctagnattaattaacgcgggggaagtatttttaatacagttttaattttgttctaaagacaaagacaagaagcctctcagactatgaataaatggaatcatcttttaacttttagtagaattgatgagtttagtaaaatccccaaattgctttgtctctatgagagtgacgttgtatatatatcacattggtaatcccagcacttcggaaggctgaagctggaggatcacttgagcctaggagtttgacacaagcctgggcaacatagtgataccctgtctctcaaaaaaaaaaaaaaaa

SEQ ID NO: 50717 - DNA, 576 bp, Homo sapiens
  misc_feature 28: n = A,T,C or G
ccgggccccccctcgggagtcttctagnattaattaacgcgggggcatacatgttatgtggtagtactattgaagctgtacattttggccataaataagtgaaagacatgagagatcacgagaagaatgagtccagaaagccttagcagataaggtatgtggtaattaatagcttagagttcagagacaaacttagaggtgaaccaagcaatacccaagagataaaggttgctgagactaaagggagaaaaagggaggggaaaggagtgatagcagagaatgtgggatcaaaaagtgaatgaataaaaattaatatccaataaaatatgactgggataaagttagtcatagtcatattatttttcctgctgtattattctgggtactcaagtcattaagcttgtgaaatatgaccctggaataattcaattattactataataatgtaaatttatattccagatttcttttttaaagattatataattataagaaatgtacatgtgttctttatgccttgagacctttttctcatttgagcttcttctattatgttgacctcttaaaaacacaatc

SEQ ID NO: 50718 - DNA, 580 bp, Homo sapiens
taccgggcccccccttcggaatacttctagaattaattaacgcgggtggggaaaacattcattgcttctttctcatgattaaagaactgaaattaacagaaatttccacaaaggcaagattccacaggtaaaaggattccgcagctattaggatataaaagctttgtttgtctgtctgggcaatcagtactgactggtgaaaatcatgtccaactgacaaatcattaataaccagaatatgtaaagaattcaaacaacacagcagcaaaacaaaaaatcattgcaaaatggggaaaagatctgaatagacatttcccaaaagaaaacatagaaatggacaacaggcatatgctcaacatcactaattattagtaaaataaaaatcacaaccacaaacagctatcatctcaccccaattaaaatggctactataagaaagacaagaaataacaaatgctgataaagatgtggagaaaggggattgctcatacactgttggtgggagtgtaaagtagtatagtccttatggaaaagggtatggaggtttctcaaaaactaaaaagagaactaccatataatc

SEQ ID NO: 50719 - DNA, 602 bp, Homo sapiens
  misc_feature 23, 533: n = A,T,C or G
ccccccctcggaagtcttctagnattaattaacgcgggacttcatctttttatctatcagacacatagccagttctgaaagacgtaaatgaataaaacattccaggttttgtgtaactcacaacctagcgaaagaagtaaatctgtaaacacataattacagaatgctatgattgctgttagcacagtgaaagttatagagaatattctctgagaaagggtaaagggtaatatgtaaactaaatcgtaataactattaggagaccatccgtggagaaaattataaaaagaaaattcattcaagaagaaaagtttgtacaaataaatgaacatcaaagaaaaacaacctattaatgtaaaagttgaaaactcaacttgctgctttttatttagtgagaatttttaattagtagaaaatttgaggctagaactattctaatgactgtatactgtacacaccaaagtgatacagattttaagattgtaatggttggccaggcccggtggctcacgcctgtaatcccaacaatttgngaggccgaggctggtggatcacgaggtcaggagatcgagaccatcctggctaacacggtgaaaccccgt

SEQ ID NO: 50720 - DNA, 582 bp, Homo sapiens
  misc_feature 536, 546: n = A,T,C or G
gggcccccccttcggggtacttctagaattaattaacccgtcatttttgctctattgtgtaactgttagcagttatgaaccagatgttaaagagcatcaatattttaaagggttgtagtaccagtgaaaatcatttctaactctcttgtttagggataaaaaacaacactcattcaatcaacaaactacagttggtatacatagtttattttggatgtctgaaggaaatctccacctatttattattaaactatattatcaacttatttatactttaccacttttatggtagattatatcctaccataaatatatcaacacatggtagaaagatagagttatgtagtataggagaaaaagtaaaatcattttcttacttaatagaagataaaagttcatcagaaaaagatggaacccttcaggaaaacttcaaaaagtacattttaattttcctttgtcctcctgtggaatttttaactccaggatttgaagctcctcttgaactattgccattgcatgtccttcatcttaactcntccaacactngttatacaattaatccaaattgtatttccttcatga

SEQ ID NO: 50721 - DNA, 557 bp, Homo sapiens
gggccccccctcggagtacttctagaattaattaacgcgggggtgatgaacgtgaaggagaggacagcagaatatagctaaaccaaattcaatgcttttaaagaacaattacttctaacagaaccaataatctgaacctataacgtaagataacaaaggtctatagatattacacacagggaaatggaatttcctatattcctttcaaaagacaatgtggtctagcattttctgtgtcagctcaaaaaagtgggagagtccactattataagaaacaaaataaaatcatcagatgttgggtatattcaactatgaaattcacagatcaaatgattcgtgtttttttttttttttctctccttgcaattcatcttcatcctggatagctccttggtaattcttttaaaggaaaaaatctcggtatcaacaacatatctagaaaaacagcaactctcagtcactaatttatagaaggaatcagtaaaataatgtctgtgccagtacagctagaaatttaaggacatatttgtttcagtagcttaataaaaatgttattg

SEQ ID NO: 50722 - DNA, 469 bp, Homo sapiens
  misc_feature 31: n = A,T,C or G
accgggcccccccctcgggggtacttctagnaattaattaacgcgggtacatgactattaaaacataacttctatgatttactaaagttttattagacttatattcttgtaacatgcccaaaatataattatggcatgaagaacaatccttggaagcaattccaaataattgcatgacaatataaatatgagactaattatcaatgatcacatccaaacagaggtcataaaagatttttaaccgaggtatatcattgaacaccaaaaaaaaaagtacagtggtagattttatgatatgtgtatctgctcagttggagagaaaatgcaattaactcttttttcataggccagtgtattattcccatgatcattacttagctaagctacttaaggataactgtcctttagagaaaggactctggttctcattaactagatttctgacccatagaggagttttagcatttat

SEQ ID NO: 50723 - DNA, 528 bp, Homo sapiens
  misc_feature 420: n = A,T,C or G
ccccccctcggaatacttctagaattaattaacgcgggcatcaatctgacaaggtcagtagagatcataaaacctggatagttttgtagcctctaaactttgtaaaaaaatcaggtaatatcatataagccatgcaaaacctctcacccagtagcaaatctgaaatgctatctccctgatctaaagccatgactcagaggtaaaaaccaagagaacattgattaacagttgtggtttccagtcccttattaaaatacatgctttaagaatcaaccaaaagaatgtgagcaatcattaacaaggacatgaatggatttttgcttcaaccctgtacagtttaaaaacaaaaccaaaaaagtttcccttttgcataaccacttgctttcctagtcaagaatcatttgattatgatgaatgganagaggaacccactagaaagatgcagtgggacattggtacccaatcccaggaagataagtgacctcttaagaatccgagatcggccgggcgcagtggctcacacctgta

SEQ ID NO: 50724 - DNA, 487 bp, Homo sapiens
cttctagaatttaattaacgccgggcattaggtctcaaagttactatttattttgttttcaaagaatagaaaaaatattatatggcagagtgtgaattatactgtataacttaaaattttaccataaacaatatactggtaaaggtaaaataggtgaagaattgtatccatctattgttgatgtttttaaaacaatattttcatgagagaaactagagaaatattgagattctatttcaggctaaaaggctgtttaatattcaacagccactttatgaagcggccttccatcaggaaagcagaaaacatttggagttggttacatttcacccctaatggacctggatgccacacattcttgatttagcccttggcagagttccggaagaatgatttaggccagtttcacttcaaatgaaattctgcccctgcgtaacccaactgttcagtgaagtttaaagaacaggcttccaaaaaaaaaaaaaaa

SEQ ID NO: 50725 - DNA, 453 bp, Homo sapiens
  misc_feature 31: n = A,T,C or G
accgggcccccccctcgagaatacttctagnattaattaacgcgggctggtccttttaaatattatgcccatgtttcttgaaagttccattgataattataggaatttcatttgtaaaactggcactaaagagctctataaaaagtaatagtgcaggctaggcgcggtggctcacgcctgtaatccaagcactttgggaggccaaggcgggtggatcacctgaggtcaggagttcaagaccagcctgaccaatatggtgaaaccccatctctactaaaaacacaaaaattagccaggtgtggtggtgtgtgcttgttgtcccagctacttgggaggctgagacaggagaactgcttgaacctgggaggcggaggttgcagtcagctgagatcttgcctctatactccaggctgggcgacagagcgagactctatctcaaaaaaaaaaaaaaaa

SEQ ID NO: 50726 - DNA, 605 bp, Homo sapiens
  misc_feature 28, 548: n = A,T,C or G
cgggcccccccctcggaagtcttctagnattaattaacgcggggccataaaatactatcgtacttaagctgtcagtaaaaaaactcaatgttttccatcaggtgttagtcatcttcttttagtagcacatttaacatgacaactaagccaccttggaaatctgttataatgctgactttgggatctatcctagcccaggaataatatacatggttcattttgtaagccaatcccaacttgctggagtggccacctgtaagaccgtattataaagtatgtctctaagctcagtgccacagcttgaccattaattagcaatgcccactaagggcgcaggagagagaactgcagtatgcatgcacgcctgttcataggtgaggaagagatgcgggcagatgaatggcctccaagatggtggccgactagacttctggttgtgtgtatttagggagcagctactattatacttgacgagctttcctggggttgttatgaccataaacaacaacaaaaacctccaattcatttatatcaggagagaaacaganaaatggatacaacgaagactgttttttttccttctgatagaaaaactgccccctaat

SEQ ID NO: 50727 - DNA, 348 bp, Homo sapiens
  misc_feature 18: n = A,T,C or G
ccccctacaagagtactntctataattaattaacgcggggccctccctgtttgttagctgtgcttcaagttctttgctgccaataatagctgagtactaaagcttgctaatggggtgttagagaggattcaagaatatcaccaagagaaagctcatctcattctcataaatcctgatatgatttctaaatgggaaaaaaaggaataaatggagttataggccccccatcatgaatcctataggactaagagccagtgctgaggaactttaaaaatatcaatatatagctcccacatccagagacctgaattaattggtctggtgtacagcctgcaaaaaaaaaaaaaa

SEQ ID NO: 50728 - DNA, 556 bp, Homo sapiens
ctgggtaccgggcccccccctcggaatacttctagaattaattaacgcggggaaattctttttgtatgaacagattaataaataattattatgaatgtactacatgatcaagtaaaaataatctttttataaaaaggaatgtatagacaaatgctaatttaataaataataacataagataatagcaaaatgcatccaagggttgtacagacaaaattcactaaactattcagaaaagtaagtagatgaaatctgttataatttttacttacagttactgatggggattgggactttatttggatcttcacataagcctacaatttgcatagtcagaaaagaattacataatgtctaggaggaaagtaagacaatgttatgaagcagagatggcttcaaggatggtacgaagctgtgattttggtgggagtgtaagctgaatgataccttcagtttatgcttgctggtaatgagaggcttgattccatagaacagaagttgtggaagactactaggtcagaattagaagtttggagttggatacaactcctcattt

SEQ ID NO: 50729 - DNA, 605 bp, Homo sapiens
  misc_feature 45, 563: n = A,T,C or G
ccgggccccccctcggaatacttctagaattaattaacgcggggnaaaaaagaggaagaggaatagaggagagaggttggaggcatttttccttttactttaagaggagttagattagaataacaaatagaatttcctggttggtcattttgcctccactggaatgtctatttctttatacggtactggtttttcaaaggtaaagcagtcttgaatacagttaggttaaagtataaaattaaagaatttatattttgtaataattttgggaaagaattttaggacatagaatattccacatagtttgagttttgtatcagtttaacctttggacataagtttgtatttacagaaattactgttcaaaagtaagctttattcaaccaggataattaattactagtatatttactattaataaataacttatttaaaaaaataattctgggcacatgttctcaagacctcctgaggctgggtctccaaataaaaaacaaaaaaacccactattctttggattccttcaaacagtgaatctttagaatgtagacttcagatatttntaataattctctttggaatttgattcattcttataaaaattc

SEQ ID NO: 50730 - DNA, 507 bp, Homo sapiens
  misc_feature 25: n = A,T,C or G
ggccccccctcggggtacttctagnattaattaacgcggggtaattctggtcttgcctgggctcactcacacaactgcatccaacctgtgcattggctcagagctcagctcagccaggaagattgagatggctgggtctttctatgtaggcttttattatcaaagagataagacttgtcttcctcataaagtaataccagctttgaagacagtgaaggcaaaagctacagcacctcttgagatctcagatgatttgtcataaatatcacttctgctgtctagtggtcaaagcaagtagcaaaagcagccagactcaaggatatagagaaaaaaaaaaaaaagctcacctcttgatgacagaaggcagttgtcacatcattgcaaagtggtaagcatactaggaagaaagattctgaaaccatttttgcaatctatcatagtccagtctctgatcaaaattcatattcctctcatccacaaaatatcctcattcccatatgaggacct

SEQ ID NO: 50731 - DNA, 568 bp, Homo sapiens
ccgggccccccctcggaagtcttctagaattaattaacgcggggatgcactgcctgaggtcatacagattattagagtgagaataacctagacaccaaataccccactcaaaatgtggcacctcatataattactcgttcgcttactcattccttctaggcacatcttccccaagctcaaaagtcaaaaactcagaacttgctactcttactcatgaaagtttctgtgtctgctaaatagcatcactgaggacaagaatacaagttgtaaggtcagtctacccacatttaaatcctaactccatcacttattcactgcgcatcttcagactagttactcaaccttcttaagtttccatgtccttatctttaaagcagagatcacagtaagggctgcggtgaaaaccaatgaatacagtaacaaatgttagctattatcattactctgctcatggcaaacctataacaaaagcagaaaacatgacaatgagactgttattccaaagcctctcctccaacatccagaagagatctgttgccaattatcttctgctactgctatccatggc

SEQ ID NO: 50732 - DNA, 309 bp, Homo sapiens
cgggctcccccctcgggagtcttctagaattaattaacgcgggtcattccttgtcatagtgaaggaggaaagaaagcaagcaaacaactaaaagctaaaaagttcaaagtcaaataatatctgaaagaaaagaggctgattatagatggtgactctatagcaagaccagagtcataggacccctcctgcattcagacacaggcacaacctccttcattagatgtaagtctgcaggaaaaacacaaaaaacaaagactgtcaaaggttaatcttcctaccacatatattcaatttccagaactttatctc

SEQ ID NO: 50733 - DNA, 499 bp, Homo sapiens
  misc_feature 248: n = A,T,C or G
ccgggccccccctcgaaagtcttctagaattaattaacgcggggcttggcacataatcgctgtttaaaaatggtggcaatgatttccttaaccctccagagctgcttcccatacctcctcactccatcatgtgtcattacagcccctcccttggcagtaattctgagtgggtggcttccttctcagagtcctgttgggacttcactctgtggtacaaaacaccctcaagaattgcttcaagacttctntccagattgcttcaagatacttcgcaatctggtcaggtactgcggctcacgcctgtaatcccagcaatttgggaggctgaggtgggaggactgcttgaggccaggagtttgagatgagcgtgggcaacatagtgagactccgcctctacaaaaaaaataaaagattagccgggtgtgggtggtgtacatcctgtagtcccagctatcaggaggttgaggtgggaggattgcttgaacctgggaggtcactg

SEQ ID NO: 50734 - DNA, 472 bp, Homo sapiens
  misc_feature 29: n = A,T,C or G
ccgggccccccctcgggggtacttctagnaattaattaacgcgggcatacagttacaaaaatcaaaggttgatttgttcatgtaaagagctatgaagctagggcctagaaaacaaatcccaattattaacatatgttctaacatctagctaggttattttttagattcgattgttcttttattttagagaagtcacacatttatataaatgcagcaggaattttatatagcacaaattccttctttttttctttcttttctttctttttttttttttttttgagacagagttttgccctgttgcccaggctggagtgcagtggtgcaatctctgctcactgcaacctctgcctcctgggttcaaaagattctctcgcctcagcctcctgagtagctgggattacaggtgcccaccaccacacccggctgatgtttgtatggtcaggatagactggccaggctggtctgaaac

SEQ ID NO: 50735 - DNA, 603 bp, Homo sapiens
  misc_feature 553: n = A,T,C or G
cgggtccccccctcggaagtcttctagaattaattaacgcgggggctgagatcatgccactgcacgatgcctggggtgacagagtgaaactcttgtctcaaaaataaaaataaaaaaacagactaccaagagccataatgtctagttatgaggcagtatgagtccaaaaaacctgattttctggggacacacagggtctgaatttaaacctggctctaccactgcctgtgtgtgacttctcaggaagcactctgtgtctttatctgcaaaaagggagcaattggtaagagcttgtagtccaagtgcttcttatatgcacattaaggcttaatggtcattcatagtcattatttgtatctctattctctggaggaaactcttaattcaagggcattaacgctgaattccttctgttaccatagtctagattatcttttggttaggtcttgggattcctcttgtggtgttttgtttttcagtcagatgagttgggtgccctggttccttcttcacccaggctgacaactttctgtgtatatggaagtcagggtangtgctgccagaatatcttggcgtgggcttccacctctgcaggatcatgtg

SEQ ID NO: 50736 - DNA, 580 bp, Homo sapiens
  misc_feature 24, 50: n = A,T,C or G
gccccccctcgaaagtcttctagnattaattaacgcggggatcttctcanagaattaaatttattttattaatttaagagaattaaatttgagaatttaaacagaattaaaacataaaaatcagttatattggtctcataccatttatgttaaggttttttattttccctttagagagaaaatatacatgtttttagacagcaacttagtggagttttgtggggtttttttaaagaggctctttactgatatggtttcataacatttgtccatatattcatggtaccaaatacagcaaagtacccagtttccctccatagattatactctccatcagaaaaaaagcaagatgccaaagagataatcatggacagtgagactgagcctatttataacagctctgcctccagcatgcctgatggcgagagggcagcagccagagctgtcggcagcagccacaggcagagcactgcccctccttcacctgcaccagaaatgcagcagcaggtggtgaaagatgtctctcacttgacttacttgtttccctaattatcctttgacaacacatctcctccttcag

SEQ ID NO: 50737 - DNA, 589 bp, Homo sapiens
  misc_feature 28, 113: n = A,T,C or G
cgggcccccccctcggggtacttctagnattaattaacgcgggaacctggaaattttagcttaggacttcagtgccatctgggttggtaacactggcacagtgacaactatgngaaaaaacatttgtacaaaagcaaggatgaagaatcttaaaagtgtgaaagagagcattttttttattttttatttttatctttttaattttttccttcataaagtaaggctgtctccttttaagacccagtgttaaggcaagtctctcttttgaagtgatgacagttgcctcattatttggcagtagggcagctggaaagaaaatgcactttgacatcaagtagaccagggtttaaactctagctcagccacttactaattgtgttaatcttggacatgattttgctcatcttaaaagtggagtgacttacactgaccaggattgttttaaggaaacagatgcactgcttgaaatatggttagcacggtacccttttccctttctgtgggtcttaatgaactagctgcattcttctacagttccacatcattactgaggacaatgtatagatttttaatactgccatgttatata

SEQ ID NO: 50738 - DNA, 451 bp, Homo sapiens
  misc_feature 8, 40: n = A,T,C or G
agactggngtaccggggccccccctcggggatcttctagnattaattaacgcggggctgccatagatccaggcacaaaatttgttacgccaaagttcacatttaggtaaacattcctctgaatgctgataaggggaacccagatatgaattaagagagataaaatgaagtctgaaattcagtgcaaatcaaaaatgtacggatctagcattgaacttgttaactactgctaaaaattatatgataaacctgctgcataaatatctaacataatgctattaatgattatgacttctgcctagccgggcctgggggcatacctccatattcccagctactatgggaggctgagccaggacaatatctagaacctctgtgatggaggctgcagctagaccgagaacgcaccactgcactggagcgtagcaacacagctagactccatgtgaaaa

SEQ ID NO: 50739 - DNA, 597 bp, Homo sapiens
  misc_feature 28: n = A,T,C or G
cgggcccccccctcgaaatacttctagnattaattaacgcgggctaaccaatgtccaaaaatgcaataacctgattaaaaaatgaactaaggatttaaatatacatttctctaaagaagacattataaatggccaacaggtatatacaaagatgctcaatgtcactaatcattagggaaatgcaattcaaaaccacaatgagatagcaccttgcacctgttagaatggctgttatcacatacacaaagggcaagtgttagcaaggatgtggagaaattagaactctctattttcattaaaacaacccaaatctgactcagagttcccatttttccaggctgctggaaatgttaacatcagcctttcttgaagatccccctaccagagtttagtgcagcgctaaggtactgagggtgctgtgtgatcagcagccaagcagtcctcactgttcaaagagaacacccattatagcaacaaccctggtccctttgggggaaactgttttacagcctgtgtgccatggagtatggcatactatgtatcagtgaaaatgcttgtgcctggagtctgctttcctcaaaattactctattttgag

SEQ ID NO: 50740 - DNA, 585 bp, Homo sapiens
cgggccccccctcggaagtcttctagaattaattaacgcgggttggctattttacttgttttagtatagtgattcccaaaactgtatccacataaaaaatcaccagaggtgctttttaaaaaaaacagactctgtactccattcctaaaggttagtttttcttcgtggtttgtgagatttttttttatatattctctagaggaatcagagatgttatgccaaaacatgcccctgatttgtatgcagagaagtgtgttggaaaatcactttagaggagaagaaaattagtggtttgcttttctcttttgactttttttttccctaaatagggcattagaaagtaaatgtgttgacatggcccataggatattgtgcatgcaactgtctaacaatgattgcttaagtgactgtttttggaaccattgtcaacaacataatcccacgatcatcatggtgttaagcaatgcttccatttgaactccatacagagagtgaatttttccactgaaaaagggttttaaacactctttttatttccagggggaaaagaggctgattctgtgaagaaaaaacagctgcctcaac

SEQ ID NO: 50741 - DNA, 191 bp, Homo sapiens
  misc_feature 40: n = A,T,C or G
agactgggtaccgggtccccccctcgggggtacttctagnattaattaacgcgggcatgcaccaagtgattagaaatgagaattgcccagcttcttgtaataatcaaaaagagggctacaattctagtctaacttctaaaggaatacctggttaatataaagacattcaagagggagagagcatcggagcg

SEQ ID NO: 50742 - DNA, 569 bp, Homo sapiens
  misc_feature 28: n = A,T,C or G
cgggcccccccctcggggtacttctagnattaattaacgccgggtaaaaacaatttttacaattgcagtcaagaacatgcccagagctggaaaacgctgcactcacagctacattcacgcctattcggggctccggcggtcacactgcgatttttccctattgcacgtggtcccgcccaatcttcagatttcacatcaaaacctgaaaaatgagtaacagatgaggcagctgtgctgtgagccaccacgatcaaaagaaaaccgtcttgacctgatcacgtttaacgggaggaaaagcagcgccttctgattttaaacagattaaatccatccagatttttatcccaggcatattgaccaaaaaaagacaaattaaaaaaaaatgtggaactgatgcatctggatgaaattctcccaggaaaacaaagagaaagccctatccctaggacagcagaactcaccacaccctgtttggtgactgttcgacaacgatatgagataaaaccgtcattcactgtagaaacagcacttgaatttacctgtaattggtgcctgtactgagacaccct

SEQ ID NO: 50743 - DNA, 563 bp, Homo sapiens
  misc_feature 14, 126, 128, 175: n = A,T,C or G
tccccccctcggangatacttctacaattaattaacgcgggtggtatccaactttatttcaatgctactaaatgaatcaaatagacaattctgataaaacttaagaggccagatggaatctctgtnanttccccctttctctccctttttttcctctctttctttctccttcccnttctcttttctttctttttttttttttttttttttttctcatttttctactttctctttttttttttccctttttccttctttttttttttttttttttttttttttttttttttttctttttttttcttctctttttttcttctttcttttttttttttttttttttttttctttttttttttttttttctttttttcccttcttttttttttttttttttttttttttttcttttttttcttcttcttgttttttttcttctttttttttcctttttcctgtccttttttttttttttctcttttttttttttttcttttccctttttttttttttttttctttcacttcctctctttttttttcctttttttttttccctttttt

SEQ ID NO: 50744 - DNA, 579 bp, Homo sapiens
cgggccccccctcggaagtcttctagaattaattaaataacttttgttaggggaaactttaacataactctaagttagaaatctaattttaaaaagaaacatgaaatctcatttgaagacaggaaacttctttctgttttggaaatacaaagtactttttcttctgtggaatttaataagctgatatgaatcagtatcttagcattctacctagaagtggaaagcaaaattatctttgtgaccaaaatggtgacacataattactcactcacaaaaaaaaatcactaacactacagcattttcaaaagcacattttcccagtcatgatatctatcttgaagagtataatttaatgaagaatattctgtcatcctttgaagtttaactgaacatgcaagtaaccaaaaaccaagatttgagtagaaggtaagtaccaaatttcttatgaacttatttgtaaaccttctgcttaactcaagtatatttctttgcaattcaatgtgaataggaagtctgttttttttttttgtcttgaatgttataatccttatcaaagcataggtgcataaagtatggatg

SEQ ID NO: 50745 - DNA, 616 bp, Homo sapiens
  misc_feature 28: n = A,T,C or G
cgggcccccccctcggggtacttctagnattaattaacgcgggggaattgtgttaaaacagtctgactttttttttccaataaaggagaagagatcctctgtttcttaaaagaagtttagtcattggatatagcaacatacagtgtcataaagtttaattgcattaattatgaagctaaaatgtctacattttagtagagagaacatggggcatagctaaatggcgaagacataggaatgtgtatacaatttgagtttcacttcctccaaatctctcagttagaggatccctctcagtctgacggtcttatcatcaacagcttcacaaactctgacaacacctggctgggtttaagggatgggccatgatatatcttgagagtaaaagatggaatgaaactcagaaatgctgaatgcttttatatatgtatacaattttatttatgtgtatatttatatatcaatatatacaaacatatatatttgtatgatgtttggcaacctcactcatggtattcctgtgaagtaggcatgtggtaaacataattagcccattaaacagatggtagggctctggcatatctcaccatattctaaaatggtggagctgtaagca

SEQ ID NO: 50746 - DNA, 362 bp, Homo sapiens
ccgggtccccccctcggagtacttctagaattaattaacgcgggctccattctctaccaaaactgtgccacttttggctggaccttactctccctgcctagctctttaggctctaactcaaagcttccgggggcatccccctcagtggatctggactgcattttgagtcccaccaccctcacacgagagtccgttctctgggtaccctctcagctgtccctactggaatccactgatgctgtcaaggaaaaaatctctcccaaagctgcactgctgggctcaactctttgaatttccttttcctgactctcggtcccataattcctttactgcctcattagctctccattgctatccagcat

SEQ ID NO: 50747 - DNA, 481 bp, Homo sapiens
  misc_feature 7, 24: n = A,T,C or G
ccccccnctcggggtacttctagnaattaattaattgtttttactctttagtattttctgtgaccagttctcatatttacatacctactgagagctttaaaagttatcaccttactcatttgtagtagatactaccaataagattcaaactagtagcagtaactttctacattgtttattgtctagaaacttttaccgtatgtgtatgttggttttataataaaaataacactaaagatatgaaaaagaaccatagcatgattgaaatgtttctaggcgtgcatttaaacaggaaatacaaccatttaagaaaagaggtgcattttgcaaagagaattgtgtgactattctttgattaaagtaaacttcgaaggtttattctgtctttcgtatacattttcctcttcagatagtaaagccctgcctgtgggagtgagagcctggtgataccaatggcgtgcacaggaatgcgatccacatg

SEQ ID NO: 50748 - DNA, 532 bp, Homo sapiens
  misc_feature 29: n = A,T,C or G
ccgggtccccccctcgggagtcttctagnaattaattaatgagtgtgtctatcacctacagctacataaaaagcctctgaaatctgagagaaagccaacttagaaaaatgggcatatcaactgagttaaatataactatcctaactatatgaaataatgtttaactttgctcaaaataagataaattcaaattaaaactatactgaggtgctatttcttacctattagattagcaaaaatctagaaatttaacaactgctggcgagactgagcaatcaggcattctcacattgatggtgaaaatgcaaaattatgcaactgcttatgcagaagtatttgtcaatgtctagcaaaattatatgcacatgctctttgacccagcaattccatgtctaagaatctatctcagggacacactatcaaaaaaaaacacgaggccattcatcacactatctgtaatagcaaaagactggaaacaagcccaaatacctagactgtaagggatgagctgcataaactgcgataacaacca

SEQ ID NO: 50749 - DNA, 591 bp, Homo sapiens
cgggcccccccctcggggtacttctagaattaattaacgcgggtaagacaaagaaaagaaaggtataaagattgggaaggaagaaataaaaatgtctgtttacagaggacatgataatatacgtagaaaatccaaaagaattgacaacaaaactcctgaaagtttttttagtccttattagtcaattagcaaggttgaaggatacaaggttaatacacaaaagccaatcacttttctatatggcatcaacaaatgaaactagaagttaaaaacacattgccatttacattagcacctaaaagaatgaatacttatatatatatacacatatatatggacctatatacttacagctataaagctaacaaaagatgcaatatctgtgcaaggaaaactacaaaaatccgatgaaagaaataaaaaacaaatgagagataatccacattcatggataggaaggctcaatattgtcaagatgtcagtttttttcccaacttgatctatagattcaacacaatcccaatcaaaatccaaacaagttgttttgtggatgttttagtccatttttgcatcactataaaggaatatctg

SEQ ID NO: 50750 - DNA, 614 bp, Homo sapiens
acttctagaattaattaacgcgggggagaagagactaggaaattaaaggaggatccacacagtaggaatcagatttacgcagcacctgctactcttggaaacagctcgctctgcgtgaaaagcgaaaagattaccatatgatcccacaaccccacttgtgggtatgaacccagaagcatttaaagcaggatccctaagagatgtctgcactctcatgttcgctgcagcatcactcacagttaccaagaggcgaatgcaacccagggggtcacagatgaatgaatggataagcaaaatgtggcatacacatacaatgaaatattatgctacctttacaaagaaggaaatacggacacatactacaacatggatgaatgcagacaacattacactaagtgaaaacataagccagtcacagaaggacaaatgctgtaggattccattcatatgaagtacctaaagtcatcaaaaccacagaaacaaaatagaaaggtggctgtccagggataggagaggggggagggaaattggtgtttagcgagcatcgagacccagggttgcagaattaatttctagagatctgttgcacaacagcgtgaatatccttcacatca

SEQ ID NO: 50751 - DNA, 523 bp, Homo sapiens
  misc_feature 488: n = A,T,C or G
cccccctcggaagtcttctagaattaattaacgcgggggatttagggaggcaggacaacctcaggttactaaatcttccactgtcatttgcacgagacagggtgcttagcaaattcctgcatggaaaactctcctctagaagcatatagaatataggtaataattgcccttctcttgtacacctgagttcagaatgattggcctcaccacaagtaggccaagaatatccaatcaattactgctccaaatgccttcactaatttagggctcaaaaaaggaaaagattataaaagtaatttggtggtttcaaatgtattttccccttgaaaacagccttaaaaagagcaaaaccacagcaattttttgcaaaatgaaatttagccactacttgtttttaatgtagatatattttcaattttaataaaactcaaagcatccagaatgcattattaatatgtcatggcttcagctcctgagacaaaatgttntcagcccctccagagtttgcagtgcaaatcttgaa

SEQ ID NO: 50752 - DNA, 489 bp, Homo sapiens
cgggccccccctcggaagtcttctagaattaattaacgcgggggacataattataccatagcagaagtcactggtataaacaagcactttgaaatgtctcaaaatatatttttgcatatgacaaggtactttgtataagaagaatatctctttcagctgtgaatgttcacactttaaaatttgacattcttggccaagcatgatggctcacgtctgtcatctcagcactgtgggagaccaacacaggcggatcatctgagatcaggagtttgagaccagcctggccaacatggtgaaaccccgtctctactaaaaatacaaaaactagccgggcatggtggcttgggcctgtagtcccagccactcaggaggctgaagcaggagaatcgcttgaaccaggaaggtggaggttgcagtgagccaagatcgtaccactgcactccagcctgggtgacagagctagactccatctcagaaaaaaaaaaaaaa

SEQ ID NO: 50753 - DNA, 414 bp, Homo sapiens
  misc_feature 24, 40: n = A,T,C or G
gccccccctcggaagtcttctagnattaattaacgcgggnaagcaaataaatatacaaatatgtggcacaaatagtggcatttgattaatataattggttagaaattttatgttccctttcttttgttttagtagggcaactctccttgctgaatagaagttgtgatttggtataaatttatattaaagagctaatgcctattgtaccataactgttggaaagctgtgagaatagcaggtgagagtagctggtagagctttgagccacattctaaaagatatgcacagtggtcatgccattcaccaagaaactttgctgagttgctttaattatctccacaaagtccttgctgcccagtcagaggtggttaacctgtcaacccttttcaccttgggtgaactttgcttactttt

SEQ ID NO: 50754 - DNA, 408 bp, Homo sapiens
  misc_feature 23: n = A,T,C or G
ccccccctcggggtacttctagnaattaattaacgcggggctttcggaagcatcctctgagggtctctgagatttaaagtccgtaccttggaattatttcaggatgttcccaccatcagccaacaaagtacaaaacagtgtgccttaaaatacacatttaagttggtatttgcatgcagtggttgaccatgtttgttatgggccagcctgcccctgttcctaccagagctgtgctgttggaaggcaagtacgaagaaaaaaaaaatacagttttaaaagactgggtctttttccagagtggttaggctgaggttttgatgcatcctccctccttctccgtcaccagaaagaggaaatggacgttcccataggctgccccttccttcttccctttcaccttccacacca

SEQ ID NO: 50755 - DNA, 371 bp, Homo sapiens
  misc_feature 24: n = A,T,C or G
ccccccctcgggggtacttctagnattaattaacgcgggggaaggtgaagggtatttggagtttttaatttagcacatagtggccaaatgctgctcagagtttgtccctggagcaccaaagtccccatcaagaactatgcagtgttttggaattgagcctattattaagtgggcgctgagtggcagaggataatatagcaaagagtgggggaatacacagtagttaccagcttgggcttgggggtccaacagcttgattctaatccctgttctcttactccacagctttgtgatcttaagttctccagggctagtactgcatgtagctaaaatggtaatggctgcctgagtgtcttaagaaaggaaacgag

SEQ ID NO: 50756 - DNA, 590 bp, Homo sapiens
  misc_feature 29: n = A,T,C or G
cgggcccccccctcggaaatacttctagnattaattaacgcggggtgaaccactgcgcccagcctatttaataattttttttaacgatcctttaataaagaataaagtagcagcctttcttttttttttttaagctagaggctgtatctggttcaaacattaatatttctttaaaatgcatcaataactataaaatttgattttttctaaaagtagtactaacagtgaggtgtttaaacattaaatggagctgggtatgctatagagaaaatgtccccatcagatctgtggcaagtatgctcctacaatcccactttggcagaatcttcctgccagagcctttggaggcagagagaaaaaggtgagacataacaccaaatctcttgtgccttaaccctcacaaaccatcctggattgagtgagaggtgtgagaaggaaagaatctccgcagatctcatgaaagtaagactggaatgtcgaagaaacataccagggggaaaagtgagtacgaacttctgaatactgcattcagtattgagactccttaatcaaaccacaaagggtgcctgagggaacaacttgtcccactg

SEQ ID NO: 50757 - DNA, 105 bp, Homo sapiens
cgggtccccccctcggagtacttctacattaattaacgcggggtgtctggttccttgggtgggacgattcctgaccctctgtccagctgttgtattcattttttc

SEQ ID NO: 50758 - DNA, 601 bp, Homo sapiens
  misc_feature 10: n = A,T,C or G
cccccctcgngggtacttctagaattaattaacgcgggggggaggcgggagatgggtggcagctgaagatctttgtcgtccttatacttctgagatggtctcctcatgagctgaagtggaacagtaactgtgtggcttcttcaataagataatacatgagaaaagtgaaaagtgttattaaaaaacaaacacagaactccaagggctttcccaatatgtgggcatattttaatgccagcgtgaatctggttacggcaccaagaaggcggtagtcactcagtctcacaaaggaacacacactctttgattctgtttctgtgaagtgtaagagcagctcaaaatgacctgtagcgataaaatattattacggatgtagaatccacaggacctcacacctgactggacactggaaaggcaggaggcccatctgacagccttttgaagtatctgcagctaagcgtccttgccccacctccccgcagaaggtgtgctgcagcaggagtgctctgttgctagtgagtccgcaacaggcaggagagtttaaagacatgtaaaacaaacaaagctgatccattatccagaaaaataagcacgtatgcag

SEQ ID NO: 50759 - DNA, 620 bp, Homo sapiens
  misc_feature 34: n = A,T,C or G
gggtaccggggccccccctcggggtacttctagnattaattaacgcggggtggtgtgcgtctgtaatcccagctactcaggaggctgcagcaggaggatcgcttgaacccaggagatggaggttgcagtgagctgagatcatgccactgcactccagcctgggtgaaagagcgagactctgtctcaaaaaaaaaaaatcaaagtcaaattcctccattcatgcatctctaccatagttacttattttactataataaaaaaagaaaagaaaaaaagctgcctgttaagtttcacgtccacctctctgttcaaattctagtaaaagagaagaacaaagacacactcaaaactgaggtagggacagggcatggtggctcacgcctgtaatcccagcactttgggaggccgaggggggcagatcacctgaggtcaggagttcaagaccagcctggccaatatggtgaaaccccgtctctactaaaaacacaaaaattagccaggcatggtggcacgcacctgtagttccaaccacctgggaggccgaggcaggagaatcacccgaacctgggagatggaagccgcagtgagccaagatcgtgccactgcactccagcctgggc

SEQ ID NO: 50760 - DNA, 566 bp, Homo sapiens
  misc_feature 454, 542: n = A,T,C or G
ccccccctcaagactttgaattaataacgcgggggacatttccttatagagctgctaagtaaaaagaaaatgtttactggtgaaataagctgtgtctagaccttaatttttaaagatggccacatgttttatctctggcttatataatcatgcaaattattataaaaaatgcatttgggaatatggaaaaggcatattttaacctatgcaaagagtattaccctggatgaggttatattttcctttaattttcagagagatttttgttatgttcagatgatgctgaaaccctgtttggatctatattctataaaatcaattttaagttgcttaaacaataggaggagggaacataatacatatttattatactacacacaatatttgctatacccatgcattcttatgcatttttaccatgttatagaatatatcagttctccctaaagcccanaatgggtattcttttgtaatatgcttggataaagtaaaattatgtttttaaaaagaaataacaagtttctaatgttttaaacaagaantatataagcaaatggtttgatctg

SEQ ID NO: 50761 - DNA, 565 bp, Homo sapiens
  misc_feature 28: n = A,T,C or G
ccgggccccccctcggaagtcttctagnattaattaacgcgggtggatcaggaggtcaggagattgagaccatcctggctaacacggtgaaaccccgtctctactgaaatacaaaaaaattagccgcgcgtggtggcgggcacctgtagtcccagctactcgggaggctgaggcaggagaatggcgtgaacctcggaggtggagcttgcagtgagctgagatcgcaccactgcactccagtaccactgcactccagcctgggtgacagagagagagactctgtttcaaagaaaaaagaaattaagttgatcaaattagccctcatgactggagatgccctttctttaaaaggtggagggagcacttgttccttctccgtcggggggatttccctcttatgctttgatcatttactcctcagagaagagatgagataccatgtgaagaatgaaaaacccgcctcattctgacccgcccccccccaccatttctccaagggaaaaaaagagagtaaaactcaacaatgtgaagataattcattatagctaatgaaataaatcaagac

SEQ ID NO: 50762 - DNA, 606 bp, Homo sapiens
  misc_feature 512, 586: n = A,T,C or G
cgggccccccctcggaagtcttctagaattaattaacgcggcacccagcccagaatccttcttgccccaactcctccatgaagctttcttgattatttccctcctatcagaatttttctgtttctgttttacattaccttgactacgttacatgcacctctacttagcacctgcctcattgcaccttgtttttgaattaagaggtgatatgtctgtcttcccctcttacagaagggaagaatgaaatctaatccctccacctggcagagtgcagagtgtacctactctatgggtaggttctcaatgactactgctgaaggaattcaaactgaaatggaagaagttttctcatggatcaaaagtcttagctgaagacttcatgttttccattaactgcagtcactcacatctatttaagcttctgctatcaaaaatggaaaagcagccagtgacttctgctttaaccgaggctgtcttgtattttttgtaaacttttttctatttttaaattnttatctagagaaagggtcttgctctgtcatccaggctggagtgcagtggcacgattgtagctcattaacttcanactcatgggctctaacaatc

SEQ ID NO: 50763 - DNA, 453 bp, Homo sapiens
ccgggccccccctcggaagtcttctagaattaattaacgcgggccgcctgtcaatgcagctgcagccatcatgtccctgtttcaggcagcaggaggaaggaaggagtggtaaggcagaagtgtgcctcagctgagcgtgcctctttcagcagctatctggaagccctaacctgtgacttcaacttgcatctcattgtccacttgcatgtgcaagagaggtcaaaaaggcatgttttggccaggcacagtggctcacacgtttaatcccagcactttgggaggctgaggtgggtggatcacctgaggtcaggagttcaagaccagcctggccaacatggtgaaaccctgtctctattaaaaatacaaaaattagccaggtgtggtggcatgcacctgtaatcccagctacttgggaggctgaggcaggagaatcgcttgaacccaggaggcgga

SEQ ID NO: 50764 - DNA, 417 bp, Homo sapiens
cgggccccccctcgagggtacttctagaattaattaacgcgggcatggtcagggatctatagagtcagcttcttttatgtaattaccctggaacaaaagaggacaaagaacccccatattctccttcagtaatgcaaaggcaatacatacttggcttgcctaaaagaagtgaagcaatgtggaatgaggatgaaatttaaaaaaattcctgtccctgcaaatactatgtaatgcaggtttctcagtttcatggtacatcagaaatcacagccaaagataaccacaaactgaaaggtgtgtctacaaggtccttctgggtcactggcaacagggtatatgatcacaaacaagggtggattcaggtagtatgtggccagaagttttcacaatctgaagattcccaaaaaaaaaaaaaaa

SEQ ID NO: 50765 - DNA, 480 bp, Homo sapiens
gccccccctcggggtacttctagaattaattaacgcgggggttggggggtggtggcatcatcacaggtataaaatgagtatgacaaatgcagcgctaacgcgagccacaaggatgagggagcactgtgagctggggcacaaccctaagattcagaaatgaaggggaaggtgaaatctaagacttctcccctgcagagacagccaccctcagcaggggacctgaagtggtagcagccagtccccaagcatccctggacacccaggcatcccccatagcagtcggtggccttcataggtccttgccatagagtactcaaacagagtagggcacccacgacagctaaatgagtccctctgactcaattccttgtcttgagactacagggttttaaacccgaagctggcaatcatttctgaagaactgcatccaattctacagaggaaagcttcagttcagccacggccatgtaggccctgaaa

SEQ ID NO: 50766 - DNA, 296 bp, Homo sapiens
ccgggccccccctcggaagtcttctagaattaattaacgcggggaagttacacttatcccaagaatacttggtagtatattgagtgcttttcaaatgaacaccaacagtcccttcagtctgccatttatttttatgagagatatgccttacctataaaacagcaacacagccaaagcctctaagagtttagcataaagaggacgttgcaggctggcagggggcaaggacactgcaggctggcaggggagcgaggacactgcaggctggcaggggggcagccaaaaaaaaaaaaaaa

SEQ ID NO: 50767 - DNA, 555 bp, Homo sapiens
  misc_feature 520: n = A,T,C or G
acttctagaattaattaacgcgggccccccagaaattattttataattaatgactgcttctgatttaatcatttaactcacttttctgccttgacccttctttaactgcagcagatcttttgtttctttcaagagatattaggacaaatagagcaaactcagagttagactctgacctttacttacacatgcaattagagctggggctcttttaactacagtgactccataaagccaacctgctgtaaagcagggcagtcaaaaaaggttacagactgatggaagaaagatgtcaagtggcctttcaaaatcccaaagcatatactgccctttattccacttattcattgtttaaatgtctttcagaaagtaacataataataagtttacaacattacccaagttacagcctgtgggtaaatgtattttactcaaaccatggatcaggtgttattaaccccagcgagggcttcaaaaggtccaactcccttgaattctaggaaaattctctttatgtgtntctttctttttgcatttagcttctccatcttcttg

SEQ ID NO: 50768 - DNA, 544 bp, Homo sapiens
  misc_feature 28: n = A,T,C or G
cgggcccccccctcgaagtacttctagnattaattaacgcgggggttacaagtaaataagcgaattttcagacagaatctgagaataatgagccctgactatctatggaggaattccttaaatccgaaatgtcttgtgagctttatgtttgggcttcttaattcctatgaatcttagaacacactctttcccatcattccatataaagagagccgaatggtccagtttttcctttggcatcagggtggagacgtctaattctcttttcttctgggtcgcttgtcttttcttgccctcctgtcacgccatagtgacatgactatgaaactcattcgctccccacatttctcctctttgaaatgtggaaataggctgctccttaaatttctggaatttgaaaacagacacatactcaaaatctgacttccttttattttttccaagacagggtctcgctctgtcactcaagctggggtgcggtggagcgatcacggctcactgcagccttgacttcagggttcaagtgacccaaaaaaaaaaaaaa

SEQ ID NO: 50769 - DNA, 619 bp, Homo sapiens
cgggccccccctcggaagtcttctagaattaattaacgccgggctccccacaatcaatgtcggtttcagcctccaattcatagtatattatgtacttgtttatcctctagagaggaagaaataataatgttatgaaggcatcaaggaattaaattccaggccacaggttgtcactgacaattcactgcagaccaaacttgtaacccagataaagaagcttgaagcgtttcacagtgaggtgtcttccagctttgacctcctggataggtgttcttgttacagtttagaagtgcagctggtttctatttgaaatgagaagaatggagttatttaaggagccagtgcctctcataggtgaaatcggctttgctgaaatgtacacaacacactacaaggaaccttaaagacaaacttccatttcacttagctgcagcacaggaaattgtttctggcttgtttttgttgtgaacagagagaacactgcatattagaaatcccctgtagttgtttaatatttgctcagtagtgtcctggttcctaatcaagtccttcttctcactaaatcctgtcaactctgtcactgttttgattggaagcatgaattgtaacactgaaaaaa

SEQ ID NO: 50770 - DNA, 593 bp, Homo sapiens
  misc_feature 28: n = A,T,C or G
ccgggccccccctcggaagtcttctagnattaattaacgcgggcacttccttacacatctagtgagtagaacttagttatagtacttagccatcgattaatttttaaaaatcatggaacaaaatgatagtttggccgttttaaaaggatgcaatatagttcagtgaatactccatacagtactaaatttaaaatgcagacgttcgtaactattaaaatgttactaagtaattattaaataagtaaacttagtatttaataaatgatcaaatattatagtattaggcacatagctattaaaatgcagaattataagcatttatgcactgaaataactgcacacacagacctagcattcatatagattatcttttgggatcttcacaactctatgagatgcttgccaggagataaggaagtgagttctcagtgtcagcaaatgtctggtctagagctagaccccatgtctggtttctagtccatagtcctttacaacaccacgctgaaatcacagaggatgttgatcaaaagcaaacttggaggtggtggctaacgcctgtaatcccagcactttgggaggccgaggcgggtgga

SEQ ID NO: 50771 - DNA, 603 bp, Homo sapiens
cgggcccccccctcgaaagtcttctagaattaattaacgcgggggaatgttctcctttcatcactgtttcgttcattgctcgtgtggaattagagtggttgatttgggggaatctggggggttttgtttttgttattgttgttttgtatgttcctagcacattttaggggacagtgttgaggattccttactaagctgactgtcttttgctgggtacatctgctggcaggtttctctaacgtgacaatgtgatacttcgggtcagtttctgtggctcccctctccccctcgttacgcttgcacttgacattttgcgaagtactttgatctgtggactttaacttcaaacacagcatttactttgattgtggctatttactatgttcagtaaaaagtctccttttttttccttttggtttaatgctttcatagcatttcctttaaacaatttattggagctttagttttcctcactgatctgtcttagatttcacttctagagggacccccaattgtaagaaaagtgttctctggtaaagttctccccaacacagacttcaggacagttcatggcccctgtctggcagatgtgtaagagcaagc

SEQ ID NO: 50772 - DNA, 511 bp, Homo sapiens
  misc_feature 34: n = A,T,C or G
tgggtaccgggcccccccctcgggagtcttctanaattaattaacgcgggtgttcatattgtagtattaacaggtaatatatatagttaacatccagtcacaagttccaaccagatttctgtgagtgtcagttctgttttctaacctttccaatgattactcatatctctcccctgtgtaagccactcagtggtcagtctggtacctggatgatcattggtgatttatctgttacttcattctcaatgtctttggcatgtgtttatgatgagatctgattcatgaatttagagctcaggagtgaccccaggtgtttataaataactttatagttctcttttccaagccccttccatttttgagccttggtcaaaagcagaggttcagttgcccccattctgctgcacgcttctatgactctatgcctgtatagggccaatgggtataggccctatcggggcctgcatagggccaacgagcataaggccagtggaaaggggtttactcaacc

SEQ ID NO: 50773 - DNA, 536 bp, Homo sapiens
gggccccccctcggaagtcttctagaattaattaacgcgggcagcatctaactatatgtgttttgtcaagtcctctctccaacttcttttttatactgaaaagacaggacagtgaagaaaaaaaaaatgtgctctttttcttcaatcaacagaggggattttgacgtttatcagttttcatggaagaatataagcttattcactagggaatagcgatggtgttccatttaaattttattcctgtgttccgatttaaaatgtgtccccctcacactggctcaaaggacatggtatctctcagcctgattcatcagtgtattgcactcagagcgcataatgagaaaagggaaagaacactatcaacatcaatccgtgcttagctgagagcttggttataaaatgatggtgataaaaccagacacttaaaactggaaatagccattatatgaataatatactctcatgctcattgacaaataaaactgtcaagctactgcatgcaaaattaagcgatgatgctgtcatacaacccccat

SEQ ID NO: 50774 - DNA, 611 bp, Homo sapiens
  misc_feature 28, 45, 594: n = A,T,C or G
cgggcccccccctcggagtacttctagnattaattaacgcggggnaagtacacggttcatgcaagacacagacagattccttctatccatcagggcaaagactaatactcgccaactcctcaagagaaccgaaaatactggcccccaacctcccatatccattcctgtcccaggagccacagaattccctgttggcagcctcctctgtcaccctagcccagcgactttgatgctgtttgtacagggcataacccagaagtccagtttccaagcactaaccactgtaaaaatattgtcgccagctccatgacaccaagttggatagtgcgggggtttaccaccacacccagggcagcaaaaattttgacagatggcaggcggccccaccatgaccccagatgccaaagagctaggagggaaagtgctgcccagggccaaggcagggacgagtcagactcctgggggatgggagcagctggcacagccaccctttactccaggttgaaagcacacaaggcagtcagcacagcctcagcctcatggaggatgtaaccctggcagtcccccacctgtctctccatctccaccctcctncaagaagccctgaaaag

SEQ ID NO: 50775 - DNA, 335 bp, Homo sapiens
cgggcccccccctcgagaatacttctagaattaattaacgcgggcactagcaacacatttttttttataattaaccttgataaatttgctcccaatataataaattttccttctgatcaacactgctcattcaacacagtccttcgaatatctaaaatagtctatttttctccacattcaatattgtcaggttcttcaaatttgatatgatttctggagtccttactcacatgactgcccacctctgaaagcattctaaatgatttggttgagatcaaactcaccacttctatagcatgctgcccatctggtaattctctcaaaaaaaaaaaaaa

SEQ ID NO: 50776 - DNA, 594 bp, Homo sapiens
  misc_feature 28: n = A,T,C or G
cgggcccccccctcgaaatacttctagnattaattaacgcgggccagattgcttgatgatgaatttagtttgacaatttgtttgttgttatatagttagaggaaagttataaaccccaaatacagatccctcaaattcccatttgtgcagggtacggaaattttgtattaaacttcttatccccacagtctcactttagtaacactgaacgattggaatattgagggcccattttattttccttcttaaggatagataaaagtaaagaaaaatgcgtaactcaataagcagtcacgttaatttttgattagagatataaatgtatttgtccctagatatatcctacagacagccatttagcattgtttttgcatatctactagttcagctcaaaaaaatttattaattggctactttagtggttttataataataataaagatggcaacttcatccttttttttctaggaagctacattaaagcatcagaagaatgagcgatagaaatacaaatggaatctcaaaaaaaactaggaagagagctgatttattcagtaattatatgaatgttatgaaatgtttttagaatggtta

SEQ ID NO: 50777 - DNA, 536 bp, Homo sapiens
  misc_feature 24: n = A,T,C or G
gccccccctcggaagtcttctagnattaattaacgcgggcacctgcatcttagagatgagacaaaggagactcaacaaaagttagaaacacagtcattgttacagtataagaggcagagttgagatttgaacccaggaccatctgagcagcctgtgttttttttccatctatactgctgtttccatgactgagcagagggagccactgggggcagacatggggcccatgagcagaatgttcccctgtcacattcagtgaggaagaggtgtctgctgcctatggtccaccatttccaaacaaactgtagctgttccctctatgtagataatgaagaagaagagaatgctataaaataaataaaactgaaattgaagccacactggtgggcaaggcctacgccaggaagatgtggaggaaggtgaaccctatgagtgagttggaggaaagcaggtacaaccaagctgcgtagatccactctcctcagctacttgtaataaaacatagaaagctggaaattgtcatcctttcaagtggc

SEQ ID NO: 50778 - DNA, 640 bp, Homo sapiens
  misc_feature 12, 28: n = A,T,C or G
cgggcccccccntcgaaatacttctagnattaattaacgcgggggggaataaagtcaatgtgaatgtcaaagacccatgttaacaaggacttttgcaaaaaagactacaaagagagtcatgactgatacactgattcataataagacattagaacaattattaatactaaaaaaactaaaggaatgaaaagtacatgataccgactgagtcaacccagggggttaatgtaaattttatttttattttttgagacagtttcacttttgttgcccagactgaagtgtaatggcgcaatcttggctcactacaacctccgcctcctggcttcaagagattctcctgcctcagcctcccaagtagttaggattacaggcgcctgccaccatgtctggctaatttttgtacttttagtagagatgaagtgagacctctgggtatgacaatacgcctgttcctacacccaattggaggtgacatatagctgggctgggaaatgactgggccagaagaagtggctcattcctgtcatcccagcactttgggaggctgaagcaggtggattgcttgagctcgggagttcgagaccagcctgggaaacatggcgagatcctgtctcttactaaaatacaaaatttacct

SEQ ID NO: 50779 - DNA, 612 bp, Homo sapiens
  misc_feature 15, 28: n = A,T,C or G
cgggccccccctcgnaaagtcttctagnattaattaacgcgggggttttaattttgataagaaatttgggagaaaaaagggtagaaaatcgtgctccaaatggccgtctaattagtctgtatttattcaatggccactctgtgttcagacctataaaaatattttaaaattatgtctctttgaataaacaaatcatacaaataaacaattaaaatgacatccagggaaattagtataagctcacctggactcgctggatgagagtttggccttttttcaaaggataaaaatgacagtctgtagacctccaagtttctaacacactcaattttctgataaaagcatagaccaggatttcatgttgacatgaaattctagtgccttagcagggactcggtgtgcaacaaaatttgtgatctgttttcccccttcatctgccaatcaaagagatgtggaaaactttatagatatttgttccttagttacggggatggggaagtggagtgtcataacacttgagagacatagaggactaaaaggcagaagaaccaaattgaaatttatgattctgtcttcagacacttacagtgtgagctgctggggatatggaac

SEQ ID NO: 50780 - DNA, 398 bp, Homo sapiens
cgggcccccccctcggaagtcttctagaattaattaagaaataaaaactaaatggattataatttaagaaaaaaacaaattaaatggcagtgtcatgttttaacaatgtcaagcaaaggaatccaagtgccagccttttgaagcaaagtttcagtagctgtcacctctcccctatattgttcccctaggttgtaaaagactgccaagaagttttcctttgaatgtctttcaataaaaaaggactgttaatcatctggacttctaaatctcttatactaatcagcatgtgtgctttagcagccttcaaattgaattagttggatttcccaggagagggtctaaagaacaaaaaaatccctcttcccttagatctccctcatccgaaaaaaaaaaaaaaa

SEQ ID NO: 50781 - DNA, 587 bp, Homo sapiens
  misc_feature 84: n = A,T,C or G
cggggccccccctcgggagtcttctagaattaattaacgcggggcccttagagaatacagtgacagaaaagaaaaaacgcaccntctgaaatccattcaggcatgcatactttactgtggagcacatacttgctaaatttgaatactatgtcatatatgagaatgaagtgaattttcttgtagatttttttctgtccttagaattgtctattttagaaaaaaagaagggatagtttccaacaaaagtgatgaagcaaccataattttatgtgattgccagctatgaatttaacacattatttttacaaacacaatacgtcctattcaatacttaggaggagctcacttgaaactcattaaatttcaaaggaaagtgagccatcaggtcatatactatgagctgtaaggtaacccagagagactgcagaaatgacagggaacgtctaacaatctgaatgtcaatagataataagttattttaaaaaataacaccagacaactaactagcaggtgatttgcaggtcaggattattgaccaaaacacacaactttacaaatcattcatgctattcatggggcacaaaatc

SEQ ID NO: 50782 - DNA, 626 bp, Homo sapiens
  misc_feature 574: n = A,T,C or G
cgggccccccctcggaagtcttctagaattaattaacgcggggtgttcagagcagctaactactggcagctaactagtgacactagtagtttgttgccccgaacacataggtgttaacacacaaacttcaaatatatactctagtgccttgattagcgtttaacctagactttgtcagaatgcccaacactggcctttttataaatctaagagaaaacccagatgagtgtagaaagatgccaaataattctaggaatcaaacacttctccatctctgaagaccacataaatctcggcacaactcttgtgcctacagtacccctttaaggaaagaacactgcaatccagatattcttcacgctggtatgaagttcagcaacaatactggcttgcatcaaatttcttagaaaatgaactgagagtagaggctggtcatggtggctcatgcctgtaatcctagcacttgggatgcctaggcaggagtattgcttgagctcaggagttcgagaccagcctgaaaaacatagtgagaccctgtctgtattaaaaataaaataataaaagttaaaaaaanaagaactgagagcagactccatttgatacaaaatcccttacagatgtttata

SEQ ID NO: 50783 - DNA, 551 bp, Homo sapiens
  misc_feature 9: n = A,T,C or G
acttctagnaattaattaacgcgggtatcattatctagagtatttggagaaactctatattccatttttgttcgtatctcatatcgtataccaaaacaaaaacatgcagactaaaacactaaatcataacgtgttgaaaacaattgagatttcagagaaaattatcaatgttacatttaatacacttaagtcaaaagatcaaaattgttagagctaagaaaataatttacaatgtaaatgccagctaaagtattagttactgtaatattatgataggtttttataaatgacaaaaagtccctaagcaaaagcaccaataaaaatgaactaagaccaatccacaaattccctacaaatggcagatcaacacaaaatctaataatatgcaactgatttgtaataaacagaatgcaaactacatgcatgaaatgttttaatctaggaaataagaaacaaaatataactaagttatggtcagtggagtatgcagttacaatcattgataattggatcaaacctttctagggaaacacattggcagtgtgtgttaa

SEQ ID NO: 50784 - DNA, 483 bp, Homo sapiens
  misc_feature 34: n = A,T,C or G
gggtaccgggcccccccctcgaaagtcttctagnaattaattaacgcgggcaacattgtacctatagtcaacaataatgtattgtacacttaaaattgtgttcattatccttagcaaactaacagaacgggaacagaaaaccaaataccgaatgttctcacttataagtgggagctaaatgatgagaacttgtggacacaaagaaaggaacaacagacactggggctacctgaggatggtggctgggaggagggcagaggatctagaaaaaataactatgggtactatgcttattacctaggggacaaaataatctgtataacaaacactgtgacatgagtttacctgtataacaaacctgcacatgtacgcctgaacctaaaataaaagttagaaaataataagaaatgaataaaatgtattacagcctaagaaaaaagttgttttttttttaaagaggtcggatgttgaccaggacacaca

SEQ ID NO: 50785 - DNA, 570 bp, Homo sapiens
cgggccccccctcggaagtcttctagaattaattaacgcgggggcatggtaaatttagttcctgttactcttatcttggttggaagtctcaaggtcgcgttttcttcagccaatagaaaattaatcagttctgaaagactggtatgtttttattacatttgtttcattctctctcagattagatcctgaaccagtaaggagattatggggaacattcttagattgtagaaaccattgacaatttatcaagaagtgtcaaagtgcagatttactgttgcattgaaaggttttatcattctgttcttagtcactgaatcttatgcctactactatttgattataaaggtctgacttactatctgaagcgtttctgggcaagtgtttttacttgttaccatataatacaaaatgctgcttagccatgtggttcttcatgcagttatcactagggtactcagttcttaaaactcagctaagagtaccttgtgttcctttttgtttttaggcaaaattcttgttttctggagatatgaacagcctctgagatagtagaatttgtgttattttgca

SEQ ID NO: 50786 - DNA, 132 bp, Homo sapiens
gggccccccctcgatagtacttctagaattaattaacgcgggtcttactctagaacaatgtgcctttttagggctgattattatggtaagcattttgtcatggacttattggccttttgtgtctcatttgat

SEQ ID NO: 50787 - DNA, 527 bp, Homo sapiens
cccccctcggaagtcttctagaattaattaacgcggggggatggggatagggggaagggtagggaattagatcaagtaaaaaatcgatgttgagtaccagctatggtttctatcttaattaggcaaccttccttaaagatatagcagttcttgaaaagcaagaagagtgatctgatccttaaaaagtggagaaaaataaacaactttcatttacataaactttctttggcactgcatttttgctattgccaatatcataaaagtctgccttgtgttttataacactggaaacgtgagcataaatcagtcctagagaagttctagccttatgtgtgtaaagaggcttatgcctcgatgttcattgcagcattgtttgtaatagggaaaaagacaatcagaaacatcctaagtgtccatcaatagcagaataattaaataaagtatagaattaaaaataataagacaaatatatgcgcacggataagaaaggtctctaagacatgctgtccagaggaaaaaaaaaaaaa

SEQ ID NO: 50788 - DNA, 628 bp, Homo sapiens
cccccctcgagagtcttctagaattaattaacgcggggtaaaataaaagaaatagaagaaaaaaagaaaaagaaatcaggttgtcctggtaaatatgaagcatatacttaacagccaaaacagtttattggtttgtgatttttttagatataaatgctccctcttttaattcttagcctattattaataattaatactctgataatgcttttttactatatagtttttttttttttactttgatatttcctcaaggtcatatacattttcatcttaggagtaaatagagaacaatgctcttcagctattgtttagtcataataaaattatgtaggttccaaaataggaaaaactgataacctcaagtaggccccagttaatgattttgctaccttaaaatggcaattgcttataaaaacattatacaccattcctgtgacataagaaaaattctccagagaggaaaactggggatggaatttggaatgttgcttgactatgcgtttagaactgctcctgaaaacaatacagtaaaatggtaatgtagcaatttctagctgatgttcacaagcagagagagcccaatcctgccaatcaaatcaagagtgttctctgtttcattgggaat

SEQ ID NO: 50789 - DNA, 482 bp, Homo sapiens
  misc_feature 24: n = A,T,C or G
ccccccctcgggggtacttctagnaattaattaacgcgggggcctcttccaaataaaagccagcattaccttatatttttcacaccaataattcactttcttatttttctgtttttgtaaactatcagtctattaagtttctcatgtattgtatagagaagtaattcatatagttattcttccttcataatttgtttctgaatttgtatttatttacacattttggatatttcttttgaaattttacttgcctaagtacccagacaccctttggatgttaatttactctatattgactagtctttctctctctccgttggatattgtgttttttggtttgtttgtttaccaaatcaacttttatagttaaatattgctgcatattgaactgtgctcagttgagaacgactaacaaggtttatgatcagcctagagtaaaacttactagaccagcacactaagcgtactgtgtgtttcactat

SEQ ID NO: 50790 - DNA, 580 bp, Homo sapiens
gggccccccctcggaagtcttctagaattaattaacgcggggattatataataagtgtcaagatctggagtcgctaatacagggaaaaagatgacgtcattcaaaacttggaattgcaacttgaagagcaggttaggaagaatttgataaagagttctaagtgtgtgcactcatttgtgcataatcacaaagattaaaaagagagagcctaaatttctatatttggggagaaatattgcttattcggtcaacccataggattgcatcacatttattggtgaaaggtgcaagtaaaatggcattcctttaagttcagagtgattccaaggcaagatctaacactttttggttgtgagaatgctcgttaatattcaaacatttgagtttatttatttatctgagacagagtcttgctctgtcacccaagctgaagtgcagtggctcgatctcagctcactgcaacctctgcaagtccacccacaaccaacaggttcaagtgattcttgtgcctcagcctcccgagtagctgggactatgggcatacaccacgacacccagctaatttttgtattttttttta

SEQ ID NO: 50791 - DNA, 582 bp, Homo sapiens
  misc_feature 522: n = A,T,C or G
cgggccccccctcggaagtcttctagaattaattaacgcggggtactttaaatacttactaacatctgccctgcagtgcaggtatttatatatgcctccctcactaagtattagctgttacgtattaggaatccacaatgcttatgacagtagtctttatgctgtaaattctcaggtaatgttattgaaagtctttatgcagtgcacctctaatgctcaatccttcatccactggcctttagttacttttgcatgtgtgtataagcttcctgattgtatttcagcagcccttataaaatgactgtaattgtcatatgccactgtaaaagtgaggcacttttaaaacattaaactagacatgtatctctacagtctttatgtgcaatctttttttgtaaatattgcaagttcttgctgctgttttgaaataatcaaagacaaaacaggtaatataaagttacaatctaaggctaaagcaaatttgtttatactattagtcatttggttcattcgaatgcctgnatatagagttgagtgcaagattattggtagtaaaaagcaggacttttcactggagactct

SEQ ID NO: 50792 - DNA, 490 bp, Homo sapiens
  misc_feature 482: n = A,T,C or G
cgggccccccctcggaagtcttctagaattaattaacgcgggaggagatgggacgaaataggtgacaagcctgccctggatcgcctatgggcaggtgggctctgttaagcaagcacacagagcaatttaatatcctcatggttggtggaaacgaccccttgccagtagcaatcaactgagaaatcatcccagtggggcagcagcgtttgcaaggtctgtccgaaaaggaataactaaacctgaaactcctaatcataaccaaaaagacttcagagtacaaacagggacaagaatgctgctggcctttcaaagatggggcccaattcagctggcacagacaacagcttctgttctgcatgatgacaccagggagcacggcgccatcctgggagacagcagtgccgctctcagaactcacagtcaatggtaattatgtttgtcagttttttcactgtctccaatatttaataacccatgctatntgtctaaa

SEQ ID NO: 50793 - DNA, 481 bp, Homo sapiens
  misc_feature 32: n = A,T,C or G
taccgggcccccccctcggaggatacttctanaattaattaacgcggggggggttctttttggtattgaattataggtgattttcttctcccatatacattttttgacaatgtgactacattgacttggtgatgtataaaatatcaaaaacaagaaacttcatgaataatttcctactaataagtgaactctggctaagatttagaggccgggcattgtggcttgcacttgtaattccagcactttgggaggccaaggcgggaggatcacttgaacccaggagtttgagaccaatctgggcaacatagtgggactccaactctacaaaaattaatttcaaaaaaattagccaggggactaaagggactgaggtgggaggatcactttagcccatgaggcagaggttgcagtgagccataatgcagcactgcactccagcctgattggcaaagcgagactgtctcaaaaaaaaaaaaaaagc

SEQ ID NO: 50794 - DNA, 492 bp, Homo sapiens
  misc_feature 41: n = A,T,C or G
aagactgggttaccgggcccccccctcggggtacttctagnattaattaacgcgggctggcctaggttaactcctcatattactacttcagaaattcgcatagcactgaatccttagtgatctctgcaaaatctgatgaggatagtcagattaatcatatggtattcagcttaagaaaagacaccacattcctatcaagtcacatatggtttccttattttatcacatcaccatactcttcagaaataatcttctaaaaggcatatttgaccaggtttagtggcccacatgtatactcccaccatttagggaggccaagcacaggcgccatcaccttgagctcatggagttcaagcaccaggcctgcggcaacactggcagaaacctcctatctagagctaaaaatacaaaaaatctgccaggcttggtggtacatgcctgtaataccagctacttaggaggcttacgaggggggatctactggtcccagaa

SEQ ID NO: 50795 - DNA, 575 bp, Homo sapiens
ccccctcggaagtcttctagaattaattaacgcggggttccaaacaatattgtcattggttagtacaaacagtggccttctcttagaggacacgggccagatataaaagggtactcacaaaacccaagaagattgctaagcctttctttggtcctgatgactccctaagatcatgaagtttctaactgctatgaggagaatcagtgctccttaaattctcctcattaacctcagtttccccatttagaatgctcacttcctttctacctgacctgcttccaaacttgacttatgccacagctttggtttctatccaacttctttctaccgagaatgctgtggaatgaatggcagccacccaaccacttgaggcttgctgtcctatactcctcaatgaagagattgagagagtagagaaatatttccttttaaagacagaccccttctagggagtaggaaatatattttctatgattgcattagattctgcttaagactcaggatgcaggatgctatcgtgacgagggacagacaaggttgaaaaggggaacatactgagcaatgaggaacagctg

SEQ ID NO: 50796 - DNA, 595 bp, Homo sapiens
  misc_feature 23: n = A,T,C or G
ccccccctcggaagtcttctagnattaattaacgcggggacatctgtgagtacagaacagtttcacaaaatgaccttgagtttgcaacaatgaatagtgtctgattcaaaagtaaaaggtgttagcatgcagacagtggcaagagagcagggaaaaatagtccaggagccatgactttaagaatactatcaagaaatggaataagatcgtaagatagctgtgataggctatgggaaatggtcatctggacaaacgacctgtataaaatgtgctggtgagagcaagatctctgaccagctcctcttcaatggtgaatatatttctaaatacacactgcagcagaaggaaaaacaaagaatatagtacaatggattcaaaatattgattggaaaagtatcgtatttcttttctctatacttgatactgaaatgagcaaaaaggaaagaagaaaattttatgtaactctcctaggattcctagtaccatattttcggaggcaagtctaactctcctaactttacttattttaaatccccctccctgtcatgagttagtaactataaataagcatgtagttcattctagtatgatgtat

SEQ ID NO: 50797 - DNA, 483 bp, Homo sapiens
  misc_feature 24: n = A,T,C or G
gccccccctcggggtacttctagnaattaattaacgcgggttactacaccatttattgaaacatctttttcctccacatttgaaatataacctattatatagcaaacgttcaatgtattttagattgttggtaggttctctgttttattctttgtgtatttgagaatcccagtgatatatcatgatgtcattgttactgtagctttatactaagtctttctattcggtagtataagtgttatttccacctcttcctatggcagagatacttggtttagactagcctttccactgagaacaattagaaaagctgtataaaatattgtttcaaataaatatttaagggatcagaaaactagaagagtggtgaggacctgagggagtgagaattcagagggtaaggttgtgcagagtttggcctgaccttaaatttgctttgccccttgagtgaatgactcagtgcaaaaaaaaaaaaagcggccg

SEQ ID NO: 50798 - DNA, 614 bp, Homo sapiens
cgggccccccctcggaagtcttctagaattaattaacgcgggaccagttctcatgcaatacattgcaaggttttgtgaaaacacaaatactctctgccaagaaaaaaatggatgtgcagcctcattgtaaagacattttagacttcacctgtgctcagaaccctatgggagacccaaccatgtttctggttgttaatagtctgaaacaaaatatcattattgatccatttgtttaaaattccagtaaaataattagtcattaaattagaatcctcctaacttgatttttctatttgtaaacaccttaagaggcagcctttactttcattgctacaagtgttatttacaaatccatttttcttcaatcagctgctgtgatataaatgtatgcaacctgtaaaaacttaaattgcttccttacacctggatattcaaccaacctctagatgtctgtaattgtatgaaggaaggtgtaaccatatctaagcattttatattagagggggccagaagccacggttggtggcaatctgacagcatctcaatctctgttgactgaggaattaagagtatttctgacattttagagctctttcatcatgctgagcacacac

SEQ ID NO: 50799 - DNA, 526 bp, Homo sapiens
ccccccctcggggtacttctagaattaattaacgcggggtaggtttggagagggtgagggataaaagactacatattgggtacagtgtacactgcttgagtgatgggtgcactaaaatctcagaattcaccactatagaacttatctaggtaaccaaaaaccacctgtacccaaaaaaactattgaaataagaaaataataaggcctataaaaggttttctgaacataacaaaaccaaaaaacttaagccttataggtttactccataattttcaagaaacagggcacccattcacagctctccctgaataatatcttactgatccttttgttaatactggacgattgtcacagaaggactgagcctaaattaacaataatttgggatttacaaattaatctttgcatttttataaacatggaaaactccaatattaccaatgaataaaacaagtgataaaaaacaaaaactcatagaccaaaatgtgcttgaagaactttattttcacagttactgaagaacaac

SEQ ID NO: 50800 - DNA, 545 bp, Homo sapiens
  misc_feature 483, 510: n = A,T,C or G
ccgggccccccctcggggtacttctagaattaattaacgcggggagttgagggtctcactgagaaggagacaccattcgtacagaagctgaaggggctgaggcctgagccaagtgactgcctgggataagagaaaatttaacagaggggggaagattttttttttttagatggagttttgctcttgcggccaaggctggagtgcagtggcgccacctcagctcaccacaacctccgcctcccaggttcaagcaattctcctgcctcagcctcccaagtagctgggactaaaggcgcccgccaccatgcctagctaatttttatatttttagtagagacagaatttcaccatgttgaccaggctggtctcaaactcctgacctcagatgatccacccacctcggcctcccaaggtgctgggatgacaggtgtaagccacggcgcctggccaggaagatccatttttaaggtcctgagagagcangggcctgacagttttcaggagcagcanagagtcccctagcttgacccaagcgagtgacaggg

SEQ ID NO: 50801 - DNA, 596 bp, Homo sapiens
  misc_feature 19, 32, 48, 515: n = A,T,C or G
taccgggcccccccctcgnggatacttctagnattaattaacgcgggngtatctatatatatagttccaaaataacattgagtaaacaagtaagctgtcaaataacgtgtaccaatgtgtatgaaaccccagaaagagagtattttctgtggctatatgtgtgtgagtgtgtgggggtgaaagtatataaaagaaccctgataatagcgattggttctgcttggaggttgagtcaatatggattatgataggggtcaaagtaagagtttgtttctaaccataacattctagtttttaaagaacttatcatatagtcacatataacttgtgcaatttttgttgttgttgttgttgttgtttttggagacggagtctcgctctgtcacccaggctggagtgcggtggcctgatctcagctcaccgcaagctccgcctccccggttcacgccattctcctgcctcagcctccggagtagctgggaccacaggcgcccgccaccacgcccggctaattntttgtattttttttgagtagagacggggtttcacggtgttagccaggatggtctcaatctcctgacctcgtgatccgcccg

SEQ ID NO: 50802 - DNA, 580 bp, Homo sapiens
  misc_feature 25: n = A,T,C or G
ggccccccctcggggtacttctagnattaattaacgcggggcttgcaggagttaactctgttgttcccaattgagaaaatgaacatcttggtttgactgaactctgctactagatacatcactaaggcacccaagagctcctcctagaaggtaaaattcatctgatctttccttacctgccttgacaaatgtatctaagtccacaactgcattgagtgtcttctacatggtgtctgtcacctcccaggctgagctccaagggcacaactttcaatgagaacagaggctcactcttgagttagggaagaagagtaaacaggtcattgtaatttagtcagaccaggactgtgagagaggaaagcacaggcccttgggtagcggctagagggggactctgcatgcttcttgctctctcatataacacagtgaggcataaaatgggagtaagcaactcagaggatgtttcatgtgcttcaaaggaggtgataaaatttaagggaagctaagaggttacataagctaagaggttattttgcagtgattccagagcaccctgtcttcttccaatcatgatcatata

SEQ ID NO: 50803 - DNA, 608 bp, Homo sapiens
cccccctcgaaagtcttctagaattaattaacgcgggcaattggtttgttcatatccaaaataacttgctgaggaaaagttgtttctgttttattgttggatagtattttgttcctattgagttataaactatatgtaattaatttcttcaatataattttaatttttttggctttgctgattttatttttatattccatacaccataatgccaataccaagaaaatgtatgatttacacatttatgtgtagattgtattctattgtttaaaatagttttgaataattttgaatgtgagtcatgaaataacaagtgttcaggaactttttctgatagagagaagttaaatgagaagcatagaaatccaattggacatatagcaaacctggagcatagtaaagacactgtgagtcaagcaaggaactgaaaatagaaagaaaatgagataagaagagctcagagagttatttcagttcttttggcattgtgaaaaaatagatattgtgaaaagtgagtcaaaacaccaagaatccattgctgtaccaccaatataaatgttcattttttaaaaaataaatgtctacaatgtagactctttttcctcatg

SEQ ID NO: 50804 - DNA, 615 bp, Homo sapiens
  misc_feature 28: n = A,T,C or G
cgggcccccccctcggagtacttctagnattaattaacgcgggatcccaggagatgtctagatctcagagtgcctggtaggttggcagaaatgttttagatttaatatgtcaggtttaagtggaaaatctcagtagcaggagccctctgcatcttatattaattgtgtcaagcattctatttaaaatttgaattggttccgaagactgtgagtactattaacagcaatggcacacagcttggtagaaaagaaggcaggcttttcatggtatagatttataggcaataaatgccaccagtagaataaaaaatgaaaattatttccaatgctttttttcatgaattgagatttttaaatcttttatgcagaacgaagttataaacattgtcccatacatttcacatgtaacagttaaaattttaaatatccaacattatgagcaatactggtattacatgtatctaattcagacatcaaactattaatagtagtgatttttttaaaaatctctttgtaggggaggaggttgaagatcttagtctcgtatcttctgcataatggcagaaggccttttaaaacaagtgatgaataatccccgatcctctggaccagcca

SEQ ID NO: 50805 - DNA, 536 bp, Homo sapiens
gccccccctcggaagtcttctagaattaattaacgcgggtgagcgttcacagtgaaatagaaccatcataaaacatgggcaaataaaattattaaaaattcatctctatgatgtgccatgttctgaataggcagtttctgagtgtctgggccatctgtacaagaaagagagttgttatttggtcaaggacacgtgcatttttcagtctagaagaatgtcatcattttcttgaggtaattgcaatgttcctactttgtatcaaacagcaaatacctctgattcctaaggcaacagcatacttattatttgatttttccaagtgaataaaatgaaaaatgaaatgttgtgtcacaatcccaaaacactggtggcatatggaatagttgagatgatagaacatgatttgacaactccaaactgaaaatatctatccaagcagttgcactcctgaaaaactattatattgtctggcaaaagactctctcatgataggaaggtttgctagatattgctagaaatagaggcaggggtgaaac

SEQ ID NO: 50806 - DNA, 630 bp, Homo sapiens
cccccctcgggaagtcttctagaattaattaacgcgggggaggacgggttaataggtgcagcaaaccaccatggcccatgtatacctatgtaacaaacctgcatattctgcacatgtatcccagaacttaaagtaaaataaataaaaaagaaagaaagatgccttagaaagtggcagcatgtagaaatgtaaaaatagtaccctgattgggatgttctcctatgtgtgttgatttatagcctggtggaactcttagtgtatgtgtgcgttttgaatactgttatagaacaggcgtgaatcaaacctcgtcagtgttgtgcagcatcccgcagttcaaaggcagccagttacatagtgcttggcaggaaggcttccatttttaatactggttgagagaaaagagagaatgaggagtctgtttggagcattttattatgaaggaagcacagcccaactgctcgagacaggtattaaaagcctatccctctggcctcatactgtatttgctacagatgcattcccacaaggcttccagatcgaaaaggaagcccactgttctgctgcacagctgttaaaatagttaatactgcgcttcccaaccattatgggatgtgccatatgtggcctttg

SEQ ID NO: 50807 - DNA, 544 bp, Homo sapiens
cgggccccccctcggaagtcttctagaattaattaacgcgggatgcactgttgccttcaaaaggagagatgcaaggttagctggatgtctggttttgttattataggacactaaaaattaggaaggggctgaaacttacaagactccgcttccaagcttcttgtatcttaaaggagaaaaaagaatagctttgtttcattttaaattttttttaagagacaaggtcttgctctgtcacccagggctggggtatagtggcacaatcatcactcactgcagaacagcctcgaactactgggttcaaacgatcctcccacctcaccctcccgaatagctgaaaccacaggctcacgccaccattcccaactagttgtttaatttttagtagagatggggtcttgctatacggcccaggctggtcttgcagtcttggcatcaagtcatcctcccaaaccattggaattacagggttaagccatcacacccagccttaaaaaaacaacaacaacaaaaaaaaaaccaaaaaaaaaaaaaaaagcggccg

SEQ ID NO: 50808 - DNA, 521 bp, Homo sapiens
  misc_feature 43: n = A,T,C or G
cgggccccccctcggagtacttctagaattaattaacgcgggnatccccaagtatcccgggggggaaaaatttatttactggaccttatctccagtatgaaatcttcacaaatacagaagagctctattttcttagagggaaaaaagcaatatgttacatagaacagtgccttgaaagtctgttttctagatgcagttataaatcactcccttagcttccagttctgttaaaatgagtaatctgctcatcctcctctgccctcccacagaaataccaagacataatgaaaataaagctacagtccaacagctgtatagagttcttacagctggcaaaggatttgtgaattgtgagatgtcatttacaactgaaacaacatgcccaggagtgtgctccttggaagaaggctgaggcaatcctctcccaggcaaccccactttccttagatggtgtctatgtgtgtaatccgtggcagccataaatgaatgctcacagggtctgtcacataccttctgcactg

SEQ ID NO: 50809 - DNA, 493 bp, Homo sapiens
  misc_feature 34: n = A,T,C or G
ggtaccgggcccccccctcgggggtacttctagnaattaattaacgcgggatagtcattaactttaggtaaaacatgacttattaaatgaagacatttatttgaatgcacatgatcagtacagtatcagcatatagttctagaaatttttatttgtaatacaagttgcaatattctaataacatgaaatcatgcaaacatgttactccaaattggtctgttttatgaataggagataaaagatatttttatttcttaatgatgacattagccacacaaacacacacattttctctctttttaaaatgactaaacacatgcaagctgcttgctcaaaccacaaccactggaatgctggtatggctactgatcaattaggcttccagtagttgtgttttgttatgtacttccagaactatgctacttggcaacaaaacactaatgaaacaagtgatgtacagacaatctatgttagtgaaaccaaattgggggtt

SEQ ID NO: 50810 - DNA, 560 bp, Homo sapiens
  misc_feature 504: n = A,T,C or G
cgggccccccctcgggagtcttctagaattaattaacgcgggtatatattaagaactactttatcaccaaaataaataccaacaaaaacaacaatctgattaaaaactcaaattgtggctgggcgtggtggctcatgcctataatcctagcactctgggaggcctagacaggcagatcacttgaggtcaggagtcaagaccagcctggccaacatggtaaaactccatctctactgaaaatacaaaaattagccaggcgtggtggcacacacctataatcccagctactcaggaggctgaggcaggagaatcacttgaacccgacaggcggaggctgcagtgagcctagatcacgccactgcacttcggcctgggtgacagagcaagacttcatctcaaataacaaaaaaaccacaaattcttccagttgactactactatcctattgtgccctgctattagcaggctgggatgtacccttttagattcctctgcaatgcacanatacgcatacactttttcttacattaatgggatggtactatacatacttgtacatg

SEQ ID NO: 50811 - DNA, 600 bp, Homo sapiens
  misc_feature 31, 48: n = A,T,C or G
taccggggccccccctcggggatcttctagnattaattaacgcggggnaaaggacagactattgaacaacagttatcctgagacataagttaactataagaaaataaaatcattatctcacatcatagagacacattttcaagctataggcttaaatgtaaaaataaaattttgacaatttttaggaaaaaaatgctctttaggtaatgatttttaaaataacatacaaaagtagaaattataaagtaaaagactgataaatgtgttactatgttgaagtttttaaaaattctaacaaaaggttcttcaaacaaaatgaaaaaccaaaccacagactacaagatattaacaaaatacataacaaaaaggtattaattttcaggatacattaagtcctaaaagtcagtaaataaatacaaacaactctattgaaaaaaatgaggcaaaaaattgtgaatagctagttaacaaaaaaaggaaatcacggtgaaaataaacataagatgttcaagttcagtacgatgcagtttaacactacgatgaaacagcatttcgcgtcagactggcaaagtatcacactaatgaaagaaagttacactg

SEQ ID NO: 50812 - DNA, 411 bp, Homo sapiens
  misc_feature 17, 44: n = A,T,C or G
ccgggccccccctcganagtcttctagaattaattaacgcgggnaacccaacttatatatggagtataaaaaagtcaatctcataggaagagaggacaaaatggtggttaccagaggtttggggtggggaggttgggagatgttgatctaacgacacaaaatttcaggtaggcaggaggaataagttcaagagatctattgcacctcatttgactgcaaaaaataagaacacattatgtaatgttaccttgaaaatttctgaagagaagacattaagttttcttactgcaaaaaaaaaaaaatggtaagtttctgaggtaatgcttatatccaatggcttgagttaacccttccacaatgtgtacatctaccaaaatgtcatgttgtactccataaatatatatatatata

SEQ ID NO: 50813 - DNA, 534 bp, Homo sapiens
taattaacgcgggggatacaggacaaatccaatctgtaatttagaacaaaaagcatatattaaaataaccaatcacattcccaaaaatggtacatttcaaaatacttgcttccgaggtaaataactaagttaactccaattatctaagatgtaacagataaaacatcaggttttgctgcctgttttagtaatatagagagtctctaatatgtcatattttcataaaagttttaaaaggacatttaatgatcagttttcaaaatataaacagtcatcttgctaggaatgtctggactttaagagaatgtcttgggtttctacattgtgcagtttcactctgttatttcaaaattggagtacaaaaaggttttaaaataaataaatgcccacagttaacattatatttaatggtaaaagactgaaatctttccccctaatatcaggaacgagacatggatgtctgctttcacacttctattgaatgttgtactgaaaatcttagctagagcaattaagttaagatttagctagagt

SEQ ID NO: 50814 - DNA, 600 bp, Homo sapiens
cgggccccccctcgaaagtcttctagaattaattaacgcgggtactataaaagctttctttaagaggattgaaataccttctccgggtcattgttaattcttagttgtgaaataccttcttcaggccattcttttcagtgaaagaaagcataaaatgctattcgaatttgatctttgaaaaaacaaaaaggcaaagcaaaaggaatttggggaaatcactagtttgttcctggattcttcctctgattgatgactgtgacactttttggggtggctttttaaaaggacatgattttcgaaagcgcaccactcctaaacataaacctccttaggtcacaggcaagttgtataatttctaaacaattgaaccaagtactgatgctcccctcacaaaacacaggccagtgatgttggaggcagattctgagtcagctctcctaggcagctgaaaacactgttacaaaaatgccagatatcgaaaaatgtggcttctctcatctgggggcttcagaacattctgcaaacaatgaactaagcttcccatctaagttccagttaactaagcttccagttagataagtggtcttttgttgcttacag

SEQ ID NO: 50815 - DNA, 613 bp, Homo sapiens
cgggccccccctcggaagtcttctagaattaattaacgcgggggttttatacttgtatagatcgctgttgatggatggccataaagataagcacaggcaacagcagggtggtgatcaatattccgaatccctcaaagaatgtggaaattatgtctactatattttgagaatgcatcagtctagtaacagttgttagaaaattagtcctaacatgtttgatacatatgttaatcctttaaccatactgtgtcatttgtgttagtcaaaataacaagccgacattcttataacaaaatagagttttcaaatcctcctaaccttttaaatccctattacaggcatttatggttggcaggaagttggcatccccctttttacagagagggaaactgaggctcacagagattgcaggttgctcttagctgctccaccacagagctgaggctagaaccaagcctcttgcccctatattttaggactgttttcactatgatggttttatcttttcaaacacttttatttctgtctttagtgtcatactgtgctaagtgctataatctacaccagctctgtttctgtcctcttagataaaaccttgtaattcccattacta

SEQ ID NO: 50816 - DNA, 559 bp, Homo sapiens
attaattaacgcggggagttccaaaattgagttagtcatacaagacctaccaaccagcgcaaaaaaccttagactagacggattcacagtcgaattctaccagatgtgtaaagaaaagccggcaccaatcctactgaaattattccacacaattgaggaggagcaactgctctctaactcattctatgaggtcagagtcattctgataccgaaacctggcagagacacaacgaaaaaaggaaaataggtaaagtaatacatatgttaatgatcttgatttagccattctacggtatatacatatttaaaaacaatatgtacatgataaatatgtacaatttgtcaattaaaaatatataaaaggaagaggaaaaaattcaaatggcgtagaatttgaaaggagaagatacagaacaaactccagtgtcttattattcaactatatatacacacgttcaatggaccgggagcagtggctcaagcctgtaatcacagcactttgggaggtcaaggcgggcagatcacctgaggtcgggagttcgagaccagcctgaccaac

SEQ ID NO: 50817 - DNA, 600 bp, Homo sapiens
cccccctcggaagtcttctagaattaattaacgcgggcattccttgaattaaaagcatttctttataattcaattccttaagaccagatttgtcttactgatgggaaaagtattagtattttcttcatataggcagttcatcttttatatcgttcatataggaacttttattttttcaccgtaaaaaaattaggtaatattggagtaggaggtaaagtaatccagctttagcaatatttagatgttttctctgaaatgtcaaaaagcaagggtccaaactgtagtgcaagcatctcctctgaaagaatgagatgtagggccaccgtgtcctcgaatttagcctacgttttagcggagctcactctcggctcagataatctctggggaaaaaacggacagatagagtggttaaacaggaaacactatttttttttttcaaacgtttgagaaaacttgaaaaccatctctcggtacttttgcagtaatttccaggagtcagaacatacagtccattattcttcagagtaaccaacgcacaagacattttggcttgggacttgatatcgcgaaatgacgtcaaaaaaaaaaaaaaagcggccg

SEQ ID NO: 50818 - DNA, 595 bp, Homo sapiens
cgggccccccctcgagagtcttctagaattaattaacgcgggatggaggtcaagtttgagggaaaaaaatgagcaatgctcatccaaacaatgagtttaaaaagtagtgaccataattggaatggaaacattttcaaatatgtaaatcaaaattattttctggaaatataactgagctacagaataaaagagaaaattgtccgggaaaagtgtccaggaaaaattgatacagaatgatcaagcctaaaatatacatgggtagagttagtggtcttctaaaaagaaaacaaaagaaaaaacctctgcttggcatcaagttcacaaagataaagttaccattggaggaagattcaggctagccttagagacttctgttcagaactttctaatagtagaatggattggattgctaaatgcctacaacattttcagagaaagaaatcgtaacacgaaaagctttataatcaggaatctaaatgcaaacaaaggcagaagacagacatttttacatgtgtgggaattctaattcccataagcccttcttaagggaactaatagagcccaacaaaagaccaatagagaaactgtaaaggat

SEQ ID NO: 50819 - DNA, 616 bp, Homo sapiens
  misc_feature 23, 67: n = A,T,C or G
gggtccccccctcgagtgtactntctataattaattaacgcgggtcttcctgactccaaagacaggngcttctaatatgtcaaactgcttccctttgaatttagaaataaaggatgggaaagagaatttgagtcttttcaagactaaaagccaaaacaaacatacagatagaaaagctaccagagtagtcttttcctcttcatgctcttaaaacactacatatttcccttcctcttctgagctcactctgcctggcatggaccatacttttccaaactagctgctctcagaaggaatctggcagaaaaaatgataaaactgggcagacttgcttgcaataagattttcagatgcaagattttactggtgtacaaaaacaagagttcaatcataatgtgaacaggaaaaagcaaaggatgatctagttatagggaacggttcacctaagtgatctctcttagctaaatattaaagaaagaaagcacttgacctgctcctgcaacaccacaagtctactgggagttctcactttttaaaaagtgcttcacgcattgcagacagtgccttaccctatccatctgtgaagagctgcatcaaaaaaaaaaaaaaaaaaagc

SEQ ID NO: 50820 - DNA, 623 bp, Homo sapiens
  misc_feature 50: n = A,T,C or G
cgggccccccctcggaagtcttctagaattaattaacgcgggcccctggnaaacagaccaataaagtaccattcagtacactgctgattcaatacacaaaatagtacttcagtattcagaaacagttaacaagacatcacaaactatgtaacttactttgtggagatattttaataataccaatttctttatagtttgcaaagcaattgcaaaagtgttatcattttgtactcttaaaaaaccaagagatatctattgctgtctccagttttttttaaaaaaataaagatattatgacagaaagattctcttttgctaaagtacacttggctgttaagtggtagggctgagcattttacactgaccctttgacaatacattttaggctagtttctacagtacagcttcctgtagttttgtacatgtgaggctatttaagtcatcttctgagaaaagaaaatattctcagtgtaagatatcaaactagcagcttttagtgcataatctggaaaatgcaaagcagaactaccttaaagtgtttgaaattcacaaattctataaaatagtaatagaatgaaaattaaaatatgtagttataaacagtataaattatatttttcttt

SEQ ID NO: 50821 - DNA, 186 bp, Homo sapiens
ccccctcgaaggtacttctaggaattaattaacgcgggcggaggacatgctatgtaaatacttgataagctctattggctcgataatgagacttactccttatagctccattgttatttacttacttgaatgtttacaacccagacctgaatctgtggttgtggaaccctgaaatacatagggcca

SEQ ID NO: 50822 - DNA, 521 bp, Homo sapiens
gttcacgataaggtcattgtatccatcaggaggcgtttcatgaacaagaaggtcttacattcccaaataaatgcctctttaagacagtcatccatgctagtcatactagcaatattgagctgtgcttattacaactttctttcacaatggcaacataaaacatatatgcaggtcaaattcaatacatgcccacctgtactcaccaggacaagatatgggcgtgacgtctaacgacccagaacaaggcacggcttataagatcaagaaagtagagaagagagcagtcacaaaaccttaaaatgagtaaagaaggaaagctacaaaaagaagtactccaatagctatttctacgtaaaaaatttataggaaaagaaaaagcatctaaaaatcatatttattaataattggatataaaatgaaacagagaaacgaagggaagatcatgtaaaaggagactgaaaaattatgagtgagaaatatttagatactttagagcgagtgaacagtcttcataactgttg

SEQ ID NO: 50823 - DNA, 618 bp, Homo sapiens
cgggccccccctcggggtacttctagaattaattaacgcgggggaaaacacacgcaatgtcaaaagacaaatagctataatataccaagagctccggtaaagaaaaacatacaaatgacagtagaaaatgggcaaagaatacaaacagacacttcataaaaaagcaaatccaatgacttacaagtacattaaaaagattatttgaattcaacagtggtcaagggaaatgcaactttaataatgagcaggccgggtgcagtggctcacgcctataatcccaagcactttgggaggccgaggcgggaggataacttcaggtcaggagttcaagacaaaaaaaaaaagtaataatgaacaactgcttcacactcatcagatcagcaaaattaaaacaaataatgcctactgttagcacactgaaataaaaacacacaacacatgggaggggagtggtcaaatacatagtgtagtgagtaataaaatgaacaaattagaggtaaaccagaaggcttgcaaggatttccatgagttactgatgaataagatgatgcaggtttgtgaacatttgtgaacaatgatcccactttgatcaggcaaacacctatgcaaaaatgtgtg

SEQ ID NO: 50824 - DNA, 533 bp, Homo sapiens; identical to SEQ ID NO: 42617
  misc_feature 520: n = A,T,C or G

SEQ ID NO: 50825 - DNA, 505 bp, Homo sapiens
taattaaatcatttcatgtttgctagattttgtaaatatagcaatcaataagaaacttctactgccaaggactagttctcaagcagaggcaaactattgactttcacaatagcaaatactaaatgtgagatctatgtacaagttatgataagggcaccagagagaggcatctttcaaagtccaaaaaaaatgaatcaagatgactttatctaagaagtaatgcattacattaaacttaaatatgaattagtcctggaaataaggagaaaaaaataacccacaggagtagatactactagggctcactaagagttctaatttctcttttcttccaagaaaatgccggttatgccacaaccatgtgacttttttggccaagatattgtggccaatgtgagtggaagtgatgtattttattgttggatagaagcaactaagggtcacgttgtaatgttccatgttctcttcacctgccagtctgaaacctgaagacgcagcttgaaat

SEQ ID NO: 50826 - DNA, 547 bp, Homo sapiens
  misc_feature 522: n = A,T,C or G
tgggtaccgggcccccccctcgggagtcttctagaattaattaacgcggggaaaatgcggacggtcatttcactgaagccccacctttaggctactcccacagtttcaggaaacacaggaggaaggctcaaggcatccctgcctcacagctggccgtgagaacaagccagctgctgggtgatggaaagtttcgctcttgttgcaaaaaaaaaacaaaaaaaaaaggacttatctaggccaggcgcagtggctcacacctgcaatcccaacaccttgggaggacgaggcaggtggatcacctgaggtcaggagatcaagaccatcctggccaacacggtgaaaccccgtctctactaaaaatacaaaaaaaattagccgggcatggtggtgggcacgtgcaatcccagccactcgggaggctgaggcaggagaatagcatgaacccaggaggcagagcttgcagtgagccgagatcacgccactgcactccagcctgggtgacagagcaagactccgtctcanaaaaaaaaaaaaaaaaaaaaaaaaa

SEQ ID NO: 50827 - DNA, 426 bp, Homo sapiens
ccgggccccccctcggaagtcttctagaattaattaacgcggggtttacttgttctctttttctcttggttgtttgtgaatgtacatccctgtactgtggggcctctgagtttgtcaaaagtacccttcaggccgggcgcggtggctcacgcctgtaatcccagcactttgcgaggctgaggtgggcggatcacctgaggtcaggagttcgagaccagcctgaccaacgtggagaaaccccacccctactaaaaatacaaaattagccgggtgtggtggcgcatgcctgtaatccctgctacccgggaggctgaggcaggagaattgcttgaacccaggaggcggagtttgcagtgagccaagatcacgccattgcactccagcctgggcaacaagagcgagactctgtctaaaaaaaaaaaaaaa

SEQ ID NO: 50828 - DNA, 562 bp, Homo sapiens
  misc_feature 527: n = A,T,C or G
cccccctcggaagtcttctagaattaattaacgcgggtgatatatgtgggtttaatgaagagacaacttatgaattttgcctgcattggatgcaatttggggccttctatcccttttccagaaacaataaggccattggaaataaggcaagtgacagtcaatttaaaataactgccatgctcagtattaatctgtaattagaaacttgggttagaaaaaaatgtatacagtcattaaaatatgaataaaaatcgaactgttctttgacagctttcaaaaatatgtgatttttttttgaaaaaatattttgcatgtcattcattttatcaagaactgtgagagagaatgccaagaaatatattttggagaaatagcttttctaaaattgtttttgaaaatgcattgtttataatttctacaagagggagcatattacatcatttaaaataagctgtgaaaaatctttcactttatgacacaggtagcaacatacaaatgtatgatatttgaaattatcctcagcagcncagtatttgaccaaattacaagactttgttttgat

SEQ ID NO: 50829 - DNA, 566 bp, Homo sapiens
  misc_feature 33, 61, 64: n = A,T,C or G
ggtaccgggcccccccctcggagatcttctagnattaattaacgcgggtctctatacatanaanaaataaataggttgggtgcggtgggtcacgcctgtaatcccagcactttgggaggccgaggtgggtggatcacgaggtcaggggatcgagaccatcctggctaacatggtgaagccccatctctactaaaaatacaaaaaaaaaattagccgagcgtggtggtgggcacctgtagtcccagctactcgggaggctgaggcaggagaatggcgtgaaccctggaggcagagcttgcagtgaaccgagatcgcgccactgcactccagcctgggcgacagagcgagactctgtctcaaaaaagaaaaaaaaagatactaagttgggtctctaagaatttgataaataaatacaagttgttccactcattggctttctataaatgtttatcatgatatctgtctcattcttaagttcattaaagtcctcagatttgaaagatgaaaggatgttttaagaactttttgctttgaaagcatgtactagtcaagtaatatctcatttt

SEQ ID NO: 50830 - DNA, 581 bp, Homo sapiens
  misc_feature 28: n = A,T,C or G
cgggcccccccctcggggtacttctagnaattaattaacgcgggacctgcacatgtactccctgactgaaagtcaaaaaatttttaaaaaggtatgatggacaattaaagcaagaagaaactatctaaacagctttatatgtgctaatattgaatgaagtcagtatattgttaagtagaaataaataaaatgacaaactatcaaataaaattttatctattatgttcattaatatcctttatgtatatgcttgtttattgatagaataacatttgtttatcttaaatgatactccaccaattagtggctacctcaagagtgacactacatagccatagttatttttctattttggtcttgtatccctaataaatcaatattttacatgaatatcacatgcttagcatacaactatatcaaatatgactttagatacagtatatgtagtacctgcgtgggaattagcttgtaatcaggctaagaagataagaatggcaaaagtagagaatcatacagaatgtcaattaatactcagttttgtcacacaaatattttatgaagccctcttagacgactgcagc

SEQ ID NO: 50831 - DNA, 507 bp, Homo sapiens
cgggccccccctcggaagtcttctagaattaattaacgcgggggcttggtaaacaccttgaactttccattgaaatgtgagaagggccatgccacaccttaggactaagaatcatgtactgggactaagggctacatcctagggctaaaggaaaaacaagaaaagactggtactaacaaaagcaaaaagaagccttcacaggattgaggtgactggccagacgctacttgccagaacacacaactcagtgctctgtggaggaaaataaggttatcgagagtctttagtatatattatcctgaaggttcagaggagaaacacttggtgactgtgacttagataaagagattttagacttaacaccaagagcatcatctagaaaagaaaaaaagttaataaaagttaataaattggacttcatcaaaattaaaaacatttgctccaccaaagaccctgttgaaatggtgaaaagacaagctagacacatggactaaaaaaaaaaaaaaa

SEQ ID NO: 50832 - DNA, 616 bp, Homo sapiens
cccccctgcgaaagtcttctagaattaattaacgcggggcatggtggcccatgtctgtaatcccagctctttaggagggcaaggcatgaggatcacttgagaccaggagtttgaagccatcctgggcaacatagtgagacccccatctctacaaaaataataatataaaatgattatgtcccaaaaataagtcatgacagaacaagatctgcttaggtgggattttattatgtcttatacaattaatataaaactgaaagctaaaagtagctgagaaataaaattctaagctcttattaactatattcaagtactgtaacagcaacaaatataaacaaaaacctttaagattgctttttggctgggcgcggtggctcacgcctgcaatcccagcactttgggaggccaaggcaggcagatcacctgaggtcgggagttcgagaccagcctgaccaacatggagaaaccccatctctactaaaaatacaaaattagccgggtgtggtggcgcatgcctgtaatcccagctactcgggaggctgaggcaggagaatcgcttgaacctgtgaggcagaggttgcggtgagctgagatcatgccattgcactccagcctg

SEQ ID NO: 50833 - DNA, 543 bp, Homo sapiens
  misc_feature 31: n = A,T,C or G
accgggcccccccctcgggggtacttctagnattaattaacgcgggaggcaccacagaaggtgaagtccatttaggaatagaaaatgatgcaagaaattatggggaaaaatcttcagtgaaatagatagcataaatacaaaacaatcacaactttaggaaatagagaacacccttagagaaatgcaaaatgttctggaaagtctcagcaatagaatcagacgagcagaagaaagaacttcagaactcaaagacaaggtgtttgaattaactcaatccaacggagacaaagaaaaaagactgaaataaaatgaacaaagtctccaggaagtttgggattatgttaaatgaccgaacccaaaaataactggcattcctgaggaagaagagaaatctaaaagtttggaaaacatatgtaggggaatatcaaggaaaacttccctggctttgctagagacctagacatccaaatacaaaaagctcaaagaccaagatcgtgccattgcactccagcctgtgcaacaagagtgaaacactgtcaaaaa

SEQ ID NO: 50834 - DNA, 362 bp, Homo sapiens
ccgggtccccccctgcagaaatacttgctataattaattaacgcggggggggcctattacaataccctggaagtggagctagctagtttctgttgctccaggggaatttaccacgtcacactagaaatagctgacaataattagaaagcctgcttctgccagtattgcacacatttttaataccttcctaagtattatgggagataatacacaaggtctttagaattctagtcatgccacccaagccatggaaaggacaactagacaatagccccaaactggactgtgacaggctaattattgtgacttcattataaaacctctttttacataggtcacctgggaagtgtaatgaaaaatgc

SEQ ID NO: 50835 - DNA, 595 bp, Homo sapiens
ttctagaattaattaataaaccaaaagtatgctccctaagactgtgtatgttcttctaaataagcttctatatcactaaaattctaaagcgtattcctcagagcatccacatggggaaggttatattgatcagttactctgatgcactactccattgttaagcttacaaagaaatgctcagaaacaaatagatcagaattaggatgctcactttcatggccattcattttatatattttttatttatttttaattttttagagataggatatcactctgttgcccagactggactgcagtggcacagtcaacagctccctgcaacctcaactcttggcctcaagcgatcctcctgcctcagcctcccaagcagcttggaccacaggtgtgtgccaccacacctggctgttttttttaaaatttcttgtagagacaggggtctcaccgtgttgcccaggctggtctcgaacccctggccccagtgatcctcccacatcagcctggccaacacagtgaaactccatctctgctaaatatgcaaaaattagctagatgcggtggcacgcacctgtaatcccagcttctttggaagctg

SEQ ID NO: 50836 - DNA, 475 bp, Homo sapiens
cgggccccccctcggaagtcttctagaattaattaacgcgggggttgttagccgtcagagagagaccttggcacacggctgaccacaagacaacctgggagttccagaatgcagagtcctgggccagctaagttgctgggatgaaccagtttcagtcaaggtaagaaaggtaacgtccaggctgggcgcggtggctcacacctgtaatcccagcactttgggaggccgaggcggccggatggcctgaggtcaggagttcaagaccagcccagccaacatggtgaaactccaactctactaaaaatacaaaaattagccgggcatggtggcacatgcctgtagtcccagctacttgggaggctgaagcaggagaacagtttgaacccggggaagcaggggttgccgtgagctgagatggcaccactgcactccagcccggacaacagagtaagactccatctcaaaaaaaaaaaaa

SEQ ID NO: 50837 - DNA, 526 bp, Homo sapiens
cgggccccccctcggaagtcttctagtaattaattaacgcgggtcctccagaaaaacaacaaaatttagtcatcatcttgccaaacataaccttcattccttatgtagaacaggataggaaaaatcagttgcctagaacacaaaggatttagagtatgttaaaaacaagatgctatactggaaccattcttgtaacttagaattaaacagtacaccagcacttttcttatcattttgaaggtgtactatacttgctaacagaaatatagtgtcagtagcttggaaatggaacataggtgtacaatgggagagtgtatttgtaaaccagatatttgatatggggttcatatcaaaatatataaataactcacctcaatagtaaaaaaaaaaattaaaaaatggtcaaagtacccaaataaacatttctaaaaagaagacatacacacagtcaatacatatatttaaaatgtgtgcaacatctccaatcatcagggaaatgcaaatcaaaccacaatgaggtgtcatc

SEQ ID NO: 50838 - DNA, 564 bp, Homo sapiens
  misc_feature 27: n = A,T,C or G
cgggcccccccctcggggtacttctanaattaattaacgcgggcccaggcatccgtaagttcataatttaatacaatggtggtttgttcatttcttcattctttaatttagccaataagtattttttattatatgtcagaaaatgggttaggcactaggaatataaagatgaataagacacagtgtatgcttgtttagggaggatgagaagcatgttaataatcccattacacagctacatgttagtgctttaagagtgtgaagaggatggctgggcacggtggctcacgcctgtaattccagcactttgggaggctgaggcgggcagatcacctgaggtgggaagttcaagaccagcctgaccaacatggagaaaccccatctctactaaaaatacacaattagccaggcgtggtggtgcatgcctgtaatcccagctacttgggaggctgaggcaggagaatcgcttgaacccaggaggtggaggttgcagtgagccgagatggtaccattgcactccagcctgggcaacaagagtgaaactccgtctcaaaaaaaaaaaaa

SEQ ID NO: 50839 - DNA, 409 bp, Homo sapiens
cccccctcgagagtcttctagaattaattaacgcgggtccccaaggagccagcacttcctctgctgaactacatttcttaaaaggacatgcagatgggcatttagacaataatttctggctacacaaaatggattgctcttgctgagttgtaattttaaacagataattttaatgactcttgagggccacctacttggagcagatgggacccaggctctttgtaccacaactttaatgttgagtgaatcagaatagaactctatttagcctttgtaaaagtggatgataatatttattcatatttcaatggagttttaaattcaatccaccatgaaaaaaatcttatgtaaaagtcttaaaaattctgtaaaaaaacacatctgcaatattcaaaatacactttttgat

SEQ ID NO: 50840 - DNA, 576 bp, Homo sapiens
  misc_feature 28: n = A,T,C or G
cgggcccccccctcggggatcttctagnattaattaactcaaataactataggttgatagtcaaaaagtcaaaacagaaatcacatactttatgaactatgtgcatttgtaagtaacttacataatatataaaatattaagactttctaaactctatggaatatttcaaaaacattgtctgaatggctggtatatgacagagatgaaatattcatttctaagaatgagatatttactgaaattatctgattccagtagggttctatattttctaaatcattttagatacattctatctgtgtgaaaggcctgaaaaacaatacacaacattctatccatgtgaaaggctttaaaacatgcaacagatctcaactggattgtgttagaaaaggagactgatcatgccacgtcccctagataggccaaaagcactgacaataacagagaaatctggtcaagcaataagtgataaaacagcactgcgtgcactgtgaaacagtcactaatatcttagaacagtgtatattgcaggaaagcatcaaactgcatatgtcatggtaaatatactcactgatg

SEQ ID NO: 50841 - DNA, 543 bp, Homo sapiens
  misc_feature 19, 432: n = A,T,C or G
ccctcgggagtcttctagnaattaattaacgcgggggaagatgttcttagtccttgccagacttccagaggaatcaattgcaaaaagaaaaataattagaaatgcttgtctaattggagctccagaaatatacactagaaagaacgtgaatatgcaatagtcaaagaggtaaagtttgataattttacagaagttttgaaacacaccaatactcacatagaggaatctgaatgaattccaagataaatcaaagcaaaaactataaaacactgaaatgtagagaaaatatttgtaatagctaatgggaaaacacaaagaagtgataatcaaattataacagattctcaagtgaatagtggaggcttttcccattttaaactcaggatttaagaagaaattctgagaggtaccaacctaacttaattgcagaanttccaaaagatttgaacacagatgaattctgtatccatcatggtataacaggaagtagatttaaccttcatcttatataacctagaaaactttactaaatattaatatgat

SEQ ID NO: 50842 - DNA, 595 bp, Homo sapiens
  misc_feature 28: n = A,T,C or G
cgggcccccccctcggggtacttctagnattaattaacacatagcttgttcacgataagggcattgtatccatcaagaggcatttcaagaacaagaagttcttacattcccaaataaatgcctctttaagacagtcatccatgctagtcattctagcaatatttgcttgcttattacaactttgtttcagaatggcaacaaaaaacatatatgcaggtcaaattcaatacatgcccacctgttctcaccaggacaagatatgggcgtgacgtctagcaatcccagaacaaggcacggtttataagatcaagaaagtggagaagagagcagtcacaaaaccttaaaatgaagaaagaaggaaatctacaaaaagaagtactccaatagctatttcaaaataaaaaatttaaatgaaaagaaaaagcatctaaaaatcatatttattaataattcgatatacaatgactaagacaaacacagggaagatcatgtaaaaggagactgaataattaggagtgagaaatatttaaatactttacagtgagtgaacagtcttcaaaactgttggccattagcctaaagcatcctcatatat

SEQ ID NO: 50843 - DNA, 603 bp, Homo sapiens
  misc_feature 28: n = A,T,C or G
cgggcccccccctcggggtacttctagnattaattaattatctacctactttcatttttcttttcttcttttatactatttccttacacaaattacctttttcccttgttagttctttatctttccgtaatctctctgtttggaaatgtggacttcaagcttgattagtaattccacgtggaaattttcttgttatgttacttacagacacatgctggagtgttgtatttaaagacagatggcaaaaatcatatgagcacaccatgtggctagttctgaatccatcaattttcagctgaggaggctagcttaagcatctgcaatcactggtcgacaagaaaataaaaatggagaagactggaaattttcacttgttgaagatgtggttttatttgttctgataccaaaatatactgaatttgaaagctcttcagatggttgtggtataaagcactcctacagagaagcgactgttttctaaatatacatagcttctttcttcagagtgggaatttaaactaggagccatgaacttatacagccacgttaatgttttatagtgtcagccagtagaggtacccatcgtataggattcttcatgac

SEQ ID NO: 50844 - DNA, 592 bp, Homo sapiens
  misc_feature 43: n = A,T,C or G
acttctagaattaattaacgcgggcatgagccaccatacctgngcctctcccacaattaaatctgtcttcagattccttctcttagtttattgagtcaactatttcctatcccccaaatccaccccatgatctcatcggccaacctgtctccacccctcaaggctaggcatctgaaaaaaatgggtttcgagattcagtctagcacatttacttggatttagctcaccaccactgatgacacagcacaacctgtttctcctcccacttctctaatgaaactcttccagcaaaggccacaagtgaccgccatttgccaaattcaaaggacacttcagtttttatatttcttgatctttttcccttatctgaccccactgaactcactctctcctgaagctttctttccttgcctctcctgttcttctcctacttctttggattctcatctcagcctcctcacctgagttatttccctctgcccagtccttacatgctgatgctctccacgactctgccagcagcctcctcctctcctcatcctccccactctccctggagaagcttatggattaccatgctacttatcacctt

SEQ ID NO: 50845 - DNA, 425 bp, Homo sapiens
gggccccccctcggaagtcttctagaattaattaacgcgggattcctgtgaaatgaccatctgatatctaattaaacaacttacactgcaggagtatcaaacctcataaacaaatcaatgtcttttcaacatcaacatgttttagaaattttattatattgaacatagatttgctttcctttgttttctccttcgatcctaggtctgccttctggtgataagcaggtaagtctaattatctcattatcaaaaatatatgtatctatcatctaggctatcaaagacatagtgtttaccctctacatcttttattttaagggaaacagctacaattaaggagattatagataagtatgtattcaagtcttttatcaccaaagaaaagccgtgatagtagtactttcttgtcacaacaaactgcacta

SEQ ID NO: 50846 - DNA, 442 bp, Homo sapiens
cgggcccccccctcgaaagtcttctagaattaattaacgcggggttcccaccaccggtaggtggcagggctgagactgagacatacacttaccccgccacattaaaacttctcaggaaaactgctgccttttaagaagcttttgttctggctggcaatggtggctcatgcctgtaatcccagcaatttgggaggccaaggttgggggatcacttgaggtcaagagtttgagaccagcctggccaacatggcaatatcctgcctctactaaaaatacaaaaattagccaggcgtggtggcaggtgcttgtaatcccagctacttgggaggctgaggcaggagaattcttgagcctgggaggtgtacgttgcggcgagccaagattgtgccactgcactctacctgggtgatacagtgagactccgtctcaaaaaaaaaaaaaa

SEQ ID NO: 50847 - DNA, 592 bp, Homo sapiens
  misc_feature 28, 496: n = A,T,C or G
cgggcccccccctcggaatacttctagnattaattaacgtgggaagtttctctgtgaagcttgtttctatatgtgtatttttatgagagtgtagtgactgcatgtaaaactcctctttttctgggattttagtctaaaaagtcattactttaattgctgtacaaattcagacttctcatcacctgaatgtgcttttttctgtcttcatcccatctgtacaactccttgcttttataaattatgcacatgtgccattcagattctccctcagccttctgattatttctggatcaaatgctgatgatggatcaaatgctgataagcttttctcataagacaggtttcagtattcgttgcttaactcagtttgcccttcatggtggaaaagactccttagtccgagaaatcacctccttggggtattcacttctgatgccttcaggaattgagattttccagttacaaatatataaactaaattttttagcctaccttnttattacttaatatatttatctgtataatctgtgctgggcacttaagaggaacacaactgactgtgactaaagtgtaaaaaaaaaaaaaaagcggc

SEQ ID NO: 50848 - DNA, 464 bp, Homo sapiens
  misc_feature 23: n = A,T,C or G
ccccccctcggggatcttctagnaattaattaacgcgggctcagcttccttgggaaacagaccctaagacagaaatgtgcatgcagagaggttacagaagagttccctgggaggcagcatttatgagaacataagggaaccaggattgggcagagggagaagttgaattgcaagacaactgaaactgagacttaagaagatccacagggaactcaggcacagagatgaccctttagagacatatctcttacttttcattgaatgcagaagaaggtcatttccttgggcaagggagttctctttggggaagagtacttcctagcactttccccattacttgaggacaataccaacctccagatctgtcgcacccctacccactggccattagggcttataacttgggtaaagtcactgtatcacccagctaggatcgtgtgagccaagggaaaaaaaaaaaaaaa

SEQ ID NO: 50849 - DNA, 552 bp, Homo sapiens
  misc_feature 27, 467: n = A,T,C or G
cgggccccccctcgggagtcttctagnattaattaacgcgggcatctaagcctctaaatttaccccaactggtaggtgtttctactcttttactgaagagcttttactatatcaggacaaaaggacacaggcttctttactgaagactgaggacctaaagaaccctcctttacatataatttgcacagaacttaagagaaacagttggaaataaaattgtcttaagtagaaactgcttattatgctaagttattaattgattaagataggaaataaaaaagttaaaaaccatcattctggaagatcacaacacttctaatatggaacaggagtccaaaagtcacaggagaaagatgtagattcttattagacatctataacaattgcttggcataaaactcatttcccaagttttcaattaatatttagaatgacagattagaagttgggaaaaggaaatgccacanattattgatattccctatagggcaggcacacattcctcctgtgagaataaaagtacctacatatattttatctactcattagtct

SEQ ID NO: 50850 - DNA, 584 bp, Homo sapiens
cgggccccccctcggaagtcttctagaattaattaattcatcaagcagtatttattatctttttaatgcaaggcaataaaacattgaagagcagacaaaactgcataattcttaccctcaaagagtttacaatctagtggaggaacagagagagatgaaatagaaaatgactttctccaatttagaaattggggctgtattgctgtattgattcttttatttgagaaaaagtctttgctattgtgaacagtgctgtaataaacatgtgtgcatgtgtcttcatagcaccatgatttataatcctttgggtatatacccagtaatgggattgctgggccaaatggtatttctggttctagttccttgaggaatcgccacactgtcttccacaatgattgaactaatttacactcccaccaacagctcctctttgtacctctgatagaattcagttgtgaatccatctggtcctgggctttttttggttggtaggctattaattactgcctcaatttcagaacttgttattggtctattcagggattcacttcctcctggtttagtcttgggagggggtatctgac

SEQ ID NO: 50851 - DNA, 161 bp, Homo sapiens
gactgggttaccgggccccccctcggaagatacttctataattaattaacgcgggggaccactgaagtttttcttaaagtcttaacgagatgaaagcagccttttaagaagatttaatcaggcaataatgtgcaagatagtatgaaaggagcgagggaatg

SEQ ID NO: 50852 - DNA, 602 bp, Homo sapiens
  misc_feature 583: n = A,T,C or G
gggccccccctcgaggtacttctagaattaattaacgcgggggtatggctaagttctcagtctcagttctgactctcctcctgaccaagtgacttgattcagttacactcagagtaataagccctgttttagtgattccagccttgaataattattacaaaagggagcagttctgtttgataccccactggggttctaggaatgtgttaggaaagaaaatatattatttaatgagacaaatagctaccaggattatttaaactcaacaatgaggcactattcattacataggaaagcatcatgaagtatactcaaaatagtggactctttttatatcttatataaatatatagtatttgtcttaagtgtcatctgttttattgtttctgtaagcttcatttcctctgtgcctgcatttcataaataaagcaaatttctgctttgtggaggtattgcttttttggtagcattttctatgttgccgacttgaaatcttactataaagtgttatgtttttaaatgccttaaattcaccttacctctgtatttcagatgaagccatatgtatatttgtatccaccanaacctgaggcctgcattca

SEQ ID NO: 50853 - DNA, 587 bp, Homo sapiens
  misc_feature 28: n = A,T,C or G
cggggccccccctcggaagtcttctagnattaattaacgcggggatgtggtggcacactctcatagtcacagctacttggaaggctgaggtgggaagatcacttgagcccaggagttcaagtttgcagtgagctatgatcatactcctgcactccagcctgggtgacagagtgagaccatgtctctaaatagattaaaaataagtttaaaaaactgaagtcctttcgtatgcccttattttattggcattgagatccagcctttgaaagtttcctccaccatttttttagaaagatttcatagcccattctttgatcatcatttacttcccatgtaccccaagacgtattttatagcacaaaattaacaaaatgctttcctggaacaaaaatgccaccacagaaggcattttgtcagggtcttcagggagccaaattaacccagtggacctaaagagagagcatctccatcatgcctgcagggactgacagagaagataatctcagtattccttggtcacagctgttctgtgggcatcatagctggtttctactatgatgtctctttcacaggtatgaacgtttctg

SEQ ID NO: 50854 - DNA, 566 bp, Homo sapiens
  misc_feature 18, 520: n = A,T,C or G
ccccccctcggagtactntctataattaattaacgcgggggtagctctacacataaactggcattatccatttttcacaattctcaaaattgtatctacaaagatacaaacaagatagtataacagttttgtttttttttaaaactgttcttttaaaactcaagacaggctgggtgcagtggctcacacctgtaatcccagcactttgcgaggccaaggcaggtgaatcacctgaggtcaggtgttcaagaccagcctggccaacatggtgaaactctatctctactaaaaatacaaaaaaattagccaggagtggtggtgggcacctgtattcccagctacttgggagactgaggcaggagaatcgcttgaatccaggaggtggaggtggcagtaagctgagactacaccattgcactccagcctgggcaacaagaatgaaactccatctcaaaaaaataaataaataaactcaagataatgcaaattttctctcatattcaaatcagctgcctctcanacagatacatctaaaccactgagattcaatgactgtaaaaaacacg

SEQ ID NO: 50855 - DNA, 545 bp, Homo sapiens
  misc_feature 24, 460: n = A,T,C or G
gccccccctcggggtacttctagnaattaattaacgcgggactcttttttttttgtacccattaaccatccttacttcccccacccagcccctcctctaccctccccagcctctggtagctatcattcttctctcttatctccactgtgaatatcaatcttttctctatactagaaatcacagcagcaatttaccttctcatcttatttaatagttagggaagatactagagatttcaggtttcttagcctagagatttgaattcctataggtactaaattgtaaaataagtgtgttatgtttagttatcataaatggtaatagtgaaaataatagttataataaatagtaattaatagtgatgactcatgcttaccatatatgtaactggcattttctcctgaatggctgaaatagtatttctttgtttttttgttttgtttttgttgttgtttgtttnttgagtctcactgtgtcaccaggcggagattgcagtgagttgagatggtgccactgcccttcatcctggggaacagagtgagacc

SEQ ID NO: 50856 - DNA, 592 bp, Homo sapiens
  misc_feature 24, 581: n = A,T,C or G
gccccccctcgaaatacttctagnaattaattaacgcggggggtggagggctaggggagggacagcactaggagaaatacctaatgtaggtgacaggtttatgggtgcaataaacctccatggcacatgtatatctatgtaacaaaactacacgttctgcacatgtaccccagaacttaaagtatcataaaaataaataaataaaaagaaattcaacatctctgaggcaaaaaataaagattctgaaacatttttgaaaaaaaaaagccagcagagtaagttgaaacccatcaaagcaataaacactattagctctttcaatctaaaacacttgttttcagcttttaaaaatttctttaaaaataacagttctcttcagttctaaaacaagtggacctgatagatatctacagaactctccatcccaaaacaacagaatatacaatcttctcagtgtcacattgcatttagtctaaaactgatcacataattggaagtaaaacactcctcagcaaatgcaaaataactgaaataataacaaacagtctctcagaccacagagaaattaaattagaactcanagaaactcact

SEQ ID NO: 50857 - DNA, 594 bp, Homo sapiens
  misc_feature 547: n = A,T,C or G
cgggccccccctcggggtacttctagaattaattaacgcggggtctctactatgtaggtaaagaacacctgcaaattcacattacctatgaattgatcatttgactgaacatttttctactaaagtattttaccgcaagagcagctatagacaatacacacatcaataagcaagttttgttccaacaatttacagaagcagggatatttggcccatagtttgctgatccaaatttaatttatagatttttttttaaagtgccaatccagcagacaattataggggaaaccactattttaaaactcaaaaattcaaatatataaaagtgaatttagaaaaaagcctagaggtgggaaggcaaggaatatctgaaattgtttctttttatttatagatattaaagtaatagcataggctgggcacggtggctcatgcctgtaatcccagcacttcaggaggccaaggcaggtagctcacttgagttcaagagtttgagaccagcctggacaacatggtgaaactcttgtctctacaataaaaaatacanaacattagctaggcatggtggcacacgctcccgtatttccagctact

SEQ ID NO: 50858 - DNA, 613 bp, Homo sapiens
cgggcccccccctcggggtacttctagaattaattaacgcgggaacatgttaaagctactatcctacaagatgaatcttcagaggctcagtgctcagtggtgacagtggccttgatttgacactgtttactggacactaaccttccatttctctttctgccataattttaggccacttcacctccatttaggttgaatgccttcatgaaaatgttagtactccaaagactaatcgagaataacacctatcatttggatgattaaatatttttaaatgaaaaataaaattaggccaggagtggcggctcacacctgtaatccaaacactttaggaggccaaggtgggcagattgcttgagcccaggaattcaagacaagactggccaacatggcaaaccccatctccacaaaaagtacaaaaatctagctgaacgtggtagtgcacgcctgtagtcccagctacttgggaggctgaggtgggaggatcgcttgagcccaggaggttgaggctacagtgagctgtgatcatgccattttagtccagcctgggcaacagagtgagaccctgtctttaaaaaaataagaagaagaaacaaaattaaaggtacttttg

SEQ ID NO: 50859 - DNA, 462 bp, Homo sapiens
cgggccccccctcggaagtcttctagaattaattaacgcgggtcataaataggtttggcttcaggagatgtgacctacagcctcaatcactttttcaggcttgacccacagagaagtatggaagcagctgatgaactttgcactcatagctactgatgtacgcaagttatctctatgtggctgataatgccggtgaaactgttaatgtgggaaggccctttcttgctggcttcttgagctcccagattcgacttcagatggtgaggcagctcattgcttcttcaacagggataaattggcaaccatttggaaatattaatatgtcacttcttactttacagatctctgtggaggggaagtgttcactataactgatactacatatataaataatttcagagctgttgctttaaagtatattgagaatccttaaagagtaaatagaaatctttccagtctcca

SEQ ID NO: 50860 - DNA, 463 bp, Homo sapiens
  misc_feature 14, 32: n = A,T,C or G
cgggcccccccctncgggaagtaccttctagnaattaattaacgcgggctgggtgcggtggctcactcctgtaatcccagcactttgggaggccgaggcgggtgggtcacctgagatcaggagttcgagaccagcctgatcaacctggtgaaaccccatctctagtaaaaatacaaaaactagccaggcatggtggtgggcgcctgtaatcccagctacccaggaggctgaggcaggagaatcacttgaacccaggaggtggaggttgcagtgagccaagatcatgccattgcactccagcctgggcgacagagcgagactctgcctcaaaactaataataataatataatgtaatataatacaaacagaaaattggagatggtttaattggttgtgggtattacagtggtagaagagggctaaaatggcttattctaaccccatacataactagacaaataa

SEQ ID NO: 50861 - DNA, 434 bp, Homo sapiens
  misc_feature 23: n = A,T,C or G
ccccccctcggggtacttctagnattaattaacgcgggtggaatatgaggtcaggagattgagaccatcctggctaacacggtgaaaccccgtctctgctaaatacatggcgagcgcctgtagtcccagctactcaggaggctgaggcaggagaatggcatgaacccaggaggcggagcttgcagtgagcagagatcgagccactgcactccagcctgggggacagagcgagactgtctcaaaaaaaaaaaaaaaattgtattttctccaacccgcagaacagttgtctttctcttgcttaaaaaaatttcttattcagttatacctctggctctactccattgttttagagcccttacattaatattgcataaatgcatgtatttgcataaaaagctacttctacttaacatgatcccaaaaaaaaaaaaaaa

SEQ ID NO: 50862 - DNA, 487 bp, Homo sapiens
  misc_feature 24: n = A,T,C or G
cgggcccccccctcgagggtactntctataattaattaacgcgggggtggtaccttgtggggatgccttgactctgagtctagtcctcatgtagacagctctaaacactgtattttatcagtttattcaggtgagactacaggggaacattcacactagccaaaatcacatttgctgtctagatcaagactttcttggcatctatgtacccaagaacatgaattagttatttgcatgttgccctgtgacactagaaaaagaacagagagaaccagatggtcctacgggcactttatccaagttattgtggaaaaacctcacgaatgtcctgcttctcaagagagtagatccttctagggtctgattaaatggggccccaggaaggatctctgcctgataaattcttattaactaccttattcactgattctaagatatacagtttttcactttttttttgacgggggaggggggggatgcctacaga

SEQ ID NO: 50863 - DNA, 569 bp, Homo sapiens
  misc_feature 538: n = A,T,C or G
cggggccccccctcggaagtcttctagaattaattaacgcgggagtcccttgtgcttgtttattgcatgtctgcagctgttattttcctgcttcttccacagttaggcaatagagccaggctgtcgtcagccttgctttgcctttattttgtgctccccatttttattgatgagcttatacttgtcctgctgattaagtaaaaatatgttttctttataatttttttaaagactatgttcccaaaaaagtctctgagttttccttttaatcactatttttccctttaaaaatgcatgaataaatttaaacccattcaaatgccaatatgcctaatgtacatattaagtcaatacgattttacttaactttttctacttacattttttttactatagctcaagacttacaacaaaatactaaatgatgactgagtctcatagtgtcttgctagaaaagtagcaactatttcctaaatattggcatgtctaattgctcaaattttacaagctaagaagactaggaagaaaaatctttcanacatttaggttagctctcagtgggagtctct

SEQ ID NO: 50864 - DNA, 612 bp, Homo sapiens
cccccctcgagagtcttctagaattaattaacgcgggggtctagggtaaaaattacaaattccattaaggtataaaaagataatagatactgtggggaaaccagtagtcttagccagtccactccttttgccattcgattatcaacgtgtattgtttcttctacaataaaaacattttcgctttctttctaagagagataagcaccaagcctcatcaccttagtgcatccagcaagaaatccaggatcccgtagtgattcttctctctacaaatgtagctctttgtggataattaatttataaattaaacttatctgctcccaaaacaaatataggataagagttcacatttagaaaagtgtcatggcaatttatacatcccactggacagcagtagcaaacatgttcttttctgcaagtagaatcaatttctttataagttacttcgcagctgctggctctactttctgcagataactcttttgcctatcaccttccatagctatatttgacaagaacttcaaaaaagaatgtatttttaggggcttttacaggccacttactgctggtgcagatttaggaatcagacattgtcttaagccaggcttgtag

SEQ ID NO: 50865 - DNA, 515 bp, Homo sapiens
  misc_feature 38: n = A,T,C or G
cccccctcgagagtcttctagaattaattaacgcgggnggagggaggagaaagcaacacactcttttaagacagatgagtgaaattccatggactgggaggatttgaatcttggatccgaggacatcgtagaaatcctggttgtttactagctgtgtgatgtggggcaagccatcaacctccctgatcctatgtccccacctataaagtaggaataaagatgctgacttcagctgggtgcagtggctcacacctgtaatcccagaactttgggaagtggaggctggggaatcacctgaggccaggagttcaagaccagcctggccaacatggtgaaaccccatctctactaaaaatacaaaaattagccaggcgtggtggcacacgcctgtagttccagctacttgggaggctgaggcaggagaatcgcttgaacctgggaggtggaggttgcagtgagcagagatcgtgccactgcactccagcctgggtgacaaagcgagactgtgtctcaaa

SEQ ID NO: 50866 - DNA, 614 bp, Homo sapiens
  misc_feature 37: n = A,T,C or G
ctggggtaccgggcccccccctcggagtacttctagnattaattaacgcgggggtctacagggaaatattaatagttgctgcctgtcttcccaaagagaggtaaatcaaggtccttccatgttatttttcttccccaggttagcagatgtatctacaattgatttaaaaaaatcagaatgacttatataagatacaaaacctaaagggaacatccttctttcatgtgttgtagtttttctcaggtccttgatccccaagccaaaaaattacttaaaaaaaaacaataaacctttttgagataaaaataaatgtaagccaggcatgctggttcacacttgtaatcccaacacttcgggaggctgaagtgggaggactgcttgagtccaggagattgacaccagcctgggcaacatagtgagaacctgtctccagtaaaaaatttaaaaattagccaggcatggtggcacacgtctgtagtcccagctacttgggaggcagaggcgagaggatcacttgagccttgaagttcaaggctgcaatgagctgtgattgtgcaactgcactccagcctgggcaacagagggagatgctgtcttaaaaataaataaaagta

SEQ ID NO: 50867 - DNA, 565 bp, Homo sapiens
  misc_feature 22: n = A,T,C or G
cccccctcggggtacttctagnaattaattaacgcgggtatatacccatagacttatgaaaaatgttcggtattactggtagtcaggatatgcaaaatcaaccatcttatcttcattccatgagaaacactaaaaattctgacaataccaagtattaatattgagcagaatgtagatgactcaggatttcatatatcctgctggtgggaaaaagtttggcattgctgaagttgaacatttatataccctaagcccagagattctattcctatgtatataccaaagaggaattcctacaaaggataaaagaagacatttgcaaggatgttcacagcagcactgacaccaatagcaaaactcttaacaaaggaaatacaatatacttcaataagagactgaacctgaataccaaccccaaccgcaactcttaatctaaatttgtgtggatattcaaacgatgtaaaaatgatacaggagtcaaataaactacagcaaaaatatggagagatatgagtaatataatatggaaatggaaaaagtgcagaagaatgtattgaacatgctc

SEQ ID NO: 50868 - DNA, 549 bp, Homo sapiens
  misc_feature 27: n = A,T,C or G
cgggccccccctcgggagtcttctagnattaattaacgcgggctccttggctctaaggggccatctaggacttcatctcagctcatgaataaaataaaataaaaagcagaggccagaaactcaaaagccttgtcctgaggaacagcataaatgagtaaacagactactgggtgcggcataagagatcacacgccttactaaaaagcctctcacactttttcaagaaaagctagaaatccagaattgctttttttctttgtttcctgaatgtctctatcagagtaaaaggaaatccatatttttatgtgtaacctcttcatttttagttatctacttcaaaaacttttgtgagacttataagaagatgcctcagcttgatgaactggatataggccaaaaaacctcatttgtgatctctaatctagaatccctagagactgaagagaggtcacagcttccctcaccagtgctgtctccctcctaaacccgcaactctcaaccccaagaaaggtggctgccatggtaagagatcttcagcttctgctggga

SEQ ID NO: 50869 - DNA, 558 bp, Homo sapiens
  misc_feature 28: n = A,T,C or G
cgggcccccccctcggaatacttctagnattaattaaataaaagctgtaaggcacttttaactctcctgcaaataattcttgtaggtatatattattgccattagttattctaggcatttcatattcaacttgcaagtttaaattatatcagacatttctcccacaggctgatacgctttaccagcaacatgcatacatacacacagagagagagagagagagagagttcttgtctattgaaaacttagcagaaattaccgttgtaatttactatctttatcatcaggtgctcaagaaggagacaattttttaatatctgggaaaaatcagtataggaagtccaaagtcagcagagtagctgagttagtgtcagattagtggagaagatgctaatagatgatggcacacctccataaaaggactgtaaaggtcgtgttctctgagaattgaacagtgctgaactgtgtgccatcttttcttatatttaattacacgacaaatgtaataaatatgtacttatgttttcctaagaagactagcaggataatgagataaga

SEQ ID NO: 50870 - DNA, 271 bp, Homo sapiens
  misc_feature 33: n = A,T,C or G
ggtaccgggcccccccctcggggtacttctagnaattaattaacgcgggatgtcagaaacagaaggttctctgtgagtagctgggagcagacggccgcacttgagttccatcgggggttctgttgatacagttttaccccagcctgccttgatggccactgccacacaagctgcatctgttctttcttctgcaccttttgttacttcgttgttaatcctctatctagtgtagtgagctgaatggtggctttgcacaagatatatccagatc

SEQ ID NO: 50871 - DNA, 609 bp, Homo sapiens
  misc_feature 34: n = A,T,C or G
gggtaccggggccccccctcggaagtcttctagnaattaattaacgcggggttcttatttctcttttgccatttttcatgatgatcgttttctaaattcccttcattaaaaagatttcacattgattacatatcccccaaagtaacttgtttaagagaagcaaaattacacgatctgaaagaaactatgctatttcaaaagtttatacatgatcacatggagaaggatggccttcaggactttcttcctagaaaccagcctgatcctggttgcctaaggatgcaggtctaaactcagaaaagcctgggagtcttttccttttgtgtatttcttccttggagaaattgcctagttcagagtaatttctaggtcagtgaaccctaatgtttctgaacaggtagtagtatttatggaccctgtctatagtactttaggcttttgaatcaactatggcagggggtattgcattactttctgtgtgggaaaatctctgtatatatctgtcagactataagctaagttgttagctgtactacataggactgtggctcattactcaaatactcatcatactcacatgcaacttaggataccacaagttttccattc

SEQ ID NO: 50872 - DNA, 571 bp, Homo sapiens
cgggccccccctcgagagtcttctagaattaattaacgcgggggatctgtgggtagagtatgggaattcttcttactgttttttacaaattccttccatttttgagacaaggtctcaaaaaaaaaaaaaaaaatctgtctgaaaaaaaacttaatgaattatttccaagaaggacaaacaaaaatacaaatatagagattcatggaaaacatgacaaaataaggcaagacaaaactgacaaaatccaggaaagaagcagaagggagccgggcacagtgactcacacctgtaatctcagcaatctgggaggccaaagcagaaggattgcttgaggccaggagttcaagaccagcacaggcaacaaactgaagcactgtctctacaaaacatcaaaaaattatccaggtgtggtgacgagtgcctgtggtcccagctacacaggaggctgaggcaggaggaaagcttgagcccaggaggttgaggctgcagcgagacatgttcgtgccactgcactccagcttcggcaacagagtgggaccctgtctcagaaggaaaaaaaaaaaaaaaaaaa

SEQ ID NO: 50873 - DNA, 544 bp, Homo sapiens
ccgggccccccctcgggagtcttctagaattaattaacgcgggggatcacaaaactgatcccatttaactgggcatccaggtaaaaagagatgccaccaagagaattcctccctccttactgctggccttttgccatcaaggtatcaattacccctgtccctgagcctcttgcccaggagtaagtccctgtctcttccaaagcccaaagagaggaaagcacagcagcacgccttatcttttaagtcaaggtggggttgacaagggtgaatgtttaaagaaggaaaggaagttttgtttctcttctttcctaaggccctatgcatccctgtagcctgcctactcacctatccatttggctgataaagggccaattttattattctggcaaaatgtaacctaaaaaccaggaaatagttgtcgccctgttttatgtctgtttgaagtgtgtgaaatggccaggtgtggtggctcatgcctgtaatctcagcactttgggaggccaaggcgggcggatcacctgaggtcagttcaagaccagcctgg

SEQ ID NO: 50874 - DNA, 559 bp, Homo sapiens
  misc_feature 37, 481: n = A,T,C or G
ctgggtacccgggcctcccctcggagatacttctagnattaattaacgcggggatgcccacttgaatgtggcagcatcgctggctaccaacaggcttcccattccaaacgcattactctttgtggaactgcttgaacacggtacagagggtacacatcagtgatacacgcctcccttgatgtttccatggtctgttaggaaaaggaagcatcaaacataaaatttattttctggaaatttagatataagtaaaattttataaggaaattgtttccttcaatgtatttgagaatcctataaagctaagctttgtaaaatggagaaaatgtaacatctgtatataaggaggttaatatattattttcaagaaaaaggagggtgatttggtctccctagacaatatttctcccgcctcacagatggtcagcatgtggtactctcgcactaaagccttctggtggtatcataagacatataactntataccagccccttaagatgaaaggtgctaatgtaattatttttatgttaaaccacaaactgttaggatgcaaataac

SEQ ID NO: 50875 - DNA, 557 bp, Homo sapiens
ccgggccccccctcgggagtcttctagaattaattaacgcgggcagtgcctagctaattgctactacagtgacaaaaggaaaaaagaaagaattactcctttaatcatcagagcacagtggttcttgatgtgatttaatccacacctggaaggtgtgaattaaattagaagatattaagtgtatcgaatagcttccaatttgggccagcctgactctcccttcagtccttcccaatggataaattcttaccagtgggccaggtgaggtgtctcacactggtaatcctagcactttgggaggctgaggcaggcggatcacctgaggtcaggagttcgagaccagcctggtcaacatggtgaaaccccgtctctactaaaaatacaaaaattagctgggcatggtggtgcatacctgtaatgccagctactcaggatcctgaagcaggagaataccttgaacccaggggcagatattacagtgagctgagatcgcgccactgcactccagcctgggtgacagagtgagactccatctcaaaaaaaaaaaaaagcggccg

SEQ ID NO: 50876 - DNA, 412 bp, Homo sapiens
cccccctcgagagtcttctagaattaattaacgcgggggaaaagagaaacctgatcatctcagttgacataggaaaagcactggacaaagtccaacaccttttcatgataaaaacgctcaacaatctaagaatagaaaggagctttttcataaccctggttatgaaacagctaacatactcaatagcaaaatactgaaagctttcccctaatatcaaaaataaagcaaggatgtctgctcttaccatttctactcaacattgtctagaagttctagcaagggtggttagaaaaaagaaaaagaaataaaaggcatccaaattggaaagaccaagtaaaactacttttatagatgacatgattttatatatacataattctaaagaatctttcaaaacaccaccattaaccta

SEQ ID NO: 50877 - DNA, 534 bp, Homo sapiens
  misc_feature 368, 369: n = A,T,C or G
ccccccctcggggtacttctagaattaattaacgcggggatgtagagaaaaggaacactcatacactgttggtgggaatgcaaattagtaaggccgctatgtagaacaatatagagtcctcaaaaaactaaaactacggaattaccatagtatccagcaatatccaaaacatagtatccagcaatatccagcaatagtatccagcaatatccagcaatatccaaaacaaaggaaatcaatatattggagatagttgtactcctatgtttattgcagcactattcacaatggccaaaacatgaagtcaacctaagtgcttaaagaaaatgtggtatacatacactacggaatattattcagccataaannataatgaaatcctgtcatttgcagcaatatggatggaactggaagccatcacgttaagtgaaataaaccaagcacagaaagacaactattgcatgttttcactcatatgtcagagttaaatctcataaagataaataaactggtggttatcaaaggccaggaagt

SEQ ID NO: 50878 - DNA, 618 bp, Homo sapiens
  misc_feature 32: n = A,T,C or G
gtaccgggcccccccctcggggtacttctagnaattaattaacgcggggatgaaacatttactccctttgacttttcagccattatggacatttctataaaagaaacatgccttctactggtcatcatgaatcttacaaggcctttgcaaccataaggcttgagaaccgcccaccctcttgtgatgaagccaatgcaatggacaaaatgtatgatcagtgtttcccctgccttcccaaatcccctgagttctctctagagcagggctgcccgcccttggaaaagaccctggccattgaagtacatgtggacctggcatctgagtacaatccatagaggggtccagagcctacttccaaagggagcgtgcccactccaggggtgcacagacagccccaagggcaagggaagaaacgttagaaagtgactagctttttccctatcttcctgctctactgacattgaatgtacatagtgagagttgcatatgtataaaatgaatctataaatgttgctctttttgtctctgatggagagcaagatccagagcttttggagaccactgattcagagcatatttctggaagcagagtttgctgtgagtctcagctctgctgct

SEQ ID NO: 50879 - DNA, 602 bp, Homo sapiens
  misc_feature 28: n = A,T,C or G
cgggcccccccctcggggtacttctagnaattaattaacgcgggctgcccaggagcctgcctgggtgcatcacaggctgtagagagtgcctgcttcaggggaccccatgagcaggtggaccctgttgcacaggtggaagatgggcgtgccctgaacagtacttgtggaaggagattaccaatgtggctgatggatccgagggtcagttgtgagtctgatgtaatagggaggacagtttagtcaccgcctctgcctcattcgtaccctcaggtggcctagggctgaagcctttgaggccagttgggccaggatgcgctggggctctggtgacagggattcattggtctgccctacccttactggttgcacagtcaaaaccaaattcactctccttttcttttaaaggaaacttaatggccacaagctaggagtcatgggaataattgcgtggcagcatctgtgagcagatcacacttaggatgctccacaagtcactcctctgaagtggtagaaatgttggccgggcgcggtggctcacgcctgtaatcccaacactctgggaggccaaggcaggtggatcatgaggtcaggagttcaagacc

SEQ ID NO: 50880 - DNA, 582 bp, Homo sapiens
  misc_feature 37, 50: n = A,T,C or G
ctggggtaccgggcccccccctcggggtacttctagnattaattaaaagnaaacaaaacttaaaaagaaatccatgatcataggctgggagggagagttgaaagaggtggcttgggaggagaaggaaagaatgattagaaacttagaagtcagagaacacccaacttttttttttgtcacagtgtttggaaaacttaagtttgtatttgaaatagaatatatgttgcccagcagatcccgattcattaaaaatttgaatttgagcttctctctatcatgataatgcttgcctccatgtcatctgatttccagagactacgtatctgagaggatgtcacttaagggctttaactgaatgataccaggggctttgcagattgataaggcatggtgtggggaagaaaagtagagataagcctatttaaaaaaaatttctatgtctttttatctggcttgtgatgccagtgaaagtaaggtggctatctggcatgtacacagattggttgttggagagccttcatgattttccattattcatttccttcagacagctcctttagtaacttaggtacatcctacctt

SEQ ID NO: 50881 - DNA, 587 bp, Homo sapiens
ggccccccctcggggtacttctagaattaattaacgcgggccttgagaagaaggaaggagactgaatgctagagagtcaaaccaacaaaggccagctataccagtctagtatttctcccatgaaggcacaatggtaaggaagacttttaaaagaagttaagtagacagtaaacacagatgcactgatttatcttgtagcactggcgatggattgaagagtctgtatatggaaatgaattttcctcctacaatgtaaaatcgtaagctgagtatgctaaaagttacttaaaagatttgtttcctatagcactgagttattctgagtccctaaagtgaaagaagaccaggagacatgtgtcaacattaaaacttgtacagcaattgtgcaagagacaatgcattcctggtgtccctatgcatcaccagaactaggtgatggtgacattttgaccacaggttgcactactaactaatgagctaactattgcccagcactaggacaaaatgttttatactcatttcatgctccagacaaactctgaaataagaactgattaccatccccatttcacacatgaggaaactaa

SEQ ID NO: 50882 - DNA, 604 bp, Homo sapiens
gccccccctcggaagtcttctagaattaattaacgcggggcattatctaagtcatttgtggtaatctgctaagagaccccaaatctgattttcttttatctacccaaaggcagatgttggatgttgtattagaataatttagagttaacatccttttcatttctttaataattatctagttacctggaaaactgccatcactttgtgatactcttagtcgccataggcaaccttgaaatgatcttgagagctgcctcggtggtccaaggactttgccgtctgacatcattgtcagttacacacacagtttgttgctacaggcattctgcttgcagccaacctccaggttgatggcataaaccttgtgttgccatatttggactgaatgtatttttgctttgtaaggcagctgcgggtgagagtggaaaagtagacaggtttttttgtttaataaagcagctaaccagggaattcacgagaagcacacattccattccacacccagttgatacaggtcaagaaacacagagcccgttggtttcttttgtatgaatttcctttagtatctcattatgggaataattgccattttggtcaacaactt

SEQ ID NO: 50883 - DNA, 452 bp, Homo sapiens
  misc_feature 32: n = A,T,C or G
taccgggcccccccctcggaaatacttctagnattaattaacgcggggatatacttccactgatccttcacttaattttatgatttaggcatgagcaaaactaccttctactttcacaacatgtccatcatatagcttaatcatcaatttaaaaatgtagaggaggccaggcacggtggttcactcctgtaatctcagcactttgggaggccgaggcaggcgtactgcctgagatcaggagttagagaccagcctggccaaaatggtgaaaccccatctctactaaaaatataaaaattagtcaggcatggtggtggtgggtacctgtaatcccagctactcgggaggttgagacaggacaatcgcttgaacccgggaggcagaggttgcggtgagccaaaatcatgcctccagcctgggtgaaagagactccgtctccaaaaaaaaaaaaa

SEQ ID NO: 50884 - DNA, 482 bp, Homo sapiens
  misc_feature 25, 42, 43, 55: n = A,T,C or G
ggccccccctcggaagtcttctagnaattaattaacgcgggnngttggggacagnaaaaatgttgcactatagatctcatccaaccccgcattttacaggtgaagatgatgagctacaagattcaatgatatcttcaaagtcacacaacccggcctagaaataggctgctgctgatcaatccactgctttctctgcctatgagttttccccaatgtcagtgatttctgtcctacctctgtaatttacggcatatcacgaaaccccaaccctcatacgcttcatcattttaaataaagactgacttttatatgtgaataatttatgaaagaaactgtaatccatattcgatgtggaaatgtaaccacatttcactcactatgaaaaaggtaacactaaaaataaatgctatgaaaaaatatattaaattttaactaaagttccccacttaagtttctgagcctgaagttttctctctgctaaa

SEQ ID NO: 50885 - DNA, 512 bp, Homo sapiens
  misc_feature 16, 29: n = A,T,C or G
cgggcccccccctcgngggtacttctagnaattaattaatttatttatctaagtgctgagtaacaatgttaaattacaagacatagtttcttttctccagtatacaaaggactaaatgtaacaagttggaaagttggtattaaggagattatgggaaaactaagaaagagtgttactggggaaaggggcacagatacaacattttacataaatacacatcgaatgtccccttatttattccactaaatattgaccaggtaccagcaagaagtgactcaaggaggaaaaaggcagatgatctttttgctcttatgataccaatagtctagaagaatcaaaattcatgaggagataattatgtgaataattcgaccatcccaattggagccagagataaaaaggctaagtaggctctgagaaagtttagtgaggtacatagccaattctgagagggaagagaagactcttttgggaaaatggtatttaagtttggagctagaaagggattggag

SEQ ID NO: 50886 - DNA, 576 bp, Homo sapiens
  misc_feature 22: n = A,T,C or G
cccccctcggggtacttctagnaattaattaacgcgggggggggggggatattgatttatttccagttcactcttactctgaggaagaggtcctcagctccggaatttgtctcatgccccataaggccatgatattaaagctcaacttcactgggttgagcaaatacccgtgggagtgaagctgtagctgcattccactcaggtctcagagttcctgtcttcacctggctgagtgagtactcacctagaaattccttgctctcttgatctcccctcaatattattaagaatttttttaaaatatgttattcaggccgggcgtggtggctcaggcctgtaatcccagcactttggaaggccaaggcgggcggatcacctgaggtcaggagtttgagaccagcctggacaacatggtgaaaccctgtctctactaaaaacacacacaaaaaaaaacagctggatgtggtggtgggtgcctgtaatcctagctacttgggaggctgaggcaggagaatctcttgaaccagggaagcagaggttgcggtgagccaatggcctgccattgcattccagcct

SEQ ID NO: 50887 - DNA, 555 bp, Homo sapiens
cggggccccccctcggaagtcttctagaattaattaacgcggggctctcgctggcctattacctatttttatttaccaaaggaaagcaaaaagtaaaatgatactgactagtgtaggtggggagaaaattctggggcaaggagcaatgccatagcctcctgtgagtgccagactgaatggccctggacagtgagaagacagagagataattaggaatcttctggaaaagaaaggaaatggcacattctagatgattcctcatttattctaaaatttcttcaccctcactacttgacctctacattatttgtttgaagcaaacataatgttgtgcaaaaggtaaagcctgtggactgtgtgtgaaatctgagagtctggtgttaaaatcttgttccgcaaattactaacctgtacaggatactaaatttctttaagcccgttcttccatcagtaaatgagaactaactatatttccattttatggtacgtcctatttgctctatctctcttatttcatatctcaaatcaattatcaatagagtaaacacaatctaa

SEQ ID NO: 50888 - DNA, 544 bp, Homo sapiens
cccccctcgaaagtcttctagaattaattaacgcgggtgccctatagttggagggatggggtgaaccactctgtgacccttgcctggtaaatataaaagaaaagagcaggctggctggctatattgatgaaggtgcacaggagagctgctgctgtactgggatccaatttcactttaggaatttgctcaggcagagaagctttaggccactaaagtaagagaggcaacgtgggggtttcttacatgaccctacccaatagggtagagaagaaaggtcagcagaggaggagctggagtttaaccccaaggtttttagaggttgaggaggaggtaatcaatcactatcaaaatgaaatatatttgtcccaggtcaagaaacttcagttaagagaccatcagctatggtggtagagagaataattccaaagagcccacaattgcacataatgagagaaagattcagtgttaaatagcctgccagtcctggagaaagaaagccagcatatgatggcacaattcgagtaagaaatatcccattctcctt

SEQ ID NO: 50889 - DNA, 474 bp, Homo sapiens
  misc_feature 34: n = A,T,C or G
gggtaccggggccccccctcggaagtcttctagnaattaattaacgcggggtggggaatgaatatgttatatagagattattttttccctttagtttgttttccaatactccagatttgttttcagaatacaattaggatctgcttgcttctgggagtaagaatactttagatctgtggcttagtaattattgtctactatttgccctcttaggtcaaaagaaactataatcttcagctacccatataaactgtattgagggacctagtggaaatgtgcccatctttgctttttagaagtagagtggcctgtttagagggaaattaagaatgttgtttaaaggccgggtgcggtggctcatgcctgtaatcccagcacgttgggagggtgaggcgggcggatcacgaggtcaggagatggagacctaacatggtgaaaccccgtctctactaaaaatacgaaaaaaaaaaaaaa

SEQ ID NO: 50890 - DNA, 602 bp, Homo sapiens
  misc_feature 23: n = A,T,C or G
gccccccctcggagtacttctanaattaattaacgcggggcaactgttttagtgatggcttctgagggataaataatatagctaaacccaggagggcacattttaaaaatgtttgcaaaagaaaaaaaaaaatcagaggtccttgtttgcagtaaaaataatccacctgtgagtctcagcttacttcacctccataaacagtggatgccttcgcccatgggctatactgtttgcagtcacatgctcatttgctgccttgctgtgtgacaaacaggaattcctataagcatttcaagcctatgactgatttttcttacatagctaattttccaaattaagtaattttgcttcctttataactgtggctccagaggagatctaaagcatctgagcattgagaaaaaagcaggggtagggggatcacaggatcaagccaaaattgcagaccccaactgtagtatttctatttaatggctttaaattcagctaatgattacaactattctaagttggcacttagaaaaagtcacagaggttcaaatttcataaagtgttagcaacagcagctgagattttggaatatgtatagcttttaatagatg

SEQ ID NO: 50891 - DNA, 425 bp, Homo sapiens
  misc_feature 28: n = A,T,C or G
cgggtccccccctcggaagtcttctagnattaattaacgcggggtcttactttacaatgttatcaggcagaaagcaaaggcagaggtgaggtgggaataatttgaacacattgtttcaaggtgttctacatgtctcataagactgtaatacttcaactaccttaacattatcatggattactaacaggatcatttaaaatgctttggaaaaggtatttcattccacaagtcatgtgtaaatgaatgcttactttgtatactaaaaatataaagaaatttgtagactaaaaatcccaaaattctttctgcgtccccctccagggctggaatctgtaatatggactccccatcactaggatcatagagttaaaacaccttttcttggctttcaagcgaccctaaaatctggtctcccttatcctact

SEQ ID NO: 50892 - DNA, 458 bp, Homo sapiens
  misc_feature 22: n = A,T,C or G
gggcccccccgtcgaaatactntctaaaattaattaacgcgggcctctgcctcccagcggttctcctgcctcagcctcccgagtagctgggactacaggcacacgccatcacctttgactgatttttgtatttttagtagagacggggtttggccatgttggccaggctggtctcgaactcctgacctcaggtgatccacccaccttggcctcccaaagtgctgggattacaggcatgagccaccactcccagccccaatgctacaggttttaatatagcctttataagttttttaccttttccaaaatatatactaccatactcttttcattctcttatttatggctgacttaacatactacgaagtgggtgcctgactcactagatatgtagcaattgacaaaaaaaaagatgattctgaacaccaaaaatttacacttaacaggctggggaataa

SEQ ID NO: 50893 - DNA, 343 bp, Homo sapiens
  misc_feature 45: n = A,T,C or G
cgggcccccccctcggagtacttctataattaattaacgcggggnaaaaaaaaaaaaaaaaaaaaaaaaaaaagaaaaaaaaaaaaaaaaaaaaaaaaaaaaaaaaaaaaaaaaaaaaaaaaaaaaaaaaaagaggacaccaacgggggggggcccaccggtgggccctttaaatttgcccttttaggcggccctttttggccccccctcttgggcgggggtttttggcccccccttggggttacccttttgcgcccccttgctgaatttccttttttccccccctgttttatcccccgggcggcccccccctttgcccctccccaacccccctcccttttgt

SEQ ID NO: 50894 - DNA, 301 bp, Homo sapiens
  misc_feature 17, 28: n = A,T,C or G
cgggcccccccctcggnagtcttctagnaattaattaagcacaaacaggctaccaaggaaagttatggaatcttggctcttagaaaaccacatatctcaaatggtttcggtttactcctgcctagacttaagagactggattaagtaggtcccagagtttgcttatagcatattatataactgatgttataccctttttacttctttcatgcatgggtgaggcacacatttgtatgaactcaagggttgaagaaaaagtacaagaactcctatataccaagtgaatcttgagtctgattac

SEQ ID NO: 50895 - DNA, 178 bp, Homo sapiens
aaaaacttttaagagcataaagaggtcttgagaccaataagtaagaaaaccactatcgtagacaatgcacatatacatgtccagcaattgtcatatttttaaatgaccaaatcaaccaactttagctttcagtgaatcaatgtacaatgaggatcataacactaactaggggcataag

SEQ ID NO: 50896 - DNA, 289 bp, Homo sapiens
  misc_feature 28: n = A,T,C or G
cgggcccccccctcgaggatcttctagnaattaattaacgcggggtccatagagatgtggggagtggctgtgaccctgggatagcacccctaacctggggtttatctccgtctttaagtcttccttttcggtccggcgcggtggctcatgcctgtaatcccagccactcaggaggctgaggcaggagaatcacttgaacccaggaagcgggggttacagtgagccgaggtcgcaccactgcactccagcctgggcaacagagcaagattcagtctcaaaaaaaaaaaaa

SEQ ID NO: 50897 - DNA, 349 bp, Homo sapiens
cgggccccccctcggaagtcttctagaattaattaacgcgggggagaggggcagtttcccgttagcacaatgaaattcagacaaacatttcaaaaaaggatgggcctatataaggcattcagacatctgaattgactatgcttatcaagcatagagtttggtcaagtttaaaatatattcaaagccaggcatggtggctcactcctgcaatctcagcactttgggaggctgaagccggaaaatctgcttggacctgggagatggaggttggagtgagctgagaccacgccattgcacttactccagcctgggtaacagagcaagactccaactaaaaaaaaaaaaaaaa

SEQ ID NO: 50898 - DNA, 353 bp, Homo sapiens
cccccctcggagtacttctagaattaattaacgcggggggaggaagcaactagaatcaagatgaaaatgtaacttcaaaccctgtttagaaaaaaataatgagattactttaaaataataaaatttattattaaaaatttagagaagttttgacaaggaggaagtggaaaaaatagatattttatttatttatttatttatttatttatttatttatttatttatttatttttgagacagtttccctcctgttgcccaggctgcagggcaatggcacgagctcggctcactgcaacctccacctccagggttcaagtgattctcctgcctcagcctctcgagtagctgggact

SEQ ID NO: 50899 - DNA, 589 bp, Homo sapiens
ccccccttcggggtacttctagaattaattaacgcgggaccaagtgaagctgcatgcatgggttctgctcttgactccttagtttgtggccttggagaggcaccccctctcagaacttccttttctttctttcttttttttaaatttaacagaagcagggtctccctatgttgccctggtctcaaactcctgagctggaggaattctccggccccagcctcctgaattgttgggattacaagtgtgagccactgctcccaacctgaacttcatttacgtcagtggtaaaatagggatgagagtgtctactttgcagggttgttgggagaattgaatgaatgatggataaatggcccgtgaaaccaagaaaatgctcaatgaaggttagcttctgctccaaagggatgcacaatcactgtgctttcctctcttctactccttatgcattatctttggccttaaaccacacgggaacatctcatttcttcttttaattcaatccctctgttacaatttgggtcttcctcagaaagcctgtaaggtggtgactgcatatttattctggtagaattagggagatttgagtgtt

SEQ ID NO: 50900 - DNA, 455 bp, Homo sapiens
ccccccctcggaatacttctagaattaattaacgcgggggacagcaccccaaaactgcattctctaaaatgaacattttctctagatgaaaattctacatgttaatggaacataattatctggcacatatatagtctgttataatatatcacatatataaataatatatatataaatcaaacataatacagttatatagtatataattataagtagaattatattaagcatatactagattatattgtaattagcaacaattgattactaatacttttcctccctaggtagctattattgagcactctctagtaagccatggaatataaagatgttatgtaattttgattttgttaggctaatttccagcagttaagtatagttcaattagtgttctgttttgactatgtaattcaaaaactatgttttgtaaaaactcacaaaaaaaaaaaaaa

SEQ ID NO: 50901 - DNA, 447 bp, Homo sapiens
  misc_feature 51: n = A,T,C or G
cggggccccccctcgaggtacttctagaattaattaacgcgggccctgggnaaacataaaaacctttcatccattaaaaaaaaaaaaagtaaatgcctgtgttttaataaatgtgtaagttcctaattatagtaatatgctcaatgtttttccacactagagactgtctagttgacattgaaaaaattatatttgacaaggcaagtagagtccattattagctggttctagagacaaagttttgtgcataatgacctggtactttcattctgatcacatatttctttaaatgaggttaaaaatacaaatatttgaggccaggtgcggtggctcacgcctgtaatcccagcattttgggaggccaaggcaggcagatcatgaggtcaggagactgagaccatcctggctaacatggtgaaaccccgtctctactaaaaaaaaaaaaaa

SEQ ID NO: 50902 - DNA, 445 bp, Homo sapiens
cgggccccccctcggaagtcttctagaattaattaacgcgggatgtagaatgtaagtcaagtaaacatctaatgtgctagaaaaaggtgtaactaaccaatttatttagccaagaaaaggctatcccccaccattctcaactcattcccattcaagaacctatctgaactctattcccctattacagagtgtagggggcaggagtggttatcagattaatacactgtacgataaattaaatgacctcatacttctcctattataaaaagcactggtggcacaatcaatagcaccttctaaaaagagctgtaaggccaggcgtggtggtcacacctgtaatcccagcactttgggaggctgaagttagtagatcacctaagctcggaagtttgagaccagcctggccaacgtggtgaaaccctgtctctactaaaaaaaaaaaaaa

SEQ ID NO: 50903 - DNA, 484 bp, Homo sapiens
  misc_feature 28: n = A,T,C or G
cgggcccccccctcgaaagtcttctagnaattaattaacgcgggattgaaaagctgacttttgtccccaaagagtgcaaatcttggtgtcaatgtgcaccattccatacccagacataggattcgggtctcctgtcaatctggagttatttgtgcctacaatgtcttctgctaacatgggtcaaggagaacatgcgacaacagttcagggaatgagcctgggtatgggcgagaaacttggtggctgtcctgcatctacagccagtttagatcaggtctggttaccccagtgttccaactctctggtgctacagcaacccaaaacttactggtttaaaacagcaacagtccgctgggcgcggtggctcacacctataatctcaacacttggggaggccgaggcaggtggatcacttgaagtcaggagttcaagaccaccctggccaatacggtgaaaccccgtctatgctaaaaaaaaaaaaaaa

SEQ ID NO: 50904 - DNA, 485 bp, Homo sapiens
cgggccccccctcggaagtcttctagaattaattaacgcgggccacgcttgaacacgcctagtatatggacaaggcagaacagctctgtgcaagacacagagctgaagcacagtccactcttctggtggttcactttgtggttggaaaattccttcaggctgaaaacacaccatctttaacctcaggagtcctcaaaaatcaggaaattccaaagtcaaggttccttttgcaataatcacacattctgtttccttaatttgcgaacacacagcctttctttccatttttctcagggcataccataaagttcacaggatgtgaaacagcccatagacagcctcttacagacgcctgcttccttactattccgactcagcatttcctcacactggagagctgtcttactcttagctctcacgttcagttcaatacctgagtttctttggctcattttgaaattctgtacaaaatgtagtcaatgcag

SEQ ID NO: 50905 - DNA, 596 bp, Homo sapiens
cgggccccccctcggaagtcttctagaattaattaatcacactgattaaaatgagttattggaagaaaaaacatttcaatagtttgttccatttctcagtagtatttctaaagaatttatctgtctatttatccatctatctaatatattatcaatcatctgaagctgttttactaacagtatctggcactgagaagaaatgttaatgaaagacataagttctgctttattgaactgtagtatgaattcaaaactacaaagcaatgagttaatagaggtttttcaaagccatctattcccctgcatactgtagggttaataaagaggggtgaataatgaaagaattgtagatacaaaataaatactgtttagaatataaaaacattaattttgtttttctctgaagaaaagtgtattttctttcctaatttattgtggaatgcttattaatttggcaactattctctgacctttctttgccaaaaagaagtaaactgattctattctgagaatcatacaattctactgcacttgtgtcagctgcaatgtaaccaatctcaaatgagggaacgtgcaccaaagaagtatatcagtaa

SEQ ID NO: 50906 - DNA, 581 bp, Homo sapiens
  misc_feature 27: n = A,T,C or G
cgggccccccctcggaagtcttctagnattaattaacgcgggggccaaggtgggaggatcacctgaggtcaggagttcaagagtagcctgaccaacattgtgaaaccccgtctctactaacaataaaaaattagctgggcatggtggcaggcgcctgaaatcccagctactcaggaggctgaggcaggagaagaacttgaacccaggaggcggaggttgcagtgagccgagatcgtgccattgcactcaagcctgggcaacaagagagaaactccgtctcaaaacaataaaaaacaaagaaaaaccaatgtctttttgtctgtgtatcaaatctaccatgctgtattattttccatgataaaacagaaaggaaaacaaaaccaaaaccatcatagattttatcgactctttcatttttgtcttgtttctctgttcttttaatgacagaatttgtttatgattttacactgtttgttttgttttctcattcctcagtccagtccagactgtcttcttctccaacactccccttgtctgaaagggccctaattatttccatgttttacaacactatctccttt

SEQ ID NO: 50907 - DNA, 470 bp, Homo sapiens
  misc_feature 43: n = A,T,C or G
cgggccccccctcgaaagtcttctagaattaattaacgcgggnggataaacacaaacagtgcttcgtgcactgatgcacaactttaaacataagtttaatttttcacaggaaaacattttggtttttaaaatttcatttctctattaaatttattgtattgcttattctacaataattgggttttaaagcaaaactataaggtgcgggggaggcagtatacaggagttcaagaccagcctgggcaaacatagggagacccccgtctctgaaattaaaaacaaacaaaaaaggatgaactgggacaatatccataatacatcaagtatataatggtagttccctctgaggaacagaaactctccttcttgcctttttgcttgcatgtttgaatgtttccgggaatatgcattactcttaaaaacaaaagcaaaaatacgcagagcaacagaggtgcaaaaaaaaaaaaaaa

SEQ ID NO: 50908 - DNA, 533 bp, Homo sapiens
  misc_feature 32, 506, 507: n = A,T,C or G
tgggtaccgggccccccctcggagtcttctanattaataataacgtgtccttggaaaatagaaaatgtctatcaaaaataattatatatttttttatattatagatcccaataacaaaagatacaaagtctctcatcaacatatcaaaaacttcagaggaccagcagcttctgacgcccagtgttctcttaaagtgactgaccatcaattcagcattagtaatgatcaaagaaagtaacatagaagttttatacacaattttaatttgacatttctctagtttcaaatatggacttgacctttattttcatccttcagaaatcaaatgtagaaaagatacaagctattcctttttctgatagacttaatgttttttttgaaaaatgaaatattttattacttccttaccaagcacttttatgtaaagtatgaaagtttgtccacattattctctatgaaagggttttgtcacttaaatctcttgataaatgctcctagagaaacanngtacataaagacaaagtgaaaatgga

SEQ ID NO: 50909 - DNA, 579 bp, Homo sapiens
  misc_feature 23, 543: n = A,T,C or G
ccccccctcggaagtcttctagnattaattaacgcggggggacagctggaagaggtatgtgtctgcgtgttggtatttgacaaaaggatttgatcagagtttaacccaagaacagacatgccagtcaatgaaggatagggttaaattattgggaaattagcttaaatgtcttaaaacttaaattgttctaattttacatgtaaggacttaaaatggatttgatatttatgaatttgaactagacagtagagtttttctggagagaaaaagcttttaaaaatcacaggatgtaagattcctatgtgttgtcttaagatgcatgttattggccgggtgcagtggctcacgcccgtaatcccagcactttgggaggccgaagtgggtagatcatttgaggtcaggagttcgagaccagcttggccaacatggtgagaccccgtctctactaaaaatacaaaaattacccaggcgtggtggcaggcacctgtagtcccagctccttgggaggctggggcaggagaatcgcttgaacccgggaggcanaggttgcagtgagccgagatcgtgttctgtactcca

SEQ ID NO: 50910 - DNA, 607 bp, Homo sapiens
  misc_feature 513: n = A,T,C or G
cgggccccccctcggaagtcttctagaattaattaacgcgggctgcaaacctagagcagcgaaagtcacagacaaagcaaatgagtcagatagatagagaacagtgatatatgatgcattctaggcaggctctgcttcagaaagagacataccaagaagaatgtctttggctacaggagatataaagggtatgaatgcaaatgtatttcctcataaaatttgagtttagttgtgtagcctgtttttctacttaacagtatatggtaacattgcaaagtagtaaatacgcttttaaaacatgaccataaaggccaggcgttgtggctcatgactgtaatcccagcactttgggtggacaaggcaagaagatcactcaaagccaggagttcaaaaccatcctgggcaacatagaccctgtctctacaaaaataataaataaatactttaattttgtacttatttcataagatgaaaatattcttagtaatgaataaggttgacaatcactgtttntaatccttttgcacaatttctgctggaaaaatgtatgtatggtatatttgtccatttctcattagaaacaatgctctactattggcttactctg

SEQ ID NO: 50911 - DNA, 530 bp, Homo sapiens
  misc_feature 28: n = A,T,C or G
cgggcccccccctcggagtacttctagnattaattaacgcgggtcatttccaacttggacagaactgaaacaaagcccctgcccaagcttcaactgtatttttatgagtagtcagcttttctttgggaaatagttctaaaatataaaagtaatgctgaggagatttcttgatactacttctataattggcctataagaaacatcccttaacaactacccaaaacaggagtggagaccaggtgcagtgggtcacacctataatcccaacactttgggatgccgaggcgggcagatcacctggggtcaggaggttgagaccggcctggccaatatggtgaaaccccatctctactaaaaatacaaaaattagctgggcgtggtggcacgtgcctgtaatcccagctacttgggaggctgaggcaggagaatcacttgaacccaggaggcagaggttgcagtgagctgagatcacaccactgcactccagcctgggcgacagagcaagactccctctcaaaaaaaaaaaaaaa

SEQ ID NO: 50912 - DNA, 603 bp, Homo sapiens
  misc_feature 20, 33: n = A,T,C or G
gtaccgggcccccccctcgngggtacttctagnattaattaacgcgggtcctggccaacgtctacaacttgacatatctcgctacttaaattttccatcttagaaacctttactcaagaaaactggttttagtgtttagtttttagtggctctgtgtgagagaggtgacactgtaccatatgcttaggttggccagccatttaggggatacgttttccattctgctggcggcattttagaagaccactgaatagtctcagaaatatcataaagaatagttttaggggctgggcgcggtggctcatgcctgtaatcccagcattttgggaggccaaggtgggcagatcacctgaggtcaggagttcgagaccagtctggccaacatggcaaaaccccctctctactaaaaattagctggtcgtggtggcgggcacctgtaatcccagctacttgggaagctgaggcaggagaatcgcttgaacccgggaggcagaggttgcagtgagccgagactgtgccactgtactccggcctgggcgacagagcgagacaatgtctccaaaaaacaaaaaaaaaaaaaaaaagcggccgccaccgcggtgg

SEQ ID NO: 50913 - DNA, 400 bp, Homo sapiens
  misc_feature 34: n = A,T,C or G
gggtaccgggcccccccctcggaatacttctagnattaattaacgcgggtaggttatttttcccaaagatctccctactacttactcaaaaagaaaatcatttacttatttttaatctgccacctgaatgaatctggcaatttttagagaaacaaaaccacccctccagagtagggtggggatactcagcacaggaactatttatttaaaggggcgtctctgtcaggacaactaggtttttagcaacaaaaacctagcaacagaaaaaaacaaacaaacaaaaaaacacaggtagttgttcttctatttcaatccctatttcaccattcccttagtttaccaggcttttaagtaggacttcactggttttgaccagtggcccccaaaaaaaaaaaaaaaa

SEQ ID NO: 50914 - DNA, 447 bp, Homo sapiens
  misc_feature 7: n = A,T,C or G
cctcggnagtcttctagaattaattaacgcgggggatttttgctgtgcattaatggatttaaaacctaattaactttcccacactgtttaagaacctcacaataacactggcgtgggatcatgtacttttaagtacattcagtgaaccataaaaggtggaaaatatcctacataccagagtcagaaaaggcagaaaacatctttcttcttcctcttttcattattttccccagcaagtgctccaagtgaggtggaattaaagaataaaggtatacttaaaacaacctatggcaatttaaaatgattaattccaggtcttttaacatatacaatggtctaatggaaattttatgtagaataagtcctatagaattgcaagttggtattaaactgacactagaagtctaacttttgccctacagacttaggaaaaaaaaaaaaaaaaaa

SEQ ID NO: 50915 - DNA, 601 bp, Homo sapiens
gggtaccggggccccccctcggaagtcttctagaattaattaacgcgggcttccccaaaataagttgtaacttctctattgatccaaaattaaaaatgtttggttttcatagttaatgaaagaaggaaagaagaaactataaaatagtttgaaaacataggttatttgggtccctgagaacatgaatcaaaatggaattttaataaattgaaccctattttcaatgcacagcagactggatgaaggcaacttaatatacttagctactcctccagtgcttgtattttgagttttttgaaggcctactccacactagatattgggtatagcattttcacaagtgtcaaagtacaatctgcacaaatctctgtagggtataaatcaatatgccattttatagatgaagaagatggcacagccgggcatggtggctcacgcctgtaatcccagcactttgggaggccgaggcaggcagatcacgaggtcaggagatcgagaccatcctggctaacacagtgaaaccccgtctctactaataatccaaaaaaaattagccgggcttggtggcgggcgcctgtagtcccagctactcgggaggctg

SEQ ID NO: 50916 - DNA, 598 bp, Homo sapiens
  misc_feature 24: n = A,T,C or G
gccccccctcggggtacttctagnattaattaacgcgggaagtgtttgctgagcgtcgcacatggtcaggttgtttttttttgcatatgttatcctctctgcctgaaatttccctaccttctctcactgctccgctactctttaaacacacacacacacacacacatgaacgcacacattctctctctctctgtgtctttgtctctctcctctctctctctttgcctctcttctctctctctttctctctctctctctttttctctctcttgcacacacacgcacacacacacactcatataatcaagcacagactggcttggccaactgatactaatcattgaatataaactacttacatttctctaaagaatctgtctctctctattactgtcaagacattgcttaccctggttccaattcctagaactaatactgccagcccctatcatattcccaattagctcagtttcttaggtaattaggatgattcttaggtatctttcaagggacagctgataaggccaccccaccttgagctcccaagcacagttgtcaccctctgtggcatttgccttttgactaatgtctccctcat

SEQ ID NO: 50917 - DNA, 478 bp, Homo sapiens
taattaacgcgggggggcttggaagaaagatgccctgacagtgcgcaaacacatggtctgaatctgaaaatggacattaaaaactctcaagcaccatcttgaatcattccagatatatttagatttgtgaaaataaactgcaccagtactgaaccgttaaaggcaaataaaccattatttaggcagagcgcagtggctcacacctgtaatcctagcactttgggaggccgagccgggtggatcacgaggtcaggagatcgagactgtcctggctaatgcagtgaaaccctgcctttactaaaaatacaaaaaattagccaggtgtggtggcaggtgcctgcagtcccagctacctgggaggctgaggcaggagaatggtgtgaacctgggaggcggagcttgaagtgagcatagatcatgccactgcactccagcctgggcaacagagtgagactctgtcccagaaaaaaaaatgaaa

SEQ ID NO: 50918 - DNA, 327 bp, Homo sapiens
ccctcgaaagtcttctagaattaattaacgcgggcacattaggccatataaattagagattttgattagtccatatctcattctgcatttttttgtgtggggtggggggtctaaggtttttttcagtgaacctggtcattaatcttaagggagcagtttatatttgagtagctggtgtgtgttatgcacattcctactggaatagggagacacaagagagaaagatttatataatgcctacagtacttcctcttgagatatgtaaagatttagatttcctccccctacttttgtaagtagcctcatcttagctaaaaaaaaaaaaaa

SEQ ID NO: 50919 - DNA, 545 bp, Homo sapiens
ccccccctcggggtacttctagaattaattaacgcggggggtacttaaagctttatatgaaaggatgtttataataaaaaaaggagaagcaacccaaatatgcagaaataacagggttagttgaataaattaatatccagaggaaaatatgcagctgttaaaaagtgcatattaaagattgttttataggctaggtgtggtggcttgtgcctgtaatcccagcactttggggaggctgaggctagaggatcacttgagcccaggagttcaagatcaatctgggcaacatagtgtgactctgtctctacaaaaataaaaataaaaaaaaaaataagccaggtgtggtggtgtgcttgtgtagtcccaactgctgaggaggttggggcaagaggattgcttgagcccggaggttaaaggttgaagctgcaatgagctatgcgttccatcctgggtggcagagtgagaccctgtccctgcccccacacacaaaacatcaaaaaaccaaccaactgcccaggaagaaaaaaaaataagcggccgccacc

SEQ ID NO: 50920 - DNA, 460 bp, Homo sapiens
  misc_feature 33: n = A,T,C or G
ggtaccggggccccccctcggagtacttctagnaattaattaacgcgggcactggtcattttccagcattattgaagaagataaatataataaaacatacaactctttgtcaagtaaccagaagtggattactgagttaatagatgatcaaataatttttattttctcttcagatatatagtagcagcttagcaaaaattcatggagatatctttttccattgctgtaatgaacacaatttattacaaatatattttaattggctaattttccaagtgaaggagttgtacttaatttatttaatttgtatgactaagaagtgacatttttccttaggcatttgtctaattcttccttttgcaaattgcccatttacactttgtcccttttttttttttttttggtcagaggagacttgttgcctcattaattggtaggaaatccttacttagtaagtaat

SEQ ID NO: 50921 - DNA, 470 bp, Homo sapiens
  misc_feature 9, 435: n = A,T,C or G
acttctagnaattaattaacgcggggaagtttagaacaaataatttaaatcacacaatctagaattggttgtgaatcctaccgaagattcaattttcatgctatgtgtagtccttgaagtagaagagagatttcaaagaagttgtgggtaatgataaagctcaaaagttagactgaaacaatcatttgtcagtttccagttgataacattagccctttgcctcagaaacactggtaaatgtggcttcactgtcagaattaaccttgctctttaaactatactcttgactttagataaacagaaaataaattctgtaatttcatgtactaaatggtttcattaagatcacattttgagcaaacctaggattaaaccagattatagcaattgcaattaaaatataattcttgaaattttattattttctattagcanactaaatatttggtttggcttctgagtgcaacatt

SEQ ID NO: 50922 - DNA, 302 bp, Homo sapiens
taattaacgcggggtgggggggataggattttttgcatcccagggtagaagtttccagggacgcaagggtttcagtactgtaactagaaaaatcgcaggcattaggtatgagctgagaggggtgtaaaaataaaaaaaatttaaaataaaaaaacagaacaatcctaggcaaaccagactggctggttaccctaagaatgcccactttcacctcaagtagagagggatttaaaagcaaattggtgtcattgagaatactgggtgatgcaatatctgacttggaaaatacagaaattgctcaa

SEQ ID NO: 50923 - DNA, 599 bp, Homo sapiens
  misc_feature 593: n = A,T,C or G
cgggccccccctcggaagtcttctagaattaattaacgcgggtaatatatgtgaaagcagtttttaaaatatttttagaaattatataaatccaagattataaagttgtaattgttattgctgtcttgagaatctcgttagatgttgatagaatagttcttattcttatctgtgatttgttttataaccactgatccccaaagtttttagtgtaactttagttaataaaaatgtattcaggctaggcacggtggctcacgcctgtaatcccagcactttgggaggccaagacaggcggatcacgaggtcaggagatcgagaccatcctggctaacacggtgaaaccctgtctctagtaagaatacaaaaaattagccgggcatggtggtgggcgcctgtagtcccagcactttgggaggccaagacaggcggatcacgaggtcaggagatcgagaccatcctggctaacacggtgaaaccctgtctctagtaagaatacaaaaagttggccgggcatggtggtgggcgcctgtagtcccagctacttgggaggctgaggcgggagaatggcgtgaacccgggaggcagagctntcagtg

SEQ ID NO: 50924 - DNA, 526 bp, Homo sapiens
  misc_feature 30: n = A,T,C or G
ccgggcccccccctcgggggtacttctagnaattaattaacgcggggagtggatgagaacacctcagcatatcctaagaaacattacttatatattagttaactttataatgtggcattcaggcatatatattgtttataaactaatcatgcttagataaactgcaataggtaatacagaatcagaacaaaggcaatttttcagtgcataatgttattatcaggcaaagataggaaaacagatcacataaaacatttaatgcctgctgtgctaattataaagtatactacaattcacatacacaaaacccttatgatttacacacacacaaattccttacaaatttccttccacttcaagttttgaatagtaacagaaagcatctcttaacttcagtatatgaaacagccattctttaaaactcagtattcagtgctcactcattgccaatatcagctacaaagaaagctatctttgaccccgcaaaagttataggtgcagaaagcactgatctactctatgctgg

SEQ ID NO: 50925 - DNA, 612 bp, Homo sapiens
ctggggtaccgggcccccccctcggaatacttctagaattaattaacgcgggcagatcggttgaggccagaagtttgaggccagtctggccaacacggtgaaactctctctctactaaaaaaataaaaataaaaattagccaggcatggtggcgggtgccggcaatcccagctactcgggaagctgaggcatgagaatttcttgaacctgggaagcagaagctgcagtgagccgagatcgtgccactgcactccagcctgggtgacagagtgagactccatctcaaaaaaataaaagaaaataaaattctgaaatatctgaaagggctgtaccttccacctaaaggaacactggcaagaaaagcaatccacaagcctgtctgaacaaacagaaacagaccttaaatggacaaacgtaatattgtttctttataccatctacataatatttacattttcccatagctgggaaattactcactacagtcaagtacccctaaatttacctctggcatgtcatgaaacctgcatctgcttaaggcctaaacggataaacgtgctagttaaatttctcatctcagagttcctctgaaattaaagtccaataaaatca

SEQ ID NO: 50926 - DNA, 423 bp, Homo sapiens
  misc_feature 26: n = A,T,C or G
ggccccccctcggaggtacttctagnattaattaacgcgggtccccatcctatgccagtgattggatgtgtgaattggcgtcattcatgggtggaatattaggagtgcatttggccagtaaacccacatccttccaacagctctatcataaacatagctgctattctcgaactcctgacctcaggtgatctgcccacctcagcctcccaaagtgctgaccaatatgatgaaaccccgtctctactaaaaatacaaaaattagccaggcatggtggcatgcgcctgtaatcccagctacttgggaggctgagacaggagaatggcttgaacccgggaggcagaggttgtggtgagccgagatcgcaccattgcactccagcctgggcaacaagagcgaaactccatctcaaaaaaaaaaaaaaa

SEQ ID NO: 50927 - DNA, 591 bp, Homo sapiens
ccgggccccccctcgaaagtcttctagaattaattaacgcgggtcccaaatcctattaagaatcaatttatttgtgttctctcgccatcagaagaatcaaccttactcacctgtcgcttgctttccgatattaaaggcatgcttggcttatcccaaagaaaagtttgaagttacaatgcttgattgttaaaaatgcttaacccggtggctcacgcctgtaatcccagcactttgggaggccgaggtgtgcggatcacttgaggtcaggagtttaagaccagcctggccaacatagtgaaatcccatctctaccaaaaatacaaaaattagtcgggtgtggtggcaggcacctgtaatcccagctactccggtggctgaggaaggtgaattgcttgaacctgggaggtggaggttgcagtgagcccagatcacaccactgtactccagcatggagcttgatcatggctcactgatcaaaaactcaattaaaaaatataaaaataaataagagttatttgtgttagcttgtggaaaagaaatagtacattaggtttaggttatatccaaaaagatactgctgtcatttttgat

SEQ ID NO: 50928 - DNA, 289 bp, Homo sapiens
  misc_feature 17: n = A,T,C or G
ccgggccccccctcggnagtcttctagaattaattaacgcggggggggtatgcatatgtagggaagggatacaggggaagtctctgtgaccttgctctacaattttgctgtgaaccttaaatgactccttgaacaaattaaggctttaaaaaacggaaataaaaatctactcacaaatcattgccacaccttgccctataacaacattattttcaaggtttagaataagttagtcatcaaaactactgaccttggaactctacttgcctgttactgataataaaagcaa

SEQ ID NO: 50929 - DNA, 590 bp, Homo sapiens
cgggccccccctcggaagtcttctagaattaattaacgcgggtctggccctagccaactgctagttgtccttacaaagcacactcctcacccagaactcccaaagcatattacatagttcttgacttacagtagcctggaatgtcatctaagagtccaagatgtaacattctagatacagaatagcttttaaaatacaaaattgtatcattaaataaaatgcaaaaaatgcctctcataaaaaattttttttaatttccatagatttattcagtcaacaaacatttactacctactgcgttcttatttcagtatcaagcagtgaggatgtttaaaaataactccctgggtgcaatggcttgcacctgtaatcccaacactttgggaagctgaggcaggacaggagaattgcttgggcccaggaattcaggactagcctgggcaacatggcaggaccccatctccacaaaaaaaaatttaaaaattagctgggtgtggtggagtacacctgcaatcccagctacttgggaggctgaggtgggaggatctcttgagcctgggaggtcaaggctgcaaagagctatgattgtg

SEQ ID NO: 50930 - DNA, 483 bp, Homo sapiens
cccctcgagagtcttctagaattaattaacgcgggtacattaaattatatgtagagaaacataatatatggttagagttcaccgtcaataaaaagtgtgggaaaatggacactactcaggaaaatattttaaaaattctcaaatgcattatttgttgatattaacacacacaacaacataaaaactgaaaataaacattctctattccttgaaataagtctaaaagccacaccagaaatagtaaatgatgtaatttatgaaatacaatgacgaaaactttacctaacctgatatattttaatatacctcacttagtgttatttggtactcacaaaaatttttcctactaatatatcacgaagattaaacatattactatatgactattaaatttcagccaagatgaggattttaatatggttttaaggcttggtgcagtttttcataggtgtcggtggttaaccatatatgtgggtctacaca

SEQ ID NO: 50931 - DNA, 432 bp, Homo sapiens
cgggccccccctcgagagtcttctagaattaattaacgcggggaagatttgttctgtgtgtgggcgaaaaaaataattaatgactgatggccaaggggatttttttttcagctgtttgttatcacagaataacccggccagtcctgatcaatgccatcatttggttctttttactttcttcactagtagggtgaggtggggtggcatggaaggctctaggtgacatatactaagagactcaccgttttgccatttgaatctgtgttagagcacttcagtcagcaagacactatcatatttattttttgagagagggtctcagtctcaccctgttacccaggatggagtgaagtggcacgatcatggctcactgcactccatccagcctgagcaacaagagtgaaactccgtctcaaaaaaaaaaaaaaaaaa

SEQ ID NO: 50932 - DNA, 413 bp, Homo sapiens
cggggccccccctcggaagtcttctagaattaattaacgcgggctatctactctaccacactgctaactgacaacgacagtcttaccagttcttcgtaccccttaaggatagcaaagaacagctactaaagttaacagtaaaactatttgtttccaagtatttagatttatttttatcatatttctaaattacatattaccttttaaagtagagtagtgaccagcatctgtacttagagattttaataagtaattccatttttgggggatgcaaagtttaattatataacaaagtgtgctaatttatatcacatgtaaccatcactttccatatggtgacatgcacagtagtgggggtagggggtgaggaatgacaaacagagacctagccttaacttaaaaaaaaaaaaaaa

SEQ ID NO: 50933 - DNA, 603 bp, Homo sapiens
cgggccccccctcggaagtcttctagaattaattaacgcggggccataaataaagattagctttcaattgcactttaaattctcttgccagagatgcctctggcaatggttccagctggctggcaacttcgaatgcagagacagtatcatattgtcatattcatctttgaatccccccagagtccagcacaatactctgcacatggagtctagcataatactccagacgtcataaatatatattctattgaaagttaactaagaccctttaaggaaaaggaacagatttgtttacccagtaaaccccttgcaagtagagtatctgttgtatttcagtcctgtgctaagtgacagggataccaagatggatgagactcattccccacctcaaagctctcagaaccaagcaaggcagacagacctgtaaagaaatcttcacctaccccgagatcaatgaatgccatgacagagcttgcacatggcatgaaagtggcactgaagagggagattgagtccatgcagagtgttcagggaaaaagtggctcatactgagttgggtgtgaaggtatagatggctggatatttgccagggcaagcatggta

SEQ ID NO: 50934 - DNA, 574 bp, Homo sapiens
  misc_feature 30: n = A,T,C or G
tgggtaccggggccccccctcggagtactntctataattaattaacgcggggacagataaacaaactgtatcgaggatatcttcacaccacctgcccaattttttcatacttgcttgataagggtcacttaagcgaattacagaaatgaaatgattgtttaaaaatattttaaatgagacatggatccttcttaatctcatatttaaagaggacctcaatggccatttggttctgcttccttatttgctacaaatcgttagtttttatttttacttatctcctatgaatctttatttttatttttacttatttttttcttctgtcttgtcttcaacaagctgctgtccaagccctgcagaattatcagtgataaaatctattaattagaaagatctcttagacagaaaaaacccttcaaaaaaatcaatgaatccaggagctgggtttttgaaaagattaacaaaatagaccactagccagactaataaagaagaaaagagacaagaatcaaatagacacaatgaaaaatgataaaggggttatcaccactgatgccacagaaatataaactgc

SEQ ID NO: 50935 - DNA, 602 bp, Homo sapiens
  misc_feature 24: n = A,T,C or G
gccccccctcggaagtcttctagnaattaattaacgcggggtaagaaactttacgtgtacctgataaaaggggaaaaaagaacctacttgtagtaaggatcaaccgtttcatattgaattaatcacatttgctcagaaagatacaaaagggttacataaataatctccctgcatgcttttctttgtatttttttagtttccctcaaagcatttggtcacctgaagaaacttcagaagttgcccattctaagtttttaagttatatgaagcatatgaagaaatagtctcttgataaagttatttttactatttaatatctggaagagaatccaggcaccagagccatcaatttgatctgcagagaaactgagtccttaattggacacaatttaattatcatcaagcatttgttaagaccctgattgaaatgtccagcaagccagcctgggcaacatgacgaaaccccagctctacaaaaaatacaaaagttagccaggtatggtggaacacgcctgcagtcccagctcaggagatggaggtgggaggatcacttgagcccagaaggtcaaggctgcagtgagcggtggttgcaccactgcaca

SEQ ID NO: 50936 - DNA, 606 bp, Homo sapiens
  misc_feature 16: n = A,T,C or G
cgggcccccccctcgngaatacttctagaattaattaacgcgggtatcatcttaacagaatagtttttttaaatctgatcatttcgtacaatgcagaaaaacatttgataaaactgaatatattattttatgataaaaacttttaccaaactaggtacagaaaaaataaacttcaacataataaaggcaatatatgagaagcccgtaagtaatattatactcaatggtgacatttgaaagccttttctctaagatctggaacaagacaaggatatgcattattagtacttctattcaacatagtattggaggtcctctctagaacaatgggtcaagagaaagaaataaaaggcacctaaatgagaaaagaagaatcgccactacttattgatggcatgattttatatatagaatgccctcacgctccaccaaaaaaattgttagaataaataaataaatatagtaaagttgcaggatgcaaaattgacagatataaatcagtagtgtttctattcaccaacaacaaactacctaaaaatatattcaagaaaacaatactatttacaatagctgcaaaatagaataaatacttacgaataaatttat

SEQ ID NO: 50937 - DNA, 564 bp, Homo sapiens
gggccccccctcgaaagtcttctagaattaattaacgcgggggttgagataatgtgtaagttatcactggaccctaagttctatttagtttttgcttttacagactaaatgctgtcttcgcatatcattacttaacccaccataaaatccttctgatcaagtttttcatatatgggacaaaaaaatcgttttgtttcaaatcttgaccagttctagcctaagaactgtttgacttaagcaagaatttcaacacagatcttgcagcttaacacccattggtgaagaaatattttctctttatattagttcatttttcatggcttctttatagtgtcatatgctattaggaaggagaaaagctaatgtgatatgtgaactaatttcttgtttaaaaattttaaagagtgccatctggaattcaatcaccatctttccagatactagctttatcgtaatctgagactcagttctatttgattattaccattgatagacagaaaaagtgctagatcaaggaaaagtacctatgatatgtatacccaaatatggcagcaatagcaagat

SEQ ID NO: 50938 - DNA, 558 bp, Homo sapiens
  misc_feature 9: n = A,T,C or G
acttctagnattaattaacgcgggcatattgttaggccatagtaatttatttaacaaataaacatggactagattgtgacaaattttcttttgttattttgtctttaatgtaacaactctttgactagattgtatatttgaagagtttgggaggtatagtccaaaaatatagttatatttttcataatgacaaatccataattatttgcactcattaatcatttgataaacatttgccagttagtagaaaatcatttattttcacttgatgtgattcttcaaatgcaatttacaaaatatttcatctcttaaaacattgatatgatcacagaaataaattaggcataattattgaatgtattttcatttcttaagacaggcattattttaatattctataaagatgattctggcatgaataaaacataaaagtctttttagttataaatatatttttaaataaagttacctatttttaatattttaatataggatagacactgacattaattcttctctctttgtttctcatatacacacacgttcacacacttacta

SEQ ID NO: 50939 - DNA, 605 bp, Homo sapiens
  misc_feature 25, 38: n = A,T,C or G
ctggggtaccgggcccccccctcgngggtacttctagnattaattaacgcgggtcactgcatcaaaggagaaatttaaaaactgatatttaaattatctaaaagcaatgaaaagaacagcaatttttaccaaaacctaagtaaaagaaatcttttactcgagccctcaatgcttcattaagaaaaatcaaatgtaaagaagtgtaatagtcctctaacgaagttgcaaaagcagctacaaatcaaccaaaagaaactaggatgaaatcattaaggcaaaaataagctgcaattaacgaaacggaaaatgaaacagtgaaaagaatatacaaattccacagttatttctttgagaagaccaatcaaataattcaacctatccataaactttaaatcaaggagaaagagagggagaagaaacgtaagatttcaactttagtcttgtatatttgtagaaaaatttcaaatctaagggtcaaccaaaccaagtaagtaagggtgacaaaataacaaaggaaatcaatgtaataaaaatgataatggcgtgtctgtcacagataatacatgataaagattttggtgtaaatgatctttcatgcactcagt

SEQ ID NO: 50940 - DNA, 610 bp, Homo sapiens
cgggccccccctcggaagtcttctagaattaattaacgcgggtatacactgtggataatgtgtagagttgtgcctatggctcagcatcgtaattgtttcttcacatctctgcttgctgccatccctgatgagtaccttgagatttctttacctttatgttaccctaaatgcctagcactgagcctggaatattgtatgctctttcccaatgtttgctggttgaggagattaaactagattaacagcttgataactttcacaaagttgcctttttctagcttattgcaggcacctgacttgagtcacctgctcacaataaaaccaaatcctttctttggattatatagcacattgatgttgaattctttccctccctggagtcaacatcagagttttgttgtattacgatcactaggaccttagcccctttcatgccaggagctctggaaggatagggttaaaagcttaaaccaggaaagaatagagactcaaagaaatgatcaagaagtggctggcaatcaaaactctccagcactttagccatagttggagcaggtaacctgaaggaatcaggaagaatatagggaactatttttccatttcaactact

SEQ ID NO: 50941 - DNA, 605 bp, Homo sapiens
  misc_feature 27: n = A,T,C or G
cgggccccccctcggaagtcttctagnaattaattaacgccgggtcctacaacaactccatcacattatatgttctgagagttagtacactttgaaaagcccaactctaactaggactgacatttcaaaatcatgcaaaaacatatttttatagtcatatacgaacaaaagggcttattccactttcccctcaacttttaatgacatcaagttgttaatttccaggttccttaattatacccagaatgttttcccttgccttctgaaaactcccttatgtcaattgtacccagcattcttcattgcctccaaccccacattagcagacatctcatgaagatgtgagacagctactggattcctctgtaagaacagacagtgaagacccacatgttcttctgtatttatgatagtatacactgtatattttcagttatgcatattcaatacctctgcgccaggtatttatttatttatttatttatttatttatttatttatttgagacggagtttcgctctcgcccaggctggagtgcagtggagtgatctcggctcactcactgcaagctccgcctcccaggttcacgccattctcctgcctta

SEQ ID NO: 50942 - DNA, 612 bp, Homo sapiens
cgggcccccccctcgaaatacttctagaattaattaacgcgggtccggtgggaggatgagatagagcaggagagagaaaaatcccaatgcacgactaagttccaatcaagctctcaaaatgccctttatgctgataatgcctcatatatttcactaaactgtattttactgtcctttaatactttgacttaaggaataaaggtattcttacggaatcacaaacatggaaaaacacaatacaataaagactgaaatgaacgaaaatccaaataactaaaaggaaaaaaattatatccatcacctgcaaattcaacgtgttcaaaaatcacattctctgaaaatcacctctcgtcctaattttggacaaagtatttcttttcctcatcctctggttcaaaaccttggggtcttcttagagtcctctatctccttcaagccctataataactagttagaactcaaattccacagattcttccttcaacatttctcattgcattcactcaagcagtttttattgtgtacctactgatgccaatttcaggagattctggtggtacaactgcgagggtaggatgtggagatgtatacagcaacagctactaaactagt

SEQ ID NO: 50943 - DNA, 601 bp, Homo sapiens
  misc_feature 28: n = A,T,C or G
cgggcccccccctcggggtacttctagnattaattaaaagaaatctatgtttgagtgtcctctatgtgccaggcagagttgaagagtttacataggttacttaattttcacaaattctctgaagaaattgctattactgtctccaatttccaagtggggaaactgagacttaaagattaaataaactagtcagtaaggtgacacatgcctgtagttctagatactcaggaagctgagttggggggaatcacttgagcctgggagcttgaggctgcagtgagctacaattctgccactacattctagccttggcaacatagtgaaaccctgtctcttaaaagaaaatccagaaattaaacaaactatggaactgctatttggcccaacagtctactattgagcctatactcttaaccaatgttcagactaattagctgacttgagatggtagcctctcctattcttactccctgacactctttatgccacaaatttatggcattcaataaaacttgtaattttacttgtgtacacacaaatacacatacacacataaatatatacacatgcataaatatatatgtacatatacatatatata

SEQ ID NO: 50944 - DNA, 613 bp, Homo sapiens
  misc_feature 574: n = A,T,C or G
accgggcccccccctcggggtacttctagaattaattaacgcgggcttccactttaatgatggcaatagagaattgcacacattccttccatttatcaaaattttccccataaagagactaactttatgcaaactttttggcatgaaaatgctgggcactaagaacagcaagcaatttgtggattaaagatataaaattagcactagaattgttgagataagcctggtttatcctggccagatgataagcatgggaagtggctgggtaatcagaaactagttgtcaagttagaacaagagctccaaaattataactcaggattgaggacgagacagtgtgaggaggaaaattcagaaaacaaagctcaggagaaggccagaacactttacacggagcatatcctgggaaatcaaaggaaaaaaatgtctattaaagggaagggtggtagaaatgagattagagaaaaaaaaaatcagaaagatcaaagaaaatctggtgctttccatccaaatctgtaccttaatggatagagaaatattaggggcttctctgtcaaagatttcattttaactncactggttatcttatttatttaattttttttaattctta

SEQ ID NO: 50945 - DNA, 162 bp, Homo sapiens
  misc_feature 16, 19, 20: n = A,T,C or G
attaattaacgcgggnggnngtgaatacagagcaatcaggctgacctaagctccagaagaaaatcctagcagctcttgtggaagaactcttctactagaaaatgacgcttttccttttttttcttttttgagacagagtcttgatctgtcgccaggctggaa

SEQ ID NO: 50946 - DNA, 498 bp, Homo sapiens
gggccccccctcggaagtcttctagaattaattaacgcgggggcctgacacacagtaattatttgaaatattcatcattgttataactacccagatgggctaaattcagctcatccagaacgcccaaaaaaccattttgtaaagtatgctgggcctacagagaaaaatatcagatattagcatataaaaaattttttttgcagccaggcacagtggctcacacctgtaatcccagcactttgggaggccgaggcaggcggattgcctgagctcaggagttcacgaccagcctgggcaacacgatgaaaccccatctctactaaaatacaaaaaattagctgggcgtggcagcgtgtgcctgtactcccatctactcgggaggttgaggcaggagaattgcttgaacccaggagatggaggttacaatgagccaagattgtgccactgcactgtagccggggcgagtgagactctgtctcaaaaaaaaaaaaaaaaaaa

SEQ ID NO: 50947 - DNA, 611 bp, Homo sapiens
  misc_feature 524, 551: n = A,T,C or G
ccgggccccccctcggaagtcttctagaattaattaacgcgggcaattaaaatataatttcagtggtcattcaataatatttattgagtatactttataagcagactgtcgtactctaggcaatgaaagtcttgaactcataaacttagtcaattccatagtaaaaaacaaaatcaggggaaaaatttacattagcatttttctatgattattgaaacgtcctttccttctcatgtgctaattataaataaataataccaattcttcaccctcaagttgttttattactattaaataactataacttacagtggcatagatttatacctactggttatttaaagtttatgaaatgccttcagctctctggagaaaatgcactgaatacatataaaacaataataaaataataatatgcccaaggataaaccatgttcctatgttttcatactgtgtatatcatgggcattttatagcacaggttgtttataaatgaggcccccagctgttactgagagactcangcagagaaagggagtaaacagaggatnaatatcctgattataacgggaggctgtttctgcagggaaccagggtgagttacattctcc

SEQ ID NO: 50948 - DNA, 595 bp, Homo sapiens
acttctagaattaattaacgcgggggtagggaaggagtgcatgggagagaatccttaatggataagcagttttactttgaagcgacagaaatattttggacctagatagttttgtgtgtggtggttgcacaactacatgttgtgattattaagtgtcactgagttcattttaaaatagttcattttatagtatattaatttcacctcaatgcattattttttaaaaatttaaccatattacaaatgaaaatgctactaaatttaataagtactggtagaatttgaagtcaatatttattacataataatactagctcccatttattatctgttattttacttagttctccctacaatcctgtgaggtatatgctatatctcatattgagaaaccaaaatagattgagttacttgctcaaaataatgtagcttgtgaatggcaaagctgagctttacttttctgactttaaaacctatattctgaaagataaaactgccattgactcagcaatcccatttctgagtatttaccaaaaaaaaaaaaattgttctacccaaaagttacatgcacccacatggtcatagcagcactact

SEQ ID NO: 50949 - DNA, 594 bp, Homo sapiens
  misc_feature 28, 546, 579: n = A,T,C or G
cgggcccccccctcggaagtcttctagnattaattaacgcgggggagagagagagagagagacagagaaaagacactccaatcctgagagatgaaactctactgatttgaacaacaaaaaatgtccaacctagatatgttcctataataaattgttagtgaggtaaacctggccaaacctcatgagtatatattggccaaacctcataagtatatatcttgatgatttaataattaatatgctctgcctaatatatgcctttatagtaggtaataatttgtgttacaaaagtgcaaacatgttcaattaaaacagcatctgttatttaatacacaaggtcaatgcgatttctagaatgtgaagaccgtggctaccaaatggctagcagtcacctggccacattacgtaagatgcatatgcacgctacaatgttcaattctgagttaactggtctgaaaactgattcatgtattaattccaggctacctatgacagtaaaactatcaatactaggagaggcacttggttctggtttgagattgaatntcccctaattaattacactgtgggtgcattctntcagttctatgatct

SEQ ID NO: 50950 - DNA, 464 bp, Homo sapiens
  misc_feature 29, 42: n = A,T,C or G
aagactgggttaccggggccccccctcgngggtacttctagnaattaattaacgcggggggtgaatcacgaggtcaggagatcgagatcatcctggctaacacggtgaaaccccgtctctactaaaaatacaaaaaaattagccgggagaggtggcacacgcctgtagtcctagctactcgggaggctgaggcaggagaattgcttgaactgccttgaggtggcggaggctgaagtgagccgagatcacaccactgcacgccagcctgggcaacagagcaagactctgtctcaaaaaaaaaacaaaaacaaaaaacaaaaaaaaaaaaaaaaaaaaaaaaaaaaaaaaaaaaaaaaaaaaaaaaaaaaaaaaaaaaaaaaaaaaaaaattaaaaaaaaaaaaaaaagggggcccccaccgggggggacctccaattccccctatagggagtcgtataacccccc

SEQ ID NO: 50951 - DNA, 625 bp, Homo sapiens
  misc_feature 16, 29, 566: n = A,T,C or G
ccgggccccccctcgngggtacttctagnaattaattaacgcggggacattaaaggtagaatatgggactaggtgagaatctccaagtgggaagggcaggtccagatagtgaaagaggctcttatgtcctaccaaggaaggtggacttctaattgcttctaacatgtagttactgattcaaagactatgggcttgggaagggtctgtataccttcctcctctttatggaatccctggtatctgtaaacaaggatctttatttggattctctgtggtttttatacctgaatgctccatcatagcaatgcagtgagtaaaggaccttggaagcagcaagttctccatttgccaagaaaaaggaaaagaaactaagtaagaaaatatgcaacacacttctttcagatcccagaactacaaagcttctccccacccagttaatctcatggcaattcatagtcactctgttttaacaatctctgctatcccaattttaatgccctccttcattctccttcctctaaagcagatttctgaattagctgggagttaatgttcatgaatatgtntcttttcaatgcggaccgaatactctttaaataatgtcttactcttaacatacttgaaa

SEQ ID NO: 50952 - DNA, 530 bp, Homo sapiens
ccgggccccccctcggaagtcttctagaattaattaacgcggggacttcactcagccgtaagtatctcttattctctcatgtcaatagtttcagtatttgtgcaaatttctctatagatgaaattccattacttatagtactattataaatcatagctccatataacaaagctatttcatattgccaaaatgacctgttaaagcaaatctttcttttccctttatagaaaatggtgtataatgaatatctgaaaatgttaaggacttcctgcgtctctgcccattaaacatttcagtaattttttttctattataaaactgataaatatttatcatagaaaagcaaaattagggattacagctaaataaaaacaggaaatgtaaaagctctcatggccgggcgcggtggctcacgcctgggattcccggcactttgggaggccaagacaggtggatcacctgaggtcaggagttcaagaccagcctggccaatatggtgaatccccgtctctgccaaaaaaaaaaaaaaa

SEQ ID NO: 50953 - DNA, 596 bp, Homo sapiens
  misc_feature 444: n = A,T,C or G
cccccctcgagagtcttctagaattaattaacgcgggtaacaaaagtaaacggaagttacaaataccttggacacccctattgaagcttatatccagtaaacttttacacattctattaagaactgatttttaacagcaattttgaatcttttgtctctctcttggcttctgaccactgtgcatggatgaccaagtagagaaagaaacaagtagaaaggaggaacaataaagagatttcagtgttacagaattaattgtcatagagcataacagaatgtgacaatcagacagacattctcaaaacgttagataccatactgtatcataatccaatgcagggttcctattaccacatctctaaaggatgatgattaagcctctgtttgaaaaaaatcttttaaaagcactctttttttttttttttgagaatagagtcttgctgngtcacccaggttggagtgcaatggcacgcgtgatctcagctcactgcaacctctgcctcccgggttcaagcgattcttgtgcctcagtctcctaagtagctgggattatgggtgcacagcaagactctatcccaaaaaaaaaaaaaaaagcg

SEQ ID NO: 50954 - DNA, 550 bp, Homo sapiens
  misc_feature 32: n = A,T,C or G
taccgggccccccctctcggggtacttctagnattaattaacgcggggctacttcggaggctgaggcaggagagtcgcttcgaacccagggaggcagaggttgcagtgagccaagatttcgccactgtattccagcctgggcaacacagcaaggaccccatctctacaaaaacaaacaaacaaacaaaaaacaaaaaaacccacaactaattgtacaaaggtgattggagtcttagcaacttgtttctaggttctgtcacccagagcattctataaagtcagagtggcaatttgaaatgatgagtgtatctaaatcattacagaaatgcaaataaaagccacactgagatacatcgtattctcactaagatggttaaaagacaggtaacaacaaatgttgatgagaatgtggagcaactggaatcctcatacattgctggtgggaatataaaatagcatagccacttgggaaaacagtttggcagttcctgaaaatattaaaaacagagttaccatataattcagcaattttcactcctaaatatacaac

SEQ ID NO: 50955 - DNA, 580 bp, Homo sapiens
cgggccccccctcggaagtcttctagaattaattaacgcgggggctgaggtctctgtctgatgagcactcgagagccgtgtgactggctccacttctgccgaagcttgaggctcactgtgcaaaggctcttttagaaataaatactgaaggttattcttcagagaggtggagttgagctcgaaacacaggagtggatttcaaaaagcaaagggggccgggtgctggctcacacttctaattccagcactttgcgaggctgaggcaggagaatggcgtgaacccaggagacggagcttgcagtgagccgagatcccaccactgcactccagcctgggcaacaaaaccagactctgtctcaaaaaaaaaaaaaaaaaaaaaaaaaccaaaggtaagcaaagaaactggtaaatatgtggtgaaaatgaaataagtgttggtgggtcaggtgcggtggctcacacctgtaatcccaacactttgggaggccaaggtgggtggatcacgaggtcaggagttcacgaccagcctggccaacatagtgagaccccatctctactaaaaaaaaaaaaaaagcggccg

SEQ ID NO: 50956 - DNA, 510 bp, Homo sapiens
  misc_feature 17: n = A,T,C or G
ccgggccccccctcggnagtcttctagaattaattaacgcgggtcacctatgacacaaagaacaaagcttgcattgtacatctataaaataagtggcttacataaataagatgctttctgccatagccaaatgggccatatggcccatatgatttttatagcaaaagaaaatttttctggtacgagcataaatgtttccctgactccccacccccccctttttttttgagacagagtcttgctctgtcacccaggctggagtacagtggtgcgatctcggctcactgcaagctctgcctcccaggttcacgccattctcctgcctcagcctcctgagtagctaggacaataggtgcccgccaccacacccggctaatgttttgtatttttagtagagacaaggtttcaccatgttagccaggatggtctcgatctcctgacctcatgatccgcccgcctcggcctcccaaagtgctgggattacaggcgtgagccactgtgcccagcccg

SEQ ID NO: 50957 - DNA, 495 bp, Homo sapiens
ccccccctcggaagtcttctagaattaattaacgggggattttatcctcatgccaaaacatttaaacaaaagcgagtgaaaaggcccctctaaccaccccctaagattgaatggagacatttttcacatagtcagaaatgtaaacagtcaataccacacatacttttctatgacttaaagaataaaacattaaaatacaaggccgggcacggtggctcatgcctgtaatcccagcactttgggaagctgacacaggaggactgcttgaggtcaagagtttgagaccagcgtgggcaacatagcaagatgactctacaaaaaatgtaaaaattagctgagtgcggtggcacacacaggtcgtcctggctacttgggaggctgagatgggagaatcacttgagcccaggagctcaaggctgcagtgagctatgatcaagccactgcactccagcctgggtgacagagtgacactctatctctaaaaaaagaataaaa

SEQ ID NO: 50958 - DNA, 606 bp, Homo sapiens
  misc_feature 25: n = A,T,C or G
ggccccccctcggggtacttctagnattaattaacgcgggcatccatacctacagctgagagtgccagggcaggcaggaagtcataggaaacaatgaagaagagtctttgacttctgcattaaatctagctgagagactaactcctctccttggcagctgactcaggacctatgagatcatattgggtaagcctttaaaatgcaatttgatatgatcagaattttgaagagtagatcaggtcagaaaagcagatttttctttattaggaaaagaaagaaacacttaaaagaaaaatgttctcttcttggaaaggattttcttaaaggtggattattaattcactcattaattcattccttatgtatgacgcatttactaatagatgcttgctttcattcacctctgaagttagatgtgcacactcttattttctctttttggatgtcacaggtagacaggcatgttttagctacttgcactacttaaatatgcagatttcctaggtgacatcatttggctttagtgttaatgggcccctgatgaccactaaataatgctcaagaagtcaggtctgcatgataggttagttccttaattgtgtttct

SEQ ID NO: 50959 - DNA, 608 bp, Homo sapiens
  misc_feature 543: n = A,T,C or G
ccgggccccccctcggaagtcttctagaattaattaacgcggggcccaacgtctacttgaattttaaaaaccaaagaacagggctgggcatggtggctcatgcctgtaattccagcactttcagatttcgagctctgcagtacaaatgatcctgttacccaggtacacagcatagtacccagtagtatttcaacacttgcccttctccctttctcctatctcaagtaatccccagagtctgctgttgccatgtaaagcctgatcttgaagacatatttgaaaagcatttttcacaatagctaagaggtggaccaatgcacatacccactgagaggctaaatggataacctaaatatggtaagcatataaatacaacaggatattgttcagtcttggaaataacatcctggcccctgctgcaacatgcatgaaacctcagacaggatgctataattgtaaaaagccagtagccaaaaaaaaataagtataattcatattagatgttatgtagagttctcaagctaattcaactgtatacatcanactgtttaagctgggtaattttatgttttttataataatgattgattattgtatgaaataaaact

SEQ ID NO: 50960 - DNA, 498 bp, Homo sapiens
  misc_feature 475: n = A,T,C or G
ccgggccccccctcggaagtcttctagaattaattaacgcgggtcctgtgcttttatgacactccatgcactaaatgcctattcttctcctgacccctatatgtcctgagaccttctgatgtcttcttaccctaggttctcttctcctggctacctttaaataagtgactgagctatagggctccttttcctggtagggtagaaaaacacctcagtggctctcattttatataaatgaatctccctttggctcccataaatacccattttacaaagaactataaagaaagaggctgtgaaacaggatagtgttatgatttttagctttataaaaaataataaatatgggttaccctacttaggttaaggaaacactatgtgcttctacgggcccatgaccataatgtcttcatggactaatagagacaccatcccggccgggtgcggtggctcacgcatgtaatcccagcacttntggaggctgagccaggtgaatca

SEQ ID NO: 50961 - DNA, 410 bp, Homo sapiens
taccgggtccccccctcggagtacttctatattaattaacgcgggactctagttaacaacaatgttttgtatatttcaaaatagctataaagaggacttgaaatgttcccagaacatagaaatggtaaatacttgagctaatggattcaaataccctgactagatcattacacattctatgcatgtgacaaaatattgcatgtgctacataaatatgtacaaatattatgtatcaataaaaagtaattaaaaagtttttaaaaagattcagccttgacatttatgaataggaaaaggaactggggaggaattacgtttcactttatttccattctgtgtctctgagggaggcaccaggtaaagagagatgagccattgcgtggtgaacttgaaatgagagtgtagctgcg

SEQ ID NO: 50962 - DNA, 461 bp, Homo sapiens
cgggccccccctcggggtacttctagaattaattaacgcgggagtgaaagcaagagagaagttgagaaagtttcctagatttttggttggggtaactctgaacagagagtaccatgcattgagataggaatataaagggaaggagcaagtgttacggttttaaaaggcatggttggccatgcgtggtggctcgcgcctatataatcccagcactttgggaggctgagactgtgggtggattgcttgagtctaggagtttgagaccagcctgggcaacatggcgaaaccccatctctactaaaaatacaaaaatttgacaggtggtgatgcgtaccacctgtaatcccagctacttgggaggctgaggcatgagaatcacttgaacccaggatgcagaggttgcagctgagatctcatgactacacaccaacctgggtgacagagtgagactctgtctcaaa

SEQ ID NO: 50963 - DNA, 584 bp, Homo sapiens
  misc_feature 25, 569: n = A,T,C or G
ggccccccctcgaaatacttctagnattaattaacgcgggtggtaggtttttatttgttagtttgtccagagtttagagtcactatctccaccagacagcttattctaatatactgaagaaaaactcctcagctgtggccttcaaaactctggacctcatggtccctgccctggcttgtatcctaatgactgggacccaaatctgagatccagccttcccatcagaggacacttggggcttgacccttgtgtcctctaatccatccatccatccatccatccatccatccatccatccatccaccgacccacccatccatctaaactacatttattgagagtatgagctgcttctgactctactatgaacagagaccaggaatgaatgagatagacactggatctgaaaaaaaaattagccagctgtagttgcatacacctgtggtcccagctacttgggagtctgagggaggaggtttgcttgagcccgagagttcaaggctgtagtgacctgtgatcacaccactgcactccagcctggaggacagagtaagtccctgtctcaaaanaaaaaaaaaagcggc

SEQ ID NO: 50964 - DNA, 604 bp, Homo sapiens
  misc_feature 30, 577: n = A,T,C or G
accggggccccccctcggaagtcttctagnattaattaacgcgggctcttgttatcttttctcaaaatttctgaactcaaggggcagaaaccaggtttctagacattcagctcagccaggcaaacagcctctagtaattccaggcaagtgcaaagacaagcagcaaattgggcaaacagtagagattgcacctgttttctttttgagagtatccttatcagagagccagaactagtcattaaattgtgtttgtttgctaacgttgctttaccttgctgagctaaaagtgcccccatggacaaaaaagatcacagaccactgcgattgacagggactgcagagtgtatttagttcctcccacctcatttcacagggtggaaattgataggggaaagggggaattcaaattacaacagacttgatagaattcttttgctgttttcctctagacagctcaggctcagtttaaggtccttttaaaaagcccccattttctgatctgctccttcagaaacagggcagcaaatataaggatgggaacagaagtgagaaaggcactccgaagcaacggacacanaagaagagcgattgatggacctgcccg

SEQ ID NO: 50965 - DNA, 592 bp, Homo sapiens
  misc_feature 23, 554: n = A,T,C or G
ccccccctcgggagtcttctagnattaattaacgcgggataatcttagagataaatattattgatttattatacatatcagtctcacattttaagtggtgtatgtttaaaatacatacattcagaaaacctatacaattagatacaattttaatgataatttgtcaaaggtagcataaaagatgcatttaatatcataattaaagttttaaaaaagctttcttgacagcagtatgttaaactatatacttgaccaatcttcatgataaaaacaactaaaatgcatgataaattatatatataatacatatatatgcatagacatatatgtgtatgtattacaatgcattattgagttggtacagttgtaagaattctacagaggacaaaacagaaatgaagacagaaatcctgagaggttagtaagtactaacagctcatttttgttccaaagatttctaccacaaccttttatcttactattcatttctgatagttgcatggagtgtggaaaataaggtgagaacccacaaaaggtgaaggggctaatagganaaactagcataaagctggaaacctaaaagctgcatata

SEQ ID NO: 50966 - DNA, 431 bp, Homo sapiens
  misc_feature 411: n = A,T,C or G
cgggccccccctcggaagtcttctagaattaattaacgcgggggggaggcttcagcctggtgtagaaatcccagacattctgctgccatctccacaggagtcataggcgattcagaaccacagacaaaagcagtgtcatggcacgtttgagggcttgggcttaagaaatagatggttctggggttgaatctcagttcagatgagcagcctctcaaagcctcagtgtccatctgtaagatgggaatgattcctactttgtagaatagggagtttaaagaaaataatgtattcactgtgcttggaataggcctccactgacaagctcatgtttagtggcaataagtaatgaattagtttcctatgtaaagacagtctagaaattgctttttgtcttctaaagcataacacttnctttctctctctctcatttc

SEQ ID NO: 50967 - DNA, 251 bp, Homo sapiens
cccccctcgagagtcttctagaattaattaacgcggggcaagattgtgattaatctctggactcccagcccagtgttttttccattgctgtctcaatgaggcagctaagagcaaagacacacacctgtactctggaaacctttctttctttcctttttttgagatatttttgtcaggctggagtgcagtggcgtgatcaaggttcattgcagcctcagcctgacaaaaatatctctaaaaaaaaaaaaaaa

SEQ ID NO: 50968 - DNA, 568 bp, Homo sapiens
cgggcccccccctcgaaagtcttctagaattaattaacgcgggcatgcagagatagggcagtcaggcagactggcctcagtgaaatgtcagtccagagggaggacacacccagacaaccttcaccatgggctagcccacccctcaacaaaggggccagacccatccccaatcccatcccaggaggacaggggctcatcttgttggaggcgcaggggtgggtttcagggaggatgagcgaggagggagaggggtctttgttgcaggcagaggtaccagcttctaaagacgaggggagtaaggccgagatgaggcatctggggtctctgcgaggtcacattcaaccctcaagagcgcctggcacgtaatgtgcaaccaccattattattgttcgtgcagagcagggtggcactgggtcagtggcagcagcggtcccgaagggccttgaatgccaagcccaagatggccgggggaccgcgcgggggagcacgaagccggcgcggttgaacgccggccattccttccctcgccccagctctgcaaatctgacgccccaccccaagcatccca

SEQ ID NO: 50969 - DNA, 597 bp, Homo sapiens
ccgggccccccctcggaagtcttctagaattaattaacgcgggaactggcttgttttggcaagttcatgggaataccagttttgaaacatgatttcttataattagtcaacgctgcttcaccacaaaggaatggaattggccttttaaaaacaaaaccaaaccaaacaaaaccctaccgtctttgcagaaaacaagtctgaggtttgagatgaagctagggatggcatacctggaagtagctgacctagtagctaaaggccatgatcacagcattactgcttatgcctctgctctttttctcttttctcttaagcagtgatgctggagattatggcctttagtctccaggtggactggaaatccagcttcatggatatattgaaatcatatttctctcattgcttctccaactgcagtaaataaagtcttttgtttggttattgtgctgtatcgatctcaaaattatttttaaaaaaaccctgatatccactaagactgtacctttatttttttctatttttttgaattggggttttgctctgtcacccaggctggagtgcagtggctcgatcacggctcactgcagccttggcctc

SEQ ID NO: 50970 - DNA, 499 bp, Homo sapiens
  misc_feature 17, 465, 481: n = A,T,C or G
ccgggccttccctcggnagtcttctagaattaattaacgcggggtcatatttttgttcatgttaagaagaaaagtgatgggagctagtttctgagaacagagaaagaaaaacaaagcagatgcacaagagaagaagagctggggagagggaactgtgaagtcatgagttcgtgattctagcttttccttaactctagccacagatttattcttatattccataagatacctttatattcttataataatgttatttttgtttaaactcattggagtgtggtttctgttacttggcattaaatatcttcagaaatacataatagaccgggtgcagtggctcacgcctgtaatcccagcactttgggaggctgaggtggatggatcacctgaggtcaggcattcaagaccagcctggccaacatggtgaaaccctgtctccactaaaaatacaaaaaattagctggnggtggtggcgggtgtntgtattccagctactcgg

SEQ ID NO: 50971 - DNA, 463 bp, Homo sapiens
  misc_feature 380: n = A,T,C or G
cgggccccccctcggaagtcttctagaattaattaacgcgggcccccttcagcaagtagcatctgctaagaaacaactcctggattgctaccaaatggatagagaactgactaccttgtcatgagactcagggatcatctggcctgagcttccagtcatgaactggaggttatctagttcaataaactataagattaggtattttagcattaaaaacatttgtacatagatctgtatcatattctcacaccagctagaaatagactgctatggtattatagctatcattgaagatgaacccaaagggcaatgaaaaagggaaattgtcccagtggccaaaatttgagtagtatattttgttcagtttacctggaaacagnaggtacctaaagaaaagatacgatactagttctcctgaattgaagctgagccagccacctaggcagtttgaattctacatacc

SEQ ID NO: 50972 - DNA, 601 bp, Homo sapiens
cgggccccccctcggaagtcttctagaattaattaaccgggtgtggtaacagggccccaataatcccagctactcaggagcctgaggaaggagaatcatttgaacccaggaggtggaggttgcagtgagtcgagatcgcaccactgcactccagcctgggcattatgtaagagcgaaactccatctcaaaacaacaacaacaaaaacaaaatgtgttgcaggggatgggaaaagacgctattaaaactgaaaggatgaaaagaacaggactcctcaggtataactaatatgtttcagagtcagagattatttcagatttggaagaagtcaaataatttatttcacttaaagacacacaagacccagtgttgtaaatgatctggaagataaacatagaggaacatcattaagtagagtattatcactcagctttccaggaaataatgagaaatagttaatctctgtgctagtaggaagaaagggagcggctgagttttactgagtgtaatgcaaaatgtttatacgctgcaatgctgtaggcaaacttaagatttggaaggttgcgcgttatttagaaatatttgaaatctaaagcatcatt

SEQ ID NO: 50973 - DNA, 588 bp, Homo sapiens
acttctagaattaattaacgcgggtatatgcaaaaagactatacataaatatataaaatgctcaacatggtaaattgtttaataaattatggttcacatatagaatggggttctgttttcttagaatgagatttttagatgataaaatacatagagagatagacaggatggaaattattatatagttggtaaaggaaaagcatttactttgcatgtgtgcagaactatgattcaatttttgtaaaattaaaaaataagtacatataatgtgcgtgtgtgtgagagagagagagagaaagagagagagagggagaagtggaaaaggttaaatttcctaattgctacagcagaagcacaggtatgcaaatcacctaaaagccatattgatttttttaagatatacatttaaaagaatgccagccaggatatagatctactctaaggtatttcaaattagtagctcacctttcaaaaccatgagataacttttttgatcaacagaaatattgtaaagatttgagagaagtattaagctcctagatctaactctggggaacccatatgattgtgatcaaattcagaacaatg

SEQ ID NO: 50974 - DNA, 621 bp, Homo sapiens
  misc_feature 590: n = A,T,C or G
ccgggccccccctcggaagtcttctagaattaattaacgcgggttcatatagtatttatccagtgccaactattccaattcttatacttcttcatattagtgaaatttgtaagcaatatatgaagaatagcattatggatttttaacagaatgtcaatattaaggtaaaatgcttatggccttatttttccattttgaatagtattcaaaaaataaatctcagagatgaaacaaatgaaagagagatttttaaaaacaattcaaaagatcaaccaaccaaactattggtttttcaaaaagataaaaaaatcaacaaaacttcaactagactaagaaaaaaagagaagacccaaataaataaaatcagagatgaaaatggagacatgataactaacatcacagaaatacaaaggatcataagagattattaagaacaactatatgtcaacaaatttgagaacatagaagaaatttataaattcttaagacacatacaagctaccaagattaaagtataaagaaatagaaacactgaaccaaccgatcacaagtgagaaaattgaattagtaaacaacaacaaaaaaatctntcatcaaaaaaatcccaggaaatatccagga

SEQ ID NO: 50975 - DNA, 486 bp, Homo sapiens
  misc_feature 29, 454: n = A,T,C or G
cgggcccccccctcgggggtacttctagnaattaattaacgcgggggaggtgcccattggaacagatgatggcatacgcctgaaaaggagaagctggggccattaatatcactatgtaactagctaaacttcacaggagatcctgatacccatatcctatacttccattctactgagagtcactagattagaaggctgggaaagctcatcaaataagcagtccagtattcctttataccacatacgcttctctcattgctcccttcttctatttatctatttatttaggctggagaagggattcaatctctcaaagttgcggcatacaactttgtgcacctccaggggtgttatcaaaaaaagtattaagaacaattgcagccaggcacagtgcctcacacatgtaatcccagcactttgtgaggccaagataggaggatcacttaagcccatngagttgagatagcctgtgctatcacatctcta

SEQ ID NO: 50976 - DNA, 422 bp, Homo sapiens
ttctagaattaattaacgcggggtttcccgagtttagttattcatgaacccttttgtttgcagcagggtatcttgctggaccagtcttctgaggcacatggtatgggaaatgctactctagaccatgatctgctactgcagatgccctgtgcatgtagtactctccacatgacaatgaggcagctttcaattaggacacaaaggcagtattccgccttcctgtctgacccagagggtgaatcttcatccaagacccagttctttcctggaggctcagaggtcacaacattcacagaggactatttttcaactagtctttgccagaagatgggaagtgaaagtggagaggagaggataaaaagggcttcattttacaaagtggggcatcgggagacattgcctatagcttatggaagaaatgt

SEQ ID NO: 50977 - DNA, 597 bp, Homo sapiens
cccccctcgaaagtcttctagaattaattaacgcgggcattgggagatatacctaatgctagatgacgagttagagggtgcagcgcaccagcatggcacatgtatacatatgtaactaacctgcacaatgtgcacatgtaccctaaaacttaaagtataataaaataaataaataaataaattttcgttttcaataggataattaatttagataaccacatttttccacattctttttgaatttatattttagaaaactgtcaaacacatgtaactggacagcttctctaacagttgaattgttaatttagattctaagatttaatgtgtagttgtttaattatcatttattactgtagtttacaataatctattgtgtatttcttttatattttccagatacagggtcttgctctgtagctcaggctggagtgcaatggtacaatcatggctcactgtatcctcaacctcccaggtttaagcgatcctcctacgtcagcatcctgagtatctgcgaccacaggtactccgtgtctggctaattaaagaaaaaatgttttgtagagttgggggttcacctatgtttcctgggctggt

SEQ ID NO: 50978 - DNA, 544 bp, Homo sapiens
  misc_feature 526: n = A,T,C or G
ccccccctcgggagtcttctagaattaattaacgcggggagctgcacatggaatattccatgacagaggatatgctaggttacaaacaaacttccataaatttaaaagattaaaatcatatgaagcatattctccaaccataatggaatgagacctcagtaacagaaagaaatatgggaaattcacaaatttgtgaaaattaaaccacatactgctaaagaaacacagaagaaattgcaagggaaattagaaagtactagatgactaataaaaatgcaaacataatataccacaactcaggagacacatctaaaggaatgcttagaggaaaatttataactacaaatacctatattaaaaaagaagaaagggggccaggcggggtggctcaagcctgtaatctcagcactttgggaggcagaggcaggaggctcacttgaggtcaggagttcgagaccagcctggccaacactgtgaaaccccgtctctaccaaaaatacacaaattagctgggcatggtggcggntgcctgtatcccagctac

SEQ ID NO: 50979 - DNA, 601 bp, Homo sapiens
  misc_feature 51: n = A,T,C or G
cgggccccccctcgaaagtcttctagaattaattaacgcgggcatacttgngaaaatcactgcattagagaattcaggggtaatgagggaatcatgtctgcaacttaacttcaagtggttcgaaacaaaatttaaaaaaaaatgcatatacagacacacatacatctatattttgaaagatgagaaaggaaattttgtaaatcgtcaataattgaggaatttgcaagaagcttttgtgggagttctttgtactattcctacaatttttctctaaggttgagattatttcaaaacacgaactatagctaaaaaaaaattagaggcatttctaccaacatggatatgattacgagcataaaaaaagactagaaaaaaatgaaaacagaagttgtatatagtaggattagaaatcatttcttcaccagttttctcaagtaactttattactaccacttcatccacattaaaaaaaaaaaagcaataaaacactttttcccccaagatgaaaactctctaatgtaataaagtataaaaaagctctcctcacacctccttggtatgagaagatacaaaacattcaaaagtacaaaacaatcttatt

SEQ ID NO: 50980 - DNA, 615 bp, Homo sapiens
  misc_feature 37, 604: n = A,T,C or G
ctgggtaccgcggccctccctcggaggtacttctagnattaattaacgcgggccaccatccctgttttcttttgtttcgttggtaaaaatcaatccttctaccatccatgcatagcaatttctaaaaactgaatttcaagagcagtatctgaagaaacaaacatgatttggtccttttagtaaacagaataaattttaataaatcaactttgaaatagttgtaagagttaagaaaaagcacaaaactgagatcatcagagcagcttggcctcaaaggacaggcagcaggattctacagggtttgagccttcctaagtgaagctgtttcctgcaggctccctgctccaagctcctagctaacagccccttctcccacgattggcaacaaagagcaaaaataactttgtacttgatgctgagtcagtgtaaaaagccataaaaaattccctctaaatgtcaaaatgtttgcctcctttgaggcttctctcctcctactgggtctggataaattagcactgggcttatactgagtcacagatctgggccctgccacagagagcttcctcctagtgtgtgatgctttttctccaaactattgatacanaatgcactgga

SEQ ID NO: 50981 - DNA, 589 bp, Homo sapiens
acttctagaattaattaacgcgggacatgaaaaagatgtttcatcatttccaaatgagaagtcagttgcaattcttattgttgttcctataaatgtaatgattaaggttttccatttacatgcagaatgaaactagaccctcaaccccggcatatacaaaaattaactcatggtgggttaaaaatttaaatataacaactcacactatacaaatcatagaagaaaacctaggaggtactcttccggacatagcctaggcaaagaattcatgagtaagtcctcaaaagcaattgcaacaaaaacaaaaattgacaagtgggacctaattaaactaaagaacttctgcactgaaaaaggcactgtcaacaaagtaaacagacaacctacagaatgggagaaaatatttgcaaactatgcgtctgacaaaggactaatatccagaatgtataaggatcttagatcaacaagaaaaaaaaaagaataataaccccgttaaaacatgggcaaagaacatgaactgacacttctcaaaagaagacatgcaagtgtccaacaagcatgtgaaaaaattctcaacatcactaatcat

SEQ ID NO: 50982 - DNA, 529 bp, Homo sapiens
cgggcccccccctcgggagtcttctagaattaattaacgcgggacttctgtcaatttcttaaaaatctaacactacctatggaatacacaaaactcctaatacatttcttttaaagccaagttctctctttctatgttattgtgtattgaatgagttcttttcagctctctccaggttgtttaaatataagttcaaatgacttcagtcaagaaggtaaagtcattattagtatatataaaaatgaatctaaaaatatgtagtcgtgccccaaaacaacaggattaaagatctccctggactagaagtgcagcatggatccacactttaagctgtagtcccaaggagaattaacggctaaaaaatacacaatgggggctgagatttcagcatgtgcagaggaatagggaatgaatgcatgtcacatgtaggacatcagtcgatctagtctacttgaataaagcatggaaccggcatcttattgccctacctgtgaaccaaaatggataaatatatatttgatcaactatc

SEQ ID NO: 50983 - DNA, 598 bp, Homo sapiens
cccccctcgaaagtcttctagaattaattaacgcgggaaccacattgagataccactacatgactgtgggaagtgctaaattaaaaagtatgaccatatcgagagttggagaagatatagcactctcatatactgctggtgtaatgtaaatgttaaagccactttaaaaaacggtttgataagttcttaaaaagctaaatatacatgtacattaaacacattctgctcttaataattcacccaaaagaaaaagaggtatatattcatacaaagccatgttcaaaattttcatagctgcatcgtttgtaatagaccaaatctggaaataacccaaatgtcaatagacaatagatgaatagataaacaaattgtggtagatttataaaacggaatataaagaaccaaatattgctacatttgctaaatgtaactaatattgttaaaaataattatgctaagttaaagaaggcagatgaaagaagagctcatactgtatgatttcatttagataacactccaggaaatgtgaactcgtgtagggagagaacacacatcatcattgtctggaatacaaagagaatcaggaaggaaggattac

SEQ ID NO: 50984 - DNA, 474 bp, Homo sapiens
  misc_feature 28: n = A,T,C or G
ccgggccccccctcggaagtcttctagnattaattaacgcgggggttccactcgcagtcattcctgagtcaggagtggggagtctccctgaagcagcatgcacttctaattaaaataaccaagataggtatatactcttatatgattatgcctttgcatgtatgtcctcttggaaaataaaaacattccgccctcactttgtcctcctcaaactctctttcttagttattaaataacagtctacagaataaagtacctgaaagtgaatttttaaaggacttcaaatatggttggttggcagaatgtgagcattaccaacgcttttattttgacaatgtgattttaccgtgtagtcagagtataaataaagttaggcttcttgggagacgagatcaaaaattgtattattacaaatttgtactttcaaaagagaatgcatattgaacagaaactataagggagcatgagatttag

SEQ ID NO: 50985 - DNA, 454 bp, Homo sapiens
  misc_feature 43, 52: n = A,T,C or G
cgggccccccctcggagtacttctagaattaattaacgcgggnaagagtagnaaaacaaagtacaatcaaatgttaggtttatagtatagatgatgaaagttacagaagaaaggagaaatactcattaatttcaaatatttgatattaacttctacttaagttcctagtgatgttatgttttctcttttcatagccattcatctgagcattctggccaactcagtaactgggcttcttgttaaatactaataacctgaccctttatctccctttttccgaatgacaacctgtgagaatagacttttcattctactcatttgtaacagaaccatcttaacaatgacttcagcagatccaaaagttaaatcttttaagtgaaatgtatttgcaaaagatatatggtaactgaaatatgtagccactcataataattcagtattttattaaataata

SEQ ID NO: 50986 - DNA, 576 bp, Homo sapiens
  misc_feature 559: n = A,T,C or G
gccccccctcggggtacttctagaattaattaacgcgggggttggggttgttatttagaataattaatgcagtgaacttacagaactctaatatgaaaagtcaaggacagtgagacagagaggaggactgtttggagtaattccaggaaaacttcgagaacaaatgctaatctgttttgcttggtgcatccaacaattacgaaagaatcagacatgatacatacaaactgatgtattagcagttagttagtattttggttagtgatgtttctgaattcactgtaaggctttgctacaccctgtggagaataaggtgagatgaagacaccaaagcagggtgtatccaggaggaattgagacactatgtggctctgcttattttcctttccttacattgtttaacctctctaatctatttactgcaggatttgttattattaatatttgcactttctttttaaataattgtgttgtattttcctggagtcttttcttgcctactagggggcctgtaagcctacaggcacctggaaaggggacattttaccaaggacacagngaatatttggtcttact

SEQ ID NO: 50987 - DNA, 413 bp, Homo sapiens
  misc_feature 75, 76: n = A,T,C or G
gccccccctcggaagtcttctagaattaattaacgcgggccctatctgaaaaagttttaaaattagaatatttannctttgtactctcatgaaaaagatttaaattaggaaaaaaaaatacttgttccaaaaaattaaaaaaatcatttgatgtgaaaaattctaacataaatcctaaaggttgtcaaagaaaatagtgtaaataccactacacataaaccaaaagagaaaattctgcatttaaaaaccctataaatattaaagtcaaatgacaaataaaaaaagattatatgaatgcttccacatagtgaagtttaattacagaccagttagtggaatttagtatgtaaatgagcactgaaaatgaaataagaggaagatcagcacccatggaaaaatgagcaaagaacata

SEQ ID NO: 50988 - DNA, 385 bp, Homo sapiens
  misc_feature 28: n = A,T,C or G
cgggctcccccctcggaagtcttctagnattaattaacgcggggaggatcaggatctgctggggcatctttgccacctcatgagaactgtgtgacccagaagggagcccacccaggaggacgccagcctgagaaatggaagagaacccttcctgatgatgtcattttgcaccaagatccagctgtgcctgtagtcaaatactgccgggacattaagtttctggagtgaagatattcatgttttcactcatttaagtttgagtgggtattctgtcctttgtgatcaagagtgctgcctgatagaggttgcagtgagccgagatcgtgccactgcactccactccagcctggcgacagagagagtctctgtctaaaaaaaaaaaaaa

SEQ ID NO: 50989 - DNA, 508 bp, Homo sapiens
cgggccccccctcggaagtcttctagaattaattaacgcgggcattgtggtatggatcatgcagtggcacatacctcagaggctacctagtctacagattaaaatgtcaaacttgagttcaaccccaaagaatacatatatatctactgcctgcgcccggggaaaaatacttgagtccttttaaatgacaaaagtaatagaaaagcatctttaaaaaataattccagtccaggtgcagtggctcacacctgtaatcccagcactttgggaggccgaggtgggcagaccgcctgaggtcaggagttccagaccagtctgaccaacatggtgaaactcagtctctactaaaaacaaaaaataaaccgggcgtggtggtgtgaccctgtaatcccagctacttgggcagctgaggcaggataatcgcttgaacccaggaggcagaggttgcagtgagtcaagatcgtaccactgcactccagtctgggccacaggagagagactccgtctc

SEQ ID NO: 50990 - DNA, 588 bp, Homo sapiens
  misc_feature 549: n = A,T,C or G
cgggccccccctcggaagtcttctagaattaattaacgcgggcagactgtaaagatctctgtcttatttcgtactggcactgtaatcacagttgctgagtttattcatgaaggtgaaagtgtccctttggcgaatagaaacaaacttgggaaaagcacttctcacttcctcctgtatgtgtctttactccagaccctggcctgtgttttgctcctcctggaggccattaagtaggagtcttattctaaggattggaatcttctggagattctgtgggagacagaggacggagggtggtgtgtgttccttacttactgtcaaaattgagaaatttccctcttggccgggcatggtggctcacgcctgtaatcccagcacattgggaggtggaggtgggtaggtcacttgagctcaggagttcgagaccagcatgggcaacatctcgaaaacccatctctacaaaaaatttaaaaattagctgggcatcgtggcatgtgcctatagtctcagctacttgggaggctgaggtgagaggattacttgagcctnggaggcagaggctgcagtgagccgtgatcgcaccactgc

SEQ ID NO: 50991 - DNA, 491 bp, Homo sapiens
ccgggccccccctcgaaatacttctagaattaattaacttgggaggctgaggtgagagtattgcttgaacccaggagttcttggttacagtgagatatgatcatgccactgcattccaacctggacaacaaaacaagaccctgtctgtaaaaaaaaaatacaataaaaaataaataaaaaagctgtttgtatcaaagactgtatttcagcagttgttaaagtttaaacaagatgtcttgtctctcttttcattttgtgatagtgtctgttggggacgaatagctttgttaaggacacagaagaaatatcagccataatttgggaaacctaggcctagagtctatgtgggcctctgcaagaaaatactgtggctggccagccagcactttgggaggccgaggcgggcggatcacgaggtcaggagatcgagaccattctggctaacatggtgaaaccccgtctctactaaaaaataccaaaaaaaaaaaaaa

SEQ ID NO: 50992 - DNA, 610 bp, Homo sapiens
  misc_feature 17, 28: n = A,T,C or G
cgggcccccccctcggnagtcttctagnattaattaacgcggggtatttagctttttgcttgatctgttctttaaaattaacttcagtgaggcccagtgtcctggtagcagagtgattcaaagaaagaaagattactattaaattaagtcttgcttttttgaaaaatgagaaattctgaattgaagtcagcaatttcaaaatatacttaaggcaattatgagggaaggttatattggcttgaaaagatacttcaaaatgtaaatgtcagttctaatattgccttagctaaatattagatatccttgatggctttcttattgcaataattatcttcccactaacccaaatgcaagaatgaagattataatgggatatttcaatagatccagaggaggttaaatttggataggccaaatgcaaaactgacaccattacagtccaataggactgaatgtattaactgttaagtgtacttggagtgagtctgactagctcatgttgaaccaaaaggtttatgcagtaaaaatggcattgtggcacatcagaaggcacagttgtagattaaataacactcatcagccatttagaaatggcaagtgttgaggagag

SEQ ID NO: 50993 - DNA, 458 bp, Homo sapiens
ccgggccccccctcggaagtacttctagaattaattaacggctggggtgggcagattgcttgaggccaggagttcaagaccagcctggccaagatggtgaaaacctgcctctactaaaaatacaaaatcagcagggcgtagtggcacgtgtctgtaatcccagctacttgggaggctgaggcatgagaatcgcttgaacctgggaggcggaggttgctgtgagccgagattgcgccactgcactccagcctgggcaacagagcaagactctgtctcaaaaaagaaagaaagaaagaaagaaagtgcttattggccttttaaaaaaaatagtctcaaagctgggattgaacccaggccatctggcttccaattccatgctcttaagcgctctgtggacgtatcagatggctggacagggccaaaccggctgatctctctggggatgggaggaaggccct

SEQ ID NO: 50994 - DNA, 599 bp, Homo sapiens
gccccccctcgaaagtcttctagaattaattaatgccacctatttaaagaaacatttgtttttggatagactttcctcttattatcagacaattctggacaagtaaaaaaaattattgtcagtttgtaggcaaaataggaaatgggctttcttcattgaactagacaatcaatgggaatctacctgaatcatatttgtccaaacaaggccactgggaattggaaatgagatggaaccaatggggagacaggagctggaaaattctggattttgcagtggtcataaagcagctcctcgccgtaccaagtaggacgtctctgaatctcagcagagactcagcccctgtaggaggaggctgagaggtctccttcaaggatgacacatgcccacagggccagccagccattcggaagcctccactcttcagagacatgtgtgtctgtgcgtggcaatgtgaaacgtgactagggcttagttaactctctgaagagctggattcttgattcacgataacaatagtgacggtaaatatttgttgagtactcacgaggtgccgagcaccacacagcactttctgaagtaggtgctgatactacagt

SEQ ID NO: 50995 - DNA, 577 bp, Homo sapiens
  misc_feature 37: n = A,T,C or G
ctggggtaccggggccccccctcggggtacttctagnattaattaacgcggggactacttgttttaaattaatataaattaatctaattattaattttggatttgaatactaattaagcaaaaattaagtctacattcttaatatagacttttaaaacaacaacttctttaataattaagaataacaaaatgcaattgtgttaaaaaaatgtttttatgcataacactcatgagaccaaaactgtgaacttaacatgcaagaaaaaaattttaaattaaaaataagattaaagaatttttgtcagaaattattataaatgagaaaccagcttattattttaaacaatgctaatattataatattgtgattttgttgctatggttggtgtttacactcagatgaaatggtcttgtgaagtaatctaagaattttggaaaatgcaaagaacaggaacagaacaactcaagatttaaatacccaccaagcataggtcactgttccttacaagttaagtatcagcttaagatctgatttcattgtcaatcacataatctcttctattatattaaataacca

SEQ ID NO: 50996 - DNA, 522 bp, Homo sapiens
  misc_feature 23, 36: n = A,T,C or G
tgggtaccgggcccccccctcgngggtacttctagnattaattaacgcggggctgggattacaggagtgagccactgcacctggctactttttgtatttttagtagacatggtgagccactgcacctggcccccatttccttctaatctgtatcttttgcattatttccctgccaaaatttcttgagtaaagcccatttccctagcgcagcatctgaggtgggcagtgcacacagcacagcagcctagggtactctgccctggagtcagacttcctgggtcccagtcccagctgcatggactcctgactgcaagtttgcagaaatgagttcactcctcctggcctccgttttctcatgtgtaagatggaagcaaaaatagcacctgatggccaggcacggtggctcccgcctgtaatcccagcactatgggaggccgaggcgggtggatcgcttgagctcaggagtttgagaccagcctaggcaacatagggagaccctgcctctaccaaaaaaaaaaaaaa

SEQ ID NO: 50997 - DNA, 486 bp, Homo sapiens
  misc_feature 77: n = A,T,C or G
cgggccccccctcggagtacttctagaattaattaacgcgggggggtgggggttggaatattctaaatagcagattnagcaataaacaaccatgtggttgagagctgctaagcgcacaaaaaaatccatctgcatctggtccattgaaagcatagctatttatggagctcatcagtccctcccccaacaaagaaaactcatttcatcagacaaaaaatgagaaatagatgcttactgaagattacagaggggagctggaggtaatgggatttatcaagcaaagcctcacattaaatcagcatcatatgtttcttaatttctgtcctcagctactacccaggttgcttcattcttgtagctggcctctaaactcccaggttccttttgaaaactcccccagtattttatctaggcctttatttgtatctcttttgtatgcagaaacattaaactgcatctgagctacacaactggtgcattctcatt

SEQ ID NO: 50998 - DNA, 596 bp, Homo sapiens
cgggccccccccgtcggggtacttctagaattaattaacgcggggtttttactttcaaaactcgtttgagaaaacaccactgttatagagagctatcgatcacatatttgggtctacaaaaattgagtaaacattattttctattggataatgtaaatattcaaaacattctatgtattttgctaaattatttaaaaaaatgaaattcttgcctttcttcccagtatgtattgtacaccaaatttaattagtaatgcaaaatgtctataactggaaataaactaagggaaaatactgaaaaataagtaagtaaatgctaaatcaagatgcactctaagctgcaaataaactttggtaatagtaatcaaccattattaactccaggatttctaattcagtgggtttccattcattttaaatttattccagctatctcaagactctgaaatgtatagaaagagtagagatttcaaataagcaactacgatattttatcattctatcacaaatgcttggcataacctaccacttaggtaaatatcaaaaagtaaccttatggactttcatttaacccatggttaaagatacctcataag

SEQ ID NO: 50999 - DNA, 593 bp, Homo sapiens
cgggcccccccctcggaatacttctagaattaattaacgcgggattctgtaaatactctctgtagttaaatcttatctctattcttttatattttactccctttcttttgtccttaatcaagcatatgaaggatttgtaattcttattggatatgtcaaaaaaaaaaacctgttgacttatttatcatttgtagtttttctcaattgtacatacagattataattgtgttccgttcacagagttattattgtgaggattaagtcagttaattttcatgacatgcttagatttactcaaatttcaaaagaaatatattaaatgttcttattcaaattatattttcttcaagttgccagtgtgatatgtagttcttactttttatattgagctgctgtaatgtgtcttgcaaagctctatgactgcaaatctgcgtcacaaaatgtgacttttatcagtacatgtcggcctattttatattctgtttagtgctttcaaccccgaagtccaccttctaacattaatattgatatccatcctctctctcctccaacctctctctctcttgcatttacttttagattttcattacttt

SEQ ID NO: 51000 - DNA, 560 bp, Homo sapiens
  misc_feature 505, 517, 518: n = A,T,C or G
cgggccccccctcggaagtcttctagaattaattaatatatttagaaatcctgcacttagtaatgaaggtctagtcagatggccaacacaaaaaaatatgtggaaataagaaataaaataaatatgaactataccaacttgaacctatcgtgagtaaacttaagtaactcattttccctcttacactgaaaatagaatggcatgacagcaagtagcaagaaaaaagtgatatatgaaggctaaaagtgatatacaaaggatacgtctaatgagtttttcagatcaaaacatcaaatgtaaaattttaggaaattttttttctactaaataacatcttttagtgctgtttaacagttattctatatagctattggttatcagcattattttaacagaagtatttcacatatttcaccatttttttctccctctctcttttcttttattttgctatggtttcacgggcttgtgaaagaactttctggcctttcaaattcaatctctntctctgtcattnntctcagctagtgaaagtaaatgctttttttatttaaaaaaat

SEQ ID NO: 51001 - DNA, 607 bp, Homo sapiens
  misc_feature 513, 515, 525: n = A,T,C or G
ccgggccccccctcggggtacttctagaattaattaacgcgggtacgtaacaggaaaagaatattctttttaattctaaacttttttttaataattctaaacttttctttctgaaagctacttaaactcttaaaataagaccctaatttgaattaaaaagaaaaaaaagtaaaagtacaagaagactcaatcagaaactaaattgttgtcttttatttcctagcttttttatctgctccgcatccctgttcctgattactgattttccctgcagttatttggatccaattacctccaccagttagttgattttcctctattttaatccaaagggccattattgaccaagggcagggctggacctcaggaatgggaggcacaatggttaaagctaggccttgatcacaactagaaaaatgactcagaatgcacgtccttttccaagtgggttggtgaccgcttctttgtctacaaaggtcggcatattcactgcattctttttccttttctctntntttttctttntctaggcaactgtggcagggggaaatggtatttcttccaaagagtataaagcagaatacttggggaaaggaccagaagcaga

SEQ ID NO: 51002 - DNA, 427 bp, Homo sapiens
gggccccccctcgagagtcttctagaattaattaacgcggggttatatgataattacctttgctaatcatagaacaatgcatacatatatgaaaatatactgtgatagcctgatatttacatctatcactagtcaattaaagttaaaacacaaatactcacaatgaaaagcttaacacaggctggatgcagaggctcacagcctgtaatcccagcacttggcgctatgagaggcggacgcaggtgatctcctgattcaagaccagcccgaccaatatgacgaatctccatctctactattaattcaagactagctgggcatactggcatgtgcctgtactcccagctactctggaggctaagacagatgcattgctagaacctgggaagcagaagcctcagtagagctgagttcatgccattgcact

SEQ ID NO: 51003 - DNA, 546 bp, Homo sapiens
  misc_feature 459: n = A,T,C or G
cgggccccccctcggaagtcttctagaattaattaacgcgggtggtgtttttaatggctataaaattcgtaagtttatgaatagagttcattcagttatctaatctctctcctccttctataccctgatatgccttgattctccattatcctcatgtaagttggagattaatgtgtttccttatttatggagaataatggttattgctatggcttcttgataatatttccttaacctattagcaatctaacatcatcaggtgggatggttttctctatggtttttggtttttgaattttcacaataaatctctatttcctttgtaattgaaaaaaaaaactgtagagttatttccattttagggaaaaaaatctcttccttcctcctggctaaatgagaaaccaggttcttgccttctcaaattgtattatgagagggtaatcaatgacctgtttgctntattacttattttcaaaggcatctcggcttgcagctttaaataataaatagtctagtcctaactctgaagaaaatcagtatcttcat

SEQ ID NO: 51004 - DNA, 469 bp, Homo sapiens
gggtccccccctcggagtacttctagaattaattaacgcgggaggaagagaagactgctaatagcgaatgcattcaactctctggaggagttttgctataaacaggatcaaaaattttaggcagtagccagtgaaggaagtaagactttagtgtttttaagatgggagaagagcttttttgtacaaaaagaacaacatgagaggtaataaatatactagttatatattcaagctctgaagtcactctcctaaagtttaaatgctggctccactactcactagtagtgtagcaagtcacctaaaatctcttagccccagttaattctgcaaaacaggatctttacctatattatttcctaacattagctaccacacaggattaatgagtaaatgagacaacgctcataagtacttggtacattgcctggcactgtagccaatagtaatgacagcagtggtagtgttacat

SEQ ID NO: 51005 - DNA, 577 bp, Homo sapiens
gggccccccctcggaagtcttctagaattaattaacgcgggccagacagacatttctctttcaacatttcatgtttactgtagggctaaatttttgaaaatacgttcatcctcttaaaagctggttttgctatagggtcaaaagagtttcattgtaatctcataaaatgtgaagatcctacatcatatcaagttccaaattctttgaaagctactggcaaaatggcaaaccaaatggacttaacatacatacctgctgtctctgactaaaggccaggattctcccatccatgggcaaggtcctatcttctcttggtgcagccaataaggctttggtctttccaagagttcattttaggtcaggcaaacaggatttggtcaaagatcaattcttcagtcaatttcatcctaaaagatgtgcctcgtacaggagcttatattgtatatctgtccatctatcttaagggacaagtgtggcaccctatcttctggtattttagaaagaaatatttccctttctctcccagtttccttgccagcccataaaataagaactttcaccttcttggaagtgctgg

SEQ ID NO: 51006 - DNA, 544 bp, Homo sapiens
  misc_feature 26, 43, 50: n = A,T,C or G
gggccccccctcggaagtcttctagnaattaattaacgcgggnaatacangaaaagaaataaaaggcataaagactggaaagggaaaagtaaaagtttttccttttcacaggtgacctgatcgtttaattatcaaaacttaatattgataataaaactactagaatatgtgagattagcaatgtcagaggatatgtcaatacatataatccattgtatttctaggtagcaacattgaacaattggaaaatgaaattaaagaaacagcttcttttataattatgtcaaaaagaaacatacttaggaacaaatttgacatcagtattgcaaaaacttctcaacgaacatttaaaaatgttctgcttatgtaaattgcactgcttaggttaactgaaagccttaaaaagtatccaaaaaagacattatgtgcttggcatgtactttcaaaatctattgaataaattctaatgaatacctaatacattccatgcactggagatacaacagttaaaagtcctgacctcatgaagttttaggtcctactt

SEQ ID NO: 51007 - DNA, 585 bp, Homo sapiens
  misc_feature 505: n = A,T,C or G
cgggccccccctcgagagtcttctagaattaattaacgcgggaagtttctaactttcaattattctttgaagccaattatctttcaaaagagagaataatgttgaatcctttcataacgtgagggcagtgtttttctgtgtggagttcccttgcgccagatccaccaggatggtgtattaaaagtacagattcctatgctctgcctcagaccaaaaaaaaatactatttctggtggtccagttcagggtctgctcttttaacaagccacctcaggtgattttccatacacactcaagttaagaactaaattagtgggagaaatcatacttgctgctttccctgaagcaggtgggttttttcatcaatatagatacaatctaagcagtaactacagagtttggagaccttcaaaaagaaaagattctaaggctctccaaaagcaaatacacatctgcatctatagcctacaaattggaaattagcaagtttttatttattcaacanaaagttttgacagtcaaattagtgacccctaagattgtgtgaaatactgtattaaaatagtctccaaagttatgggaagt

SEQ ID NO: 51008 - DNA, 522 bp, Homo sapiens
  misc_feature 37, 468: n = A,T,C or G
ctggggtaccggggccccccctcggggtacttctagnattaattaacgcgggcctaggggaggagtgactaatccgggatcacagctggtacagggcaagcccaggagagaggacggaggccttcgtggggccctgctgactcacatttagcggtcaccctgcagtctgttgccagaatgccaacttgctcacttccagcgagcaccaggactgccaaggctgcagagggctccgagtgggcacgtcctctccccgagagcatctacacaggaagccaggtcataccgagatgggctggaggggtccagcccggacataaggccattgatgaggttggggccagagggagttgggcgctgcccatttccaccctcagtgccaacctgccccaggaaacagttggtccccaagggtttggggggacactgccaacctggcctctgagtcagatctgctggctgacctgnggactgccactcttcctgtgtgtgaagacttgggcttcaggcagggcttgctgg

SEQ ID NO: 51009 - DNA, 433 bp, Homo sapiens
  misc_feature 43: n = A,T,C or G
cccccctcgagaagtcttctagaattaattaacgcgggggggngaggaaaaaaaaggggaaaaaatactcaatagccttaagctctggtacaaagttcttctatctgcatgaattcaatttctcactcattcattcaccaaacactcactgagccatatacatgccttctctatagggatgtacagaggggatacagagatgacatacttccagctctcaaaaaagggaaactggaggatgagttctgggtgctatgaatgatctcttttaataaagagcttctcaataagaaatagaccaggcgcagtggctcatgcctgtaatcccagcactttgggaggccggggcgggccgatcagctgaggtcaggagtttgagacctgcctggccaacatatggtgaaaccctgtctctactaaaaaaaaaaaaaaa

SEQ ID NO: 51010 - DNA, 588 bp, Homo sapiens
  misc_feature 582: n = A,T,C or G
cggggccccccctcggaagtcttctagaattaattaatttctgattggtaaatgaccaaattcatctattaaaaaagtagcctgactttgttgtagtcattaaaattttaggcaataaaataattttaaaaaaaacaagtagaaaggaaaacacaaagttattgccttacaatgttagattgtttacttagaaaagctaagagaatcaactgaaaacaatcataggcataataagaaagttagtaaaattagcacataaaggaaaaagaggccccaaataagtatgttaatggagagcttccaatatatgaacacataaaaatgtcagatagtgataaagctatgtggagacttaaaataggattatgtgataaggagtcactgagagatgatttaagacaaattggccagggagggcctttattagggggtgatgtttaaattgaagtctaaatgcaaaaaaggagccagtcattaacaaaaggacttctcacctacataacactgaattaatcaatcaatctatgttgatttaagttgctaacgtagaaatagagaagtaatatattgggtgtgtcaatnttttga

SEQ ID NO: 51011 - DNA, 607 bp, Homo sapiens
  misc_feature 39, 535: n = A,T,C or G
gactggggtaccgggcccccccctcggggatcttctagnattaattaacgcgggatccctccactcttgtcagtagtaagaacatattaacaagtgtagttcaagggcatatgatcatccacatatagcagagcttaactgaaaaaatattgaatgtagaaaatgaggaaaaaaatcagatatcaccttcattaaaacagacatgctttttaattatgttagacataatagtttggtgatttaggaaacagaacagaaatgcatgaccctttaggccctagacctgctactagctcataagacttggtcaactgtaatagtcattcatccctgaatgatttcttggtctttcttctttacctactgtaatctttcttcctactagatctgcatgttcacagtatcacttttatcatttcactgataaaactttcggaatactatttaaactcctttgctggaggttggtcatttatatcttactcaagctactttcaagtgtctactcaaccttcattatgtgttcaaaactatntattaggtccctaggtactatatgctagacactatgctagctgatgagcatacagtgcaaaaaaaaaaaaac

SEQ ID NO: 51012 - DNA, 600 bp, Homo sapiens
  misc_feature 575: n = A,T,C or G
cccccctcgagagtcttctagaattaattaacgcggggtggatcatctgaggtcaggagtttcagaccagcctagccaacatagtgaaacctcgtctctaataaaaattagccgcgcatggtggtgcatacctgtgattccagctacttggcaggctgagacatgagaattgcttgaacccgggaggcagaggttgcagtgagcggagatcccgctactgcactactccagcctgggtgacagagtgagactctgtctcaaaaaacaaacaaacaaaaaacaactaagtaagtaatttctattacaatttaaaagtacagttgagaaataatttaattttttagagtaaatattctagatattttttctttcttctgtaagatatttacctttatccttttacagccctattgtcctttttagttaatgtcctttggctgtaaataaaataatttaaactagcttaagtaaaaaggaattggggccaggcatggtggctcatgcctgtgatcccaacactttggaaggctgaggcgggtggatcgcctgaggtcaggagttcgagatcagcctgngaaacatgctgaaaccctgtctcta

SEQ ID NO: 51013 - DNA, 553 bp, Homo sapiens
ccgggccccccctcggaatacttctagaattaattaacgcgggggtgagaaggcactggcacatccctcccacctgggggtggggcttactgtaggagaggcatggtctccagaggacccctcccttcaccactgtgcaggatgctcagtcagtcctgaatattacagccaaaccctagccagggcccctgccacctgaggtagtggctgagtgtgtggggatggagttcccatagcctgccggcaaactcttcgggatcacacacatcctaagagcaaaggaaaagaatccatgctagcctatgtccctctcttctcaaaactgcttcgggagctttagttcttggagaaaccacacttttcggatccaatttcaagactttccacatgtcccttgtaaatgaggatgtgcacttctcgagcctgaagagtttgtaaaaaggccacaattggtcattccagggacagtgtcagaaaagcgggtggtcttcctgggaagcaaggggtgacacactcctgcagggggtcattctatgcatgacacatttaagtc

SEQ ID NO: 51014 - DNA, 444 bp, Homo sapiens
cccccctcggaagtcttctagaattaattaacgcggggggtggttgggaaatgcggtctagctataggtccagccttctctgccacaatgacatttaagacataaataaataaaagccagctggaataagtgaaaaaagaaattgccgacgcctatggtgtcccctctgtgccaggctttgtccttaatctgtagataccaatcctcactatagccctgtttagacaccagtatcagcactactttcagaagcaggaaatttaaaccaggagaggttcattaagttgctgaagaaaggagtttaccggccaggccctgtggctcacgcctgtaattgtatcattttgggaggctgaggcaagaggattgctggaaggccaggagttcaaaaccagcctgggcaacacagcaagacctcatatcaattcttaaaaaaaaaaaaaa

SEQ ID NO: 51015 - DNA, 421 bp, Homo sapiens
cgggccccccctcggaagtcttctagaattaattaacgcggggaacatagttttgccaagtctgaatactttggttaagagatctgtttcattttgaccatgcatttttaaatattcctatgggttttctccccagtaaaagtattttctcttctggttgaacccagatttttctgtcatcttaaaaataccattgcctaagaattcacatttcctatcatgtattgctatgtgacatgggagaaaacttcatttttaacatagataagaaaaaacctaggaaaggagatgcaaagattcagaaaccttattttcacattattcttagtgttttaaaattaaaaaaacattaagaccagttcttaaatatgtgccttatgatctaataaggaaaatatcacgctgaaagtgtgtagaactt

SEQ ID NO: 51016 - DNA, 526 bp, Homo sapiens
  misc_feature 13, 26: n = A,T,C or G
ggccccccctcgngggtacttctagnattaattaacgcgggcctgggtagcaaacctgaacatttcttttcttaagacagtcagtttttgagtgttaggaaattacataattatttggtgaagctgttcacaaagctgtggtaatttttttcttagccaaaattatttgtttttgttttattcgaaaatcccttttatcatattcattaactattgatgaatcaatagaatctattaaaaatagcaaaaatggcctggcacagtggcttatgccgataaatccagcagtctgggaggccaaggcaggaggattgcttgaccccaggagtttgagaccagtctgggtaacatagtgagactttgtttctacaaaaaaataaaaaactagctgagcatgtcccagccactcaggaggctgaggtgggaggaccgcttgaacctaggaggtcaaggctgcagtgagctgtgatcacgctactgcactctagcctgggtggtagatgaagaccctgtctcaaaaaaaaaa

SEQ ID NO: 51017 - DNA, 422 bp, Homo sapiens
acttctagaattaattaacgcgggcagtcttgttcaccactataattccagcattacatagcacctagcatataggctttgcttaatacatttctgttgaatgcataatgattgaaatgccttgaggctgggtgtggtggctcacgcctgtaatcccagcacttagggaggccaaggcaggcagatcacttggggtcaggagttcgagaccagcctgggcaacatggagaaactccatcactacaaaaaaatagaaaaatgagccaggtgtggtggctcatgcctgtggtcccagctacttggggggctgagactaaaggaccatttgagccaggaagtggaggctgtggtgaaccaagattgcgccactgcactctagcctgggaaatagagtgagactctgtctccaaaaaaaaaaaaaa

SEQ ID NO: 51018 - DNA, 602 bp, Homo sapiens
ccccccctcggggtacttctagaattaattaacgcgggcaggtgcctgtaatcccagctactcgggaggctgaggcaggagaatcacttgaacccaggtagcagacgttgcagtgagtcgagattgtgccactgcactccagcctgggcgacagagtgagactccgtctaaaaaaaaacagaaacaatatgaaaaaatcaagtcataacaaaagttacaatgaataaatcataccaatcatccaagatttttgtattcagaattaccactgttaataatccatgaacagccaggtatggttgtgtgcctctgtagtcccggctgcttgggaggctgaggtgggagaatctcttgagtccagtagttcttgactgtagtgtgctatggtcacgctactggaccatggcatactacactccagcctgagcaacatatcaagaccccatctctaaaaaataaaaataaaaaataaaagtgaatactacatgaacttgatcccggatacagtgtctctctatgtgtatctatggatagaaaggtagatggatggttggatggctaaaaagaaatggcagcatgcaatacttgaagccagattgatt

SEQ ID NO: 51019 - DNA, 597 bp, Homo sapiens
  misc_feature 31: n = A,T,C or G
taccggggccccccctcggaagtcttctagnattaattaacgcgggggatggatcacttgaggtcaggcattcaagaccagcctggccaacatggtgaaaccccatctctatactaaaatcacaaaaaattagccgggcatggtggcgcgtgcctataatcccagttacttgggaggctgagataggagaatcacttgaacccagcaggcagagactgcagtaagctgagatcatgccactgcattccagcctgcgcaacacaggaagactccatcttaaaacaaacaaacaaaaacaaaaaacaacaacttgctatacaagaccgatgaggaacaaataagatgactcatgtaaggtattcagaactatcaggcacttaaaagcacagtaaatacatgctactttgttttgaaatgttttcatttatttgaaaaacagcaaatatatggtgaatgatatggtatgaatccttggggccacatagtattcatctctaaatttaatcaatactatcaatgaaggaccaaataacatttcattttctctagagtcttagtatctccaaatggcccaattatgttacaacagtaaaacac

SEQ ID NO: 51020 - DNA, 597 bp, Homo sapiens
cccccctcggaagtcttctagaattaattaaccactatttaaggctgagttaggtggtttctgccgagataatcaacacaatggccttatataaaaaagacaaaacaggcgccacatttaaaggggccctggcaggcaggagcacatccaggggagagcacattgatcatggaggccacctgaggaaccgtcgaggaagctgggcatgttctgcttggtaacaaggagactcaggtgggccatggccccatccaccctccctgttgacagcaactcagagactggtgaaattctgtagggcagactaggattcatgagagggaggaagcagacagctggttttgaccttcctgatagttggagctgttttaactttggaatgggcctattatagcagtagtcagtgctagctaacattttgtatgagcacttactacatgctaagtccttactgtaccactttagtagtctatgcaagcatcacactagccctatgaggttggtactgttatcaccccctaatacaactgaggaaagtgaggttaaggtacttagtctagatgactactagtaaggggtagagccgaaaaaaaaaaa

SEQ ID NO: 51021 - DNA, 603 bp, Homo sapiens
  misc_feature 23: n = A,T,C or G
ccccccctcggaagtcttctagnattaattaacgcgggtcccaactttatagatccaataaaatctcaatcaaaatcttagtaagttactttgtgaatactgacaggctgattgtaaagtttatatagagacaccaaagactcagaatagccaacacaatattgaatcagaataacaaagttggagaactgaaactacctgactttaacacttactgcaaagctacaataattaagacagggtgttattggaaacaaacaaacaacaagtacaaatagatcaatggaacagaatggagagcccagaaattgacccacagaaatataatcaactcagctttgacaaaggaacaaagacaattcaacagagaaaggaaagtctttttaaccaatggtgccagaacaactcaacatccacatattaaaaaagaaaaaaattgaatctagacacagagcttacacactccacaaaatttaactcaatataggttatataacaaaacataaaacacaaaactatctgtatacgccatgccacgtatacagcacatgacatttatagaaatggtattattaatcgttatgtagaaatagtttatagact

SEQ ID NO: 51022 - DNA, 417 bp, Homo sapiens
gggccccccctcgaaagtcttctagaattaattaacgcggggatggtcaatattgggagccttgaaatataagattttataaggtaggaatcacattttccacatgttctgttaagtgtttcctgacaacactggaagcagcatttaggatactggcaaggagggcaggttctgcaataggatggcttggctataaatcccaattattaattatgagaaatattgggcaagttgcctaaatattgtaataatttcctcatctctataatatgtatgataacggaaactcttatgctacagttattaaaaattaaataagaagatgcataaaagttccccacacagtgattgacacactacatgtttgttacatgtagtttatacatggtgatcacagttataaaagtagaagctaca

SEQ ID NO: 51023 - DNA, 526 bp, Homo sapiens
  misc_feature 24: n = A,T,C or G
ctggggtaccgggcccccccctcnaaatacttctagaattaattaacgcgggcagagaggaagaaaagtacggggagggcttaaactgttttggctgtctcatttcttaaactgggtgataagtacatgaatatacatatttcatataaaatcacttttttcaaaacaaaaaggacgcaattaccttgctgaaggtgacattgtatcctcttgcaagaaatggcagaaataacactttagtataatattattttagaagttgcctcacttaaggcaatcatgtaaaaataattatgtgaaagaaatgtttcagctgtaatatttttaaacgtctgaatattttatctaattgcttcttttgaactggtaattaattctaagtaacaatttgggagacataataatctcattgcaagattttctccgtacattacagacacttacttaaaaataaacaaatagttctaacttaagtggattcacggcttctgagataccaatgacatcaaggaggaaatgaaattat

SEQ ID NO: 51024 - DNA, 531 bp, Homo sapiens
  misc_feature 73: n = A,T,C or G
gggccccccctcggaagtcttctagtaattaattaacgcggggaacatatgcactatactatgcttatgttgngaaaacaatactgtaaagatgtaaattgttctcaaactaatcttaagattcaatgcattcccaatacaaacttcagaagatgtttttttgttgggggtgagatgacagttgaccggttaacagtaaattcacatgaaaatgcaaagggttaaaaatagctatgacaatcttgaagaaaaagaagtttggaggactaatgctcttaaacaatgagacatattataaagctatagttactaagacagtgtggtattgtcaaaaggatagaaaacagccagtgcaacaggagagagattccagaaacagctttctatgcaggtcacttaacctgtgatgaaggagacactgctgcctgttgggttacatgctgttcatggtcttttcataagtggcacaagatcaattaaatattccatataccaaaattaactccaggaggtctctagatcttaacatta

SEQ ID NO: 51025 - DNA, 601 bp, Homo sapiens
ccgggccccccctcgaaagtcttctagaattaattaacgcggggccctgctgagatcatattgctacataataaattaacatttacttagtctctactatattcagaattgggtgcagatattggggcattttaggtgatatgaggcgttgggttggtcctcctgtatcttcctcttgtaggctatccttatgtcaacactccacactttagctcatgcttttatacaattaataaatgacatttagtttattttaaggaaaggttacttaatgaatatacataagtactttcggatcttagtatgataggtgttaattatcttattttatttttaaatagctgtttccttttttggtcacacacaaaaaaatgtgttctttggaaaatacagaaaatatcaaagacaaggtatagtggctcacacctgtaatctcagtactttggaaggacgatgtaggaggatcgcttgaggcaggaatttgaaaccagcctaggcaacatagtgagaccccatctgtaaaaaaattaaaagtgaaaaaaaaaattttcgagactctgtccccacccaaaaaaaaaaaaaaagcggccgccaccacggt

SEQ ID NO: 51026 - DNA, 593 bp, Homo sapiens
  misc_feature 28: n = A,T,C or G
cgggcccccccctcggaagtcttctagnattaattaacgcgggtctctccttaaacagttaaataatttaaaagattgtaatactccaaattaaataaatacatattttgtatacaaataatttcacttaaagagtttataaaataaagataatggcttcttccatttcaattattatcaagagttatagatggagaggaataaaaatcctcagtgaaaatgaaaatgaattcgaatgatgttaatagaatcaaatctctagtaacattaccttaagcaagattgatttaaaatgtaatataaagtcattaagaagtatattcttctatgcacattttcccagtgaggataaatattgttttaaatgagataaattgactgaatatgtattcttgctgcatcatttcaactaagcatgagatctgacattcctgtgggattctgtctttccagagttggttgtcttatgtgtctagccttacggatatttggttacaaggaatgggaaacaactcaagtcaaattaaacaaaaatagaaggcatcaaatgcaagtaagatgtacgttttatatttttctttgttggtctggta

SEQ ID NO: 51027 - DNA, 582 bp, Homo sapiens
  misc_feature 51: n = A,T,C or G
ccgggccccccctcggaagtcttctagaattaattaacgcgggctatacanccattgaaaattgaaaggttaatgccaacaaatttaactcttcttttcaagcttaaaaaacctcttataattagaaaatagattactaatttttttacatgcttccttttgttgtttggggaggatagctgggcttttttcttgtagagagagaggaattaaaggacatggtatacccaccagaatactatagtagcatatttcctttcatttcagcagaagaaaattgaagaaaataataggcttgtctgccaactgcacagtttttaaaggggggttgggtcataaaacacgcttattttatctacatgtttatagttccgatgccaaacttgaaaattatgaaaatccttaggcaaggtacttcatcaaagagcacttccttagcatccatcacaaactcggttcataagatctgagtggttaacaatagccacacaaaaaagggtataagtaagttctcaaaacacttcaaaagtcacctgtaatctcacttcctgaacacactcagcagccataaacacaataatc

SEQ ID NO: 51028 - DNA, 518 bp, Homo sapiens
cgggccccccctcggagtacttctagaattaattaacgcggggtgggctcccttccaggaccatgaaggggacctttaactgaccatagagggcaggtagctctctaagtacgttaagagctcagtgtctgactgaaagtagtgtaatagtattcatagctgtgacagggaacattttaggagtaaagaaagtcaactctttttattttatttatttatttattttttttgagatggagtctcactctgtcacccaggctggagtgcaatggcaccaatctcagctcactgcaaactcctcctcccgggttcatgccattctcctgcctcagcctcccgagtagctgggactacaggcgcccgccaccacgccgggctaattttttgtatttttagtagagacggagtttcatcgtgttagccaggatggtctcgatctcctgacctcgtgatccacccgcctcggccccccatagtgctgggattacaggcgtgagccactgcgcctggccatcaac

SEQ ID NO: 51029 - DNA, 535 bp, Homo sapiens
  misc_feature 508: n = A,T,C or G
cgggccccccctcggaagtcttctagaattaattaacgccgggatcataaggcaaaagtcacatttccctgttccagaaatttggacttagtatcattgagtgtacctcatggtatatttgagggttttacatggacagagtcactttcacaagtgacattcattgtgtaagccgtcctttcctcccatcactccactttcgaggtatgtgagtgctcagtgacaaagacaaagcagattacctaagacaaaaatgaaaggaaaatcagaagcttcatgtaagttttacaaatattttacaaaatatttggcctttcaaatatatgaatagaaatttcatagaaagcctgaaaaacaattattgtttgtataaaaatttctttctagagatgatagattcattcaattttctgaaactatcttctgaggaataattctgtcattctcctctgatttttctctcacatctccttatcttcctttaagaagctaatttccttgaagtctntgatattttgtttatttttttttaatg

SEQ ID NO: 51030 - DNA, 581 bp, Homo sapiens
  misc_feature 549: n = A,T,C or G
acttctagaattaattaacgcggggagccaccacacctggcctagaatttgttacttttatgacacttccatgaacatctttttaaaaataaatcttgctctacttttttgatagttttcttcatgtaaattatcggatgtggaaattatggtataaagaggagttttttttctttcttaaacaccttatttatttacttagtttgtgtgtgtgagagagagagagacaggatcttgctgtgtcacccaagctgcagtgaggtagcatgatcatagctcactgcaacctggaactcccaggagttcaggcaatcctcccacctcagcctcctgagtagctaggaccgcagatgtgggccaccacgcctggctaattaaaaaaattaattagacagggtctcgctctgtcacccaggctggagtacagtggcacaatcttggctcactatatcctctgcaacctccacctcctgggttcaagcaactttcgtgcctcagcctcctgagtagctgtgactacagctgtgtaccaccccgtctagccaattnttcttggtgtttttaatagaaacttttttttg

SEQ ID NO: 51031 - DNA, 606 bp, Homo sapiens
cgggcccccccctcgaggtacttctagaattaattaacgcgggtaatgttgaagtttaagatcaatttaacatcatgtttaataatagtggtgtttaaattacatgccagtagaatattctttgcatgaaggatactattctttttaaactctgtcaaaatagaatttggggaggggagtcttgctatttattcattcaatcttttgttgaggggtgggcacaacaggcttcctggagtagataatgtttgaattgaactttatggcctcagttgggattcaccacaggaaaaagagatgaagatagaagagcattagcaaaatcatggaaggaagaaacagtatagcaggtagaaaactatgagcagtgtgatgaggaagaattctgcttgtttgtttttgcttgttttcattttaaataatatactgctaggattcgacagcaataaaacctctactgcttctgctgagcagacggagcacaaagctctgcaactctaaaagtgacatatgcctgtataaactttccataggctacagtgaaagtgtgatttcaaaaaattccacaggttactttgagggctccaaaatcaaggtaaatagaat

SEQ ID NO: 51032 - DNA, 588 bp, Homo sapiens
  misc_feature 19, 32: n = A,T,C or G
taccgggcccccccctcgngggtacttctagnattaattaacgcggggaaaaaggtagatgacacactgctgcatctttgtcattaaaaacgaaaaatgtctccggatttggaacttttcacaaaagaaaatctgtaccttctccttaaattctctgactctttgaaatactaagccatgaaatgaccagtaaacctccaagtcacacaaaagatactcatggtcattttccacatcactgcgaagcattgtaaagctttcgctatttaagggtcttgagtttttgtggtttgtttgtttgttttaattgaccacaactggaaagctctgaaacttgtaaactccaacacgcctaggatgcttaaagtagacttgtggtgagggcccaccatcactccccacatcacagggtgcctcctcctcagtcaggatgccacggctgctgacatacaagccagcgtgaacaccagggtctgtccaagtattaaatgtcagtaaagctggcagggtgtggtatcgcatgccagtggtcccagcactttgggaggctgaggcaagaggatcatttgagcccaggagtttgagacc

SEQ ID NO: 51033 - DNA, 574 bp, Homo sapiens
  misc_feature 476, 535: n = A,T,C or G
acttctagaattaattaacgcgggggggaacgcactgagggacttagagggatttgtgcttggctggctgagttaggaaattcagggcagcggaggtgggtgtgaagcagggatttcaaggcagagaattatacaccaggaagaagagaagcaagaggagctggtcctggcaggtttacttggcggaattgcagcgcccgtatctgaataatgaagttggtgaaaccgagagggctgcaacccagagatgaaggcgcggagccaggacgtggctcacgctgagcttccagctccaaactctcagcacagggctgagcacaaaatagaagagtgatgaatgaataatacctaataatatcccaaccaaccggccaactgcaggacaagccagttttacaggacttgccggccagtcctttatttttaaacttctttgcccgctcttggagcttgagtttgatatttacacccacccnccacccccaaaatgggcacagcagaagatggacgcgctgctcagatctaagcatttggnatacctgtaatagctctggtttagcttggaggagactga

SEQ ID NO: 51034 - DNA, 466 bp, Homo sapiens
gggccccccctcggaagtcttctagaattaattaacgcgggggagggtgaaggggcagttctaagaagcctcgctaaggcagatctgctaagagatttcccttcaggctgggatcttagtgcaccaggcccatctgttcagagatgaggaaacggaagtttaaagatgcagggttaggctgggcacagtggctcatacctgtaatcccagcactttgggaggttgaggcgggcagattgcctgaggtcaggagttcacgaccagcctggccaacatggtgaaaccctgtctcaactaaaaaaaaaaaaatacaaaaaaagtagccaggcatggtggtgtgtgcctataatcccagctactcaggaggctgaggcacgagaatcacttgaacctgggaggcagaggttgcagtgagctgagatcactccaccacactctagcctgggcgacagagagagattctgtc

SEQ ID NO: 51035 - DNA, 590 bp, Homo sapiens
cccccctcggaagtcttctagaattaattaacgcggggcattggtctctttttctctaaggactgttactgagtttttttgtttgtttgaatttggcggtgagaaaaggatagcccacagaataaacctatttcccttgctgggtgctctccctaggtggatccatgtgagaaaatttctaactggtgcttttgcctgtagaaaagtctgaggtctcactgcacagaattgttttgtctagccagacattccatgggccacaagagaatgtcccatacagatgcccgctctccttcgcctcggattctttaacaggcagctcctatcttcctgccttccatccctaagtccccacctctcctgtctttcccagctgctcacccttgccccagaggttaataaagtcatctttctctgggtcatggaaatcttcaggctttaagtgtgggcttttagctcccagatgatttttttctcttaatatattcatttcggtttctgggtagttactgggatgggttttgcaaggacagaagagcaatgcggagtacagtttgccttttgactggtttacctttggttcgtattat

SEQ ID NO: 51036 - DNA, 597 bp, Homo sapiens
ccgggccccccctcggaagtcttctagaattaattaacgcgggggaaggccagaagggaggtgagggataaaagactacattttaggtatagcatacagtgcttgggtgatgggtgcactaaaatctcagaaatcaccactaaagaacttatccaggcaaccaaaaaccacctgtacctcaaaaactattgaaataaaaataaaaatttaaaaaaacaaaaacaaaacaaaacaaaaaacaagttctgatagaagagccttaaacatgggaaggactttgatgtgcaagaaatgctagactgagagttcttgtttacctatcttttaaaaagcaatcccaaacatcaaggtataaaaatttccttatttcaaagatctttgccaagaagacacatgagtattcttcagatattcttttatcaccagggttgtgcccggctcagcaggtaaagagtctacctgaggcctgtccaaaaaaatgggattcatgaagagctactcaggagctgtgggtggtatctctaccttataatataaaaaagaaactggggccaggtgcagtggctcacgcctgcaatcccagcagtttgggaggca

SEQ ID NO: 51037 - DNA, 495 bp, Homo sapiens
cgggccccccctcggaagtcttctagaattaattaacgcgggcatcagccatagtaataggctatgatagagaccacaatgttctgttatatgtacctctcatactgcaggcataaagcaaccgagtcatgattgaataattatcagacagtaagaatacttttcaggagaggatgtttcctgactttttctaaatagcaaataccttcccaacctcagaaaagaggtatttttatactttacattataaagtgtaaaaatatctgaggacattaagaagaaatcagaggctgggcatggtggctcacgtctgtaatcacagcactttgggaggctgaagcgggaggatcacccgagggcagaagtttgagaccagcctgaccaacaaggcaaaaccccgtctctactaaaaatacaaaaattagccaggcatggtggtgcatacctgtagtcccagctactcgggatggccaagcaggagaattgcttgaacct

SEQ ID NO: 51038 - DNA, 470 bp, Homo sapiens
  misc_feature 27, 452, 453: n = A,T,C or G
gggccccccctcggaaatacttctagnattaattaacgcgggtcaaatctacaggacgtgttgaaacaaattccctaattaagcattacaacagaattaaacttcatttttacaaatgcattatcttcatgaaataagactgcccatccacgaatttgaatgcactaatgcttttcagctaaggaaaaaagtctagtacatacctggtacaaaaatatgtcaatgctgggctgaattcaaataactgattttttttctatgtctttataatcatagacttacgtccaaagagatgggaggaaaaaaacctgaacctacatccctattactgaaaccatgccagctactcaatcataagggagaagcagaactcacgatctttttcataggatgatgtgaaataaagaaagcccctgtcagaaaaaatcccctttgtgttgcccaagactganncaaaaataaaattaaaa

SEQ ID NO: 51039 - DNA, 594 bp, Homo sapiens
cccccctcggaagtcttctagaattaattaaaaaagttatatgttttgcagtgacagggtctcaccatgttgtccaggctggtcttgaactcttggactcaagtgatccttccacctgggcctcccaaaatgctgggattacaggtgtgagccaccatgcctggcctatataatttttttcacagatgtcaagaatcaatctcttcttgactaaaaataaacatctaaatataataggaatgaagtattaatttctttacatgataaagaatacatatttaaaactaactcagcattatacttaatggaaactactagcactatttctcttttaaatataggaacaaagccactgtatggcctatcatcaccctctttaggaagcgtttgtgccagttatgagtcaagttctttcagctctaaacatacttttttagattctgctctgtgttggtggggctgagagtgtaaaaaaaaacagctgttttgccagatggctccatggttctatcattagaaggcgtatatgggattggaaggcaggaatagagagaagggagtaggtccttcctgttttgctcttcctgttggttt

SEQ ID NO: 51040 - DNA, 474 bp, Homo sapiens
gggccccccctcggaagtcttctagaattaattaacgcgggctaacaaatattgattatgcacctattatgtgggctgggaactgtcagggaaatgatagaagtcaaaatcaatgaaagtgaatcccaacaagcacaatctatttaaagggacacgtgaaaggatcaaaaactaaaactctgtctccaaatactataagaagatagaggtaggtgaacttcatagagatgactgtagtaagagtgttacatggagacaaattattacttaggaaattcatattctcttgaactttgcatctcaagctgcttcccaaattttatgaatcctcaatcacacaatccggtctctgatattagttttgctttacctctctgtctttggtcatccatctataagatgaggaacagattgacttcatttctagacctctttccattgcaataatgttgtgttactgcttatgtaactgat

SEQ ID NO: 51041 - DNA, 459 bp, Homo sapiens
  misc_feature 185, 197: n = A,T,C or G
ttctagaattaattaacgcggggcgtagtggcacatgtctgcaatcccagctactcagaggctgaggcaagagaattgcttaaacctgggaggcagaggttgcagtgagccgaggttgtgccactgcattctgccctgggcaacagaacaagactctgtctcaaaaaaaaaaaaaaaaatttatngcggattgtttntccctctcttcagtgcttcaccagagcaacaagcagaagccacagcaagaagcttagccccaaagaagtcaaaagcaccggctcctaaacggagtcaaagctgttggaatcacaccctagtgtcttgtaaaactaatatttatgaacatacatttaacaatccttggctttttatttaatgacaagaaactaaaaactaagatctctatttgctaataaaacttagctactggaggccttcaccgtaagatgacaaggcagc

SEQ ID NO: 51042 - DNA, 287 bp, Homo sapiens
cgggccccccctcggaagtcttctagaattaattaacgcgggtctcacaaaaatcaaggcagtcaaatggttctcttctcttgccacataccttgcctgagcaactggcctatagaacactcagctccagggccgagtggaaaagcaacacttggccgggtgcggtggctcacacctgtaatcccagcactttggaaggctgaggcgggtggtttacttaaggtcaggagttcgagaccagcctgatcaacatcgcgaaaccccatctctacaaaaaaaaaaaaaaa

SEQ ID NO: 51043 - DNA, 546 bp, Homo sapiens
  misc_feature 28: n = A,T,C or G
cgggcccccccctcggggatcttctagnaattaattaacgcgggtatccaagatcattattccaacctgtgtgtctgatttcttctgccttctcaaatccaacaccaatacctgcactatctctgaaatctgcaagtcagatatctcacattatggtcattatttcctaccattccagctaacttactccattatttttacttttattcagttattgacatgatattcacaaaatagatctatggtttaggaaactgtttgcaatgcaattttaattgaaaaagaagaatataaaattgtcatgtaaaaattcattggaaaaagacagctaatataaaaaggggtgatggacttatgggtgtttttgccaattttagaataaaatatattctactcctttatttctaattccaaaatcactttatcttatggaaatgttcaatgtacttactcttctccctcattttttttttctcttatttctctctttactaaatctccatttagatgatctagtaccttcaaagcaggtgaatacaattctaa

SEQ ID NO: 51044 - DNA, 561 bp, Homo sapiens
  misc_feature 532, 533: n = A,T,C or G
cccccctcggaagtcttctagaattaattaacgcgggatctgaagtgtttattgcttgccaggagacggaaactgagttcccaaggcctgttcaaccttcagaatcaaaactagacatattttgggaagctgagaatggggaaacacttttctctccataaatgaagactgtatcctcactgaggttgagacgagaattaaaccatccatcccacaccataagtagaatcctaaacctcaacttgtttgaatttggctttggaattctacctgaggtatgtaaccatctaacacagaaactaatgtagaaactagttttagcttgtaaactctcaggatctcatatagaggcaaacttaaaactgcctccaagggttggtttccacaacacacaacgtgtatgggaccaccatcaaagattgcaaagtgagcttatagacaaaaattatgccatgaaagagactgaaaatttatatccaggcactaaagacattagcaaagatctttaaaataaatatttaatgaagccagnnaattaaagtatgaagcatgaactggtga

SEQ ID NO: 51045 - DNA, 589 bp, Homo sapiens
cgggccccccctcggaagtcttctagaattaattaacgcgggcacttattgaacccttcttaaacatttgctatggaacagacactctcttagatatcaaaatcatataaatactagtaagcctttttcttattttcaagggcaactaggagagcatgctggtagtcaaacaattatactaaaagatgaagtgttgtaaaaaccataggacaggtacaaacttagtggtggcaaagtcgtgatgggagagaaagcaaggttataccaagggtcgggattcataagaaaaaagatagcagatggctgaatgaggaagaagagatttttttttaattctgtaaaagaagtgtttatggaaccattttattgaacatctactatttaccagttgttttgcagcaggatattttatacacgtgatctaatttaacaaatttgattaatttgactaatcataacaaatctatgatgttatgataattcagtaattacagaattcttattccaagctcattgttaccatttatcaaagaaaagataaaataatttgctggtaaggtgctgagtttagaaacctagatctgctagc

SEQ ID NO: 51046 - DNA, 601 bp, Homo sapiens
  misc_feature 28, 44: n = A,T,C or G
ccgggccccccctcggaagtcttctagnattaattaacgcgggnaactgatgtaatatccacagctaaggcaaagttggttgactctctcccagttgcctgaaagcaactcagtgagaaggctgtggacagaaaagaacatcaatggagctaaaactgaagcctcctttgccctgcaggagacacactctagaatcctctttcctgccttccttttttgttaaccggggctcctcaactccatctcagcctccactcactgaactccacaaccttctcccaaggagtgtccacttggctggacctgcctaacgagtcagttttcctacatccctatcctcagcatcctcctttgaagacattcacttaaaagtggtggccgggcgtggtggctcacgcctgtaattccagcactttgggaggccgaggtgggcagatcacgaggttaggagatcgagaccatcctggctaacacagtgaaaccccatctctactaaaaatacaaaaaactagccaggcttggtggcgggcacctgtagtcagctacctgggaggctgaggcaggagaatggcgtgaacccgggaggcagagcttgcagtga

SEQ ID NO: 51047 - DNA, 591 bp, Homo sapiens
ccgggccccccctcgaaagtcttctagaattaattaacgcggggaggggagagaacacagagggctttgtgaccttttaatgaggcacaaaaacacccctgagactttccttttcccaccccttctctattaatcctcttcaacaacatgaatttccacagtgagttgagggtttacccctacctgcctcaaaggaattttgaaaagattaaaaaaaaaaaaaaagaaagaaaggaaaacagagctttggcttagcactcaggacccatccgaggtggtcgcaattaaaaacaaaagcagccactgtgattggtctcacttgtaccgtagtaacatgtgatctatttcagcagcagccatagcgtttgttttggagacttcagtcagaaaataaacgtaacgcatgtgtgaaaagaaagaagtgtgtggaactcggagaaagtcttatcttctgaacacgagtgcccgaggacagaagcccccatcttttaacaaagaaaagtccattgttcatcattttgtgaaatgtgaaaactaacatgataaacaatgattcattttaatggactgaaaaataacttgcatagacac

SEQ ID NO: 51048 - DNA, 318 bp, Homo sapiens
ccccctcgagagtcttctagaattaattaacgcgggggtaaaggaagggtcagtgaaaagctgggatgtaaacaatgctataagatgctcgtagacttaaatagcatcgtgccccgcctttcttctctctttattcacttttttttttttgagacagtgtttttttgttttgttttgtttttgtttcttgtttttttgttttgagacaggctagagtagagcagcacaatcttggctcattacagtctccgcctcccaggttggagcgattctccatctcaacaacaacaacaacaaaaaaaaagaaaaaaaaaaaaa

SEQ ID NO: 51049 - DNA, 591 bp, Homo sapiens
gggccccccctcgaaagtcttctagaattaattaacgcgggggcagccattccttcagaatccttgtcagaggaatgaccagaggcaatgcagagaagcccctccccaacaaaggcagctctggagcttgtaagactctgctacaaagccatagaggggctttatttttatacttgtctgtacacacctttttttggatatatgatttgcaaatatttttccccactctatggcttgtctttttattttcttaatggggaattttgaaaagcaaaagctgttaattttgataaaaatttatcaatttttaattttatggatcatgcttgtagtggtttacctaaaaatctttgcctgtcccaaggttagaaaattttacttctatgttttcttctagaagttttatagtttagcctttacatttaggtatgtgttccatttaaatttttgtgtatagtgtaaggttatggtctatgttcattttgttaaatatgggtacccaatttctctattaaattgccttggatcctttgtcaaaaattgactgtaaatataaatgtttatttctggaatgtctgttgtctgttttgt

SEQ ID NO: 51050 - DNA, 474 bp, Homo sapiens
accgggcccccccctcggagtacttctagattaatacgcgggagacactctagtgaacatttccacttgaaattctctgaaaaagcttgcaatgttagtttcatttcatccagacctattttgttcaagaaactctgctagccacagggagtacaaagataagtaatagagatttcccgccgttaagagataagacacaaatttgcaggaggatgtgctatgctagtttaaatatggatttcagcctggttttctaactgaactttcagcttcctaagggaaaaaaaaatcagatatttgatcatattatgggtcaaaacatagtaatgaattaaaatgaatgtcaatacaagctattttattttttatttatcatacttacaaaaattgtatataggtgaaatcatgaaataacctcttctttataaaaataagaaaatatggccctgagactaagtaagtcacagagcattt

SEQ ID NO: 51051 - DNA, 510 bp, Homo sapiens
  misc_feature 453: n = A,T,C or G
ccccctcggaagtcttctagaattaattaacgccgggatacaccatataaaactttgcctcataaacctactgtttcaattacttaacaaaaggtcttaaacaaaatattataacatttcagtgatttctctgacagttaaataatcaaatatttatatggaaaacagtaagctttcatgacttgtacgtactctaagcctgtgcatatgaaaagctgtctctttcatctatttaaagaaataggccgggcgcagtggctcacacctataatcccagcactttgggatgccaaggcaggagcatcacctacggttgggagttcaagaccagcctgaccaacatggagaaaccccgtctctactaaaaatacaaaaaattagccaggtatggtggcacatgcctgtaatcccagctactctggaggctgaagcaggagaatcgcttgaacctgngaggtgaggttgcagtgagcagagatcgcgccattgcactccagcctgggcaacaag

SEQ ID NO: 51052 - DNA, 584 bp, Homo sapiens
  misc_feature 530: n = A,T,C or G
cccccctcgagagtcttctagaattaattaacgcgggatccacttcagggtaagttaagattttacccatacatataagctttttatatgccaaatcgcataaaaaagtaaaaagtaaagtactttttttcttagtggggacattatttctctaggtgtttattcctgtgtattgcctggaagccctgaatagttcaggtgatttaagaaaaggacaaaattatatattgactaggaaaaaggaggctgttttcccctagcaagtggaaaagtatctcagaaagttaaaatcttgtggcacaggattcttagatatatctgccaagtttattaccatattaagcctcttggtcctactttctgtcaggattctgattttattacagggaaacttttgcgactatattatttatttctgttatttaagccaagatttagtggtttgcgtaatctgaaaagtgcttcgtcatggatatcaatgcatatgagtgttgttgacttgaacatttaccttaatcattgcacatcanattcaactaaaatatttttattaaatactcatatccagactctacctacagata

SEQ ID NO: 51053 - DNA, 316 bp, Homo sapiens
  misc_feature 111: n = A,T,C or G
accccttcctactctctattacatattttaaaaattggctaaatcacacttaacctacccccacctccacacacacacacaaacccaaaactggatccactgaataaaagnatattttcttctatttttttaaaagggggcataatgtatataggtatgcaagactatcagttactaagtctgaaaagcagatcttcccctaacagcaagagcttttaaatcagaaaaccaggagcatgctgaggaatcttgagaaagtttgtcttcattccatcaacataaacattctacaagtcagtctaaaaaaaaaaaaaaa

SEQ ID NO: 51054 - DNA, 603 bp, Homo sapiens
cccccctcggaagtcttctagaattaattaacgcggggaaggaaaatgcttgcgtgtggataaaggtgctctttcttctcatcgcagagtcaaacacctggctgctatcaccaaggacaaaggatgttctgaagagtgaaccaactcagatttacccacatacttcaagaaagcaatttagaaaaccgcaggaatccaaacattctttcattggctactaaaatacaagaaaagaaatcaagaaaagtttgtaggacttttaggaagctattacttgatcagaatattattattataaatatatcagaacacttttatccttgcttgatgggaattcaacacttcacgtcagccaggaaagctacaggttagtaactaaactaacctagtctgttgtccctaaagattttctgccaatggccaggcatggtggctcacacctgtaatcccagcactttgggaggctgaggcgggtggatcacacctgaggtcaggagtttgagaccagtttggccaatatggttaccatactgattatcattttaacatttatatacaaacatctttaagtcttcctagacaatgttaaggaaatgttaagga

SEQ ID NO: 51055 - DNA, 474 bp, Homo sapiens
  misc_feature 35: n = A,T,C or G
tgggtacacgggccccccctcagagtacttctagnattaattaacgcggggaatgagtgtgggaggtgagcaggtaaaggagtatgcatgtctgctaaggtttccttaatttgaaattcctctgtcacattcttttaaatcttgtattgcaccaatagcactggtaataagcagtcagcaaaaccaataacaaagaatctgtcataagtatctttttaaaagctccttaaaatgagtaagattaatactcagtagaaaaatggataaagaacctgaactgataatacaaagaacaaatgaccagtgaatgtgttttcaaaaatctaacttcactaataaacggcaattaaattacacatcatttgttgttcaacaagttggcaatttttaaaatatgatcatatttaaagataataagagtatgacatacgcactccccttaatgttcatgtgagtataacctggttaaatctt

SEQ ID NO: 51056 - DNA, 524 bp, Homo sapiens
  misc_feature 469: n = A,T,C or G
cgggccccccctcggaagtcttctagaattaattaacgcgggcagccttctcgggaaacaggagatatctaagctccatatttggtcatgagtgccctggtaactgctctgactctgcccattgagggctccaggaattctcaagtggaccctcaagaatgtatcaacttctcatagagaaggagctgatgtctgctaagccctcctacaatgctccaggaactccctgacagaagctccgatcctcacaattctccagggacactttgctgtgaggatttaagctctgactggatactccatgagggcagggctctgtattcccagcacctagaacagctcatggtggctcatggtgggtgttgaataagtatttgttgagtgaactttagagatgaggacacaggcttgggaagttcaagcgtcctacccatcaccacacagctagtaagttgtgcagtcaggatcntcatgcaaggctctctgtagctaaattcatgccctttcccagtatttcatactta

SEQ ID NO: 51057 - DNA, 530 bp, Homo sapiens
taattaacgcgggtctggattgttttccttctttctctgagctgtcacttgctataaaagcgatcattgatattcagccattatgccattatacttccataatcattaatattcttaaaaggctcttgaaacacatttatacaaggctacatgatcagttcctacatttactttcaatttaaataacagttttagccagggttttgatgtgctgtttactttaattaccatcctgcccctttctgtgtcttgacacagtgtcatttaatattttatgaatttcccttagccctttttttccctgatatgtgtgatttgaacgggttgctgcttttttagaaaaaaatttgtagttttaacttttctgagacttgctgtaaacaagatgtgtcatgcctatggattctcttcccccagtgataatgggaggaaataaataaaacagcagacagctgctttacccagatggcacagggatgccagggggttctggccctgctgcaggcacagagtgacaggccagcaacttc

SEQ ID NO: 51058 - DNA, 544 bp, Homo sapiens
  misc_feature 13, 33, 473: n = A,T,C or G
gctgggtaccggngccccccctcggagtacttnctataattaattaacgcgggcaactgcacatgaatttatacatcatatattcagtatatgtgtttcaatgtagttttcactaattcaagtaggtctcttagtaaatcaaaacacctttatagagtgctttctgaatgtcaatcttaactaaatctcaagtggaaaaagatgtagacagatgatgtcattactcaaggatatcacagattgtgtttgcatatttcagttttattttgagctgttgtgtaaaaacattagctcctaaaacttaagaattatgctgcaaattgagtagttctttcattatatctgattgaataatgctctttttttcaaaggaatgatttctactttcatatgaaaatttgatgaagtagcaaaattctggtataatttaatttcattaacagtggagaaaaatacccatttttagatagcanaaagtcagtctacatttaatccatttatcctttcttttgaagcattcttctggaagctaaactgatctaaa

SEQ ID NO: 51059 - DNA, 371 bp, Homo sapiens
ccgggccccccctcgaaagtcttctagaattaattaacgcgggtattgcaaaagttaatagtgcatgaaacgttgtatacactattgaaccatgaatgtgaaaggattctttcaatggatatcaatgtaaatattttgaaattatttgataaaaatgaattgcaaacaaacaataacttactgatgaattagctaagatgggcagagctactatatatgtttgagggaaaagatcataaaaatcttggataatgtagcatgcattttgtttcacaagaatccttaaagacactgatattgcaaattgtagacaatgatttgggaatgtggttcacataagaaaacttcagtttgcaataatcatcccacac

SEQ ID NO: 51060 - DNA, 552 bp, Homo sapiens
  misc_feature 521: n = A,T,C or G
tgggtaccgggcccccccctcggagtacttctaggattaattaacgcggggaacatttgaacaaggcccatcaattactttagatatcacgaaaaaaatatattgtttctaaaatagaaaaagtgaagcaagtttattatttaaatatttgttgaaaagcatattataaatcttgtattactgaccaattatctatattcggccatgagtacacacaaaagaatcagaaagaagttccttttctaaagttgttaatattctagatgagaaaaacaaaagcaattttatatgaaaaaattaattctcacagattgttactgcctcctatcttctttccaacgtgagtatcaagggttttatgagtattaagtggtctcggctcatccctaaacctgtaggactagacactcaaaggccttttctcagggatcaggccattctcgtactatgtgacctcacccattggtccagctaattggtccacaagccaaccagcagtcttagaggtgatctttcataanatgtatgataatatctagctagatagataaa

SEQ ID NO: 51061 - DNA, 603 bp, Homo sapiens
  misc_feature 28: n = A,T,C or G
cgggcccccccctcggggtacttctagnattaattaacgcgggggtggtgtgtgcttatagtcccagttacttgggaggctgaggcaggagaatcggttgaacccgggaggcggaggttgagtgagattgctccactgcactccaggcctggcgacagagggagtatgtctcaaaacaaacaaacaaaaaaccgaaataccatgtgaatgcacacagtattcagattttgaaatgtcagccatgccatgtagaggttgctgatgaagtgatgtttcccaaattcccatgtcagcaaatggcaagctgacctccctgtgcgtctctctgccaagaactgccacctgccttctctgggctcttcccggatagcttatgaagtccacagcctttgaatctggcctagagggtggtttttctcttctgcacccagccaagtgttttaggagaggtgcggctctctgtgagggaacacagggcatgttgaacttgttggcattcatagcttcagcgtgttatgcaggtggcacttacataaaagcaactgaaattaaaagcagtgcatgtggccaggcgcagaggctcatgcctgtaatcccagcact

SEQ ID NO: 51062 - DNA, 503 bp, Homo sapiens
gggcctcccctcggaagtcttctagaattaattaacgcggggaatacttgaacccagaggtggagattgcagtgagccgacatcatgccaccgaactccagcctgggtgacagagcgagactctgtcttaaaaaaaaaaaaaaaaaaatcaagatgcattatatgtatgacattaatttaattcagctcttggttaactagagacgtttggatttagccattctacatttccagggttacatctgtagacctataaagccagcctgagatgcgttaatatagggagtggaggggtggcagagtgtttctgagttcatattccatttctgttggttatatctaatcagaatctgagtgatgaatgtcaacaagggcagattcatggctgatctgtattttagtttcagagcaatggactgtttcttcttctccgacagtagactagagtgatttcatttgctaaagcctaagcctgaacatttctggaagcttacaaaagtgat

SEQ ID NO: 51063 - DNA, 502 bp, Homo sapiens
  misc_feature 480: n = A,T,C or G
cccccctcggaagtcttctagaattaattaacgcggggcttaaaataactgtctggctcaagatcagtattttaatacaatagaatgaaataaaatgaaatatcagaatacagcagataggaaataggtaagtataaatttctgtttcagttctatgtgtgtgtgtaaaatgtaaaggtcagatgtaaaatgtacttcacatttacagagtccagaagttggaaaattacttaccttggggactctgttgaattatgtaaataataatttttttaatttttaatttttgtggagtcataggtgtatttatttgtgggacacaagggatatgttgatacaggcatgtaatgcatactaatcacatcactaaaatggcttctctatcctcccaagcttttatcctttgtgttacaatctagtaatacattttgggttatattaaaatatacaattaggccgagagcagtggctcatgcctgntatctcagtactttgggagtct

SEQ ID NO: 51064 - DNA, 479 bp, Homo sapiens
ccgggccccccctcggaagtcttctagaattaattaacgcgggtgtctagacaatttgggggattgtttttggctgttggttattaaataatccaggtcacaagagtcacaaactatatgcaaataggagcactgggtggacatgtgtggaatggagttgctgtgattaaaggaccttttcctggccgggcgcggtgactcagcctgtaatcccaacactttgggaagcggaggagggcggatcacgtggtcaggagatcgaatccatcctggctaacacggtgaaaccccgtctctactaaaaatacaaaaattagccgggcatggtggcgggcccctgtagtcccagctactcgggaggctgaggcaggagaatcgcttgaacccgggaggcggaggttgccgtgagctgagatcgcgccactgcactccagcctgggcgacggaacgagactccgtctcacaaaaaaaaaaaaaaa

SEQ ID NO: 51065 - DNA, 398 bp, Homo sapiens
cgggccccccctcggaagtcttctagaattaattaacgcgggacagtcccaatgtggcaagaagattagctataccacttttacattgcctactaacaatgtatgagtgatcgacccattttgtctgcatcctcaccaaaatttggtgtagtcactatgttttaaattttagcctttctgatagctgtgtggaggtatctcattgtggttttaatttgcatttccctaacatctaatgatgtcagacaacttttcatgtgcttatttgccagcaatatgtcctctctgtaatcattttctcacagtctgtagtttatcttctcatcccctcaacagggtctttcacaaaataaacatttttaattttggtaagatccattctatcgatttttcctgtt

SEQ ID NO: 51066 - DNA, 442 bp, Homo sapiens
cccccctcgagagtcttctagaattaattaacgcgggaggctgaggcagaattgtttgaacccaggaggtggtggctacagtgaaccgagatcaagattgtgccactgcactccagcctgggagacagagggaaactggtctcaaaaaacaaacaaacaagcaaaaactaagttacaaagaatcatatacattagtaaacttaaattatcttaacacttagtagtacaaggtaacaggtagtatacgagcaagatgatggatgtactgtttgtttctttctttatgaataccgcagaagaaacttcacttaaggctgagtgcggtgcctcatgcctgtaatcccagctctttgagacgccaaggcagatcacttgagatcaggagttcaagaccaacctggccaacatggtgaaaccccatctctactaaaaaaaaaaaaaa

SEQ ID NO: 51067 - DNA, 629 bp, Homo sapiens
  misc_feature 557, 564, 593: n = A,T,C or G
accgggaccccccctcggagtacttgctataattaattaacgcgggcaagttaacagtgtggagtctgcgggctgtgctggtttcctctgtgtctccagcgcccagccgaatgcctgactcgctccagttctcagaaagtgtttactaagtgaaccgcactgccaggtttcggtttcttcagtcacatccacagtgaggatgttaccactgagatgagggcaggattgtaaaaggaggcagatactaagctctgttacaaatgttaatttcaagaagtcactttattaacatttgagcagagataaacactatgaggctcatttctatctcctgttctgcgagcgtggcagatcgagctcagcaggttgagcgagctccctggaagattacagagtctctggctgacaccaatggccctgagctgtctcctcccctagctgagctccagataagcacctagtgctggttgagagggccacgccttatgcaaaggccatgttcaagtcctccttatccttggaatgacaaactcccagatgcctgcctggattatccncagcctncaggagtggcttgctgctctctcacttanctcttctacatttggccttcgtgaagtcagcagcgg

SEQ ID NO: 51068 - DNA, 608 bp, Homo sapiens
  misc_feature 28: n = A,T,C or G
cgggcccccccctcggaagtcttctagnattaattaacgcgggataggaatacaagactactgaacaaaagccagtggcttttccaattttacatgaagggggtttattggtgcttggcataaatatgtcaatgcattttagttactatccttcctttctgaaacctacagagatgcgtacacatcagtatccctcacacatcatcatgacagtcttagagaaggaagtggcatacagtcttttctagaagtatggcccatggcatatcttgggggaaaaaagatcttgctttgacaagaaaaagaaaagtgctggaggctaaagaattatggagaccaggcgtggtggctcatacctgtaatcctagcagggcagaaaagtgaccagaattacttttgaatacaacacaacaatgttaatctgaaacatgaaaaaagcctttaaataaccaaatcattctcaatctataaaaatctcccaaagggctccagctgatatcatgtatattatctaatttgcctaatgttaggcagagcacttatggttgaggtatcctattcagttgaattctaccaccccatacacactctcggtaaatgctgctgaa

SEQ ID NO: 51069 - DNA, 534 bp, Homo sapiens
gggccccccctcgaaatacttctagaattaattaacgcgggacatcatgcaaaacctaaataactttatgaatgtgaaagtagaaaatagccatgtcctacttcccatttggaaatggaaaaatggaaggaaaaaataaaaacagcagcttgcagcactctctgaaaaccatggcataattaatgccaaaggcactgtgtgtggtgtcaagacagtggggggctgagattgcctcacaaaattcactggtgctccaaagagcacctgcaaagcagccaacatttcccatgtccacaggaaggacatgcacttatatgagtgaagggcagcagacttagagaggccatggggttgggatgaagaaatctgtttgcagatgacagtgtgggccgtaagccagatttcatatgcaaagtcatcgcagtggatgctcacaagaccagacagggcagtgtcaactgtgaggacgccagtgtgagccgataacaaagtcagacattcaccacctaatattgctgccattagtaagtctcc

SEQ ID NO: 51070 - DNA, 603 bp, Homo sapiens
  misc_feature 46: n = A,T,C or G
cccccctcgagagtcttctagaattaattaacgcgggccctccggnaaaagcctccctatcctcctccaggcagctgccccctcttcccatgtgcttcacttgtctctccatggcagctcttcctacacactgtgattatacttatctctttaagctgttgggagatggtagaaatgtgatattggtttgaaattagaggctttttttggggatagaaggaggctcatgagaagatagtataaatatgtattaatatttaatagaaattagagaggttgtgaagaatccagtgtgaagaaaaaaggtaggaaaagaaaagaggtaggaaagatggtgaaggccagatgttagagagctgtcgacagaaaggaaacctggccagaagaaaaaatgtagtgatgtaaggatatattttgtcatctcttacattttatttgagaaatattcagaacacttagaaggactaataggtacaggtcacaccctcctcttttctcctctcccctgcccccatactttcagtttaacaaggaaagtagaatacataaaaaaatagagtaaaagtttaataatggcaacctatgtgtggttagggtgcttaa

SEQ ID NO: 51071 - DNA, 491 bp, Homo sapiens
  misc_feature 106: n = A,T,C or G
cgggccccccctcggaagtcttctagaattaattaacgcgggcccctaaactgttaaagaacgattttaaggaaaatgatccccaaaagaaggtcagagatataangaaaaagtaagcaaagaaaaaggtaaatacaaggtcaggagatcgagaccaccctggccaacacagtgaaaccctgtctctactaaaaatagaaaaaattagacgggcattgcggcacacacccgtactcccagctactcaggaggctgatttttgtatttttagtagaggggaggatttcaccatgcttgccaggctacaaaaaaaaaaaaaaaaaaaaaaattatccaggtgcagtggcacatgcctgtagtcccagttactcaggaggctgaggcaggaggatcacttgagcccaggagtttgaggctgcagtgagccatgctcacacaactgcacaacaaagcaagacctcatctcttaaaaaaaaaaaaaaaaaaaaaaa

SEQ ID NO: 51072 - DNA, 364 bp, Homo sapiens
cccccctcggaagtcttctagaattaattaacgcggggatgtgaacaatctcaggtgtctccaggctccaccttacctcctcagatcccacccacaccattttctcctcaccctgagagtcagaaggcacttagtaatgttgagtgcttcttgcttgctctcttggtatgatgatggagtctgggcactactgaaataaacctggaaagatacattcaaacaagattgtaaaggaagtttaataataagttaaggaacatgttgctgaagaggagagggacatgatcctgtctgtgtgttgcaatgataattttggaggccatggggaaaggatggagagggaagatactataaacaaggacag

SEQ ID NO: 51073 - DNA, 389 bp, Homo sapiens
agactggggtaccgggcccccccctcggagtacttctatattaattaacgcggggccctctttctaaatcaagtgtttgctgtgtctagactgacattcatcggtgttattgtgaattaaaattgcactactataaatatatgaggcttaatagttacttttaagattctcgggtttaaatcccccttaattcataacatgcacatactacaacctagacacacgctaagcgcggtggttcacacctgtgatcccatcactttgggaggccaagatgggcggatcaccttggtcagcagttcaagatcatcctggccaacatggagaaaccccctctctactaaaaatacaaaaattacctgggcatggtgatgcctgcctgtaatccc

SEQ ID NO: 51074 - DNA, 578 bp, Homo sapiens
  misc_feature 39, 456: n = A,T,C or G
taattaacgcgggggtacattagtgagcacatgtggctngaaaagcagccaatgatatgaatccccaaattcaaatctatcaaagatttggaaacactggtgttttccaacctgctttctttccggatacattattactttctttccaacaaaaaggtggttgcatttccaagttatttactgagatcaaaccctagagtgctctgaagtgctggagtaggtcaggatatcaccagaaggcagagcttagcattaaaagtcatactgctatcaagcctgtttcctagtcctctgagttctcactgagcgctctgggcccacagcagatcactaagttccattcttagcgacagctgcctgcctagctctggtctctcaggaccgctcccttcctcctacgagattcggactgtcctttgtctctttccacatgtcaattatctttggccttagctntactttcctaattgtcccccaaagactgaaatcacagccacaacctccagattgttgcaggctctatgctgcaacactgaaaaatactgctctgtctttgcagttggcaatgacactcctag

SEQ ID NO: 51075 - DNA, 599 bp, Homo sapiens
ccgggccccccctcggaagtcttctagaattaattaaaatctactaaattaaaagttaagctctgctgtttctaaagagcttaactttagaaagcttaacattcatttttcaattttgaatgtcaggttttgtaagtatataacttggccatattaatttgtttctttttaaaaaaaacactgctgtgttgctttataaaccacttttggtgcacgttagactttttggcatttgatttgcttaaattattttacttataacatggtttgcattttaagtttgtattctttaatatgttgtatatttattgtaaattttaccttactcatttgaacttttggttctattaaaggactaagcagttattcataatgttcagaattgtgggtaactgagacccttggtccccaaattgttgctgaaactcactagtttaatatctattattttcataaattttctaattaggccagactgtgatttgtgttgtcatgtctacttcctgcacttttgtgggaaagatattagggtgagtttggaataaatattaggtggtcaaaggtcagcaactgcataattagacacttaaagaatactg

SEQ ID NO: 51076 - DNA, 601 bp, Homo sapiens
  misc_feature 17, 576: n = A,T,C or G
ccgggccccccctcggnagtcttctagaattaattaacgcgggagctagttttttgggaacaactagcagttttttccaaagtcacctgcaaagttcgtttatgcattgttacattttctatgttctagctgattaatttattaatctttattattctatttcttcattttctttaagagatgttggacctctcagctgaaaccctataagccagaagagactggaggatctatattcaatgtttttaaagaaaaagattttccaagattttttatatcaagccaaactaagcttcctaagcaaaggataaataagattattttcaaataagcaaatgttgggggagttcgttaccaccagatctgccttacaagagatctttaaaggagtactaaatatagaaagaaaaaccattatcagctaatacgaaagcacatttaaatacacagaccagtcacactataaagcaaccacacaaacaagccagcataataaccagctaacaacacaatgacagtatcaaatccacacacatcaatatggactttgaatgtaaatgaaatgaagtccccagntaaactacacagaatagcaagctgg

SEQ ID NO: 51077 - DNA, 586 bp, Homo sapiens
cgggccccccctcggaagtcttctagaattaattaacgcgggggacaccttcaaaccatagcaatagataaatagcaaagaaacacttgaacttaagcttcccttctttatgctccagctatagggactggatgagtttaacatctcttctgcagagacaatgctgtgttcaacagatatagactacgtttcccaggatcccttgcatgtaggtatgttgtgtgactgagttctgccaatggaaggaggtggaagagatgcataccactttcacatttggtcatgaaatattctacacacttaagctgggtgcagtggctcatgcctgtaatcccagcactttgggaggccaaggcgggtggatcacctgaggtcaggagttcgagaccagccatggccaacatggtgaaaccctgtctctactaaaaacacaaaaaattagctgggcgtgatgacagacgcttataatcccagctattccggaggttgaggcagaagaatcgcttgaactggggaggtggaggttgaagtgagccaagatcgtgccactgtactctagcccgggtgacagagcgagactccatca

SEQ ID NO: 51078 - DNA, 604 bp, Homo sapiens
  misc_feature 28: n = A,T,C or G
cgggcccccccctcggggtacttctagnattaattaacgcggggggggcttaaattaggtgccactggaaccattactggcttggcagatacttgcttctatagtgtgatttgaggggtgttttgagagaaggtacatttgaacctaattgtctctaccactggcacttttattatctattaaactgttgctcagatgaatttatcaagatagttttaatgaaccagacgtcaaccagaaactttaacgaagagacagcagtaaaaagaattttgagatagaagggaaaacaaaatcaagagcaaggagtattgccagatgagctgaacgtcgtgagcatctctacaaatgtaacgtcaggtcattgcataccaaactaagggaagaggaaataaaggaagaaatattttttacctattttcctgatttggggtagagaaggactagttgtctgtgcgctaaattcccatctctatgtgtaataaaaactaaatgttctagaagcagttaagcctacttgagttgatttaaaatgttttccttttgtgaagatagaaccttattttagaaaaaataatcaactgcctggtcttattaaagagtg

SEQ ID NO: 51079 - DNA, 418 bp, Homo sapiens
accgggcccccccctagagagtacttctagtattaattaacgcgggttccctatgtcttatatattctgctgtcttttgcatgctactttgtttatcactacagacatttataatttgacatccatactctaaagataagaatgttgcaactaccaaatttctgaaaaaaagcagttgttactttttgagaccttgttatattagttttatattgctttttaactaactaccacagtgacaattttggacagtaatcctgaaagtaattgctatgctctgaagaagctatagaggtgatgaagatgggcaacaaaatcagtatcattgtttatatgcccccaatgcataggtcttgctgtgtattttaagagactggctttctagttgtactggagaatctgcatactacctactatc

SEQ ID NO: 51080 - DNA, 466 bp, Homo sapiens
  misc_feature 43: n = A,T,C or G
cgggccccccctcggaagtcttctagaattaattaacgcgggnaaaagaaaataaatatagatggcagaagacaatgaagaattctgaaggagaaagtgtgtgacccaagaattccaaaagcagttattgctttctacacataaaagcaatagaaagacactcctggccgggcgcggtggctcatgtctgttaatcccagcaccttgggaggccgaggcgaggggatcacccgaggtcaggagtttgagaccagcccggccaacatggtgaaagcccgtttctattcaaaatacaaaaattacctgggcgtggtggcacacgcctgcaatcccagctactcgggaggctgaggcaggagaatcacctgaacccaggaggtggaggttgcagtaagccaagatcgcgccactacactccagcctcggcgacagagaaagactccgtctcaaaaaaaaaaaaaaaaaa

SEQ ID NO: 51081 - DNA, 539 bp, Homo sapiens
cgggccccccctcggaagtcttctagaattaattaacgcggggaaggcttaaattaggtgccactggaaccattactggcttggcagatacttgcttctatagtgtgatttgaggggtgttttgagagaaggttcatttgaacctaattgtctctaccactggcacttttattatctattaaactgttgctcagatgaatttatcaagatagttttaatgaaccagacgtcaaccagaaactttaaagaagagaaagcagtaaaaagaattttgagatagaagggaaaacaaaatcaagagcaaggagtattgccagaagagctgaacgtcgtgagcatctctacaaatgtaacgtcaggtcagtgcataccaaactaagggaagaggaaaaaaaggaagaaatattttttacctattttcctgatttggggtagagaaggactagttgtctgtgcgctaaattcccatctttatgtgtaataaaaacgaaatgttcaagaagcagttaagcctccttgagttgatttaaaatattttc

SEQ ID NO: 51082 - DNA, 549 bp, Homo sapiens
  misc_feature 12, 522: n = A,T,C or G
gccccccctacngaagtactgtctataattaattaacgcggggcttggcctggggcagggtgggttgggtagctacagtgagtgctctgagatatgcaggacaggctggcgtttcccagtggggctggaatatccaggggtcagacaggaaagtggctgagtgggaatgtggaactgtggagttttttctcttaaaaagaccaaaggcggctgggcgtggtggctcatgctggtgatcccagcactttgggaggccgaggcaggcagatcatgaggtcaggatatcgagaccatcctggccaacatggtgaaaccccgtctctactaaaaatacgaaaattaggccgggcgcatggctcatgtctgtaatcccagcactgtgggaggccaaggcaggcagatcacctgaggtcaggagttcgagaccagcctggcaaacatggtgaaaccccatctctactaaaaatatgaaaaaaaattagccaggtgtggtggcacacgccctgtatcccagctacttgngaggctgaggtaggagaattgcttgga

SEQ ID NO: 51083 - DNA, 604 bp, Homo sapiens
  misc_feature 571: n = A,T,C or G
cccccctcgagaagtcttctagaattaattaattttgttcaagagctaataaaaaaaaaatcttcatttctttggatgacactgtgcccaactccacggtcagcttgcagagcgtagcggttctgcccgaaacccatccgcccaaggcttttattttcctagatctcaaacagtgggagggtcggactctaaatactatttgtttagacccctgaaaatttttgataattcaatcttaagccgaattccgtttacctttacagtatgaaaaaagagtgactacgaaataaagaacataaacattaatagtacaagcacttcagaaaaatgtttagcatgccgtaaaataccaattacaaagcattgttaactctcaataattagatctccgatgtaattatacatgaccaataaagtaataacactacttatctttaaaaacattaatataaccaagactacccacattgcaacaggttatcatacctggtcaacacgagaattccctgtaaaaaagcttctcgtgtgtgctaatgaagatgtgtgagaatggagaataactcagctagtntatttcctgggcatttatgaaaaactgaattga

SEQ ID NO: 51084 - DNA, 581 bp, Homo sapiens
  misc_feature 24, 40, 547, 554: n = A,T,C or G
gccccccctcggaagtcttctagnattaattaacgcgggnaagaactttttaatttaattggttgttattttcatattttattttttattcataaagaatcttacaggtgtgtctccatttcacattatatgccatttaatgagttctatttttttttccatttatcttgttagagaaaaatgctttaagcaactagaatgtaaaataaaacatttaaaaatattgttagtgtaaattttgatttatcatttagactttcactttacatatgatgacccttaaacttttctattaaataattaatctacttaaattttacctttaagttaaaattttaaattatttatatgaatgtaaaaacgatatcaactaaacatgggattctaaacaaaataaccaaataatagaaagctgtgagataaaaacggagaaatatattaaaatttctttggggccccaactttattgcttatggcaaatttgatagtaaaatataccatgcatcactgcagtgacaggcttgagaaaatgaaaaatccaaagctntacatanatcaatcagaaaatcatattaaaatgt

SEQ ID NO: 51085 - DNA, 598 bp, Homo sapiens
  misc_feature 28: n = A,T,C or G
ccgggccccccctcggaagtcttctagnattaattaacgcggggatgattttctccactgagactcttctgtattcttgtaatccctcaaatgtgtttggctggcaattgcagagcatgtttttgggctctcctttttcaagcctttcataaatggtctagtgcccttatatttttggaatgtggagatacctgcaatgtactgttggcatctcttattgttaaatctagaattttaggctctttgaagtgagagatctgaatgtctcactcatttcaaaaatgagaaagtcaagtctgagagaagcaaaacaaattttccaagatcatgtacagctttttgctataaaaaccctaaagctatgtacaatatgtgctaataacctatattttctcaaatttaccaactttaaaatggcataattaaaaatagaaggtcaagggttactgtaaaggttaaaaaagttaatgtgtgaaaaacttttagcagaacttggcacagagagaacactcttctacctctccttctttctccaaaggtctgtgtggccaatattgagaatacaagcaaacagaactaaaagtaccatccatcacca

SEQ ID NO: 51086 - DNA, 568 bp, Homo sapiens
acttctagaattaattaacgcgggctctgctagctttttatctggccaaagcacatatttagatacttccaatgaagttcagagagcaacatattcctcttcccttatctaaatcttcagttacccaagatgagcctaattctaggttcctaacttgggattgatgtttaaaaaatttagttctggagttttctttttctgttcataaaatgttttattttactagaatttataaataattaatgtctattaataggcatgtaggaataactcattttttgttgttattgaatatctctccgtagcagagaccattttaaaataatttctgagtttaattctagttcagtttgagactgaggcaggccatttcaagggtgtaaaaccagtctgagacactccttggccttcctgaggctggatgggcttgtttgtaagagatgttaggtttccatcactctgagtaaactatcacaaggacagaaaaccaaacaccgcatgttctcactcataggtggaaattgaacaatgagaacacttggacacagggtggggaacatcatacact

SEQ ID NO: 51087 - DNA, 427 bp, Homo sapiens
ccgggccccccctcggaagtcttctagaattaattaacgcgggtagtattaaaatataacaagcatgtaataagtaagttattttttcttcatcaaattatatatactcttctcccagaaaaaatgatcccaggctgggcacggtggctcacgcctataatcccagcactttgggaggccaaaatgggcagatcacttgaggtcaggagttcgagaccagcctggccaacatggtgaaaccccgtctctgcaaaaatacaaaaattagctgttcatggtggtgtgttcttgtaatcccagctactcggggagcttaggcaggataattgcttgaacctgggaggcagaggtttcagtgagccgagatcatgccactgcactccagcctgagcctggagactccgtcccccccaaaaaaaaaaaaaaa

SEQ ID NO: 51088 - DNA, 492 bp, Homo sapiens
  misc_feature 26, 28, 39: n = A,T,C or G
gactgggtacccgggccttccctcgngnatacttctagnattaattaacgcggggagggcttaaattaggtgccactggtaaccattactggcttggcagatacttgcttctatagtgtgatttgaggggtgttttgagagaaggtacatttgaacctaattgtctctaccactggcacttttattatctattaaactgttgctcagatgaatttatcaagatagttttaatgaaccagacgtcaaccagaaactttaaagaagagaaagcagtaaaaagaattttgagatagaagggaaaacaaaatcaatagcaaggagtattgccagaagagctgaacgtcttgagcatctctacaaatgtaacgtcaggtcattgcataccaaactaagggaagaggaaaaaaaggaagaaatattttttacctattttcctgatttagggtagagaatgactagttgtctgtgcgctaaatttccatctttatgtgt

SEQ ID NO: 51089 - DNA, 520 bp, Homo sapiens
gggccccccctcggagtacttctagaattaattaacgcgggcactagatttaactaaaataatctctataactaggcaaacacttgtgtcctgtcatacactaatactaaaaacatggtttacatgtttacagtagattaagccaaccctaaactacaaggtcttctgcaccctaattctctctctaagacttttatcctcctcattgtaacctctcctttacactaaatactgaaaagcacagaaacccttcccaagatcattgcattttcacaaatgacacaaagtcttaaagcaaggacaaaatgtttaaaaataaaacgtttaagtaatgtccttcggcaggaggaaaacatggcatgttgagtatccgaacagatgaatattcttctcaagtatgtattagggttggggagcagaaggaaagctgatagaatacatctggccgagacgggtggatcacttgagttcaagagttcaatatcagcctggccaatatggtgaaacccggtctctacta

SEQ ID NO: 51090 - DNA, 376 bp, Homo sapiens
  misc_feature 15: n = A,T,C or G
cgggccccccctcgnaaagtcttctagaattaattaacgcggggcagcagaaacccttgtctttcactctgatgagtgttgcatggggctgatgctggaaactgcttcacaatctcaacagcatgggtgccggccaactccgagggatgtgacaataggccagcctgtcccagggcacatcggctgaatatcacctctccacggagtgtcagccaagtttccttcttttaaagaacattttggctggacccagtggctcacgcctgtaatcccaacaatttgggaggccaaggcaggcagatcccctaagatcaggagtttgagaccagcctggccaacatggcaaaaccccgcttctactaaaaaaaaaaaaaaa

SEQ ID NO: 51091 - DNA, 422 bp, Homo sapiens
  misc_feature 28: n = A,T,C or G
cgggcccccccctcgaaagtcttctagnaattaattaacgcggggagggcttaaattaggtgccactgggaaccattcctggctgggcggatactggcttatatagtgtgatttgaggggtgtttcgagagaaggtacatttgaacctaattgtctttaccactggcacttttattatctattgaactgtcgctcagatgaatttatcaaaatagttgtaatgaaccagactgtctaccatgacactttaaacgataccacacaatttaaagatttttgagattgaacggtaaaccaaatcaatagcatggagtattgccataagagctgaacgtcgcgagcatctctacaaatgtaacgtcaagttcttgcataccaaactaagggaagaggaacaaaaggaataattattttttacctat

SEQ ID NO: 51092 - DNA, 608 bp, Homo sapiens
ccgggccccccctcggaagtcttctagaattaattaaactacattcacaaaatgtattaatgtgcctttctcccaagctaaactgtgtacttctaatagatagaaaatgagtcttatgcatgtatgttccctgccttcttgggtctagcacatgacctggaacaaactcgtttcttgactactctctttgaatgattaaatccataaacacatgtgttaattcctttgaaatctgtgttactaaggtaaaagaggtgttcattaattatttccaagctcaaacatttgtttgaagactaaagtaggaggaagacaagcatcaacaaattcagagctcctttaaacgggacttcaatggcaaataaacatgttctttcttttgacagttatgaagtgaagaaaggtcttgactgctcagtttcatgtagatctgaatatacacatctgggttgaattttcccaagtgactatagccatgaaagtgttaaatcatattcattaatgaattcatataaaggagactcatgctcttaatcatcctgatattaggaagataaaatttggaattattattggaaatggatgaaagtttcaattgggtataatgg

SEQ ID NO: 51093 - DNA, 515 bp, Homo sapiens
  misc_feature 456: n = A,T,C or G
cgggccccccctcggaagtcttctagaattaattaacgcgggtctgaacaattaatattgcattactctagaataaacacttaattttaatacaaaacttgtactctgcttgataacaccaatttaaataatcttaagttttttctttcctactctataacttaccttagccactgttttgctcttagaaaaaaaattattcaaaagtattcataattctgtatcttataactatttccactagagtatactttaatagtaggatagcatgtgtccacaaatattttatttgaggcagcagtgaagaggttaatttacagctacatttatgaacgagttttatttatatttgacgtgccgtacaatatttatgtttcaattcataaactatgttttcccaagtggcaagaagtgaaatgttaattacatactattctaaaatagactgaaagacanaagtttttgtttaagtaaagtttgaaattaaaaataggcagtgagttaaaatctgatta

SEQ ID NO: 51094 - DNA, 385 bp, Homo sapiens
  misc_feature 28: n = A,T,C or G
cgggcccccccctcggaagtcttctagnattaattaacgcgggtggaggggatgggttaaacttaatcagtgtttcccaggctatattctggaaactggaaaaatttaagagatgtggcacagaagaaaggaatactattcaaataagtttgggaaacactgtattttatctagaactctgtctgagagtttcacaatatgtttagatgtaataaaggatctgaaaagttcttaagaaactagtttaaattggccgggcaccgcggctcatgcctgtaatcccagcactttgggaggatgaggcaggtggatcatgaggtcaggagttcaagaccagcctgtccaacatggtaaaaaccctgtctctactaaaaaaaaaaaaaaa

SEQ ID NO: 51095 - DNA, 504 bp, Homo sapiens
  misc_feature 410, 430: n = A,T,C or G
ccgggccccccctcgaaagtcttctagaattaattaacgcgggcttatgtggattacatctgcattccacacatcacagctacctctgtcctgatggctattcctctgggaaaagctaaggagcaatctacgaagacaatgaatacataagggagattgtttacaaaagaaaagtgttccagtgggtatagaggaaaaaatggtcagaggtgaggtagaaattttttactttccccaattaatgaacaccttttcccttcaaccttctacaggctgtttattcttgctcctgtaggaaggcgtggcaaggtatcagctttctctttgctacccactgctacttttagaccactgtgcttccatcctcttgcaaaaattcttctccctttgaagcttatgccatctggctntactgccctttaacaccttnttttttctttttctttttggagtgcagtgagctatgattattgccactgcactacaaaaagaaaaaaaaaaaaa

SEQ ID NO: 51096 - DNA, 234 bp, Homo sapiens
  misc_feature 23: n = A,T,C or G
ccccccctcggggtacttctagnattaattaacggggggtgggaactatctctatattgggtgaaagtgtgagttggtacaatcgctttggaaaagttatggccgtatccagcaaagttggaaatacatagttacattgaatcagaaacttctgcagataagcctaaggagatgtgtgctaatatatccactgtagcattgtttgtttgtgaggaaagcaaaaaaaaaaaaaaa

SEQ ID NO: 51097 - DNA, 529 bp, Homo sapiens
  misc_feature 28: n = A,T,C or G
ccgggccccccctcggaagtcttctagnattaattaacgcggggggggcttaaattaggtgccactgtgaaccattactggcttggcagatactcgcttctatagtgtgatttgaggggtgtttcgagagaaggtacatttgaacctagttgtctctaccactggcacttttattatctattaaactgttgctcagatgaatttttcatgatagtttaaatgaaccagacgtctaccaaatactttaaagtaatagaaagcagttaaaagaattttgagatagaagggaaaacaaaatcaagagcaaggagtattgccagaagagctgaacgtcgtgagcatctctacaaatgtaacgtcaggtcattgcataccaaactaagggaagaggaaaaaaaggaagaaatattttttacctattttcctgatttgaggtagagaacgactggttgtctgtgcgctaaattcgcatctttatgtgtaatgaaaactaaatgttcaagatgcagttaagcctccttgagttgat

SEQ ID NO: 51098 - DNA, 603 bp, Homo sapiens
cgggccccccctcgaaagtcttctagaattaattaacgcgggtgttgcaagatcataaaacatttttgattttgctcttgcttttgatttggaggcagggcaaaggccaggcaaacctttggaaaaggggtggaggtggctgaagatacaaacaaaaaatgagataattgctgaagcaaagtccctaaagggatggaaagaaagtgaatttagtgttaaattgaggggtaaaatttaggaggagggatatatctttttctaagtcaagaaagatgtaagaaatgtatatagttagagaatattaaaggtcaaaagctggtagataaagaagctcacaccagatgacctggatctattcattaaggtacaaagtataaaggtgcaaagaggagtattgctgtcctccttggcccaagaaccaacctggaatcgtcaagctgaatactctcttccagagaaatccttgaggctaaagaagctgggttggcacagagcactccagctaaggatagcaggtagggatgatgatgaatggaaatgaaagggatcatatgtgagatagcacttcagaagcagaagaacattgtaagtggtcatcaaaca

SEQ ID NO: 51099 - DNA, 572 bp, Homo sapiens
  misc_feature 16: n = A,T,C or G
cggggccccccctcgngggtacttctagaattaattaacgcggggagggcttaaattaggtgccactgtgaaccattactggcttggcagatacttgcttctatagtgtgatttgaggggtgttttgagagaaggttcatttgaacctaattgtctctaccactggcacttttattatctattaaactgttgctcagatgaatttatcaagatagttttaatgaaccagacgtcaaccagaaactttaaagtaagagaacgcagtaaaaagaattttgagatagaagggaaaacaaaatcaagagcaaggagttttgccagaagagctgaacgtcgtgagcatctctacaaatgtaacgtcaggtcagtgcataccaaactaagggaagaggaaataaaggaagaaatattttttacctattttcctgatttggggtagagaaggactagttgtctgtgcgctaaattcccatctctatgtgtaataaatacgaaatgttcaagaagcagttaagcctccttgagttgatttataatattttccttttgtgaagatagaaccttattttaaa

SEQ ID NO: 51100 - DNA, 594 bp, Homo sapiens
cgggccccccctcggaagtcttctagaattaattaaatagaacatgtgtgaaattatattggccttgaatttatactctgtaatttctgtaattttaaagagtgttatattcataaaaaatgcctaaaagtcattgttctttaaggtagaatccatgatatgtttgtcatcctttactggttcttctacgtggtcagaaagtcaaaaaaaggcacgctgtgccagctatgagaaatcactggtgttatttggctatttcatggtaacactcattcaaaccattgattattttatattttatcctattaatcttcacattttcagatataaaattatggttaaaattattaaaataattttacaatgtccattgttgattatatttataatctttcaatgttttgaaatgttatcttaatttctgtttatagacatattaagtgtatgttatgatttattgtttaatttaataaagggggattagaaatatgtgatttggggtatttatgatttctagaaatatcatagggtcatgagttcaatgggttcatgggtgaaaagaaagataagaaacatttggaatgcttaaatttt

SEQ ID NO: 51101 - DNA, 485 bp, Homo sapiens
cgggcccccccctcggagtacttctagaattaattaaattgtagtcaaatcttaaatgaacattacaaaagtgtgtgtgtaaaaatatgcaccattttgtgccattttttttttatgagaattggtgccaactatttggagaataccaaaggtaggaaatggtgtcctgctttcttgttctttctcctttttaaaacgctttctttagaattctccctttgcacttccagttccaagttgtttctcaatggtttgagaagaaagtgaaaacttctcttttacaaacggatgaaaagagagagccctaatggaccacatctaggatgctagatcattgggtctggagcaaactacccagtttccaactctggctccagaatctaccatctgtgttaccttgggcaaataacctcagtaatccccagtttccataccttgtaaatgtagataatgatattacccacctcatatgactgatgtgaagt

SEQ ID NO: 51102 - DNA, 548 bp, Homo sapiens
ccccccctcggggtacttctagaattaattaacgcggggagggcttaaattaggtgccactaggaaccattactggcttggcagatacttgcttctatagtgtgatttgaggggtgttttgagagaaggtacatttgaacctaattgtctgtaccactggcacttttattatctattaaactgttgctcagatgaatttatcaagatagttttaatgaaccagacgtcaaccagaaactttaaagaagagaaagcagtaaaaagaattttgagatagaagggaaaaccaaatcaatagcatggagtattgccagaagagctgaacgtcgtgagcatctctacaaatgtaacgtcaggtcattgcataccaaactaagggaagaggaataaaaggaagaaatattttttacctattttcctgatttagggtagagaaggactagttgtctgtgcgctaaattcccatctttatgtgtaatgaaaactaaatgttcaagaagcagttaagcctacttgagttgatttaaaatatttccttttgtgaagat

SEQ ID NO: 51103 - DNA, 422 bp, Homo sapiens
ccgggccccccctcggaagtcttctagaattaattaacgcggggggcggaggagggacaatagttaactatcacgtaggattaaatgacttcataaatataaggtgcttagaacagtctttgtgaaaacctcaggcttgaggatgaaggatgttcaatgaataaatgaacactgaatgttcaatgaacgtttgctatttttatatatgttgctctcatgtgactgtatgtcatcctgcatagggcttcatcctaattttggttagtgaaaaatcctcaggccaggcgtggtggctcacgcctgtaatctcagcactttgggatgctgaggcaggtggatcacctaagcccacgagttgcagatccacctgagcaacatggtaaaatcccgtctctacaaaaaaaaagaaaaaaaaaaaaaaa

SEQ ID NO: 51104 - DNA, 488 bp, Homo sapiens
cttctagaattaattaacgcgggggcttggtaaacaccttgaactttccattgaaatgtgagaagggccatgccacaccttaggactaagaatcatgtactgggactaagggctacatcctagggctaaaggaaaaacaagaaaagactggtactaacaaaagcaaaaagaagccttcacaggattgaggtgactggccagacgctacttgccagaacacacaactcagtgctctgtggaggaaaataaggttatcgagagtctttagtatatattatcctgaaggttcagaggagaaacacttggtgactgtgacttagataaagagattttagacttaacaccaagagcatcatctagaaaagaaaaaaagttaataaaagttaataaattggacttcatcaaaattaaaaacatttgctccaccaaagaccctgttgaaatggtgaaaagacaagctagacacatggactaaaaaaaaaaaaaaa

SEQ ID NO: 51105 - DNA, 489 bp, Homo sapiens
gggccccccctcgaaatacttctagaattaattaacgcgggcgtggtggtgtatgcctatggtcccagctggggaggcatactggggaggccgcctgagtccagaaagtcaaggctgcagtgagccaagattgtgccactgtactccagtcttggcgacagggtgagaccccgtctcaaaaaaaaaaaaaaaaaaaaaaaagacaaaacaaaacaaaaaaccttacaagccagtttcatcaaattgaactcaaaggaaagaaagttcaagtgcatttaaagaataggaagtagatcagaatagctacaatacataaagacatttgtataaaattgtaggaaaatgaaaagcagtacagaatgtgaaaaagacagttaacaaacaaatgaatttgggtttctattctataatccagtacaagtcagactgatgatttggggaacaaaagtgttatctgcacctaacacagcatctgatacctatatgccc

SEQ ID NO: 51106 - DNA, 507 bp, Homo sapiens
  misc_feature 28: n = A,T,C or G
cgggcccccccctcggaagtcttctagnaattaattaacgcggggggggcttaaattaggtgccactgagaaccattactggcttggcagatacttgcttctatagtgtgatttgaggggtgttttgagagaaggtacatttgaacctaattgtctctaccactggcacttttattatctattaaactgttgctcagatgaatttatcaagatagttttaatgaaccagacgtcaaccagaaactttaaagaagagacagcagtaaaaagaattttgagatagaagggaaaacaaaatcaatagcatggagtattgccagaagagctgaacgtcttgagcatctctacaaatgtaacgtcaggtcattgcataccaaactaagggaagaggaataaaaggaagaaatattttttacctattttcctgatttagggtagagaacgactagttgtctgtgcgctaaattcccatctttatgtgttataaaaactaaatgttcaagaagc

SEQ ID NO: 51107 - DNA, 167 bp, Homo sapiens
  misc_feature 23: n = A,T,C or G
ccccccctcggagtacttctagnaattaattaacgcggggggcctggggaggcagtatgaagatgggttaggaatggcacttggcttatctctacgggcgtgtgatattttgtcatccattctgctggggtagcttgctccaccctccataattctgaaaaaaaccc

SEQ ID NO: 51108 - DNA, 566 bp, Homo sapiens
cgggcccccccctcgaaagtcttctagaattaattaacgcgggtaatcccagcactttgggaagccaggtgggcggactcctgaggtcaggagttcgagaccagcctggccaacatggtgaaacccatctctacaaaaaatacaaaaattagacaggcatggtggctgtaatcccagctactcgggaggctgaggcaggagaatcacttgcacccgggaggcagaggttgcagtaagccgagattgcgccactgcactctggcctaggtgacagagcgagattccatctcaaaaaaataaaaaataaaataaaataaataaaaaataatgaaaacactgtggatgtccctcagaaggggtcacagtcaatgacagtgcctccacacgattcaacacaatgcagccattatgatggagtgtgggaagagggccaagctaccacgtttgaaacggcgctgcagagccacttgagtaggacaacgctgttttcacgcataacaacaaaacaaagaatcatcaaactgttaatttgttaactctagggaatgggattatgggggcctttg

SEQ ID NO: 51109 - DNA, 487 bp, Homo sapiens
cgggccccccctcgagagtcttctagaattaattaacgcgggggagtaagatgtaagagaggaggtggtgacagaatgctacctttgaaatggacaggtttctttgccaggggagggggtaaaaaaaaggaatgataagcagactgcctaaaaattattttataataacacaattccaaatgacttctcatttacaatgtaaatatacaatttacattgtatatttagcaaaataaaatgaccaggttgggaagaaccacagagggaaaatacactactaattgtggtcatcggctcaacagtcaaactggaaatgaatttgttaacaatgcattaacacattttagaaagactggttttcccccatgtcttgggaccaatatctctgtcactgacattaaacaccatagacaatctcattttatgtagaaagggtaaaaataaacggccattttgattaatattcttgctctgtgattaattccta

SEQ ID NO: 51110 - DNA, 577 bp, Homo sapiens
ccgggccccccctcggaagtcttctagaattaattaacccaaaaaaatttctaggaagctgtagtgagaaactgtagctttgaaatgtagtgatctttatccactgttgggcttgggtcaaagaccttggacaaggaaggaaaaaagggaaggagatacattatagaaaccagatgttaaaaactgataaaggctgaccagccccctgctgctaaaatctaaccccacctccatcaaaaaggtgacattctcctctgaagcccctctgtccttctaggagaaaaagcgacacaattctggctctgcatttttcctttggcctaccttgtcgaatggccctagaagactaaacaggtgttatctacttttgatttcagtgcatttaaattaatcctgtcagctcagctgttaaaacaactgtcatctccagctgttagtaattttcgactgggcactttcacaggttgccaagatctgagcctgcattgtgtgtctctctgaatgcactagagtaacaatttgtgggcttttaaaggggactggtattgtgatgctgtacacatggaatgatcataat

SEQ ID NO: 51111 - DNA, 615 bp, Homo sapiens
gggccccccctcggaagtcttctagaaattaattaacgcgggggtgagaaaagaacagactgggagtaaatattagttggatatagattcacttgctggaataaagagatccagtggtttaaaccagattaaaagttctctttcatgtaacaacaatataagcagtctagagctaaaatgtatgcttcaggtattcagaacctacactctttctattgttgctcccccaacccctagagcagtgcttctcaaactggttgtgcatggtccacccaatgctgcacttctctgcctggtcaaagaaagttcaccacaacatccattgggttagtgttccagctagaggagaatgaggaggggatattttataagatgtgtagacaaaactagagagctcaaagcataaagataactacaatcccagctgctatccagagtgtctgaatcagtgtgattaaacagcttggaaattggaagaatgggtctgagttctgccaaacttctcacattttaagttggcatttaatatgtttccaggtgtaggtttaatatccttgacaaaaatagaaaatattaaacattgcataagatgaagtgggaaaaatggttcattat

SEQ ID NO: 51112 - DNA, 537 bp, Homo sapiens
  misc_feature 42, 49, 498: n = A,T,C or G
gggccccccctcggaagtcttctagaattaattaacgcgggnaacccanaaattccctcacattcaacttgacacactcaaaacctcctttcgtgtttgttctattgagtaggataggaataaagtgaggtgaaatagcatttctgtagcactgagacaaacagttcaattgtgaatcatttcttaacacctataaaagacacctggggtattaatttcaatgacgatggattgtgaaagaatgtactattattacacatattttcagtcaaaactaaaattctcattagtttttcagaccaatactattaaacaaatttttttctgggccaatttttttctatgctattaccatgtactgagttgaaactctccacctaccaaactctcactgtgtctactgctgcccttatatgtcattgaaagatatgaacaatatttgtggttaggtatgccatgatcccatcaggagcgaagctattttgcgctgtaatgcanatgactgcattcatcaaaggagctttgttagtattcatt

SEQ ID NO: 51113 - DNA, 588 bp, Homo sapiens
  misc_feature 577: n = A,T,C or G
cccccctcgagggtacttctagaattaattaacgcgggggggcaaaaccgtagggggctcaacggtaataaaactctgagaggtgctctcaggctgcccttgctttatgccttaaaagagacttccagtttgtattgtctatagaagactttactttttgtaagtggcaaagtttctgttaaacaccagcttcatgccatcctcctgattctcattttcatcaactgtaaattggagaaatatagttctttccttgtggtgctatggtgaggcttgaaaataaaatgtgaaacttcctagcaaaagatgtggcacatagtagattctcagtaaagaactctgtctccacttcttgctgctattctaggaagtttggaggacttcctccaagatgttgctgtaattattacacacaaatcaccaaagcacacttgctaaacaccctggtatagatttatgccagaggcacaactatggcaagtgctctcatcaccattttcaccgtcttcaaaactgattacaggcaagacgtagtggctcatgcctgtaatcccaacgctttgggaggccaaagcangaggagtgctt

SEQ ID NO: 51114 - DNA, 604 bp, Homo sapiens
cccccctcgaaagtcttctagaattaattaacgcgggccaggaggcggagcttgcagtgagccgagattgcaccaccgcactccagcctgggtgacagagcgagactctgtctcaaaaaaaaaaaaaaaaaaaaaaaccacagatatccatcattattccagcattatttatcatggaaaaaaaacaataccaaactgcaaacaacctacatgtttgtcaatagggatgaataaattaatacatgtctacaccaggtgaaattttgcaatttttaataaaaagaataaatgagatttatatctattggcctgaagtgaagctcattatatcttttaaagtttatctgttcctcaaactccaaaagcctggtgaggctaattctcatgcttatcaataaaaattacttttctccgtcaattagtatttggtccagaaaaaaaaaatcagtgtgtcttgctgtaagaacatcagtgtgctcagagctaaaattaggaaacacacacaaattaaaacctgactttacaaggggcattttcctattaacaaaagggacaccaataagttctataaaattgattgttttacacggtgcatggaaagcat

SEQ ID NO: 51115 - DNA, 496 bp, Homo sapiens
  misc_feature 460: n = A,T,C or G
cgggccccccctcggagtacttctagaattaattaacgcgaggccctacatcactttctttttctttaatggaattctaggaagatgtgtgagtgggagaatctgagtgtggaaggtgttgcaaagatgtatatgttgtcaaaaattaaggtaaactatcataacacataaataaactatgttcctaaagctgcaaactttttaggtgagagcaattattcttatgctcaattatttgttaaccatcatgatgaaatgtcttccagatgcatctttgcttatatcagcttattaactaagagtagtcagattctatttataatgtaaaatattaaaaatacccaaatctattcagtccttcatagttcccaaagctttccacatctatcgtcacatttggccttctcaatagccctgtggagtagctagagatgatataattgcagctggaaatgaagancatattcaaatggagcgtgtcaaccaatttactagt

SEQ ID NO: 51116 - DNA, 538 bp, Homo sapiens
  misc_feature 23: n = A,T,C or G
ccccccctcgaaagtcttctagnattaattaacgcgggggaggcttaaattaggtgccactggaaccattactggcttggcagatacttgcttctatagtgtgatttgaggggtgttttgagagaaggttcatttgaacctaattgtctctaccactggcacttttattatctattaaactgctgctcagatgaatttatcaagatagttttaatgaaccagacgtcaaccagaaactttaaagaagagaaagcagtaaaaagaattttgagatacaagggaaaacaaaatcaatagcaaggagtcttgccacaagagctgaacgtcgtgagcatctctacaaatgtaacgtcaggtcagtgcataccaaactaagggaagaggaaataaaggaagaaatattttttacctattttcctgatttggggtagagaatgactagttgtctgtgcgctaaattcccatctttatgtgtaataaaaacgaaatgttcaagaagcagctaagcctccttgagttgatttaaaatattttcctt

SEQ ID NO: 51117 - DNA, 395 bp, Homo sapiens
  misc_feature 355, 356, 361: n = A,T,C or G
cgggccccccctcggggtacttctagaattaattaacgcggggataagcaattatgggcttcatttagcccagggtaagtgaataagtgataaagaataagtgacgatacaaaacatgcttgagatttcctacataataaggtatcggtgacgattaattttctgaattccatgtgtaataaactactttgatctgagatgtaaatcaaattaagacctcaaaattatttaaaagatcacattacattttattcaaacattcagaagcatgcattttaatcttaaaattaatcaagtattcacgtaaataattttttttttttttgagacagggtctcattcatcctcccaagtnnctacnactacactcatgtgccaccacacccgggtgatgg

SEQ ID NO: 51118 - DNA, 565 bp, Homo sapiens
  misc_feature 51, 520: n = A,T,C or G
ccgggccccccctcggaagtcttctagaattaattaacgcggggggtgagnaaaatagaggcaatcaggatattcgtcactgggagaaaggacaggtaaaacatggaggatatacagggtgtgaagcactatgctataggtagaaacaatctagagataggtggataaatcttaaaaacagtactgagtaaacaaagggaaaaaacaaaatgaaatctgtagcacaatactatttatgtaaattaaaaatacaaggtaatcgccgggtgtgctgactcacacctgtaatcctagcactttgggaggccaagtcgggcagatctcttgagctcaggacttcaagaccagcctgggcaacatggcaaaaccctgtctctaccaaattacaaaaaattagccaagtgtagtggcagggcacctgtagtcccagctacctgcagggctggggcaggaggattgcttgaacctcggaggttggggctgcagtgagctgagactgcgccactgtactccagcctgngtgacaaagtgagaccctgtctcaaaaaaaaaaaaaaaaaaaaaa

SEQ ID NO: 51119 - DNA, 507 bp, Homo sapiens
  misc_feature 34, 471: n = A,T,C or G
gggtaccgggcccccccctcggagtacttctagnattaattaacgcgggcagctacttgggaggctgaggcaggagaatggcatgaacccgggaggcagagcttacagtgagcggagatcacgccactccagcctgggcaacagagcaagactccgtctccaaaaaaaaaaaagaaattatttttagaaaacaaatgtgagtcagaggaagagctactttatgtcttgcactatgacaagtgctttatacgtaagatcgaaacagaaatctctcgatgtattagtatttatttcatattaaagataagaaaactaaagcccagagaggtcatgtagtacccccacatcagtgaggtgttgtgtgattccaacacacattttgcaaaatttatactcttcagttacaacaatttgctttttcatttaaaaattgtatcctatcactactgaaaacaatccctgaaattattntttgtagatgtatacaagtcaataatttcttaatat

SEQ ID NO: 51120 - DNA, 570 bp, Homo sapiens
  misc_feature 28, 479: n = A,T,C or G
cggggccccccctcggggtacttctagnattaattaacgcgggggcggggaggttcactctgaatagcattgcccaggcaagaccttacaaagttcatggcataaagaattaattctattttagaattacgaagaatacttcattttgtggaaaatttattttgcttttaagaggaaaacagttaagaacttagggtaccatatgcttttgaaaaaagtgttatgtacttccatgagatgtgggactcttaccatcaaggaggagatttttctgctcttaaagtggaggatgggggcattttatgctgtcccatcttctcttgtgttcgtcctaccctacctttctcagaatagagacctgagaggagggagtcctctctgaagcttttagggcagcagagtcattcatcttaggttaactagcagtacattttcttctcctctattgaacagcagagaacacttactaattcaggatntttaaaaagattaaaaattcatggctgggcacagtggctcatgcctgtaatcccagcgttttgggagtctgaggcgggcagatcacctaag

SEQ ID NO: 51121 - DNA, 578 bp, Homo sapiens
  misc_feature 28: n = A,T,C or G
cgggcccccccctcggggtacttctagnaattaattaacgcggggtgggggggatgaatggagggatggttggcagggtgagggtggaagaaataaatatgggtacaacccccactttccccttcttgctgtagagctccagaaagcacttatcaaaaatacaaattcccagatgacccagcaactccacttctgagcctatgttctctagactaattcacacacgtgtgatgtgccgatgtgaacggttattcctgcagcactgcaatgataaaaatttggagccgggcgcagtcgctcacgcctgtaatcccagcactttggggggccgaggtgggcagattgcctgaggtcgggagttcgagaccagcctggccagtatggtgaaaccccatctctattaaaaatataaaaattagccaggcgtggtggcaggcgcctgtaatcccagctacttgggaagctaaggcaggagaatcacttgaacctgggaggcggaggctgcagtgagccaagatcacgccattgcactccgcctgggcaacagagcgagactcagtctcaaaaaaaaaaaaaaa

SEQ ID NO: 51122 - DNA, 583 bp, Homo sapiens
  misc_feature 24, 517: n = A,T,C or G
cttctagaattaattaacgcgggnaaatattctatatcttgatctgggtagcaattacaggtgtttatacaaaaaatcaaaatcaagttgtacactttataggctttgctgtatttatgttagagctcattttagaataacagttttaaaatgcatataaagagatttccaaaggatattcaccagattttattaataacttcttccatatggtgggatttttctgatgatattttcttttcctttttgtatttattcgtaatctctttcaaatgattcacattttgaaaataaaaacaataaaaatactattctttttttgaaataaatctactcagtgacatcatcacccatcatattggcaaaaattcaaatgcttggtcacacttttttgacaaggttgtgaaatagcagacatgctccatcattgctgtgaaatttttaacaatttattcttaaaatccccaggtaggggggctgggcacggtggctcacgcctgtagtcccagcactttgngaggttgcggcagatggatcacgaagtcaggagatggaggccatcctggctaacacggtgaaaccc

SEQ ID NO: 51123 - DNA, 599 bp, Homo sapiens
cgggcccccccctcggaagtcttctagaattaattaacgcggggactggtattggtaggcctttaatttcccaattattgagactttgttagccagtttctgcataccaattcaatgccactcttgacatgttactgtttatatagtgttttctgctgtgttgtctgattttatacttcatctgctttaagctagtgtggttattctttgaaaaagcaaagtttgtatgctgagtagagcaagttttcgtcctttttaatgacgcttattaaagttcaagctttaaagaccgagtaaatcatcctctacttcccatacactaggtatggtacatatgccgttattattgcacatgttaatagctacatttaaaaagcttcacaaaccatgacttcttagaattgtgtctcaattggtttacttcaaagaaataccaaatgccccttttcttatgaagaccagtatgttatttctgtagctgtgaagtaaagtattatataaaccttaatgggtttagaggtaaacaaaatgttttctgatcattgtttcctggaaaactctgcctcatttccctaagccctccttgtaagctggttgct

SEQ ID NO: 51124 - DNA, 595 bp, Homo sapiens
acttctagaattaattaacgcggggtgctcactattctcttcctgtcctgttggctctcgcctcttgtctttattcttctttcccacttccctcagacaaagacatggaccgcggcccctgcctcgctgcctcatccctcatccttccttctgcacttccgggtatatacaccctagaaggcaacttgaaaaccagcttctgaacattttagattactattaaagaacctaaccctatctatttctttcagaaatacaaatttttaaccactgtagaaaaaatgttaactactaaattctacataattttcatcattgttaaatagaactaaacagtaaattgcattgctggctgtggagaagaggcaagagaatgggactcaggagctcacacaaagtcctcagaattctccatgtagaaggaaatggcttgtgaatatggagaggtggccgggtgaggattgcccctacctcttagaaataataggtttctcccttcctttctttttcccttccttctttctttcttgtctacacggtgaaattttgccaagcatatgcttctgctaccaaaggaggatgggtatcatctttc

SEQ ID NO: 51125 - DNA, 481 bp, Homo sapiens
ccgggccccccctcggaagtcttctagaattaattaactcactggaggtcacacagaaactagactcccatcacatcccaaatccattttttctccgtgacttcagcaagctactgaactctgcttttctctttccttaaatataagatgagaatgagttccagtccctacctacccagctgtctgaccaagctcatttcttcccgatttcctattgattgacattagacaattcaggcctgtgtcctggttttctttttttaaacatgaagcccccattcctgtaccgaagaaccaaagtggaccctgaccaggaggaattgaggcaccttgtagccttggcctctcacattgcctttccaggaattgacctgagacaccacaaatgggttattcaatgggagatgctgaagtaggccctggaaaaagactcctggaaccaaggctgccctttaggagccatcatgatggagactcatac

SEQ ID NO: 51126 - DNA, 511 bp, Homo sapiens
  misc_feature 27: n = A,T,C or G
cgggcccccccctcggggtacttctanaattaattaacgcgggcgtcgggctgagctgcgtccggataaatgtgacaggaagcagctcggacacactgatggctggaggccctgcagctcctgctgcttggcatgcgccgcgggcctgcgtgtcagagccgcctctctagctcggctcttgcggtcatgctggccttggtctccacatggctttgggttggctgttcttcgtgccattttctttctggctccgtctccatctctggagtgggaggtgtctgaacaggcatgcggagcatcaccaggtcccagtgccacgacccccggcacggtgggtcgccatgatgctgtgtggcctgccaggtgataggcgcccttgggccacatggtgacagagggtgcgagggtgccactaccccgtgatgagctgtaaacacacattgttatccatcccaggaaaacacaaactgcttctgttcctctttcttggcaggccaaaaaaaaaaaaaaa

SEQ ID NO: 51127 - DNA, 582 bp, Homo sapiens
  misc_feature 9: n = A,T,C or G
acttctagnattaattaacgcggggcaagatcggaagtaaatggcacactggtcttaccttccaagagttttcaatctaattggaagggagtattacaattttagattataataattataaaaacaaacattataggagctcagagggtttagagatctgtgttctgtagttattacaggaggcctctagattctaacttgggttagggcttgaaactacattgaatttgaatattcccagtttaaacatgcacgcaagtattatgtccaaagtagcatgaatactgacaacaccaaacatgaaacccagatttatttattctctatttagtcctttccctactctttagagcagaaagagaaaatccttgcttgagatagcaaattagtgctacactttttgggaaggccactggaatttaaacccggcaaaattccaatttttgtgcttgtaacctgtttagccggcagccagtgaaagctgttataattctttttgaattgaattttctttcgtattggtttaggtacagctcaagctcaaatgatagcgtctttttttctttaaaaaaaaaaaaaaag

SEQ ID NO: 51128 - DNA, 407 bp, Homo sapiens
tctagtaattaattgaacgacagggccagtccaaacacaaaatcaaagtattagttcaactacacacacaaaaataataagaacaaaattcagtgtcccggcactagcagttgttgcactgttcactttcaattctacacaatcctgtgctttcatagccatgagacttgctctgtgttggctacagatatgaacattataaatgggcatttaatagaaggattagaagtaccatctgttcctgagtcagcataaacagagaatttccaccaaccattttatttctttgcttatgaaacttgtttttctgtttttagaggcctctagggcaaatccaagactccaatcaacagcctgagaagcaaacttgaaataactaaacataatgcccgaaaaaaaaaaaaaaa

SEQ ID NO: 51129 - DNA, 560 bp, Homo sapiens
cgggccccccctcggaagtcttctagaattaattaaatgtacatccctgggatctgataatcacacctccaggaacctagcctaaaaatattttcttacacatgttcaaagacatctgcaaggatgtttgctgcagcattatttcaacagcaaaagactagaaatgacttaaatatctattaaaagtagaccagttaagtgagttaggttgcattcatagaatgaaacactatatagatgttacaaagaatgtgaaacatatattaatatggaaagctctccaagacacattaaagtgaaaaaatgcaaaaaacattgtgcttttttgagaaatgtccattcaagttctttgcccatttttaataagagtagtttcttgttactgagtagtttgagttcctttgtgtattttggatattagtcctttatccaatgtataatttgcaaatattttctcctaatctgtggtttgtgtcttcattttattgtttcatttgctgtgcagaagctttttattttgttgcaactccatttgtctattttcgctttcatttctcaaa

SEQ ID NO: 51130 - DNA, 609 bp, Homo sapiens
  misc_feature 28: n = A,T,C or G
cgggcccccccctcggggtacttctagnattaattaacgcgggcagctctctcagaggcaaaagtaaaaacatataaattatgtgttttcaaggagagtcaagcaatactctttgggaagaagccacggatataaaaaaatttttccgcatttgtctcacttctctaatctcaaggcttgagatgtatgtactttcaaaagagactcatcgaaatttgggcagcatgaagttgagccccctgttggtaaggaccttccaacagtgactcggtcttattggtgataagccctgtttatatgagctttcaaaagcctaaaaacaggttctttcaacatgacaccttgaaataaaataaacgcattgcaaacaccaactgcaataaaccaggctcacgccaaaatgcacacgtgcacatttcacaaaataagggggagacatttctagtgaggagcaatctctatgggaaggcaagcgagagcgcccacctgccaagggtcacatgctccagagcgcacaggattccctaagtgaaacaggccggtaggaagaacttgaatagtcaaaaatctacaaactcttcagaggtacagatcatcaggccataaaag

SEQ ID NO: 51131 - DNA, 550 bp, Homo sapiens
cgggccccccctcggagtacttctagaattaattaatggtttcatttaatggtaatttagttttcaaaacctggaaaggcagagggtaagtagaaaccattttgagtatctgttcagtgccagccagtctaagtgctttaaaacctataaatgtacagtagtagctatttcagaaaggaaaagtttctgggacagaaagctgtctggagtatggagatcctttatattatttgaggtttcagtgttttttttgtttttttttaagagatagggtctcactctgttgcccaggctgcagtgcagtggcatgttcatagctcactgtaatcttgggctccggaacgcaagcaatcctcccacctcagtgtctcaagtagctggagctacagatgtgagctgtcactctcccagctgatttttaaatttctaaaatttttcacagggaggatcgcttgaagctaggagttcaagaccatcctggttaacatgattgagaccctgttcctacaaaaagttagccaggtgtgggtgcacacacctatagtcccgg

SEQ ID NO: 51132 - DNA, 377 bp, Homo sapiens
  misc_feature 16: n = A,T,C or G
cgggccccccctcggnagtcttctagaattaattaacgcgggggtggcataaacattggaaaggacctggaccaatgtggggaggcacacagcaaccagctaagggccaatttggtcctggggaaatacatatttctcggaattagcaaattttccttaagatggcagtcatccttattattactactcagtgataagaagaaaaataaatgtagggcatttcatgaccgccatagaggtaacacttggatgattttacagtttgttttctttttaatgcagctataaatgtaaacacaggtactacatttacttgaagcactcacacacacagacctggcatgcttaaaggtccgtaagcccaaaaaaaaaaaaaa

SEQ ID NO: 51133 - DNA, 508 bp, Homo sapiens
cgggcccccccctcggaagtcttctagaattaattaacgcggggagggcttaaattaggtgccactggaaccattcctggctcggcagatacttgcttctatagggtgattagaggggtgttttgagagaaggttcatttgaacctaattgtctctaccactggcacttttattatctattgaactgttgctcagatgaatttatcaagatagttttaatgaaccagacgtcaaccagaaactttaaagactagaacgcagtataaagaattttgagatacaagggaaaaccaaatcaagagcaaggagtattgccacatgagctgaacgtcgtgagcatctctacaaatgtaacgtcaggtcattgcataccaaactaagggaagaggaataaaaggaagaaatattttttacctattttcctgatttagggtacagaaggactagttgtctgtgcgctaaattcccatctttatgtgtaataaaaacgagtgttcaagaagcagtt

SEQ ID NO: 51134 - DNA, 465 bp, Homo sapiens
  misc_feature 28, 45: n = A,T,C or G
ccgggccccccctcggaagtcttctagnattaattaacgcggggnaatctaattaaaccaattcatattaatgtgtaaatagccaaaagtcctttggggctcccattttaattctgacttaaaatgtataaatgtacttatacattttaagtcagaatgtattaactcaggctgggcacagtggctcacacctgtaatcccagcactttgcgaggctgaggtgggcagatcacttgaggccaggagttcgagaccagcctggccaacatggccaaactccatgtctattaaaacaaaaagttagcggggtctggtggcacactcctgtaatcccagccattcaggaggctaaggcatgagaattacttgaacccaggaggcagagtttgcagtgaggcaagattgcaccactgcactccagcgtgtgtgacagagcgagattctgtctccaaaaaaaaaaaaaaa

SEQ ID NO: 51135 - DNA, 611 bp, Homo sapiens
cgggcccccccctcggaagtcttctagaattaattaacgcgggtgatgaaaagtacatggtgtgtggtgagagtggctcccagaggaggggttgagttgtattccagcagggttagttggataggggcggagggaaagttcaggacaagagaacatctcacaaaagtgagaacttgtagaatatcctgacttgttaggtgaattgtaggcagtctttatgtggtcatatgtgttgggggcaggatggggaaggcgaattcggtcagatgccgccaacgaggcagcaggagccagagcactaaaggccttgagtgctgacctaagggattgaaattcctcctgcaagtagcagggggctactgaagcttgaagtgaggtatgacacaatctcattttcatcttacaagctcattttcatgactgcaatatgggcaagaaagacagggtagtccattgagtagattattccagaaatccaagttggatgtaatgcaacttgctgaaccactgaaccagagcagtggttacgaagatgtggaggatagattcaagagctagaaaagagatagagggatcaggacttggagtggtttctttattcattgattcgt

SEQ ID NO: 51136 - DNA, 608 bp, Homo sapiens
cggggccccccctcggggtacttctagaattaattaacgcggggagttggttatagattccagcagcgaatgctaagaaacaggtaggggactaagaaaactctaacccagacaccaacctcttaagaataactaaacataagaaatgaaataacagcttcactgtaggcttgagcaagtgccagctgacacacattcccagtggaatcttccctggagctgtatcaaataatcactgagtaaagagggaaactaaaccctaaggcaactccatttagacttgctatacataattcattgaaaagtttgacaaaaacagatgcaacgtattggatacaggcagtatgaagaaaacctctgagaagtaaatgatgaaggcatgaaggaggtaaaccaccttcaagtagtcaacccaaactgttactctacccatacagggtcactggatacagagtcctaaatgatcacccagaatggctccttccttatgtaacatggaaacattaagaaatctagacaccacaggaacaacagaatgatctggcctatgattgggccattttataatgctaatggttaacactattttagaagaagtctatatcaga

SEQ ID NO: 51137 - DNA, 478 bp, Homo sapiens
gggccccccctcgaaagtcttctagaattaattaacgcggggggctcccagctcataaaaaagatcaggtcagttagagattaaataaagaatccatatcctcttcaaacatcctatttgtagtaagaataatgttggccaggcttttggtatcatctatgtattaaaatagcagtgttggccaggcacggtggctcatgcttgtaatcccagcattttgggagagcgaggtgggtggatcacttgaggtcaggagttcaagaccagcctggccaacatggacaaaccccatctctactaaaaataagaaaaaaaattagccgggcatggtggtgggagcctgtaatcccagctattcgggaggctgagacaggagaatcacttgaacccaggaagcagaggtttcagtgagctgagatcgtgccattgcgctacagcctgggcaacaagagtgaaactccatcttaaaaaaaaaaaa

SEQ ID NO: 51138 - DNA, 588 bp, Homo sapiens
  misc_feature 547: n = A,T,C or G
ggccccccctcgaaagtcttctagaattaattaagagcaactgacaaatcttgaaatcttcctcccagtacttgagatgataaagtatttttataagaaaaattagagcgaattcatcaaataccttaaaaaaatattaagggtaaaagtatttcccagggtgttctcatgttttaatttgaacagcagtcctgtaaaataaatgatcataatatggctttcaacagaggggcctatggaaaaaaatggaactatcacttactcaccttattggtctatgtcctcacgaatagaatagaagatgtctctacagtgcatcaggactaagaagacatgtcatttgccccaatctgccagtgtggtcctaagtttaactgtaccacaatctgagcattgttatgtatccactcataaacctgatctgtaagggacacaatacaaaggttactctttattcttaatgtgtagctgcaagaaaagaagcaagcgcttacttacctgctgaaagatgaacactgccacctgctgagtaagagaactaacaaanatgtgcaaagttatgcacttttaaaactgtgacattttcta

SEQ ID NO: 51139 - DNA, 517 bp, Homo sapiens
attaattaacgcgggggctctaatatgaatttgtatgcactattaaatcaaaattcaccaaaacaaggagttttatggtaacactttaaatctaacatatttttgaaacaaacattatgtgagcttaatatcactaaaggattctgaacaacaacaaaaaataatttggaggaagacagaaaagtgaaaagtaacataaagttaaaacactgtagaattcaaaaccaaagacaagtgcctctttaatttttccaatacagaaactttaaaaagtgctcaacagagtaaggccgggcatgttggctcaagcctgtaatcccagcactttgcgaggccaaggtgggtgaatcacctgaggacgggagttcgagaccagcctggccaacatgatgaaaccccatctctattaaaaatacaaaaattagccagatatggtggcacccgcctgtaatcccagctacttgtaaagctgaagcaagagaatcacttcaacccaaggtgcggaggttgcagtgag

SEQ ID NO: 51140 - DNA, 605 bp, Homo sapiens
cgggccccccctcggaagtcttctagaattaattaacgcggggagtataatagaagcagcggagatgaggtagtagatgttggtgcttcgttctctctctctggaccaacgatgactgatacatccattaaatttcagcccaggctgattgactgagtggatttatataaattaaaaaaatgcaggtcatataccttttctgatagactgtaaatgagaaatagggattcctttaaacctcaaaggaggaaatccataggcgaggctttctagtcaataaagctctacagcatcactcttcttgctgtgtttgtacaataagttttagttaatagacaaatattatgccagcctctccctgactttttcagcaagaggcaatttgtaaattaactcacatggtgttgaaggttttccagcttttgttgcagtttgaactcctgcattttagacatgaagggggcagaaatcatccctcgttccattttttttttcagtgtaacaagtgaaaatggcattagttaaggaacaatgacttattcacacccattctctcagctccatgtccatttgtccattggaatgagccacttatcattcttcca

SEQ ID NO: 51141 - DNA, 595 bp, Homo sapiens
  misc_feature 8: n = A,T,C or G
ccctcggngtacttctagaattaattaacgcggggtggggggggtcagaaccagagtaacaatctggggaaatgtatttatgttagcctgtcgagctctgttgagcacttccgtcaaataatggaattataccaccccccctataaaagataccaggtggagaatagcaaagagaagggaggaggaggtgaggtgtgttcagaaggttgatcaaataaaactgaatggtaggtccttggctacaccaaatgtgggttttgttttcttttaattttgccattaaaaaaaatgcggtgtcactccttcaatctttctacaattctgcatggttgaacatttgaaatgagtttgtgtatcaccctcaggcgctgattcagacttgattggggcaaagcagactgcatgtgcttatttttatccacgtcatttgggacgttatgtcgccaaaggaaccaaaaatgtgctgctctattgccaaattatcacctatccttttatcagacagggcgatgatcctcaacaagttgtgcgaccttagtgtaacagcaatgtcaggtcaacttgagaaagtgaagagagagccctagacacaaaa

SEQ ID NO: 51142 - DNA, 583 bp, Homo sapiens
cgggccccccctcggaagtcttctagaattaattaacaaaataaatcaaatggaaaagattccctaaatagagctttaaaagtaagtctatgtgtgtctgactgccatgactaattatgtatccatgtaatgtgtgttcaatttgggcttatttaaatagcagaaatgctcattagctgcagtatatctgtgaagcttcagtaaacagtttaatggtttttatgtttaaccaatttcataagttcctgtaattttagctttagcagctcattaatgttattttttgatatccatcttaaggcttttttttttccttgtcaatcgtcagtaggcacacttcaatgccaacttaaaacacacagtagaattttgtttaaacaattttagtacataagtaaatgtgcaattcaaaagtatagtttctttatatagagaactagctgtattatcatgcactcaaaaaatatcaacattggcaaaggctatatctaatggggataaaactataataatggaaaacatttattgagcgctttcatcagcatgtagctggctctaggctaggcactgtatatactatctc

SEQ ID NO: 51143 - DNA, 588 bp, Homo sapiens
  misc_feature 29, 570: n = A,T,C or G
cgggcccccccctcgggggtacttctagnattaattaacgcggggatttacaccacagaacatcttccaaaattttcttggcccatctagcttccctgaatgtcacctggtggctgtccctccccctctctgtctcctccccttctctctaagtcctttagattttagattctttcttcccccacatttcacagagagtcctttattttgtaaattaatctgccctctgggtttctttcctctcaggactttaatcattacacaccctgctcagggcccctctgctcccattttggcagtacaaacactgacttcccaagaggttgggaaaaggagaaaagctgtatatatttatatttttgtcctcatcaaacatataatgttctataattcgtttaaaaataacttgctttcgggtgggcacggtggctcacacctgtaatcccagcactgtgggaggccaaggtgggtggatcacctgaggttgggagttcgagaccagcctgaccaacatggaaaaactctgtctctactaaaaatacaaaattagctgggtgtggtggtgcatgncctgtatcccagctactc

SEQ ID NO: 51144 - DNA, 589 bp, Homo sapiens
gggccccccctcggaagtcttctagaattaattaacgcggggggggaagtgtttttcactccctaaattctggaattttattcagaattaaagggaaaaaaaaaagccacatgtctactgatttcactcttaggacttatctatcttagtgccaggacgagagtcggcactgcggatctcaccacggcaaagggggtgctttaggaggactgcacaatttattggtcaccatgaattagttcccagtaaattatacaacacacattgtctcttatctcttgctaggggacactgctgatttcagagataaatgggattgactgtttaatttcactagtaaacaaacttgtaggaaagtggaactagcatgcggcgtccgaaggtctcttagtaccatgaaacataggatgagtgtgaaggtgcttattatattaaaaaattaaggtgattatcatatttaaaaaatcaagcaagaagaatgtttctaacttaagaccagtaatagctgcatttaatgccagaattttccaaggaaatgaaacaggtcaaacagaaacttcggtgaagacgtgctctggggagaaaccaa

SEQ ID NO: 51145 - DNA, 601 bp, Homo sapiens
  misc_feature 512: n = A,T,C or G
cgggccccccctcgagagtcttctagaattaattaacgcggggcaagacataaaatcaagggaacatgccacactactcacaaactgcccacttacggaattcagtgaaatttcactgttgacgatctgggcgttgctgatggggaagttacttaaggaaccagaacaggattcgtcagtgtcgctccgtatcactcaaggacacaaaacaacatgtctagtccaccattctcagagcaaaactaatggccatggccagccacagtggctcacgcctgtaaccccaggactttgggaggcctaggcgggcagatcacctgaggtctggagttcaagaccagcctggccaacatgattaaaccccgtacccactaaaaatacaaaaaattagctgagtatggtggcacaggcctgtaatcccagctactcaggaggctgaggcaggagaatcgctcgaactaggagacggaggttgcagtgagcccagatagcatcagtgcactccagcctgngcaaaagagtgaggctccgtctcaaaacaaaccaacaaacaacaaccaaaaaatgacttcctttcccaatgtaaaattttcatgttttt

SEQ ID NO: 51146 - DNA, 601 bp, Homo sapiens
ccgggccccccctcggaagtcttctagaattaattaacgcgggcaatgaatgtccttctagcgatataatggaatttagtccctactctgagaataatgggtgggacttagagagtttaaagaaacgagaaaaatgggtgcttccctacaagtcttatgatacagtagaaagacttgattataagatttgattcgttcactcgatattttacattatagtaaggaaataaaagctatttcttataaaaaggaagactgaaataccaatattaaactgcatgatgcagactactaaagaaattcaataaataaaggccatgtgatatttagaaattggagaaagcttggtgagtggaagaggaaatagattttatcattccttcgatgatatcatgtaatttagtagttggagaatatgagagagtttattcctggaagaagaaaataacatgagcaaagtgattaaggcactagtaacttgtgcactgtgaatccccagttcctagggcaataccttacacatgagaccttcaatgcaatttcactaaatgaattaaaggatatcagcctaagtgaagtagaaaatgtgtataattgtagt

SEQ ID NO: 51147 - DNA, 494 bp, Homo sapiens
  misc_feature 27: n = A,T,C or G
cgggccccccctcggaagtcttctagnattaattaacgcgggcaatgtcctcgtttctgaagtgaggaaactaaattctcagtctcatagtttctctgcggcaaagctagtattgttgaaatcattcagggcttcttactgggcagaatctggtaatccccaagccttctgcaggtcagattgggtgagggagtagccccagtagttcatgatggcactgctcctgtcttgagaagggtatgaatggttctccttgaacattctcttccaaactggaaagaactggcaaaagaggctgtgaatacaaccacttagccatcttagatgggaggtaccagtgataagagatcagctgggtgtggtggctcgcgcctgttatcctagcactttggaaggccatggcaagaggatctcttgatcccaggagttcaggaccagcctgggcaacatagtaagatcccatctctaaaataaaaataaaaaaaaaaaaaaaa

SEQ ID NO: 51148 - DNA, 553 bp, Homo sapiens
  misc_feature 24, 73, 529: n = A,T,C or G
gccccccctcggagtacttctagnattaattaacgcgggaggagcagtacctaagaaaggttagaatcacttngaagaaagaatacagaggatgcatggtacaaatgaggctacagggtcttataaaccagcgtcaggactttagagttcacatgaagagaatggaaagccactagggggttttaagagagagaacattataagaagtgtaatgtaaaaagtgactgaaggagagtgacaacaactagagataagaggcttagagatggccatggtttgaactatggtggtggcaaaaagatgcagtgatgaagaggctatgtaaagatattcagaagatttgaaggacagagttggtaatgtgtgctatatctgcaaggaataaaaagaagtcaaagacaactcctatgtttttaggctgcacagctgtttagatagttagacagtggaatcaaaacacacattcatgtgctcatgtacatacacacacacacaagattatgtaaaagaagccagattaatggagcantaatgagtcttcgctatggacact

SEQ ID NO: 51149 - DNA, 532 bp, Homo sapiens
gggccccccctcgaaagtcttctagaattaattaacgcgggttataataaacatgatgatatttaaatcactattaaaataaaaagtactcatccatgtgtacaacctgaaatcacctttgatggtatacacactacattttgggaaataatgtcttattgttaaccatgcctattgtggtcatttcatatcccaatgctaatatggtacccggcacatagtagatgtccaataaatacctactaaagaagattatgataatatacagtcattattagaagagacgtgtttaataaggaagacaggaccgtgtgattgctagaggtcagttcagtaatattaggactaaatgtgacatatcagccaccatgcaccagagcaagaatcaaatgtcccaaagctctcaagttcttcaagttccaacattaatcttattcactaattaagaagtcctactgagcatgttggtacacactaagtgctatgaaagctagaagaagtatagagcaactggccagctaatatcgtttaa

SEQ ID NO: 51150 - DNA, 599 bp, Homo sapiens
  misc_feature 522, 533, 558, 575: n = A,T,C or G
ccgggccccccctcggggtacttctagaattaattaacgcgggtaggatggtcaatgacaattgaatattttgtggaaagtaatattcagtaaagtaaatatatagtagttttcagtaaaaataattgtaataagcaaaaaatcatattaagaaaaaaataatggcaaagtattcatgcagtgagtgtgagcgaattgctgagggatagcagtcaatgtaatttttatgcagttaataatcatcaacacattccatccattgtggtactgttttcactgttgcttttatatgtgactcttgatggcatttgagaatcaatgtacaaaaatatggcaaaagagtgtaagttgtacatatatatatgtaaaaagaaaaggggagtaatattctgatacttaaaaattcacttgctcctttatttacaaaaattatttttaaaatacctacatactattttcattagtaaaataccaccatgcctccaaaacacaattctaaaaaacctggttataggtgcatgncataattacanaatgcataataattaagaaactctntacatatcacatatcanaatattacagctatgaagaaaaaa

SEQ ID NO: 51151 - DNA, 593 bp, Homo sapiens
  misc_feature 17, 28, 581: n = A,T,C or G
cgggcccccccctcggnagtcttctagnaattaattaacgcggggccatatacaggtggtatattcattatctcagctcactttgtcagaaataaatcactttttgttgtttttagtaattaaaaataaatttagtattagttttctttccccttcatttaacagttaccatgagtaattgctgtagaatttcatgaaatgtgtcaggcagactgctgcaattcataattgaagtggtttttgctgtttcctaacaagattgtatttttcttttaaccagaaatgattatttcctaaggagttgattttagcaaaatattaaacatgactttttgtggacaaatgatagagtcaaacttgattgagcacaacacaactttgcaatgtgttttgaattaacaggaatccaacaaccaataacagaattacctcaagttcaaaattaaatagataaaacctatggatttatttctcttattattaaatatttaatggagagttaaagtcaacagaagtatcagatttctcattacaagtaacatcagaagtgacgtgttatctttggatcagacattttaatntataagtgagga

SEQ ID NO: 51152 - DNA, 577 bp, Homo sapiens
cggggccccccctcgaaagtcttctagaattaattaacgcgggggggggggcgggtcttagttcattctcactaagattaagtctatggtcaatactagtttgctagtgtttcctttatcaaaccatgcttgttattaggatcaggctgctcccacctcacttcctatgtctatgtgatttttttgtactcacaaaaaggattttcctctcttgcattccaacacaaggagttccttgacaatttaatattatataatatatgcacctggaaagatgtttgacatctaatttttgacttacacttaaccacatatttccgctttcatttgaaggcaaaatggaacattttcttgtcaatttttttttctagattatgtgaagaagaaattaatagtcttgtcccatgttaatctaaagctcttctgattacataaatttaatagagggctctccctaaacaaactttaattccacacttaaagtatctttacaatgacaaaattgttctgcattctatagatattggaatataacacattgcataatttagaggttaagaaaatggactctggattc

SEQ ID NO: 51153 - DNA, 487 bp, Homo sapiens
taattaacgcgggccctcccaactactctatgaggtaggtactaatataaattccaacaatgaggaaactgaacaacaaaagagggtaaacaccgtgtgtcaaatgataatcagtggggctgagatttaaactcaaggagtttagccccaactctcaactactatgctatagctattccagcatctttgacatcaagctcagactattaactgctatgtgaccttgcctcaaaaggaacatttatgccactgtgtttatagtatatgtgtgtgtacatgcctgaactcctaggctatggctttctcatcacagtgcatcctacagtgtctaattatctaatactgttttatagacctaggttttcaataaatattagaggcctttcacttatgtactttgccttaaatcaacagaaaactattaagagacaattttctatgactctgtcacatttctgcacatcttagagaggcagtgacaccattt

SEQ ID NO: 51154 - DNA, 509 bp, Homo sapiens
  misc_feature 24: n = A,T,C or G
cccccccctcggagtacttctagnattaattaacgcgggccccggacaaaccaccacacctgtcccggcctctgcttccttatgcatcaacaggaaggtaataatacccatcacgcagggcagtggtgaggctcagaaagcatattagtagaccacgtggaagaattctgcttacccctgttttgaaggagcgattaatcatgtatagaaattaggtgtgagtctcaggatgttagaggccaaggtgggtgatattaagatgtaattccatcattgctgctgtgataatcatcatccttgtattcttccgatttcctcacctcctactttatttaatggtttcagcaaacctgtgaggaaggtaaggaagggcaaataataatgatgtccattttagagaggaaagaaaggcaagaagagtttaaatatactgtcaaacgctgcctggctggtttgcatgacagggttttctcttcaacctagttcaggagctgaacgtccccatcttc

SEQ ID NO: 51155 - DNA, 586 bp, Homo sapiens
  misc_feature 27: n = A,T,C or G
cgggccccccctcggggtacttctagnattaattaacgcggggggagaggcaacagaagttagcaggtaaggtggttttgaaaagagcaagaaggttgaaatgtcaacaactgtatctttctcaagtttttttttcttcatttatgattcaggtatttgaaagaaggcactataaagaagcagacatgcagcatgccaaaaaatccaaatattttccagattgtagaagaaaattagattatgttgaaaataattaatgataaaataactttagtgacaaatattgagcctgcatgttcttgttctgtatgttctatcatctgtatattcacacagatgatagcctctgtgttagaggtatagttaatggtaatttgatctatccaataatttaataagtatctggaccatgtgttctaatctatgagatataagtgatatacactttgaatggttctacctgatgagcccacactaccataactaattctacttgtgcatctagcaacagctacacagatggcaagtcatagttgtctaggaataattaaccttgactagacagtgcatgtggcaaattcaacct

SEQ ID NO: 51156 - DNA, 584 bp, Homo sapiens
  misc_feature 514: n = A,T,C or G
cccccctcggaagtcttctagaattaattaacgcgggcctgaacatatcccttggtgtgctttcaccagtatctaggcaaatttctagcttgtcttttaaaatgtatctgcttctgaattgctgggctaattaaagaatcatatggtccttttgtaattaaaacaaatccaacgaaacgcattcaaattgccaaagtaccccagcagcaaagtggagtcacttactctctccctctcctgcctccatgaagtgacatattcttcctcctctgcgggcacagccttgaagctcacgatccttccactgctcttccctctggaatgtctggaaacaatctgaagcctcgtgaattttataggctctaagcatccatcagctgacctaatcaatttcagagacctgaaagtcagtgttatccccggtactaccaaaccttcacccgtcggaaattggaatgggaagattggttgcagtccatttctccagagaaaatgctctgaattgaggaggaanaagtctagtcagacccattttcattaaagaatgagaatccaggaggcctgagagagctaataaaaagagc

SEQ ID NO: 51157 - DNA, 554 bp, Homo sapiens
gggccccccctcggaagtcttctagaattaattaacgcggggtaactggagacttgctgatactaaagcagagttgttctaacttatctctgtattctgacttgtcagttacagcttgtgacttctaaaaataatgagaagtactagtgacatttaacagacacaactcactgtttactgggtatcacaaactgaaaacttactacctgcccagagaaaaatagcccattggatattgctgcacaaatttaactccacttatttcattacagaagcaaaaaatatcccctaaaatgatgactccttttcattgtgctatatgccaaagtaattatgactctgcttgatttttctcttctgagaaaaaagtatctttatttgctttatactaattagaactaagacttcacataaaatcaaataagtgggtctgagtactgtagctcttgaagcattccacaaaaaatgttcataggaaatacagtgtaactagttttgggctgtagaaaataatttacaattagtatttccaaattagtatccttttttttttt

SEQ ID NO: 51158 - DNA, 512 bp, Homo sapiens
  misc_feature 25: n = A,T,C or G
ggccccccctcggaatacttctagnattaattaacgcggggatgcctgtagtaccagcactttgagagctaaggcaggcagaccacctgaggtcaggggttcgagatcagccctgccaacatgatgaaaccccatctctactagaaatacaaaaattagccatgtgtggtggtgcttgtaatcccagctgatctggaggctggggcatgagaattgcttgagtcagggaggcagaggttgcagtgagctgagatctccccactgcactccggcctgggcgacagagaaagacctcctctcaggaaaaaaaaaaaaaaagattaaattattgactttatttacattattgtccattttattacatagacatgtagtcagtctgaaacaagaaatagaaacatatttaaaccagactaacataggtgaaaggaatcgaacaaaagacaaaagattatattggaaacgtacctggatgtttcacagaacccaaatcggtggcaaaaggaacagtc

SEQ ID NO: 51159 - DNA, 412 bp, Homo sapiens
cgggcacccccctcgaaagtcttctagaattaattaacgcgggctctcctttctcattaaagaaacattatatggatagtcctatcaactgtattaataatcagcaaatgtaatcaatctcaatttctatttcccaatcccatgacatttcactgtcattttctgctcttagataggcaataaatacaaaaataccacaaacacatacacatgctctaaattcatctgcagttttaaatgtgtgtgtatggacatatataaataaaattacacttgactcttaaagttgagagaaaactagtttagttattctcaataaatccttttaaaaagtcagtaaaaagcatttgttaaatgtattattcaagataaatataaaaaaaaatcacaattccccaaaaaaaaaaaaaaa

SEQ ID NO: 51160 - DNA, 612 bp, Homo sapiens
ccgggccccccctcggaagtcttctagaattaattaacgcggggtgctgctgccgaccatgtctgcagtagatgcagactaggacacactaaaggctatggtcagcatcaggctctgggttagtgctgagcaaaggcaagtctcatattttagacttgtcagttcttattagctccacatggagtgaagggagagtgctgtgatgggcacttgaccaagcaaattaagctaatttagccctaatctagtaaactgcagagagggtagggctccaggctctttaatttgctgctttattcccatgcagacgattaaacgataacgatgatcttttttaatggggattttttaaaaatctggaattggaattttttcagcacaatagagaaaccgttcattcagttgttctaataccttgaaattttacttataatacattaattttcaaacataatttgaatctgaatcccagattttacatgaatttgaataacagaggaatttggaacacctaaattatatttttgacaagaaatgagtccagggttgcattttgggaatataccagcagatggcaatgtctgacaaagagttttgctagtttctaccttc

SEQ ID NO: 51161 - DNA, 312 bp, Homo sapiens
cgggccccccctcgggagtcttctagaattaattaacgcggggggaaccctaattttaaaaactgaacacaataaaaatctatagacaaacaatggaattacataaattagctgagacagttcttagactacataaaaataatttcttgaaagtaaggtttcagtagtcagcaaatcctttttttttttttttttttttttgagaaagagtcttgctctgtcaccccaggctggagtgcagtggagcaatctcggctcactgcaacctccgcctcccgggcacaggcaactctcccccaaaaaaaaaaaaaa

SEQ ID NO: 51162 - DNA, 595 bp, Homo sapiens
  misc_feature 27: n = A,T,C or G
cgggccccccctcggaagtcttctagnattaattaacgcgggtccccacccttgacttgggtttggccatgtttttttgttatggccaacagtatgaggcagaagtggtaatattccagcagcaatacaagatcttaagagaccttgtgtgtttgcctcttatctctttgcatccctgcaattggcatgagaataatttccatcagggagcctctccttcagaatcagttccaccatgagacatatggaaacaatagagccagacagtcctgcagattgagcaaagtaaccataccagcccagcctagataagccaactcccagctgacccataaaaatatgaacaggccaggcatgatggctcatgcctataatcccagtactttgggaggcttgagacaggaggatcatttcagccccagagttcgagaccagcctggaagtacaaaaaattaaaaattagccaggcacggtagtgcatggctgtagtcccagctacttgggaggctaaggtaagacgatcacttgagccttaagcctaggagttcaagcctgcagtaagccatgaatcgcaccactatactccagcccaggc

SEQ ID NO: 51163 - DNA, 484 bp, Homo sapiens
  misc_feature 16: n = A,T,C or G
cgggccccccctcggnagtcttctagaattaattaacgcgggggcccctcccccttcccctcccctcattaccatgtccccatttccctgtcatctcctcagtccctgtgtctccctgttgtcgtctttcctgggttagacaaaggaaagatgttactatggcttttctccagttgctatcatagaaatcactattgcttgggaaggggctgcagactgaccttggttgagagagggatgctgcaggaacttcctggactggcttaaggtgacaaaaaacaaaagtaaaaatatgtaatcatgagtccttgtatctagtgatgtaagcacaggcaatacccacccaacaatagagcttcttggtgatgtggatataaagaaggaaaacagatttgtttttgttgttggtattgcaatatatacatcagataaataaaggatcacaatgtcaatttatattatattaaagggaaaaaaaaaaaaa

SEQ ID NO: 51164 - DNA, 599 bp, Homo sapiens
gccccccctcaaagtacttctataattaattaacgcgggggaggagctttggaattccacatttctactgttataaaagacaggacacaatatctgtatagtagacaataacaaagatccaaataatatcaacttgagaattggcatgtttaatatattcagcaatattcacaaaaatgattcaaattttacccttgttttctaaacctccatagatgatgcttatatgtatacttcatttaacattgttaagctaaatatattagtcacagttcctttggaggattctgggctttgtgcaagtcagaacttgctcagttggaagatgctgagtggagctcaagttaggaagaagtaaagaatgtggccttaagaaaggacactttggccaggtgcagtggctcatgcctgtaatcccagcactttggaaggcctaggcgggcagatcacctgaggtcgggagttcaagaccagcctgaccaacatggaaaaaccctgtctctactaaaaatataaaattagtcgggcatggtggctcatgtctgtaattccagctactcgggaggcggaggcaggagaatctcttgaacccaggaagt

SEQ ID NO: 51165 - DNA, 145 bp, Homo sapiens
gtggatgcttgtaatctgcattacccagaatgcactaggcttttcataacatcactgggcaatggggaacagtggtacaaagtaatgtatgtgatgtaactagttgggaagtgctggataaaaatctatcaatccctgcttccca

SEQ ID NO: 51166 - DNA, 374 bp, Homo sapiens
  misc_feature 23: n = A,T,C or G
ccccccctcggaagtcttctagnaattaattaacgcgggccacccaagtatatacctgctactgaatagggttagtaacttgtccacgagtgaagctttttgagacctatcacacccttatcttttaaagatatattgtgctgactcatgcatggagtgtgtgcactcctacatgcaacactgaattcaccacaaaaggaatttcaccactaaaggaatacccttaaaatattcaccattgaaggaatatcaaaagctatccacaaccaaagagcccatagtagagcctcggcccactaaacagactcccaaaatgaagcaaaacactcatacacaacatataccacatacataaccccaaaaaaaaaaaaaaa

SEQ ID NO: 51167 - DNA, 557 bp, Homo sapiens
ccgggccccccctcggaagtcttctagaattaattaacgcgggggcacatagctgaagtgcctttccctggatctttgccttctctctgaagaccctccctgctacctttgtagttaggtgtagctaactgaaattgtaggtcaatcacagtcatgagattgaactctagccaataaatgtgggcctggcccataaacttactctctatgggatactcctttggttttcctcatctgccagctgaatgcagaaaattttaaggagagcagagctaccagatgagaaggacctgggttagtgaatgaccacatagacagcgtccaaccaggggcacccacattgggctgtgacatgggcattgtcttgagccactgatagtttggtgtttattacagcagcatggcctggctcacatatcagagaggggcagtaagaggcacagagtgatgctcagaagaaagcgagtacggttccctgaagaaggaggggtgacgggcaggcaggatgttaaatgttcactccagaaggaagttgtgagccacctcgagtgtcaggc

SEQ ID NO: 51168 - DNA, 618 bp, Homo sapiens
cgggccccccctcgagagtcttctagaattaattaacgcgggtagctgcgttgatctccttccaatacgtgtcatccttgcttggtccttttctgttagctgcgctggagttaagcaaaacagaaagtaaacgatcaaactcactgcagtttgcattgaaaatgccgtcgctgaaaagcaggaacggccaatgggaacattttgctcacctttcacccttattggatccgttttccagagtgtctgtaaagaaaagcaaaaattcaattatttttatgtttttcctttcttttctcatctcaggagtttcatcactaatgaccagaagtaaaagttcttcaggaaatatggttgaaaattagttcgcttttaataaagataaagcagtttatattaagatgcaaaaaaaattgcaaaggggcagaagtaagatgacagtgggtagtaaagaataaaaggtagctctcatagatacacaaaaatctgaagttatttactctgagaaattgggccttttggatcaggagacaaacagcataaggaaaagagtgctgactgtacctggggccaggttctggccttgccctactacccacttgcagtgtaacctgggggcag

SEQ ID NO: 51169 - DNA, 387 bp, Homo sapiens
cggggccccccctcggaagtcttctagaattaattaacgcgcgtgcgttgacatactgttaacttgtgcttgcaccactgtgccaaaaatttagtagaaatgaggggaagtggcagcttattagcctaagtcacggcttgatgtagtaaggacacatagggacacctttccctccttttcttatattcaataaataaagtgataaatgagtctacacctgagaggacctgccattcacactgcctacatacctttttatcactccctatgatctgtctttactatcattcatgcatggggaggcctaccaagtcccaccttagggattctattgtttaaatcccttgataaactgagtaccaaagcccttagactgtgatgcactgc

SEQ ID NO: 51170 - DNA, 602 bp, Homo sapiens
cggggccccccctcggaagtcttctagaattaattaatccatgtaaattctcctagacaatttccagggttacatgttaattttcccctcctctccttctgtagcattctactcagtgatttccaaaatgtgatcggtgtcagagaatcttgaatgatgctcaaagatgaatatcagcatattccttgaattccctaagtgagtcatttctacttatatccatttgcatatgcatcttatgcatatttataaaatatatgtatatgcgtatatttttatatgttgatcagcgagaactacttctgttctatactaactcattattttatttttatgaataactggtgcccacgagacagtctattggagtaacgttaggaattatcatcccttaaagtaaaagggactatatagatggatggaattttattttgtatttattaatcctttttctcaggggtcattgtaagaggaaaaataatatgattcataattccacttattatagaattgcacatacataaaaaacaataaccagaaggttgtatttgtcatttaccctctcaccctcatggcactgcctctgtgatatcctgtctctg

SEQ ID NO: 51171 - DNA, 611 bp, Homo sapiens
  misc_feature 28: n = A,T,C or G
cgggcccccccctcggaatacttctagnattaattaacgcgggggggctcgaaactgaggatagactttagtagcattccacgaaatcctcacccagaggggtatccttgctagagtaggataactgaatactgattaggagtttgaagaagccatgtcttccaaggcagtgcttctcacgcccaagctggtggtcagcagaatgaccagagacagtttaggaaaaagatgcttatgaaaaatgtctttattaatatttacagagaagagacttgcaaatctatagttctctgtgtctctaaggtacttcccagtactaacactcttatttaactcagattttatgaaacataaatttctgtgccattaggaagcctcaaactacaaggatgagtgacaaaaccctgctcccagcccacccggataatttccagaaggaatcaggaccattaggagatgtattaatttagctaaccctggctctggcatttttagtatgggtccagtctcaccgggtcttggagagagtagaagacaatcacttcttttgacacattccattcctataaagttggataagtagaaacttgcatttttaaacaacatccaaa

SEQ ID NO: 51172 - DNA, 490 bp, Homo sapiens
cgggcccccccctcggaagtcttctagaattaattaagcgggggggggtgtacactttctttagctcaaggcactgtgctaggcaccaaaatctaaaaaatgagcaaatttttgtctcttaactagagcatttcaccaagttattccttcaattgcctcttagtcttgacaattaagaacttcaatctatgtgtcaataaggaatccaagcattcactataaggaatatacaaagcttactcatacacttgaaacatgatattcagagcactgcaagctatgaagaggactttaaataaattttgtgatttactcccccaaggaaacaaaagaacctgggatttggttcaatctgaggttccaatacctgggtctctgtgtgaaagttgacggttctcaccaactcttttcctgactttacccttttctccttcctatctttgactcaatcactgaaagcacaattaaaattcccaaaaaaaaaaaaaaa

SEQ ID NO: 51173 - DNA, 534 bp, Homo sapiens
  misc_feature 28, 51, 452, 494: n = A,T,C or G
cgggcccccccctcgaaagtcttctagnaattaattaacgccgggcctggnggaaatgcttataatttcaagcaaaaaaagcaaaatataaaactgtaagtatgcatactgaggcaccaaaaaacagatactcacaagaaagaaagacaccacatttaacagggttgcctattgaaaagacggaaatgcgtttctttaataagtatgtatactttaggtagtaggtagaaaaaagttttaagaggggccaggcgaggtggctcatactgtaatccagcactttgggaggccaaggcaggcaaatcacctgaggtcaggagtttgagaccagcccggccaatatggcaaaaccttgtctctactaaaaatacaaaaattagccaggcacgggggcatgtgtctgtaatcccagctacgtgggacgctgaggcaggagaatcgcttgaacctgngaggcggaggttccaatgagccaagatcgtgccactgcactncagtctgggcgacagagcgagatctcaaaaaaaaaaaaaa

SEQ ID NO: 51174 - DNA, 537 bp, Homo sapiens
cccccctcgagagtcttctagaattaattaacgcgggcattccttaatctctctaaaatcagtgccattctctgtactatggagatatttatcttctagtgccatggagaggatttagaatcatggtgtatgaattgtttagcacatcctggcatacaggaatcatctgataagtgactgctggttgttaaataagccagaagcatctgaggaagtcagggaaagtgggcatgacatgctgtgcagggtggggaaagtggagtctgttacgttaaggtagtggtcaacagaggcctccatggtagtttcacctaagaagagaccagaagaaagcaaagacgtggcaaggcatggtggctcacgcctgtaatcccagcactttgggaggctgaggtgggcagatcacttgaaggtcagcagtttgagaccagactggccaacatggtgaaaacccctctctaccacaaattcaaaaattatgtggtgggtgcatgtaatcccagatacacaggaggctaaggcatgagaatcacttga

SEQ ID NO: 51175 - DNA, 574 bp, Homo sapiens
cgggccccccctcggaagtcttctagaattaattaacgcggggcatatctatctataataatcagagccatttgtttcaaaggcaacaatgttgactgtggtgaacatatgccagtctgcagagatattagttatactccatccatatagtgtgtaagataatacataattattgaggaaccatttggatgaagaaataagttgcttgaagaaaatagtcataaagttcacttctaaattataaaataataattgaaggctggcccttgcatttgaaaatattaatatgtttaagtcagctacgtgccagataaaaatataccacaggcctccagaaaaactcagcaagtatttagaaaatggaagcaacagcttacaagatatcattttaatgggtttataaaagctcatgtctctaagggactttttttgctcaagaaaatgtcatggagatgtatgtctcagacagtgtttatgaacagtatagttattcatagttttctttacacaatgcctatggtctgtgtgtcaaaccgcctgcatgcatttacgatggcttcctgccatataaaat

SEQ ID NO: 51176 - DNA, 590 bp, Homo sapiens
  misc_feature 28: n = A,T,C or G
cgggcccccccctcggaagtcttctagnattaattaacgcggggagaaagccaaatcatactagtcttgttttcctcaagttactttaaggaaaccaattcagaaagtctaggtagtttattcagttttgaagaaataataagtggcagaggacttgattctacaaccttccttgttttccactatgccgtattgggaaggaacaattgcaatttgaaatggaagttgaaaataagcacagtaaaaataatagggaagacaacaaagaaaggggttcaactagacagatatgaaatatatgtccagaaatgtaaaggtctatttcataaagcaaccaactgagtctgttcctgcatatgcatattcatgtgcacacacgtatactttactggaaatgattgaggagtagggccttgctccgtccatttcactggtcgtgtaatgttaaatgttaaaatgaagtcatttgataaatttaaattatctaatacattaatctctagttgagatattatccccacagttttaatttcaagacaactttgtagtgggctttcatttttaaaggacattcctcacagtggtcttgg

SEQ ID NO: 51177 - DNA, 570 bp, Homo sapiens
ccgggccccccctcggaagtcttctagaattaattaacttctgttttctctgtaaaatttcagtaatacttatccctatctctgggagaggatagaagttgtgaagattaaatgaataaacatgtgtaaaggatttagacaggtctcagaaataaagcaagcactcaatatattttagttttaaatccgttggagatgattcatttgatcaaattttacttttctataggtcttatctccttcctttacttctttaataacagtgttttgtggctttcttccagtctctttttatcttactatgcaatttttttcccccacaatttgtgaacaaatgattctcaggccaaatgttcttactttattactttagtttacatatacgtttattactttaatttacacatacatccaaaaaacttcattacctcagtgttcttctctatctgtcctcacaggataagtagttttattcagtgctgatcccatggttatatgcatattgttcacatgctaatgaccctcagatttgcatctatcactcagaccactcaccctgaaccacagact

SEQ ID NO: 51178 - DNA, 472 bp, Homo sapiens
  misc_feature 25: n = A,T,C or G
ggccccccctcggaagtcttctagnattaattaacgcggggcaccacgttcttatgcctaggatgggatgagaacaatacctcaagcagaacaggcacccaactcaaagaaaggctttttttttttgtttttaagtgggggagggagcttagttattgagtcattgagtcaaccctgttctgacaataattctcttaaagcaaattattaactgttaaaactgttttccctgaccagaaacagactgcatattatagaaataacaaattcagggagtttcagtttcacctaacatacatgaatttgaaacctaaattggtttatatgagacaatgaaaacaatctttgagaactttattgcatctaagatagattttactcctcacaacaggaagtggaacccgtgaactagtccgtttcaaaatgatcttgcatgtggtttttcgctaggtaagtaaaaaaaaaaaaaaaa

SEQ ID NO: 51179 - DNA, 604 bp, Homo sapiens
gggccccccctcggaagtcttctagaattaattaacgcggggggggtctctcagcatcgacacttgggccagctctatattcaaacttttccttgcgtaacactgggaatgtatcaaaaatctcaggggctcagctattcactgatcttttcagattggaaaacagtcatccccagtggtcagacccacatctctgggtgtcagccatcttctcctagatctaagcttggaaaacagtttccagatttccttggtaggaggactagtccgaatttctgacccaccattataagaaacagaaatccttatttactttcatgaaaaagcctgggaagtaggatttattctctgcagcattatcaatcaaaaactgagattcagaatttttaagtgacttgtctgaagtcacacagtgttaagtgacagggccatgactcaaataatattttcctatacttatttccttacacttttctccatactagacatagtcccataatactctagctggatctttctttagttgcccatgtgtatgtacaatcttacctactagactttctcagctttaaaaatcataaatactctactccatgtctttact

SEQ ID NO: 51180 - DNA, 618 bp, Homo sapiens
cgggccccccctcggaagtcttctagaattaattaacgcgggggagtatagatgagaactctttctattttctgctcaattttgctgtgaacctaaaactgctctaaaagaaataaggtctattttaaaagaaaaaattagggccgggcacagtggctcacacctgtaatcccatcacgttgggaggccaaggcaggtggatcacgaggtcaggagttcgagaccagcctggccaacacggtgaaaccccgtctctactaataatacaaaaaaaattagctggctgtggcggcacacacccgtagtcccagctactcgagaggctgaggcaggagaattgcgtgaccctgggaggtggaggttgcagtgaaccgagatcacaccactgcactccagcctaggtgacagaacgagactccgtctcaaaaaaaaaaaaacaaatgaaaagaataacttaatgtagtggccctgtaaggtgaaaaggatggcaggggcattttataggcagggaaacactggtagtatttatttgaaaaacttggccaaatttaaagaatagctgtgcagatccacccaacatagcctactatgaaggcaacgccagaactaagaactatt

SEQ ID NO: 51181 - DNA, 515 bp, Homo sapiens
  misc_feature 492: n = A,T,C or G
gccccccctcggggtacttctagaattaattaacgcgggggttcacatggtccatgctccttctgttctaccatgacctaccatcctaccatgaccactctggcctgggagacacagtgagactgtgtctcagaaacaaaaataatataatttacagctgggcttcatcttcagagtaaaaagctcagagaaaaaacctcggccgggcacggtggctcacgcctgtaatcccagcactttgggaggccgaggtgggcggatcacgaggtcaggaaatcaagatcatcctggctaacacggtgaaaccccgtctctactaaaaaaaaaaaatacaaaaaaaattagccgggcatggtggcaggcgcctgtagtcccagctacttggtaggctgaggcaggagaatggtgtgaacccgggaggtggagcttgcagtgagccgagatcgcgccactgcactccagcctgggcgacagagtgagactccatctcanaaaaaaaaaaaaaaaagcggccg

SEQ ID NO: 51182 - DNA, 387 bp, Homo sapiens
ccgggccccccctcggaagtcttctagaattaattaacgcggaggtcctcaagggttcacattcccagagctttgtgtaggtcaaacttgagtcctggcagccgagtcggggaccctccccttcacaaacacttccagggaagatgatttcacaactcctcagggtgcgttctagtccacacagcccccaccctccacgtgtgttcctggggttgcacccaagtcccgatgtcacagttgagcccttttctatcttcagagtaaaagggaggtgagcccagcatggtccatcacccccagactttctcctcaacttgtatggggtcctggtgccttctcgaaatctgatgagtgccttagactctcttcccaaaaaaaaaaaaaaaa

SEQ ID NO: 51183 - DNA, 545 bp, Homo sapiens
  misc_feature 445: n = A,T,C or G
cggggccccccctcgaaagtcttctagaattaattaacgcgggatatgttaggggaaaaatttataaagagctggggaaaggcgagaaacatttttaaaaaattgacccctgattgtatgacattctgtgcatttatctaatattatttgatgatttaatgaatgaatacatccttctaattgaccactttgcaaagcatgcactattatccctgtattgtaatgagcaaactcagggtccaagaggccaagttccgggctatgactctcttaatgttcccatgtctagattgcaatgttgcttcttccaaatttcaagcctttgttctttataacttccatataatatcaactgaatttcagtaccctacttttccaagatattatgttgtgattgtgtatgggtttgctactcatgtatggttatagttgtcccctccctacnaaggaccctgttcttatggggagtggacaatgggatgacacagcatggattgcccacccatgaatgtgtctaaaatgtttgcaagccaacatcacataca

SEQ ID NO: 51184 - DNA, 346 bp, Homo sapiens
cgggccccccctcggaagtcttctagaattaattaacgcgggtctcttttactgtgttacatgagtgcctttgccaagcaagtcaaaggaacataatctagtcaggttcaactgcagcatctattggacccacaggatctctctgcaaatatatgtatctgtacatagagatgtacataacatcaggttaggctagcttttaaagcgataaagtgggctgggcagcggctcacgcctgtaatcaaagcactttgggaggctgaggcaggcagatcacgaggtcaggagttcgagaccagtctagccaatatggtgaaaccccgtttctaccaaaaaaaaaaaaaaa

SEQ ID NO: 51185 - DNA, 473 bp, Homo sapiens
cccccctcgagagtcttctagaattaattaacgcggggtatctagctagacttcattttccagcccctctgctgttacatgtggccacagggcagagttctagccagtagaaggttgagtcaaaggacatgggacgcctgcgtgtgcagtcctctagctcattcccctttgggctggctgaatatcttcaggagggcaacctcggcaattggctattgcagatggaagacccttgctggcctgttttttttttaatttattttttattttttattttttattttattttattttttttagatagagtcttgctctgtcgccagagctggagtgcagtggcatgatcttgtctcactgcaacctccgcctcccggcttcaagtgattctcctgcttcagcctcccaagtagctgggattacaggtgcccaccaccactcctagctattttttgtatttttagtagagatggggt

SEQ ID NO: 51186 - DNA, 583 bp, Homo sapiens
  misc_feature 23: n = A,T,C or G
ccccccctcggggtacttctagnattaattaacgcggggggcctgcatatgttcctgtatatcattcttgcatcaagctgatgaaacaagtgccagttcactgttcctggtatcactgatggaaccctggaagtatcaatcaatataggacccagaaacatttccatcaatagctaagctttagtttgaagtgccaccttgctaaaccatagttaggacataaatagatgcagattcagcaacaggatttctggaattcttggcaatcttgctaggcaatttattaccccaatcattttagaacctcgcaataatatgactatgtattttgcatgatctgattgtttagttttcactcaacacatcatagcaggatttttacatagttgttgaattgatgaaagactgcacaagagcggtgcaaattcaatggaaggacagagtggggttggttgtgaggcaaaggcatttgtggaagtgttaatgttttgcagtctctcatttcaaagatctatacagaggtatttccagtttattctggggagatatcttgattgtccacattaaattaaattcaaatatt

SEQ ID NO: 51187 - DNA, 616 bp, Homo sapiens
cgggccccccctcggaagtcttctagaattaattaacgcgggccacattcacttgttggtcgtctggctgaatatttttacatcatgagcaaaccatggtgctcttcttctctcttgccctgccttaatgaagtaaggcgttttccttggcttatttcctttctcattgaagcagagttgaaatgttgagactgggtgtagcttctcctaacccctgccatattatctgctgaaactgaagtgtgaaaatgaccttcatggactctgagcctcagcttcacatttccacacaggcgccacagagatgccatattatctgatgaaactgaagggtgagaaatgaccttcatggacctggagcctcagcttcacatttccacacaggcgccacagagatgccatattatctgatgaaactgaagagtgagaaatgaccttcatggacctggagcctcagcttcacatttccacacaggtgccacagagacgccatattatctgatgaaactgaagagtgagaaatgaccttcatggacctggagcctcagcttcacatttccacacaggtgccacagagacgccatattatctgatgaaactgaagagtgagaaatga

SEQ ID NO: 51188 - DNA, 612 bp, Homo sapiens
cgggcccccccctcggaagtcttctagaattaattaacgcgggcattgatactctttacattttgggctttttgaggtattttggtcttcagcaggttgacagcacaaaatagacaaacccaatattctaggcaatcgtgccaggtttcacttgtagaagcctgtgagtgtcctgtgttagtttgtgagttatagcagtgaaggcttagaaagtgagaaatgacatatttcttgaggctgcggggcgtgcaagttacatagttctctctcttgaatgacaacatgatccagcttcccagtgagaagcacgctggtgtgcttcgcttcctacactctttcctgaataacgtgaaggtgttgttaatttaaaaactgtcattcacagggcatgaaaatgtttcagttagaagtccagtgacaggcaaaagacaacaatggcaatgggtactctgaaacaggtgataattttctgcagctaattatcattatttttctagctggaacattgtgcaaaacctacagaataatatatgctttaataaggtgggcttgtaagaagtggcattccataactctaccaaataacttgactacctcttattaaaaaaaaaa

SEQ ID NO: 51189 - DNA, 560 bp, Homo sapiens
cggggccccccctcggaagtcttctagaattaattaacgcggggatgtgtcatggaactccctcaccaaaaaaatcagtacatcacgtttgtaatcctagcactttgagaggccaagatgggaggatcgcttgagcccaggagtttgagaccagtctgggcaacatggcaaaaccccgtctttgcaaaaaatacaaaagttagccaggtgtggtggcgcatgcctatagtcctagctattagggaggctgaggttagaggatcacttgagcccaggagatcgaggctgcagagagcctagatcacaccaccaatctccaacctgggtaacagagcgagaccctgtctcaaaaaaaatataaaaaaatcaataccactgtcttggtatactaattctaataattctaattctaatactaattctaataatagctataaaagtgctaagcacatttaatgaattctttcatttaatctgtatgttacacatcaggtatgtagtagcattcccactttacagataagaaagtttaggcttagacagctaaaaaaaaaaaaaaa

SEQ ID NO: 51190 - DNA, 568 bp, Homo sapiens
  misc_feature 531: n = A,T,C or G
ccgggcccccccctcgaagtacttctagaattaattaaaaataaataaagtatgcaaaggtagcctaggggagaattaacctaatatcaactttgatttcagaaaaacaactcagggaattttttaatgggctacaaatttagcatagagagggttttgtttgtttatttgtttgtttgttttaaaaaagacagacaatctgaaaatagagtgctaatgatgtggtatatggaatagggctaatggctgaatgttgtaaccaggcacagtttgctccataaaatgataccttaagccatgttgagttgataagaagcacacaattaatatggtctgtgcttatcatatagaagccctatatttgacatcactgtaatagtcatcagtatgagctactgtatacttattaaatgataaacctaattatctcttaataatgaagtgttctgtaattcaaattttataatttaaatgactcctttctctctgttagtcaaaagtattgtgatgatgtataacctagtgccacanattcgtctcaaagaaggactactgtcatatatttgac

SEQ ID NO: 51191 - DNA, 588 bp, Homo sapiens
  misc_feature 492, 553: n = A,T,C or G
cgggcccccccctcggaagtcttctagaattaattaacgcgggcataagtgcttagaacaaaacaaagagagccccaggcacatcaacccaaataacttctcactccaggggccttcaaatcccaaagctactttctcaagcatctgggtatttgtcccaaatcctgacctatttctaacttgcgtaattatattgtcttcctaattgctcttgggtattccactgtgtgaaactggcacagccagttctcagccactaggcaatgttgctaggcagccattaaacagctgtttctatccaccagaagaagtagatacatatctaaagggaatgaaaatattctttcagagtttcaccacttaaacaacagaaaattgcctgggatttcttttgggggcataggttccaaactttgaagacgtgcactcttaaaggattaacccagtgatcaaaccgtagccttagagaagcattactgaattattacattntttaaagcaaataattcctctggaggtgagataatcatcctttctccctttccaggctatnttcactattttcaaaacttatctttttatcaaagc

SEQ ID NO: 51192 - DNA, 310 bp, Homo sapiens
  misc_feature 20, 33: n = A,T,C or G
gtaccgggcccccccctcgnaaatacttctagnattaattaacgcggggcctttttcattttgcacttgtgatgctacctactggctttagaatgtgtttcactccaggcagcccgaacttgatgtgaataatgaaggaagtagtttgttctcacatcattgaaaactccagatatgggtcttcctgcagctgaagcttcttgcagtgcttccgtagtgaaaccaatggcttctttcttcctgcgcctctgttctgcctctgtagccatggctttctccttccattccctcagatgtgtccaaaaaaaaa

SEQ ID NO: 51193 - DNA, 590 bp, Homo sapiens
  misc_feature 10, 26: n = A,T,C or G
ggcccccccntcggggtacttctagnattaattaacgcgggggcgggggtatgtgggtccgaggttgactcagtagcagttgttggtgcagcatctctggttctcttgttccttccttcatggctagaggatggtggcagtattgttctgcctcaggtctttataggtaagaatcttacacaggaagcaaaacaggtgagtataaaagggttttcttggtgtgcctcttttcaaggaggaaaatctttctctggcacatacaatgaatttagagtactttgtattggcaagaactgaatcacctgttaattccaagaccgattgcaggtaagggaaatatcattttaatgatttgcttagaccattcataagtcattcctcatagctaggcacatggctgctcaaacaaaattagatagttagcaaggaagaaaggctggctattgtgtaggcactttagaatacctgctagagggctctgacgtaaacacaggtctttccttaattgttatagctttacttctttactaatgtgccacaccattagcaacttataattgtacagtttcaaatttctacaaggggttaac

SEQ ID NO: 51194 - DNA, 588 bp, Homo sapiens
  misc_feature 28: n = A,T,C or G
ccgggccccccctcggggtacttctagnaattaattaacgccgggccagtacatttcctgaaaattgagcactaaaattccatttaactttaagactgagaagcagtataattggaagtcttatcaaaaacttatgactggaacaagggtagagtactaattcaaaagaaggtcggaatgggttgtttgatggataaactattgtttgaaaagccagctcctctcagtcttgactaagttatggagctggatgtatgtgaagcagcagctagtagtatcaggctgttctctacctacagaaagcctggtctacaaagaaggaaatgatgcttgacaacataaaacagaactaagatatggagagggatttgagtccttcaatccaattgtacctgagatttgttttaccctacaatttccatttatagagacaatatatttggattttgtttaatttattacattaggtgctgttacttgaagctaaaaacatcacatttaatatcaattagtaacactcagtatatcaagaacaactgtattatattagaaaatcagtacactacaaaatcagcccatgaaactgaa

SEQ ID NO: 51195 - DNA, 603 bp, Homo sapiens
  misc_feature 522: n = A,T,C or G
gccccccctcggaagtcttctagaattaattaatagaactaacaagatcatcccacataaacagacctcggaagctgccgggttttggtagcagggggatatgtgcattggcagaggctttgggtggaaaagtgttatttctatagtggccaaaacacatgactgagtttacttactccagaatatttgttacctaaaaggatactcttttctctttaatgtgcacaggtcacagacttctggtccacagtaacctaagatatacacatttgaggtgctcttttaggttccctcctcaccccctcttttaaactgaaagtagattcttttctacaactgccaccgaagtcaaacaattggaaaggaacaatagaatgacagattgcttgttccaaataattggatcaacaatgcagcaagcagtgggttatgacaaaaatattcctccaagggtgtcaaatttcagtaactcactggacaaagagacactgagctatgccttcccgaaatagcaggcagttntaaaatcaagatgaaattccccaccccctctctattatacaccgatacacagacaaaagatgaaaactagcccacatgtag

SEQ ID NO: 51196 - DNA, 479 bp, Homo sapiens
  misc_feature 28, 466: n = A,T,C or G
cgggcccccccctcggggatcttctagnaattaattaacgcgggtaccagctagtcactctgaaccctgttttataacctttatgtagttggcaagaaattaaatgagaggaaactcctgatattgcccaacacctagaatgcctggtgttctaatattgaaagaactctaccttcccctcacaaacaagagcaaaccctcaatccccaaacttttgtttaaaattctgttttggaagtgaagaaaatagcattaagcaaagaaacgagggtaaaacagaaattctaagcccagtaatagagctaggattagatttcggattagattgcctttaatagagcaacttagcacatgattacttctctttattcttccacatgggcttgatatttttctctctctgcccctttgtggaactttgggtaaggaaaacaacctaaaaccatatccttcactctccttactncaaaaaaaaaaaa

SEQ ID NO: 51197 - DNA, 580 bp, Homo sapiens
ccgggccccccctcggaagtcttctagaattaattaacgcggggtttacatgtaagttaaaggggaaaattgaggctaggccagtaagggccacatacctatgtaaagttgggttttatcctaaaaacaatagaaagttatttaaacaggcagaaaggcaaaatcaggtttatatttttgaagactaccctggctacaattgtacaatgcacaatagtaggctgaaagtgggggaaggtgagaaaagagtcaggattcaagttaggagtataatgtaatatcccaagtaaaacagacggtcgcttggagttgggctatagaggagacagaaacagatagattggtgacatatttatgaggcaaaaaatatatagtagaacttggtagagagtaaggaagaaatgaaataaaaatgattcctaggtttctggtttatactagaatggtgccattcatcaagacaagtgacaattaaagaagaccaggtttattacaataaataccactgaatgcctaccatgggccaagcactgaggattctgaaagaaagataagtatgtagataagtctcattatatgg

SEQ ID NO: 51198 - DNA, 603 bp, Homo sapiens
  misc_feature 24, 73, 594: n = A,T,C or G
gccccccctcgaggtacttctagnaattaattaacgcgggggacttggtggggagggccttcattcacttttngaaaaaccagttacttaattggataggcagcctttctcatttaaactgacttttgtttcaacttaccaaaaaagagtttacttttaaacctgtttacttttacacgttaatatttaactattatttatttaatggaaaatgtggtcttctggtcatgtcgtttcttaggatactcaggggaagccagtccccatctatatataatagtcactgtactgaaatgtaaatttaaatctaatggcgaactagttaagtaacattttaatgaatatccgaagaagatgcaacagcaagttagtttgatatcatcagaatccaggtaaaaagaaatacctgagaatccagcaattattattaacaactcttttcccaatcctttaatatttctgaaagaataaaaataaactcttagcaatggaaacgggtacccaagataacagggatagaagaaaatgtactcttacgagtctctgaattttgaattatctcaatgtattaacttttcagaaacttttcttaanagtttttac

SEQ ID NO: 51199 - DNA, 561 bp, Homo sapiens
  misc_feature 35: n = A,T,C or G
tgggtaccgggcccccccctcggagtacttctagnattaattaacgcggggctggaaaaagaaggtaatggatatagaggacagagaatggagttcgaagatacatctaagaactttacatattcctaaggaacccacaaagataaaacaaacagagcaagtatgaaagatgtaatagaagcaaatgaccctgcattgaaaatgatcaaagtatgcagattggaaaggctcacaaattccaataaaaagaattgaaaacaaaaaaaaatgctgcaataacattctttaaactatattaattgtaaggtttttacaaaaataagtactcaggcagtagtaaaaagtttgcgaataaagaaaccaaaattaaactctaacttttcttatgtaataccaaattccagaacttggaaacatatctgcatgctttaccagggaccagattatgaggcagttatttaagattagaaaagttctctttcattggtaaaggcaacagaaagatatattttagaggtagaagctctctaacatagacactattctgccaaaaaaaaaaaa

SEQ ID NO: 51200 - DNA, 593 bp, Homo sapiens
  misc_feature 31, 520, 583: n = A,T,C or G
taccggggccccccctcggaagtcttctagnattaattaacgcgggagggaaatgatttctccaaggccaggacatggagtggagcggtaggatgcacagatccaaccacaaaccagattcagaaagtgtcagaccagcattggggcggccataggaagccaaagccacacccagcaccacctttctcctttctgagaaaggccatcaaagcaatatgagagcagctggcacaatggagtgatcctcattcaatagagagttctagcctgggcgcttcagggctacagttctgcttagagaagacactgtcgaccaggtggggtggctcacgcctataatcccagcactttgggaggccaaggcaggcagaacacctgaggtcgggagttggagaccagcccgaccaacatggagaaaccccatctctcctaaaaatacaaaattagccgggcgtgggtggtgcatgtctgtaatcccagctactcgggaggctgaggcaagagaatcacttgaacctgngacgcggaggttgtggtgagccaagatcgcgccattgcactctggcctgggcaaaaagagcanaactccatct

SEQ ID NO: 51201 - DNA, 348 bp, Homo sapiens
  misc_feature 24: n = A,T,C or G
gccccccctcggagtacttctagnattaattaacgcgggcaatgtatgttggaaccagcctgacatgcggaaatgctgattttactgatctatgtattcaaaatattggaagttcctctgttccctatataattccatggtttaaactttggttaattgctggtatcttaagtcacaaagttaagacatcttgctgggctgtgttgatcaggcgagattccttttaggtcgatgtagtagcccatgggagagaataatgcctttctagtgctttggggattattctgctaagtgtttaaacaaagtaaccttgccatgacagagtagccaggcaaaaaaaaaaaaaaa

SEQ ID NO: 51202 - DNA, 404 bp, Homo sapiens
tggtgtaccgcggccccccctcgggggtacttctaggattaattaaccggggaaaatgaggtttgctctgtaggaaggcaaaaacaattgtccaaggggatagaaagttatcttaacaatacagagttcactttccattgcaaccctctggcaaaatatgaattctgagctttacccacttacatgtggtattagttttctacagatgccataagaaattaccacaaacaggctgggcaaagtggctcatgcctgtaatcccagcactttgggaggccgaggcaggtggatcacttgaggtcaggagttcgagatttgagaccagcctggccaacacagtgaaaacccatctgtactaaaaatacaaaatttagcagggcatggtggcgcgtgcctgtaatccc

SEQ ID NO: 51203 - DNA, 585 bp, Homo sapiens
cgggccccccctcggggtacttctagaattaattaacgcggggggctgagacaggagaatcacttgaacctgagaggcagaggttgcagtgagccaagatcacgccactgcagtccagcctgggcaacagagcgagactctgtctcaaaaaagaaaagaaaaacaaaagtgcttctactcctagcaactctcaagagttgatgctcccacagtattgctgggttacccacaactatactgaaatattttatttctatttctatgccatgctcactcttattaggccactgcatgtgtttttcttgtcctggagtatctttctcagttcactctctctttgccatggcttattcctactcattcattcctactcatcttaggtgccactttacccagaaagtcttttttggtccccaaatttgagttagattcttcctaccaaaggtatttttaaaaagtatactctctcattgtagctatttgattcttagtaactgcttccttactaacaaccctgactagactgtgatatccattagggcaaaaattagattggcttgcatctccagtacttagcacggtgca

SEQ ID NO: 51204 - DNA, 595 bp, Homo sapiens
ccgggccccccctcgaaatacttctagaattaattaacgcgggggagttccagtttagcctcatagcagtttagtctaaacaaattttttaagttattttttaataggcttagcttgaaaacccaaaaactgtcagctggcttacagtttaaatattaaaccatgttatgtttattactgaatctattattcaaaaattatgtactatcctagcaccaaaaatcaaggaaactgggcacttctcatatgaatgaaactaaataaactgaagtcaagagaccacaaacaagaatatagttaactccaagaaaataaaaatttctgcctttaagacagttattggccgggcacagtgctcacgcctataatcccagcactttgggaggccaaggcggtcggatcacctgaggtagggagttcaagaccagcctgaccagcatggtgaaaccctgtgtctactaaaaatacaaaaagtagccaggcgtggcggcgtgcacctgtaatctcagctactcgggaggctaaggcaggagaattgcttgaacccgggagttcgagaccagtctgaccaacatggagaaaccccgtctctaac

SEQ ID NO: 51205 - DNA, 556 bp, Homo sapiens
  misc_feature 81, 505: n = A,T,C or G
cgggccccccctcgaaagtcttctagaattaattaacgcgggatagctttaatatgcagcgagttttttcaaatcaataangaaaaaagacacagatgggtgctgacagggccgtttggtaatatcttttaaaatttaaaacacaagtgctttcactcaacaacttcacttttaggaacctatcacacatataaattgacaaaagtggagaaatattcattgcaacattttattttataatagcaaaaaaaatcactaagggaagtacagttgattcatatgttggaatcctatgcagtcttctaaaaaatgtggaatttatttcatacaccaaatataacaatgtccaagttctactagtgaaaaagcaagatgtaacatatcattgtatttgtttaaaaaactcatgctgggttgggtgcaatgactcatgcctgtaattccagcactttgggaagccaaggtgggtggattgcttgagctcaggagtttgaagccagcctgngcaatatggcaaaaccccacctctatgacaaataccaaaaaaaaaaaaaaa

SEQ ID NO: 51206 - DNA, 563 bp, Homo sapiens
  misc_feature 483, 517: n = A,T,C or G
cgggccccccctcggaagtcttctagaattaattaacgcgggcccttccctgtaccactttcaaattcccctgctggcgtttccatgttccttccagccctgctgccttggttgtgctctgatgccttaacgtaactggttttatttgcttctttctaattgtagccagcttttataatgtgtaagggttggtctggtacatgctgctcagccagtcattagagtagagactctgaacatttttatgtagctatttatattatacagctcagcttgcctgggagccttcagtcagcaacttggattggccattccatctagaattgtcaacagtgaatgttggaaacaagctagaaatgaagacaagaatttgccacagtgcaccccccaaaggagcattgatgaaggtcaactcactcaatattctattaacccttaagtgtgtggaataggggctacagtggcaagcaactggaccatctntactgtcagaagaagtccttctttctctacattntctgaggagcattgatgtatttttatatctaatgatttgcataaca

SEQ ID NO: 51207 - DNA, 589 bp, Homo sapiens
  misc_feature 564: n = A,T,C or G
ccccctcggaagtcttctagaattaattaacgcgggctcacccacagcctcaacgtcctgggctcaagccatcctcctgcctcggcctccgagtagctgggactatacccggctcatagctgttttttaatccagagcccaggcagggatgagatgaggccaggcactggtgatcatgctgttttactcttccttcccatcccaatttggcttccagattcctccctccacccagagggctctggtcaaagtcaggagccacttgcattaccagatctaaaggatccttctcgctgggcgcggtggctcacgcctgtaatgccagcattttgggagggcggaacacctgaggtcaggagttagagaccagcctggccaacatggcgaaaccccatctccactaaaaatgcaaaaattaactgggcatggtgggcgcctgtaatcccagctattcaggaggctgaggtaggagaatcacttgaatctgggaggtggaggttgcagtgggctgagatggcaccattgcactccagcctggccaacaagagtgaaactccatctcanaaaaaaaaaaaaaagcgccgccacc

SEQ ID NO: 51208 - DNA, 573 bp, Homo sapiens
ccgggccccccctcggaagtcttctagaattaattaacgcgggcttccaccttttggatgttgtgaataatgctgtaaatgtggtgtacaaatatctcttcaagaccctgcttccaattcttttggatctatatctagaagcggaatttcttgattatatggtaattctatgtttaatttttttagaaactgccatactgttttgcacagcagctccaacaagttactttcccatcaaccatgcacaagagttccagtttttccacatcctcaccaacacttgttattttctgtttttgttacagtaggcatcctaatgggtgtgaggtggtatctcattacagttttgatttgcatttccttaatgattaatgatgttgaacatcttttcatgtgcttaccagccatttatacatcttctttacagaaatgtttattcaagtcctttgcccctttttcaattgggttgtttgtcttttgttgttgattttagtcctcttttatactggatattatcccttctcaacatatgatttgcaatattttctccattctatgggttgccttttactc

SEQ ID NO: 51209 - DNA, 335 bp, Homo sapiens
gccccccctcggagtacttctagaattaattaacgcggggtagtgtatacacaaaaataatgttcacatttgagcatatctttccatgtgtaattctttacatttatatttgaaagtgtccctctgcctcaaattaattatataaattcacaataatcacagtttagaatttgagttaaaatattagtaatttgtggctattactcaaaagagaaaacatagcaagtgttggtgaggatgtgaagaaaagggagccacaacacggtgttggtgaaaatgtaaattattgtagccattataaaaaacagtagagaagttccaaaaaaaaaaaaaaa

SEQ ID NO: 51210 - DNA, 564 bp, Homo sapiens
  misc_feature 520, 526: n = A,T,C or G
cttctagaattaattaacgcgggacctatgtgagcagaaggattcaggggatccttggtggactgctgaagaatgaagcatgtgcacccactttacttctacactttggcagctgtagaacagagacagtggtggtgcaggatacatccttgtatctgggaattaattcctttccgaggtgaatactacttagtttgtgactaaaatctacgggcttcagtttcctagtcttgctaaattggaaacatgttaatatctatgactgtagcacatcacaagtaaagataaatgagaaaatgtatgctttggctgggcatggtggctcacgcctctaatcccagcactttgggaggccgaggcaggtagatcgtgaggctaagagttcaaaaccagcctggccaacatggcgaaaccctgtctctactaaaaatacaaaaaaaattatccgggtgtggtgatgcatgcctttacactcccaaactactagggaggctgaagcatgagaaacacttgaactcangaggcngaggttgtagtgagccaagatcgcgccactgcactcca

SEQ ID NO: 51211 - DNA, 153 bp, Homo sapiens
  misc_feature 28: n = A,T,C or G
cgggcccccccctcgaaatacttctagnattaattaacggggtttttagaaactgggagagcaagcaattaacatactgaactcacacttgctttaacatgctatcttattcggggtgtttaaaaaacgttttaaatgcaattaatgcattca

SEQ ID NO: 51212 - DNA, 565 bp, Homo sapiens
  misc_feature 32, 55: n = A,T,C or G
ggtaccgggcccccccctcggagtacttctanaattaattaacgcgggtatgctngaaatttaagaatgccaagaagattttactactgccattattttactgctgccatttttgctttgataggaattatcaaagcagtattcctaaaatgtacaaaatccatttccaaaatatattccacgtaatataatacttctagatgtcctttgaaaaaaaaatccagtagccaaattagtgtgaggaaagatacatactatatttcattcttaaaatatgtatatattatatccattaaaggctctgaaagtcttctttgtatttaaagccctatttagcttattcatcatatgaaacaggttttttcaagttgaatccatttatcccaagataacagtattctgccaaatgtactttggagaattttataagataccaaactgaaagggagcagtcatgcagaatacaaaagttttagaaataaacataagtgaaagaaactactatttacctggtaaactggtagaccttgagttggtgacagaacacctgagctgttgcttactc

SEQ ID NO: 51213 - DNA, 602 bp, Homo sapiens
cgggccccccctcggaagtcttctagaattaattaacgcgggcctcatggctaaaagacaaaggacttcctaacatccaagtgtttgggctttgtctattccaccaccattcaattttgcttctcaaagtagggatcctgagaataactactgcctgaattgcagttgtacttgccaaaccctttagattcacctatccagacaactcaggagacagaattttcaaacctatcaaatgtctccagaacttctatccttttctcttgaatatctatggtactatggtgtacattaaccctaaagagaatcaagaccaatcccctcactcctctctggcagggcaaaaataccgagagctaaatatgttttctctagtcgtaaggaaatgagaaaaaggagagtctgattctgcttttggaaatgtggtctggtccatcactttaggctatgatattacagttataatatctaattggcatatcttgcctgtaattccgtttcagaggcagatattttgaaaaagatttaaggccaggcatggtggcttacgcctgtaatcccagcactttgggagcccaaggtgggcaaatcaccctgagtca

SEQ ID NO: 51214 - DNA, 540 bp, Homo sapiens
cgggcccccccctcggagtacttctagaattaattaacgcggggggggtagtaatattctcactgtgccaataatgttggggttttatttcacatttttgtattagatggtaatcttccatagcactcatattatagctcttctaacagaagattgtaattgttcttgtttgtcacctcacctagaatgaactccttacagacaaggccgtgttgtattattctttatttttttgctagtatttagcccggtgactgtgttcaataaatgcttgtttaatttaattgaatcaaacatgttcctgctggcagttctagcagtggagaagtcagcatggaagcatctccctcccccttctcgtctgtttttagaggatcagtttgccagtggcagtatgaatacagaaaagaatgacagtcccacagtaggaaaaacagcatggtatgttccaactgaaagcagatataagctgggagttgactcttcctaatatttagatacatatttcagagtaaaacgactcggaggtaaaaatttcag

SEQ ID NO: 51215 - DNA, 533 bp, Homo sapiens
ccgggccccccctcggaagtcttctagaattaattaacgcgggtggactaaaggcaaacattatgatccttcacactttacaggttactatacagaggtttagagaggttaaaagaaaaaaacacccaagaacacacatagttgttaagtagtgggtcctcttgttgattatcttattccagtagaatttgtttttaggaaaggacatgcaggtttcaaaaatatatacataataaatatgtttcccaaatgcgatttagtttaagcccttggttatgatattagagatatactaaagtattaatactacagtgttaaagctgtaatttctatttcacccacgttgctgcatcacatactgacgttgtttgagagtgtgcttttaagtggctgtggaggactatatgctatgagagctgctttatgcttttctttttgaagatgttgatggtgctctcatcttgatgagcacaactccttttcagtaaagattctggataaatgtctgttgcatggaattgaatgctagtcta

SEQ ID NO: 51216 - DNA, 601 bp, Homo sapiens
  misc_feature 41, 532: n = A,T,C or G
ggccccccctcgaaagtcttctagaattaattaacgcgggngacacatttcagctttacaaggtgacatctccagaagtctttttctagtatttttacttttcgatatgctcttccttaacttccggtgccctatatatcttttgaatgtatttttactgtggctggttctttaagagaccatcttatgcccttgattttccctcatgctttattttgtttctggtatagtgagcaagtttctctttctccagagcattggctttaaatccccttcaattcaaactttgttcctctcctgagtgctctgtgtgtagcacttcaatacttctatttttacagtcatactgaaggacaagactcccaatagttagcaaagttgtgtgaccacccccaaccagctctggctgaagtgtattgggctctctgttgctagcttctcctgtgttttttcatgtgcatgcattgcccttcttcagattgtgtctggagatgaaggggaacagagagacctaaccttggatagagcacanggattgaatctgagaatagttagcagtgggactagctggttaaagaatctatttcaaaccttggaacat

SEQ ID NO: 51217 - DNA, 593 bp, Homo sapiens
  misc_feature 545, 557: n = A,T,C or G
cgggccccccctcggggtacttctagaattaattaacgcggggtgccatctcagctcactgcaacctctgcctcctgggttcaagtgactctcatgcctcagcctcccaagtagctggaaccataggcgtgtaccaccatgcccggctaatttttgtatttttagtagagatggggtttcaccatgttggccagactggtctcgaacttctggcctcaagtaacctggccactttggctcacaaagtgcgggattacaggtgtgaactgctgtgcccatcgtcgacatgccttttaataatgccgtgaggaataatacataaccaaactacaacatacttgaactcaatttttaatggagccattatatagtttcttttcttgtgatatcttcatttggttttgattatcagggtaatattggtctcacaaaattagttgggaaatgtctcctcttctgttttgtaagagatattaattggtgttaactaattagtattaattcctctttaaatgtttggtagaatttaccagtgatgccatctncgcctgagattntctttgcaggtaggtttttttttttttattactaat

SEQ ID NO: 51218 - DNA, 365 bp, Homo sapiens
  misc_feature 42: n = A,T,C or G
cgggcccccccctcggaatacttctagattattaaaactaancattaaacaaaaacatttgcctgagctaaataggtttagaacattatttttttggtatgattacataaaattgtatcattttatataggtggataatgattacatattactcctttgtatagctgagagagtacttacattaaactttaccttcttttccaaaaggccactaatagttatcatatataggccaggcacggtggctcatgcctgtaatcctagcactttgggagaccaaggttggcggattacttgaggtcgggagttctagaccagcctggccaacatggtgaaaccctgcctctactaaaaaaaaaaaaaaa

SEQ ID NO: 51219 - DNA, 602 bp, Homo sapiens
cccccctcggaagtcttctagaattaattaacgcgggtccctttttaatccccagaaccctatagcaaaaactccataattatttgttaaagtttctagtagagggtacactaagtggggtctatagatactgaagctcttgtgaaattctgctggcctgagttcatgatttaagggaatgctggtgatagcttgtagaagaaactgagattgtattggaataaaatgtggaagccattgattttagagcctcttttttattgttctgtgaataaaatctcatttgtaagccctcaaatgtgggccttgacttttagaattgagagctagaagtaaaaacaaattcacagcagtgtactaacacatttttgttaattcctaagatattttgctttagacctattaacatatttagagttatgttccttagttctgaggcaaatttgctctgtgaatagcactacactaggaagaaatcctaaaagagacattaacatgtaatttgtgtaaagttctttttatatttcacaagttatgaattttctatagtccttttaagcgttaaatggatttataaaaagcttttggtggttagcaaaatg

SEQ ID NO: 51220 - DNA, 583 bp, Homo sapiens
cccccctcggaagtcttctagaattaattaacgcgggtatctttatttgtgctaaagacttggctgagcactagcaatcacagtgtgattatcctcacaacagaagtacctgtaaatgctgtagaaatagaagagagttagaaaacgcttcatagaagcagcaacatttgatcacagtcttaaagaatgatctggcaggagagaacagggagtggggactccagtacaaattattccacaaagctccagaaagggatttgtgcccaactatattgcatatcaatacaaatctgatgtacgtatccttagtcaggtcatgcttgatggggagcacgccaaagaaatcttggcagcccacatgagcggaagtttgttatgtataaaaaaaattgaaggtattctataaaagaacatagcatgtgcaatgtcacaggaaaatgaaaattcatggcaaatatcaaactgataaataccaaaaggctatgggtaagcctctcacacattgctagtgggaaggcaaaaagtacaactcccatggagaagaatttggccccctcttgaaaaatcacatacacattgtcat

SEQ ID NO: 51221 - DNA, 599 bp, Homo sapiens
cgggccccccctcggaagtcttctagaattaattaacgcgggtggattgcttggttataaaaatgttgtgtgattattgtaaactcttattcagaatgttttttctccgttgtataatgggcaccatgatgacataaataagcttctttataaaatttctgctgtgtttcctacagctccctcctatgacaaactgagtatttgtgatttaattctactggatgatttacttctactggatatccttaagattatatttatttacaaataaaaaatcactgaagtgggatccctgggtttgttgttataaaacttattaattatcttaaatatcaggttttcctctcttcaggctcagtcagtaggtcagggaaatgtcatgtggggccattttctcttatccctgccactttgacaatggttgtcaaattagaatgtgcacaccaatctctcgctaacttgacaaatgcacattcctaggtcccaaccttaggattatgacttaataagcctgggatcctgaatgtagcccacagaaatccacttagtaacacccgtttacaaagagactcctaatctgcgtggtccaagacacattt

SEQ ID NO: 51222 - DNA, 596 bp, Homo sapiens
cccccctcgggggtacttctagaattaattaacgcggggcctcagcctcccaagtgctgggattacaggcatgagccaacatgcccggtctaggttatcagttttaatgaccacttagaatttttaatttaataaactaaaattttgtattgaatatttttgattgatgcaatccaaaaattaaaacatgcccttttgtaaaaaatcatcgtcctgtctaagatatgctggtatcttgagagctctaatttgatttcttttaaacatatgtaagctaagatttttatcctatatagatttatatgtggagttttatgcatatatgtattaacaatcacatggagaacattttccaagtttgtttattcaataggaattggtccctggtaatattaagagagaaatactaataaggatgtaagataaatccttctgatttgcgcagttaagtgcaatgctctgctccagatgtaatatgactaaagagaattagcacatgacaatttaggcagacagaatgtctaagtgagcagattggtttataattctataaaatcccacctgcagtagtgatgtagtgatgccttccctccctc

SEQ ID NO: 51223 - DNA, 399 bp, Homo sapiens
ccgggccccccctcggaagtcttctagaattaattaacgcgggggggctcatcatatcttcctgtctcaatattcctgctttccaatttcttggctgcaagtatgactgaggatggtcaccagccatgagggaaaaggaatcttgtaaacttggaaaagacctcaaagatcttagtctcactcctctatttcccagaaaaaaaaaaaaaaactctgactagggaggtcaaaaggtctactactacccaagatcatccagggagtttcctgggtttcttgcactctctgtcttccccgaggggagccccagtagggcaggaactcagatattctgattcccttccctgcccctctccctaagatgaaaaggcgtctctctggatttggtggttctctttt

SEQ ID NO: 51224 - DNA, 609 bp, Homo sapiens
cgggcccccccctcggaagtcttctagaattaattaattcgaaacatgctgtagagatgctgatttgtaacatagaatgataaattgggttgaaagcaataagtctctctgataggaatgagctagagttggagttttatgttatttttggctgactggtggactcagagctctgctttcttaaagggacaaaccaaagaatttgtgccttatgtgaaggtcaggctggattttattggcttttggttgcctgataatttgtgaaattattttgccaacctcacctgtttttttgttgttgttgttttgtttttttgtttttaatagacatggtttgactaggctggagtgtagtgatgtgatcgtagctcagtgcagcctcaaactcctgggtttaagtgatcctctcacatcagtgttttgagtaactgggactaaaaacgcacatcaccatgcctggctaaattttgtttactttttgtagagatggggtatcactatgtttcccagcaggctggtctcaaactcctgacctcaagagatccttccacagtcctgtggttacaggcatgagccaccactcctagccctcttcttcctttttttttt

SEQ ID NO: 51225 - DNA, 334 bp, Homo sapiens
  misc_feature 39: n = A,T,C or G
cccccctcgggggtacttctagaattaattaacgcgggnactcaatataaaatcatcacaaaaccaatgaaataaaaatgcaagtataaacaggctttttgattataaaaaaatcaagagccctgatcaagttctgtaaagaaagaagagaacaacagacccagggcctacttcagggtgaagtgtaggaggagagagacgagcagaaaaaataattattaggtagtaggcttagcacctgagtgataaatctttacaacaaacccccatgatacaagttacctatgtaacaaacctgcacatgtaactcctgacggaaaaaaaaaaaaaaaaa

SEQ ID NO: 51226 - DNA, 577 bp, Homo sapiens
  misc_feature 509: n = A,T,C or G
ttctagaattaattaacgcgggcattaatgtgttattattaataagaacttctagaaacagagaagtctgatattgcatttgaagttcacggcaagagcatgatgcaaactcccactctgtccccctgaagccctgggtgagtctgttctcatattcttgccttcaaataggtgttaggttgttcttattggttgttttgttttgttggctttcagtggtaaagagtcaggctaggggctgatgctgaggcttgggttgagaaatttgaaataggagtgtcccataaagagtggcaacatgatccatataccaagctagtttagtgtcaataacagcttggagcctgagggacaccgtgacactataaatccctgaggacatttgcataattcttgagaggaacattgacttttcatgggagaataatgtgattcgaggtcatttcatctatgtattatgggggaatgaagactccatctagcctgtaatcaaatatatgttgcctcanattctttttaaaatcccccagacctatcaagttaaaatattttcacacacatacatatatatttacac

SEQ ID NO: 51227 - DNA, 601 bp, Homo sapiens
  misc_feature 31: n = A,T,C or G
taccggggccccccctcggaagtcttctagnattaattaacgcgggggccttattataaaaagcaaagagcaaaaatatcatgcatggggtcctgcttttagtttatacatggcttcaaattcttaatagcagcttaatttcatatggataagtatttcacaagttaggagtagactttctgattctgattattatcagtttttagtaccaaactagaaatgataccttctcaggtagtttaaattaaaaaaattataagcctagttacgtaaactattcagaaataacccttgttaaaatttcattaactttctcacaaaattacagattagagtcacaacaactttttaaccttcatacatagatatcaacctccaaacttatatgtacatacatacatacacacatacacacatacataaatgtgtgtgtattcttatatccctagattgtttggggtaacaagatcagagcacacagattaataaaatatctttagagatttcaataagagttccaaatgctgttacatatttttttctgatttacatattcatttatctctactttcatttactcatttatgaattcatttattta

SEQ ID NO: 51228 - DNA, 509 bp, Homo sapiens
gggccccccctcgaaagtcttctagaattaattaacgcggggaacactgtgtaccacctttattaatacaccactaacagtgctgatccactgtcagtagagaagtcaccagaatttgggaacaaaggaaaaaatggactaatgtctagacagcaagaggcaagggctcaaatccaattattcattttatacttgaaagtggaaatatgactgggcgtggtggctcacgcctgtaatcctagcactttggaaggctgaggtgagaagactgcttgagctcaggagttcaagactagcccgggcaacaaacatagcaggacctcatctactaaaaatttaaaaaattagccaggtgtggtggtgtatgtctgtagtcccagctactcaggaggctgaggcaggaagattgcttcagcccaggagtttgaggctgcagtgaactatggtagtgccaatgcactccagcctgggtgacagagcaagactgtgtgtcaaaaaaaaaaaaaaaa

SEQ ID NO: 51229 - DNA, 595 bp, Homo sapiens
cgggcccccccctcggaagtcttctagaattaattaacgcggggtgctgagggtttaatacagaggttgtgagtaggcttcattcaaaagctcgtttgtaaaggtattcttcaacttaaacatagtcagtgaggtttcctaagtgggaagagtaccaaaatacaaaaatggaaattaatgaaatataagccagagctcacaagctctgtgaagaaagaagcgatgtgtcaagaaatgggaaggtgaaaatagtttataaaaatgaacttgggtcaccttacgataggaacctcctgtctgaaagtttgtggcaaaaccagtctttctcaaactagaaactgggagagtttgtgggagagatgtggagtgatctttggagattttgttttaaatttcaatgtttccgttttagactaactttaaacttctatcaattataagcagtattctttttttgcagtgacagtttcaactaaaagtaattttcataagtaaaattttatctctacaaaagaagaggccacagaagtatgctcagttgttcctagaattttttaattcttaaaagggctctatagtgaacaggccattccca

SEQ ID NO: 51230 - DNA, 601 bp, Homo sapiens
cgggccccccctcggaagtcttctagaattaattaacgcgggggccaggctggtctcgaactcctgacctcaagtgatctgcccaccttggcctccaaagtcctgggattataggcgtgagccaccgcgcctggctccttggtccctttccttggcttctctgtacaagtctgctcagcttggatattgtctcggaaacaagagagaggggaacatcccaggctggtgctgatgccgctccccctgggaacggctttatctctgtagtttctagcacgtaggctttgtaaataaaacagggtctggacttccctgctttgttagtgcaagctatcatcgcggcttggagccgcctggcctttatgtcaaagacatttggttatgtgccgtctagaagctacctcctacccagggagggaggccagcttgcctggtggtggtgtctgcaaggtgggccacagtttatcttgtcttctcttttgattttttggcctgatggcaatttggtattttaaaacaaagttataggccaaattcccacaaactgagagatgctaaattgcttccagtcttctggtaaattaccatgtttcccattgcc

SEQ ID NO: 51231 - DNA, 613 bp, Homo sapiens
cgggccccccctcggaagtcttctagaattaattaacgccgagtttttttaaaaagaccccgtcatctcaataaacttgataacttattcttagaaatatttaaaaattactatttaaatctagaacattgtgatggtgcttttaaggcattttctagggctcttagtgactttgaagtagaagaaatattttgtattgatgctccagtgccccgtggagcaaaatatattttttatatgctttccctggatagacatgaaggattgttacatcttgacatatgtcccatgtcatggaaagaaagtcaggccaggatcatgggagtttgctaaattaagtaacaattgtttcataactacccatttccctttctcatgtaacctttatcaacattatgttcacatgtggcatattgcacacgtattatcaaattgtgcttatgttcttcctgctactctcaaagggtagttgaatatttatttaaaaacaaactttctgtgtttacttgcacttagagggtaaaggtaaagaaacagattttgacttcacccttagcatttaacacttgtgattgaagagattagaacaaatattgggagcttctaaaatgta

SEQ ID NO: 51232 - DNA, 561 bp, Homo sapiens
  misc_feature 517: n = A,T,C or G
gtcttctagaattaattaacgcgggatccagtgcctggcattatatctggcaaatagtaggtccacaactaacgcatgaaagagaaaaagctataagcctaaatatgtagcccagaaacctgtctcatgtccatcttttggcagcacaggcagggggccttgttctccatcaagcctgcctagctgttgagagagctcaggttttctgggcaataactgggacaatagtgggagaagttttaggacaccatatcagcaggggaggatttgacaagtgtttgtggggctttcactgtgggtcagaccctgtctaggtgaaggggatagaaaaattgtgaagacccagtacctgttctcatagagtggtcatgggaatcaaaggaacttacaagtggcaaagtgattggaagactgtaaagcactaggcaatgtgaggcctttagatggtgaaaggttgggccaggctgggcacagtggcttatgcctgtaatcccagccactcaggagggtgaggcangagactcgctggaaacccagaggcagaggttacagtgagccaag

SEQ ID NO: 51233 - DNA, 565 bp, Homo sapiens
cccccctcgagagtcttctagaattaattaacgcgggaggtgccctgatggatgccaaactttcacaattgtgcaatctttacctttaggactgaaagtgaggtcttaactgcctgtataatctaggcaaaatctgggcctaagtactaaatacattttgattgtcaagttctctgaagtagccattgtaggtcatgctcaaaaaaatttgtaatatctgtttgtgagttttattattggcaaagcctgccatatcacattgtttgtgtggacataagtgaggagctctgatactgaccagggatttagcttaatataaggtgactggttgttcaatcctattgtgcagccaataataagtgccttctatctcaccaaattttgtttcgtaaagtaagtaagtgtgaagttaataaactataaaacagttacatctactactaagtgtacacataatatttgaaattcaaactctgagaataaacagatatggaataaaaaagagaggcaataaatgtataagttagaggattttttggctagacattttgatatacattaaaat

SEQ ID NO: 51234 - DNA, 613 bp, Homo sapiens
cgggccccccctcggaagtcttctagaattaattaacgcgggggcggttgttatatgttttccctcaagcactgtcctctgatatgcaggccccaggcaggcccgggccaaggctgttgccgtggaaaccatagccaaagaggaggggaggggctgaggaaccagagtgaaggcccaggaggctgcaaatgtccaggtctggagctggaagtgtgctgagatcaaaatgcccgcctagtgcaacgcaggtgcttcctacaagttttctgagaaaacgaacagccctgcaccccctccccacctctatctgagccaagagaactttctccttgtggctgtgtccgtgggagccacacagtcagtccacctgctcagatgagttgtcttagttggatccagaatgactccagctgaaggcacaaagagaagggaaagctggaaaaaattaaaactggagtcaccacgtaccccaaagagttgaaaccagagtctcagagagacagctctgcccccacccgcagcagcaatattcacgattgctaaaacgtggaaacagccccggtgtccaccaacgaacgatgggcaaacggaacgtgggctattattcagcctt

SEQ ID NO: 51235 - DNA, 504 bp, Homo sapiens
gggccccccctcggggtacttctagaattaattaacgcgggagtcatattctcttatttacctggactcaggtcatcagaatgtctcattccctattatctctgacctttgaatgactgatgagctctgtagatttaaaacaaaaaaaaactcctttctgaacaagagcacaggtattctgtttccaattttaaatgtgaaagtttgtttttatggtttttatgaaaaggttgatttcctccagcaattttaatgttctgtataactaacagaaatttaatttttgaatttgagagttattgatccatttactagtaacagctgaatgttccttaaaatgcaaaagagacatttgttttatctttttgagagaatggtgctgtttgttctgcagaactggaaatttgccatttatgagcagcacttatctcactatttacagctttttctaatcagatctaggctttttattttcctacttgtgcctaagcaaaaaaaaaaaaa

SEQ ID NO: 51236 - DNA, 596 bp, Homo sapiens
  misc_feature 27: n = A,T,C or G
cgggccccccctcggaagtcttctagnattaattaacgcgggtttcctgcttactacctccatgtacacatcactcctagtaaattattgatagttccttgtatactcagctttctctttcttgagtagtcacctaatttgtttccaagggtacatttagactaatgttaaactttattttatcttacagaactctgattatctgcactgtaatcacagaacaaaattttatttggcctatacattacaatctcatgatcattccatctataaccattgtttacataaagtcctaattattagccaatatatgaagattagtaagaattggaatggtaaattgacttggtcatttaacaaatatttattggcaacttaccatatatgcatggcattctgctgagataaggaaataaaagaatgaaaaaaattcctactctctaggctcatattgaaggaggtaaataaacacatacacaaacaatcttaatgcaatgcatgctacaaagaagacatgcacagagtattaaggggctcgcaaaagaaaagcctaactgcataaaaagtagtcatggaagcctttcagagacgtaaca

SEQ ID NO: 51237 - DNA, 554 bp, Homo sapiens
cgggcccccccctcggaagtcttctagaattaattaacgcgggagtcttccattttattgttttatgttttggggatttgtttggttttggattttatttctaaatcactgatttaaatctggtaattattggagaatgactgcaaaaatctctagtctcaaccattggcttattcttaaatgatcaatacacctgaacatgcaatatttttgttcttgttttgtttttcagttagacctcattgtaggttataagaccattcaaataaagggaaaactacatgtattgaaaagcttaaaaataaaactcaaatagcttaatatagacagatatatttatgtttgataaatagccctaatttcagccaagtgcagtggctcacacctgtaatctcaactctttgggaggccgaggtaggtggattacctgaggccaggagtttgagaccaccctggccaacatggtgaaactccatctctactaaaaatacaaaacaacaacaacaacaacaaccacccacacaaaaaacagcccagcgtggtggcagatgcct

SEQ ID NO: 51238 - DNA, 298 bp, Homo sapiens
cgggccccccctcggggtacttctagaattaattaacgcgggccataactggaagggaccccagtacccagaactgatcttccacttgtcttactactactctaagataacattaaccattgtgccatatgctttcctaccttttgcagagtatccttgaagactctgtaaccacatacagggagtggtgaacaaaacactaaaccagtagttagaaattctggattattttccaaggactacaatttggccaccacatgaccttgagaaactcataattccccaaaaaaaaaaaaaa

SEQ ID NO: 51239 - DNA, 615 bp, Homo sapiens
aagactggggtaccgggcccccccctcggagtacttctagtattaattaacgcggggctggttgaggttgcagtgagccatgatcatgccactgtactccagcctgggtgacagggtgagacactttctcaaaggaaaaaaaaaaaaaaaagagttaattgttgcccgtcacagcaattaatacagatccttctcactctaaaaccttacactcagtaatgatctactatatgcaaagcacctcttacatccttcaccaccccattcattctgagattgactcctcccctttccagaaacaggaccacctaaacattccctattccagtcccttatttgcaagtcatcaaaagaaaacagagatttcaaaaagaaaacagagaccttatctgtaatccttggtaaggatcttccaaatttaagcctatgccagttttcaggaggagacatgaatatgaaacagtctgacctttagacataatttttttgttgactttaaattcccttggttaggccactgtaaccagtaaaataaattttattttagaaataaaattataaagggggaaattgagtctagccatacaacctactactagttactatctttgattc

SEQ ID NO: 51240 - DNA, 614 bp, Homo sapiens
gggccccccctcgaaagtcttctagaattaattaacgcggggtgtggccctgacattgtttcatacaagcagagctttctggccacaggcaggtttgaagcccgtctgccctcattagcataaggtgctacactaaccttccccactgttaaatgaatctaaaaagttcgctctcctgtggctctctgcattgtcaccaggacaggatttaattcaagactcaaattgagtcttaaactccattttttaccggcgtctgggttaagggatgtgacaggcccaaggttacaaagtcattgccagggcctccacagccgcctaggaaataccgcagcctctgactgctgtttgcatttgctggttaggctaggatgtggcatctggttgacttcaattggaggagataggagctctttatccaaaaggacactgaaataggtcagcagttattactcaaaacagatccagggtaccttaaatcccgagacataggcagggtgaaatagaagggtgagttttggcaaaagtcacttgacacaaagcctgactggcccggagaagctagaagaccttgcctgccaatcaacatgaagtggtataaaaagaagtttcta

SEQ ID NO: 51241 - DNA, 423 bp, Homo sapiens
cccccctcgagagtcttctagaattaattaacgcgggggaggggatgttacatgttgtgaaacagagtagcaaccacatcagacttctcttcagaaagcaggcgagtgacagtggagtgaaatatttagtgttggccgtggatcacggctgtagtcccagcactttgggaggccaaggtgggtggatcatgaggtcaggggattgagaccatcctggctaacacagtgaaaccccgtctctactaaaaatacaaaaaaaaattagccaggcatggtggcggacgcctgtagtcccagctactcgggaggctgaggcaggagaatggtgtgaacccgggaggtggagcttgcagtgagccaagatcgtgccactgcactccagcctgggcaacagagcaagattctgtctcaaaaaaaaaaaaa

SEQ ID NO: 51242 - DNA, 601 bp, Homo sapiens
  misc_feature 588: n = A,T,C or G
cccccctcgagaagtcttctagaattaattaacgcgggtacctccagctagaagaattataggcaactgttttcttcttctttatagttttccatatttgcatataacacattgataacttttttaaaagttaaactatttcctgcaaaatctactttttgtgatcaactctactttttctcctgtattttcctttttaaaattctaaaacttaaacaagtgtctgccaggtgtccgatctaatgcggacagccacttcacagggctggagtcccagcttgcaatttaaaagcaaagctaggccgggtgcaggggttcacgtctgtaatcccagcattttgggaggccaaggcacatggatcaacgaaggtcaggagttcgagaccagcctgaccaacacagtgaaacccccgtctctactaaaaatacaaaaaaattagctgggcgtggtggcaggcgcctgtaatcccagctactctgggaggctgagacgggagaattgcttgaacccgggaggcggaggttgcattgagccgagatcgcgccactgcactccagcctgggtgccacagcaagactctgtctcanaaaaaaaaaaaaa

SEQ ID NO: 51243 - DNA, 617 bp, Homo sapiens
  misc_feature 27: n = A,T,C or G
cgggccccccctcggggtacttctagnattaattaacgcgggcggatcacctgaggtcaggagtttgagaccagcctgaccaacatggagaaaccctgtctctactaaagatacaaaaaacttagccaggcgtggtggcgggcgcctataatcccagctactagggaggctgaggcaggaggattgcttgagcctgggaggcagaggttgcggtgagctgggatcacgctatagcgctccagctggacgggcaacaaagatgaaacgtctcaaaaaaaaaaaaagaaagaaagaaatggtagcatcactggaataaattcatagctttcactattttgagggatgactttaactaaatgagaacgtttacttaatatcacggtgcaaatgccaagagaaataggtataaaattctgaaaattaatacaatttaagaaaaagtcagctgggcatggtggttcatgcctgtaatcccagcactttgggaggccaaggtgggtggatcacgaggtcaagagatcgagaccatcctggccaacatggtgaaaccccgtctctactaaaaatacaaaaattagctgggcgtggtggtgcacgcctgcagtcccagctagtca

SEQ ID NO: 51244 - DNA, 544 bp, Homo sapiens
  misc_feature 502: n = A,T,C or G
cgggcccccccctcggagtacttctagtattaattaacgcgggccctgccactcagggtagaactactctgcctttatttagtatttagacagaaatgcacttcgatttgctataatcacaagaggtttttttgtttgtttgtttgttttaaaaaagaaaaagatctggtccaagatagcagtaactataacgtcatgatgacctctgggtataactcctcagtgtagaccctgatccacaaggctcccctggggtcaggagttcagtgatgcagtgcgctgggctgaaggggcccaaggagggaggaggatgaatttggggccatgtaaggcacaggatcaaagacttgaggtatgatagataaagcaaggatttgaaggtcatctggcagtctgctgctgaaattagaaatgcggaatctcagctgggcgcagtggctcacacctgtaatcccagcactttgagaggctgaagtgggtggatcacctgaagtcaggagtntgagaccagactggccaatatggcaaaaccctgtctctacta

SEQ ID NO: 51245 - DNA, 394 bp, Homo sapiens
  misc_feature 18: n = A,T,C or G
ttctagaattaattaacngcgggaactgtaatatgactatggaacaaaagattattttaaaaattaggaggtacaatgaggaaaaggatcaaacagaactcaaaatgaaatatataatcactaagtgaaaatcttaagggacacattaaacaacagattagaaataactacggagaaaaatcagtgaactagaagaccgataagaaattacccagaatggctgggcgcagtggctcacacctataatcccagcactttgggaggctgaggcaggtggatcacctgacatcaagagtttgagaccagcctggccaacatggcgaaaccccgtctctactaataatacaaaaaattagccgggcatggctgggcgcagtagctcacgcctgtaatc

SEQ ID NO: 51246 - DNA, 587 bp, Homo sapiens
  misc_feature 554: n = A,T,C or G
cgggccccccctcggaagtcttctagaattaattaacgcgggccttactaactaaattttcactataagaattattcatctgggctttgtaaactgaactctaggaaggggtaacactttaagcaactgtcaatcatgcataccaaacctcatatttggcttttatgggtaacagctagttaagcatgatgaagaaaaaaagagtttcaatttgtggaaggtattaggaatataactgaaacaggtaatgtgaggaaaccaggtaccttgtgcacaaaaagaggtgggtggaggagggctgcaaaggctattcagttgcttaacctactctaggctctatcccaacagtaagtgcagatactctaaaataacagttgaaaatacagtgaggttttgagataacaaagccaccctagaacaatgattctccaagtgttttaagaggatcactggcacagaagcaactgggataatgttttaaattatccaggtttctgggccctgcctcatccttaatctgaacctctatcggtgtgatctaagaatctgcattntatagcaagtacttcaggtgattcctacaatgc

SEQ ID NO: 51247 - DNA, 565 bp, Homo sapiens
cccccctcgagagtcttctagaattaattaacgcggggacatgctcgcccttcctgcagttccatatgtgctaaatttgtttagtatcacatgacactggccctgtctccctacacacgcccacgcatccccacctccacctcctggccacccaccagggatagatagactaaacccagccattagacttgactgacaaccagtttaatctcctgaaaatctggaatcaagccagtgagagaccacgctgctttgctgtgtgggatgagctggaacaccaaacggaaccacatctggattaatgtccagaaagagccagagccacatgcccgtactacagttacagaatggcagacgtcaagaggaagctggtttctttagaggaacacagagtggacatgcagaaaaggacagggatgaaagacagtgtccccagaaaaagggatgggacagtaccttccaggggctggcagtttccagcaccagttcccacagtgcctagctggacttgtttccccaagatctccatgtcctcataagtgtcctttgcaaacaaataagccct

SEQ ID NO: 51248 - DNA, 407 bp, Homo sapiens
  misc_feature 17, 25: n = A,T,C or G
attaattaaaatgtgtngaaaacanatcatctattttcaaataagctactatatattttcaacatcagcttaaaaataaaaagtttcaatacaaagagaaaatgccgtattaaaaaagggtgccaagactagaagaatagaaaggtaaatatttgaagtgttactttatgccactaggaaaagcaaaaagacttttaatcttataccatcagtattaaggtatacagttttctaaaaatttatctctgcagttcaataaataattcctgcacattttatttgatagagcaaataaagaaaaaaattaaaaaattaaaggaaatgtcagtattagactcatgcacttttcaaagcattactaaaaagcatcacacatttctgtgtaaaacacttgtaccattgcataa

SEQ ID NO: 51249 - DNA, 537 bp, Homo sapiens
cggggccccccctcgaggtacttctagaattaattaacgcggggtcaacaggatatttacatagataaaaatcattttgacccttacctcacaccctacacaaaaatcaattcaaaggggttatagatctaaatgtgaaaagtaaaacaataaaacttcttggtagcataggagaatatcttcatgatattggagcaggcaaaaaattcttaaagaagacacaaaaagcactaacattaaaagaagatgtataaatgagttcattaaaattaaacacttctcattgaaaaattataagagttaaaagcaagctacagtgtggaagaattctgtaacacatacatcgcacaaaggacttctatctagaaaatataaagaactccataaaaatcaataagaaaaaggccaggcgcagtggctcacgcctgtaatcccagcactttgggagggcgaggttggcagattacgaggtcaggagattgagaccatcctggctatcacggtgaaaccccgtctctactaaaaaaaaaaaaaaaa

SEQ ID NO: 51250 - DNA, 542 bp, Homo sapiens
cgggcccccccctcggaagtcttctagaattaattaacgcgggtaggtgcatacttagaatataaagcaagtttttggagagaatgctaaaaagaaataaacaacaaaaaacttctattaatacaactccaaaggcctttgtgtatattaagttgaaatgtgaagaaaactgaaataaaagaaataaagatttctagtcctgagtgatgtcacactgcacatgaactcattaaaagcacacatacggccaggcgcagtggctcatgcctataatcccagcactttaggaggctgaggcaggcgaatcacccgaggtcaggagttcaagaccagcctgaccgacatggggaaacctcatctctactaaaaatacaaaattagctgggcgtggtggcgcatgcctgtaatcctagctacttgggaggctgaggcaggagaactgcttgaacctgagaggcgaaagttgcagtgagccgagattgagccattgcactccagcctgggcaacaagagcaaaactctatctcaaaaaaaaaaaaaaa

SEQ ID NO: 51251 - DNA, 478 bp, Homo sapiens
accgggcccccccctcggagtaccttctataattaattaacgcggggcctgtaccccaaaactattgaaatttaaatataaaaagttatcttgcttctcttctcttcatagattcagattcaacatttttgacaggactcttacataaataatgttgcatccttagaaattacacattttgggcctagcacgtggtggctcacgcctgtaatcccagcactttgggaggctgaggcgggtggatcacttgaggtcaggagtttgagaccagcctaaccaacatggtgaaaccccgtctctactaaaaatacaaaaattagccaggcatggtggcgtgcacctgtagtcccagctactcgggaagctgaggcaggagaattgcctgaacctgagaagcagaggttgcagttagcagatatcacgccactgcactccagcatgggcgacagagagactccatctcataaaaaaaaaaaaa

SEQ ID NO: 51252 - DNA, 578 bp, Homo sapiens
cccccctcgagagtcttctagaattaattaacgcgggaccactcacatgaagtcttaaaataatattaaatgcagagagatttattgccaagttagataatatctttccagtaatacgatattacgacaaaagatatttttatgaaaattagttatttcattatctcttcagtataaactttaagtcagaaggagaactatgtcacaatgcttttcattattgaagcctgagtgttaaaaaagacaatagtctttctcaggcggagacctcagaaacaaaacccatgattagagtctgtaatgaaaatgactcttaaacgaatctgagagttaggaataggacatcgagattggaaagaaagcaattggcagcacctcttgccaccttctgcccgtggactgtgtgtgtcttctctggttcctttgtatcgaactcaaacgccctgagcatttatcataggtggccctcaaatacatttttctttttctgccagacatgttctcttccatttatgtcagatgagcttattttcttgccattttttcatcagcagcatgacaaagttgtcactcctggc

SEQ ID NO: 51253 - DNA, 452 bp, Homo sapiens
cgggccccccctcggaagtcttctagaattaattaacgcgggacctaggattggttatatgtggggaagaaacacaatgtcagtagaaagaatttctgaagatgcatacagataaatgttgtcattgttttcctcagctcagaagaaaattgttttttcaactaaacacatgttttcacaaattatggagggcaaatttactaaaaacattctttttattaatatacaagacagtctgttttctgtcaggatagcactattctgaaacaataccttaaattgagctgacaagaatttaatatttgatgattcacaacctttcagtggctcagcattatgaatatcaattattactgcactacagctatttggaacagcatttaatattttgattaaaatgtactaaagcttttcttctttgtgtacatttcaatgccaaaaaaaaaaaaaaa

SEQ ID NO: 51254 - DNA, 576 bp, Homo sapiens
ccccctcggaagtcttctagaattaattaacgcgggagggtggaaggttctggggatttcatacagattttgttgaaagagagggctgtacaaaaaatatctagattttaacatttcacaaagcgaatatggaaattccacaaaattctgttaataaatctctttaaacaaagaacctccaatctttaaaaattttgtaaatcaactgcttaaaaatacaatttaagcagtcacctaaaactctgtaaattactaaactttgttaccctagttatgtaagatctgttttcaaaacaccatactcactgaaaatcctatttgttattttatgtcattactgacatagctagataattccttcataactccaatttaacctaatcatgctttttaattacagatattaagaaagaatatttctctacagcaatttcgtaagaacttcccgaagcttagagggaatagattaatatttaacagatgtaaaatgcattaacattgtttctgaatttgtactttgtggaatacttatcctgaaaagttatcagtttcacatctattatacgtatttcagtt

SEQ ID NO: 51255 - DNA, 601 bp, Homo sapiens
gggccccccctcgaaagtcttctagaattaattaacgcgggggagatgagttgcagagtttctctgagctcagagttacccacttatccacccagcccttccccgcagaggcctggtcgagttttggccttgctcattaatagcacgattctcccatctctcatactggctacaatccctcattcccaaccggtgtgtaagtgggctagcatgtgtgtggatccttctcacaaatgtttctggctgctcgtttccccggatggattcctgtcaggatgctatgggacaagacatgagacatcccatccgctttgttgattcaacatggatatgtttgcttttctgcctcagaatggagacagttgtttacagcctcaccagtcaaaatatttactaaacgtaacctacagttccaggattgagaggaaggaaaacacacagttcactttccatgttgataaaaacatttgcataagatgccttaaaatgcaagccggtgcccctctgtgtgccagagggatgtgctcaaggtgagagtctcaggagcggggtttcctcagcacacccgggccacaggccctcttctgttaaatgtcatatt

SEQ ID NO: 51256 - DNA, 524 bp, Homo sapiens
ccgggccccccctcgaaagtcttctagaattaattaaaagactaagtactgttaagatgccaagtttccctaagttgtaatctcaaccagaattccaagattttttaaaaagtaattgataatctaactttcaaatttatatggaaatacaaagaacctgaaataaccaaaaactttgtaaaataaggagaaagtttaggggctgatttcaagacttattataaagatacagtaatccaggcagtgtagtgtcagcataaagtgaaaaaactaaaccaatgaaacaatatagacagtctagaaacagacccatacgtatatatggtcaattgatttttgacaaatttgccaaggcaattcagtgggggaaaggagagtctttcaacaaaatggcactagaaaaattatataaggtagggcatggtggctcatgcctgtaatcccagcactttgggaggctgaggcaggcaaatcacttgggcttaagagtgcaagaccagactgagcaacatggtgaaaacccg

SEQ ID NO: 51257 - DNA, 516 bp, Homo sapiens
  misc_feature 30, 488: n = A,T,C or G
accgggcccccccctcggagtacttctagnattaattaacgcgggtgccaaggtttgtgctcaccatttccatccttaagattctcacaggagaagaacccacacaacagctttgtccctgcgactctgggtgagtttctgacactggcctgggctcccgttttgcccgtcaccaacttctcacagtataactatccaagagaagtagcatttgatgtcagggaatcaaaagggctaaggctcgggaggccaaggcaggtgaatcacttgtaatcaggagttcgagaccaccctgaccaacatagtgaaaccccatctctactaacagtgcaaaaaattaaccaggtgtggtggcaggtgcctgtaatcccagctactcaagaggctgaggtaggaggatcgcttgagcccaggaggcagatgttgtggtacgccgagatcatgacactgcactccagcctgagtgacagagtgagactccatctcanaaaaaaaaaaaaaggcctaaggcttact

SEQ ID NO: 51258 - DNA, 300 bp, Homo sapiens
attaattaacgcggggattaccttgctaagattgcggcgcagctaaccggggcttgcggtgtgccacggaacgccgttgctgctctcatctgatctccggagggaagaggctcactatcaaggcgctgaatcgtggaggtagatagagacagctgaaagacttctgtgtgaacaactttcttttgcgccgagccccagctctgtgtagaaaattgaatctcaacagaggatgcacaggctttaccaggattctctgaatctagcagacattctaaagatcctatgtggttcagcattaca

SEQ ID NO: 51259 - DNA, 588 bp, Homo sapiens
aagactggggtaccggggccccccctcggagtacttctagaattaattaacgcgggggtggaaaagtctttctcctgagttgcgcatgtatttatttgtgaggctttacagaagactaacatttagttgcttttagccatacatttaatgagccatctttgggaaaaacaatgaaatcatgcagagtcaatactgtcttggaaaatctgggaggtactatttcaatgactaccaatttggcgtaattagatctatgctgtaactacagagagaacccacccagtcctatttttatgcctggtatcctgacagaaagagactggtgattagtttatattgacattgagcattgggatttatgtttgatcggtttagtttagactgaccaaattgtggtttttgaattcttattcttaccatcatcaaagctgatggttttaaccttaacagaataagcagtgagaattcatacaagattttcttctgagttgtattgttcattgaattagatgacaatgggggaagatacgtgttggttaagaatgtgctcgttacccttggttagtttctgctgatcgcaattgctta

SEQ ID NO: 51260 - DNA, 515 bp, Homo sapiens
ccgggccccccctcggaagtcttctagaattaattaacgcgggtctctaactctttagaatagtaatgttcacattttaggaataattagaaatctataagcatgtggcctgatttctctcctaatcaactcttttaataaaaatgcatatatagcctaccaaaactaggtatgactcatatctcttggctagatgttactcaaagcctaaaattgggctgggagtggtggcttgggtctgtaatcctagcactttgggaggctgaggtgggcagatgacctgaggtcaggagtttgagaccagcctagtccaacatggtgaaacccggtctctactaaaaatacaaaatattagctgggcgtggtggcaggtgtctgtaatcccagctactcaggaggctgaggcatgagaattgcttgaacctaggaggcagaggttgcagtgagctgagattgcactactgcactccagcctgggtgacagagcgagactccatctcaaaaaaaaaaaaaaa

SEQ ID NO: 51261 - DNA, 531 bp, Homo sapiens
cgggcccccccctcggggtacttctagaattaattaacgcgggtcggactcctaggctcaagagatcttacctgccccagcctctggagtagctgggatcacaagcacgcaccaccacagcacccagctctttctctaattcttaggcagatgttttctaattagattaagcataaattaagtgtgaagtttacatttggtcttgtagccatcctaagaaattgaccttttaattccatcatttacccaagcttcccaaatcttgctgactgggtggtaggaggaaagatttgcaaggagaataacataatggactgggcgcggtggctcacactgtaatcccagcactctgggaggccgagacgggtggatcacccgaggtccggaattcgagaccagcctgaccaacatggggaaacctcgtctctactaaaattacaaaattagccgggcgtggtggtgcatgccggtaatcccagctattcgggggctgaggcaggagaatcgctcgaacccaggaggtggaggctg

SEQ ID NO: 51262 - DNA, 595 bp, Homo sapiens
  misc_feature 19, 32: n = A,T,C or G
taccgggcccccccctcgngggtacttctagnattaattaacgcgggttctctatgctagacactattttaaacattcagtatcctgcttaatatttctagaaaacctataagtagataccataactaccatctctatttacaggacattgaggctaagacaggttaagtcatatgtctaataagtagtggagtcacgttttgattccaggaaatctgaaatccgagccctcacttttaatcaagatttacttgtgcttccaatactggctagagtgtaaaaaaagtattgttagaagtagtgtaggtagtaccctctttctagagaggactttataaaatatcccccaagcactaaaaatgtgcatgctgtttggaatatcaactgtatttttacaaacctattcaacacatagctacaaactcatgcaaataattcgttgtgcagatttccacacaaatttttcaacagcagaaaactaacaggaaataaagagattaaatatttactaattgaatacattgtggcatattcatgtcatggaataccttttagcaattgaaatatcgcctctgatgaatagttattgacaaat

SEQ ID NO: 51263 - DNA, 595 bp, Homo sapiens
ccccccttcggagtacttctagaattaattaacgcggggacagtggtaggctacctctggagactggggagagactggagggaagagatcaatcagacctttaatattgacttgatatggttcttattttttgaatttgttacaataatctttcacactttctataatgaaaaacagtagtaaaacacaaattacaaggtagcagaatttattcttaatttttgctagtatcaattaggttccaagttcttggatgacaagagacttgcgttatatttcttggttaccccagagtgtctagcacagtaccatgttatccagtaagtatttgctgactgactgaatgcatgaaggagccctctcttctcctgcagggtggcctttgcaactgttttctagaactaaaatacccagggtcatctcagtttattctaaggttagtatttctttttccttctttcttatgtttttgtcttgggagatgctgtgcagcaaatttatcccttaaaaaaaaaaggaaagttgctctccagatctgactggtacacctggaggaaagaaatagtaagagatttttttaaggagaagggaaaaa

SEQ ID NO: 51264 - DNA, 610 bp, Homo sapiens
ccgggccccccctcggaagtcttctagaattaattaacgcgggaatggccaactcttaattttttagatcaagtgaacaaatattgtattccataaaaattacaaaccagcaagcaatccaacgttcatctggatttagaatggattattttactgaaagacagagaatgtcatatttatctttcggattgagcacaagtacaaagataatgcctataagaaataaagagatggcagtggtgagtacctgccatcccagatacttgggaggctgaggtggcagaacagcttgagcccaggagctcgagtccagcctgggcaatatagtgagagcttgtctctgaaaataaataaataaataaacaaacaaacaaacaaacaaacaaacaataaaaaataaaataagagatgggataaaaataattgtaaagattttaaacaactacagaaatacaattcatcaaccttgtttttttttaactgtgattctatatattattacacaaaagagaaaacctgttctgtgaagtttgttagaagaaataacatgagctaaaaatagccatacttaaagtgattaaaagtcaatcaagttttttttcccccttgg

SEQ ID NO: 51265 - DNA, 160 bp, Homo sapiens
  misc_feature 53, 56, 61, 62, 71: n = A,T,C or G
cttctagaattaattaacgcgggaagattgagaatctagatgtgtaagactgnttntctcnntcttacacntctatattctcactcctctcttcttgctaccgactctcattctgtcccccaccctcccctaatctgtgctcactgcttcctttgcctcc

SEQ ID NO: 51266 - DNA, 569 bp, Homo sapiens
cttctagaattaattaacgcgggcagcctgaaggaactttctataggagtaaattacacttgaagacactatgctgcaggtcccatgggtggtgagtgacaccaattcttcacacctcttccaacggtcaccctcatcacctctgtagctgccaaaatcttgagcaagaaaagatgattaaacttgcttaatagccacaatgtgtgggtgatacctctccatttagtgaaaaatacatgttggtgtcagtagatttggtcataatgataacagagcatttgaaatgtcttcattgactccacataaattaatctgttatttctttcaaacagtgtctgaagtgtatatgcacaaaattagcattttctggtttttatcctgcaagtgtgctgaccgcgtatacccatctgaatgcaaacaattgtaggcaagcgagatatcaaagatatggaatgcagcgagaaagatatcatgaacctcaggcctggctcccactctcctattaaccagagtccttttccttccagagctggtcttgggaagtcttcttagatttcctcatttcaatg

SEQ ID NO: 51267 - DNA, 597 bp, Homo sapiens
ccgggccccccctcggaagtcttctagaattaattaacgcgggttgtatgtgctaaatatatgttacctttaatcttgacaactatacaggagagataacttccagaaggctagttagtcatggtatagtcaaggtttgcagccagatgtctaactccaaagctagcatgttttaaaagatacaaaagggcatccctatttgcactgacataaaagcacagtcttcaatctgagccagaatttttagttttcaaattcacatgaatatttatttatttggaattcagtgaaggaagcaaaggaggaaaggaataattcagtccagatttcttggtataaccaaacaaaataagatctttgaaaaggtgaaatgaaatagaaaaagaatgaaaatttgttaaagggagtcaatacctcttttctcttcacgggttattgttaaataggcagaccactatttccatagagatgagcaattattgccatagaaacagttaaactgggattgttttttatatttacacaaactcacagcagcatccttctagttcatttgtagagcaaaattgaaaagaaggcatatagcgtgataacttt

SEQ ID NO: 51268 - DNA, 592 bp, Homo sapiens
  misc_feature 28: n = A,T,C or G
ccgggccccccctcggaagtcttctagnattaattaacgcggggggaactctggtactcaactacctagtactcaagcctcaactacccagggagttaagggagaacataaggaagaacatctacctgtaaaagtacgttgtaagttttagcactccttatcaatgcaagtcctattaagatattgaaagtggaggaatacaggaagatcctttatagcaaaattgggcttggatatctaagttgaaattcattctaccactaagggctttataccaaagtcaaccacatccctagaaatgcagtgtccagctgggtgtggtggctcacgccagtaatcccagcactttgggaggccgaggtgggtggatcacaaggtcaagagatcgacaccatcctggccaacatggtgaaaccccatctctactaacagtacaaaaattagctgggcatggtgatgcgcgcctgtagtgccaactactgaggaggctgaggcaggagaatcccttgaagccaggaggaggaggttgcaggttgcagtgagctgagatgatgccactgcactccagcctggcacacagcaagactccatc

SEQ ID NO: 51269 - DNA, 580 bp, Homo sapiens
  misc_feature 28, 550: n = A,T,C or G
cgggcccccccctcgaaatacttctagnattaattaacgcgggcccggcggcccttactttctttaaatcatagctttattcaagtgaaagaaattttgtaacttgaaatttcataagtaggtaagtttatctgcttacaaaaattaaaatgattgtgtttaattggggatatttttgcctgcatgtattggtaaaaccatccaagaaaagattaggtaataaagctatttagttatctcacattgcaagaagcttggaagagcaatttggggtgcaactgcttcttgatggcgtcaatggcccaggatcttcatgtctttctgatctgccatccttagcacatcgatctttcttatatatctttttgcctagcctcataccaacaatatagttgctgcaggtcaaattaacatgcccaagtacaaggcagggagaaggaggatagtatagaagcaagatttatccctttcattagaaaatatttttaaaaaccaatctgttttgtctcattgtctgaaatatgtgacatggttacttcttttcatgtangctgagaaaacaaatatgaacatccctgcc

SEQ ID NO: 51270 - DNA, 567 bp, Homo sapiens
  misc_feature 528: n = A,T,C or G
gggccccccctcggaagtcttctagaattaattaacgcgggcatccagagaggtaagagagaggctgttttttcttttattctttattgaaatttttatttcttttactattgtatttatgccttttattcttcattaagtgcagatgcttatgatactgaagaggggagaaaaaagagggacaattaccggggctacccactttgtcatttgttttatggattgctctgagcctcagtgtcaaaatcttaagttgggattagtgcctgtttcacacagctattgcagagattaaataagaagacagcttttgtgtctaaaacaatgccttgcatgtagtaagcactcaatgtatgttcatttcttttctgtgatccatgtcctgttaaaggctgttctattataaacgtaaggctatgccctgtctctactaaaaatacaaaaattagctgggtgaggtagcgcgcgcctgtagtcccagctactcgggaagctgaggcaggagacacacttgaaccctggaggcanaggttgcagtgagctgggttcacaacactgcactccatc

SEQ ID NO: 51271 - DNA, 572 bp, Homo sapiens
cgggccccccctcggaagtcttctagaattaattaacgcgggtaggatgatttgtataatactgctcctaattaaaaacacaaagtgttctggaaattctgacatagagacatgattatgatttaataggtatcattgcaatgttatgaattgacagtaatgattaaaagaaagacatttttcaaaataatatatatagttgagaagtggtaatttggcaacagtgcgtgacagtgaaagaatgcctacgtgataatgcatgaactttggtaggaaagaagtggctgaaggtattctggtcagaaataaagatggggtaaacataaataatgttggtatgtgccacatattttcttgctgaaagaaatcgtactttccaatctaatgaaaaataacataaaataaagtatttgctcatattaaaatgtcatttattttagaaataatttgtgaaatatttataaagtcctactatgtaccaggagtttctcctatagtgtcgattagagtgcaatgtttgctctttggtttcttattgtaagggagggaagaagacctttaaacctgtaagt

SEQ ID NO: 51272 - DNA, 545 bp, Homo sapiens
  misc_feature 9: n = A,T,C or G
acttctagnattaattaacgcgggtttgaagaggttaaaggatttgctgtagatcacatgactagtgagacattcttcctgttaaaggaattgggaggggaagagagaaaagggaacaagtaattctccctgttttccttctgcctttctgtatgatatgaattttatgtaacatgtaaatgcattaccttgatcatttcattttttccctctagcaaaatcatagttattattcatggctctgaaaagggaaaagtaattgaaccaatatgcaatgacatcaaaagagctaagcaatgaacacaggtgtaagaggctcacctgacccaagaagatgagcccacatcctccaggcatgggtatcaacgccgaatgaggctgtgcgggcaggacctcatccactgcactcccggcagcatctgcagccctcagcagagggcctgcaccccacactgcaggcctagggccaatgttgtgctcaaaaccactgcacaacacagggacaacctgtgtcacacagcacatactaccagaaaacggtctga

SEQ ID NO: 51273 - DNA, 602 bp, Homo sapiens
  misc_feature 535: n = A,T,C or G
cgggcccccccctcggaagtcttctagaattaattaacgcgggctgcttggcatgttttcttgtaaatagatattttatgtactattttctataaatgtgatcattataattgaacatttattgaatgcttattctttggaagaaacactttaaaatattaactactcaaattttgcaatcatataaagtgtttctgttatcaagctcattgtacagataagaaaactgtatatgggagagcatcaaaaacaacatcttatttttatttccaagtctaaatttactctgttgcctttgcctggaaggttttctcctcttcaacttgctgctctattctatgctctcttcaagactaatgtaaatctttcatgcactttcctacaatcttctctgatttttctagtcctaatttggctccttctctgtaattattcactcatttattattttattcattcatcaaaacatccacccatccatcaaacctttactagattttgttatgtgaaaggctatgagagttgctggagattntgcattagatttgtgtttttgcttcacatagtggttttgtcgtcctaaatagatcataagctgcttg

SEQ ID NO: 51274 - DNA, 606 bp, Homo sapiens
cggggccccccctcgaaatacttctagaattaattaacgcgggattatattcatagatagctatctgaaatcattttgagtctgagattgcattttcaacctttatcttttagacaagaagagaataccaaaattatggcataaacttttaatagtacatatattcatttttttaatattacaggcaaataaatggtctacatgtttttatgtaattcaatatcaaaaatatatgcccaaatatatgagtggttacaagcttgttttagctaagagtgattctgaaagagagcagtctcatatgttgggacatttcagtatagtagagactacatctaaaaaaattactggaagtagcttcaacaaatgccagggagtgaatgggaactgtagatttacaatagtagtcagtttaccatagcaagatgtagaaatttttaaaaagaacatgaaaggtgtcagatgcatagaaatcaagtatgttatttgaaatttctgaggctatcctctaaaagtcattaatagtttgcaatttcaagtgtttcagagtatgttaccatttgtataacagctcttaaatatgtatgagcctataggttgagtaaa

SEQ ID NO: 51275 - DNA, 554 bp, Homo sapiens
gggccccccctcgagggtacttctagaattaattaacgcgggaatattcaatagaacaaaactgcaagatcatgttcagatattaaagtctggaagtatctgtcgtttctgacatttttattagtttttggtaactgctttctcataaaaagctttaaacacacgtaattgctcattttagttttaaaggtaggaagaacgtatgtgagttggttttcatctcatccctgcctgcctgtttaaatagcaaaaatgctactgagacatgaaaatagtaacaaagaaacatgaaatgaggtagtaagattcattagcttacaagtaatgaataagactttgattgttattctgcctagaattctaaaagctacctacaagtatatatttgaaaatttcaatgccttccctcaaccagaacttggcatatatgctcacaacactctgaggctatagatgacatctttttatgttttaattgtgaggaaatgaatgttttacccatatgaagactacatatctttgtgacttaatacttcaaaattatttaattgctt

SEQ ID NO: 51276 - DNA, 461 bp, Homo sapiens
  misc_feature 11, 35: n = A,T,C or G
tgggtaccggngccccccctcggagtacttctagnattaattaacgcgcgggctctagtcatgactagatcagtaaatcactgtaagtcctagtgaaaattatttacctttcatgtggctctattaacatatgagtaaaatgtatttaaaataattataccatccagatgcagtggctcatgcctataattccagcagtttgggaggctgaggaaagacgattgcttgaggccagaagtttgagaccagcctgtaccacatgtgagaccccaactctacaaaattttataaattagtcaggtgtggtggcatgcctctatatatagtcccacctacttggggaggctgaggtgggaggatcacttgagtcagggaagtcaaggccgcagtgagctatgatcatgccactgtgctccatcctgggcaacaaagagaggctctgtctcaaaaaaaaaaaaaaa

SEQ ID NO: 51277 - DNA, 403 bp, Homo sapiens
  misc_feature 16, 355: n = A,T,C or G
cgggcccccccctcgngggtacttctagaattaattaacgcgggggagaggtccaaggcagcctcactttgattcttgttcggatatttacatgttttatgttctttcctctgaagttaaccaaaaaaagcaagaaaacaaaacccattaaactccttgtcaaatcatcaaggcttagtagtattttcatttttccttttagcctttattcatagttttgtttttaatttaagaaaataattttggtttccttgcagtccttactaattttaacctattaacctgttgttctcattctggagggccttaaaaaaaaagttacaattttatctcagacattcctttccttgggttntatgtttctatttcattgaggctgcttcatcttgcattcttctggaat

SEQ ID NO: 51278 - DNA, 595 bp, Homo sapiens
ccgggccccccctcgggagtcttctagaattaattaacgcgggcagaaagctccagcaagaggccccaaagacaaacaccaactagaccccacagtcccagaaaacaggtccatttcacagctgaggctcagcacaagatctggtcccaaaacagaaagacaagtgaaaccagaagaaaccggagctgcggctacacacgtctgtgactgagagtgcaggcaagagcctccagggctgagctgccagatcactgaggcagggaagacagggtgtaggcccctgaactctgggcatccgtggggtggtcaactatagaagcccagattccaaggcagaagcaggggtgaaagctgaataaactccaaacaggatagtgcgagttgctcaagacagcaaggcagaggcccaggaggaaagagcaagtcccacagaacacttcccagacccagagcctcaggaagtgggaaagacaagcgaccttcagcacttcttatccccagaccactctcattagcttcagaaggaagacttggcaggtctaattagcttcacagctgttcaaagcattatcattaacatctcaaactagtcttt

SEQ ID NO: 51279 - DNA, 542 bp, Homo sapiens
  misc_feature 43: n = A,T,C or G
gggccccccctcgagggtacttctagaattaattaacgcgggngaaattaaaacatttctcatttgcctgcacttaggatagcaagcaggtgcaacaaggcccctaacccagactctctgtagaaagaggttcccagttcccaaaggtatgcttcgtctccatcggataataagattctccaaaagaccacccctgtccatttcattccacttcccaccagaagttcggctggtgctgggcgcatctccaggatgaacgtctagaccagcctgaatggcctctgtcagcctgcacccaacatcagtaagctcaactttcagaagacactgaaaggctctgtttcctgtcaccggctggaggccctagctctgagatcttactataggttttgtgcagagctcatggtactctaggggatggggacagggatgacaagagggaggtagagccttatccttaagaaatacatggaattacctggtactggaaatacaacagccactaagaaaagcccaacttctcttttgattaaaaaaaaaaa

SEQ ID NO: 51280 - DNA, 539 bp, Homo sapiens
  misc_feature 29: n = A,T,C or G
cggggcccccccttcggggtacttctagnattaattaacgcgggccttagtgccactctagaacaggagtttttaacaagtgctctagaatgactgcttcataggagagctgttacctagacgcaggagagaaatgaacatatgtaaagcaaggtaagtcattttaagcaactggatttgaaagaactaaccagtttatccagagtttttgagtagggaacagaggcttggctctagagctgcacatttgggccatgtttatgtgagtcaggagaaagcctggctccaaggctgacacactagcacagttgttgctgtcaccttttggggtaatttggagcacacccagcaagaattggccctgcggcatgggaggccagaggccagctagagttgttctttccatgagtaccacacccctggattttcagggtgtcctgacacccctggctccactgtgaaagggcacacccatcagcagatagcaacctacggggagcccatcaccacttgattttccaagttctgacttcttttct

SEQ ID NO: 51281 - DNA, 600 bp, Homo sapiens
cgggccccccctcggaagtcttctagaattaattaacgcggggtgtcatttcatagtcatattttctttaacaatgataaacatggttccatgttatggtgaacatctatttttggacaaccgcatcttggcaatgacatcttacagctcctttgggaaatcaccacttcttcatatggtttaggtggaattgacatttacccacctccagtgacagaagctgtttgatttaggcaaataatcctgtaatatcctcctggccacagtgataggtacagaggtggacacatcatgtgagaatcctcctatcagggtgtacttcatgacttgctgggaactgctgggacaaagattatcttgcttgttttatgaatgttaatgtgggagcagttggtttcaaaaccattggcagacatattcataagaagagagcctgagaatgaagctaatggtgctaagtggtagtgctggaaaacaatgagagagaaacctctttacaccgttgagccctcataaagccttgtctgaagcaaatattctgtaccatctcagactcttcagtatatgaaccaataaatgctcttctccttcccactttta

SEQ ID NO: 51282 - DNA, 280 bp, Homo sapiens
cgggccccccctcggaagtcttctagaattaattaacgcgggggttggaaatacagagcaatcaggctgacgtaagctccagaagaaaatcctagcagctcttgaggaagaactcttctactagaaaatgacgtttttccttttttttcttttttgagacagagtcttgatctgtcgccaggctggaatacaatggtgcgatcccagctcaccgcaacctccgcccggcaacaaaagcaaaactctgtctcaaaaaaaaaaaaaaaaaaaaaaaaaaaaa

SEQ ID NO: 51283 - DNA, 600 bp, Homo sapiens
  misc_feature 30: n = A,T,C or G
ggataccgggcccccccctcgggggtactntctagaattaattaacgcgggccttactgcattattcttcattcctccttcatcatttacttccaaagcatagttcacaggagtcaagtatatgatgaaaaaaaaagataatgaataattacaatcagtacatattaaagattaaacaaaccaattttaaaaatacaaatagtaaatatatacattgcaaagaaaaaacacaaatggctgataaatatataaaaagatgcttaacctcactagcaatcaaaaaaattaaaatgagatgccgttttttctccattgaattggtaaaaatgtaaaagaatgataatgtcaaccgttggcaaggatgtggggaaacaggagtgtgactcagcacagactccttagggacaatttcacattgtccacaagcatgtaaaagtttaggtaccctttcatctgaatctataaaccttatactgcagagtattcatatatgttgcaccactctgtgtacttttaaaaaatcgaatacaaactaaaggcctttctacaggagagtttgttaaatatgcttcatccaaagatagattaaaggcacttagc

SEQ ID NO: 51284 - DNA, 598 bp, Homo sapiens
ccgggccccccctcggaagtcttctagaattaattaacgcgggggagggaaggaaaaaaaaaacacataaaaatagcctttatgaatctttctcaatcagtgaacataatggctcaggaattccaataagtaagaaactgccacaagcaaaacaaaaatggagtaagctatgaagagaaggcaaccaaacaatcacgattctcttcctgcaataaggtctagaaacaaaaataacaaaaagcctgggaagagcatcccaaataacaggcatgaggggttatttgggaaggaggagagggggaaagcagtaaatagaaataagacaacacagttgaaagagagataacatttaaaagaaatcaaacaagggaaggctggatttaaaatcagaagcatacccccatttaaacatatggccagaatatcaaatcaaaaggtcacaaatgttcacttcctcctccaccctcttacatattggatcttcaattgcaatagggagtgtaagatgggcattttagagacgtagttgcatcagcagaagcaaacccatcttatacaaatgggttttggggataggaaaaggctgctaaaaattcac

SEQ ID NO: 51285 - DNA, 487 bp, Homo sapiens
  misc_feature 415, 432: n = A,T,C or G
gccccccctcgaaagtcttctagaattaattaacgcgggatgtttcaaagagaggtcttttactgctgaattaatgtacagggattcttcaaaacacacccccacccccataaaaaaaatgcagtatggaaaaatcaggagccaaaacatgtggctttcgtcctccctgaatcctccactacctagtcatgtgaccttggggaaaatcacacacagctatctgagtctcaatcttttcttctctacaaaagattaaataaaccctaatgaatcagtgaaaggattctatgaaaatgatgtatgttaaagtgtgctatagagtctaaagtgctaaccaaaattaaaacatagaataacatatttgttaagagaaattttctgttttttcctccaaaaaacaatacattttatacanccagcaactcaaaatanaaaccttttagggatgatgaggcattgtacacaaatgatccttggcttgcattat

SEQ ID NO: 51286 - DNA, 571 bp, Homo sapiens
gggccccccctcggaagtcttctagaattaattaacgcgggtcctgggtgatgaatacacattcaataaaatttgtcaccattcctggtttttaaaaatccttataaaacaaaaatatattaatataaatttaatttttctggctcacgcctataatcccagcactgtgggaggctaaggtgggtggatcacatgagtccagggatcgagacaaacatgatagaatcctgtctctactaaaaatacaaaaattagctgggcgtggcagcacacgcctataatcccagctacttaggaggttgaggcatgagaatcacttgaacctaggaggcaggggttgcagtgacccaagacagggctactgcactccacctgggcaacacagtgagactctgtctcaaaaaatacatatatttttcttaatatggaaaaaaaagcctgtatcatgtttagtgatcaggtactagaaggctttcactaaaatcagaaataaaaataaggattcccactaaccaggacaagcccccaaaataacccatatgtaagctaatctttgaatatgttttttttt

SEQ ID NO: 51287 - DNA, 472 bp, Homo sapiens
ccgggccccccctcggaagtcttctagaattaattaacgcgggtgactaaggacaacacgtgggtgccaaattcaccctacttcatacctagctgcagcatcctgcacgcgtggagcgcctacattgcactcagcgaagactagcaaaacgctctgagtgtacctctaatttatgggtgatcaacctagggcacaagcacatactactgactagctctcattatgagggagctcacccaccactcactcttcagcagcattgaccagctccctgtggggcagcaagaatgagatccaagggacaagcagaggtataataacgcatgcgtgaacaagcgcggactagcctctctggccttagaatacactgtggattgtgctgagcacgactgggagagcgactggtaagaacccgatcctggaacaagcgccctagcttgaggtcactgaacacactcaattatgtaaccac

SEQ ID NO: 51288 - DNA, 554 bp, Homo sapiens
  misc_feature 28, 465: n = A,T,C or G
cgggcccccccctcgaaatacttctagnaattaattaacgcggggcatgttgattggcagtgcaggcttgcaaattccttcagtattaagtcatgtcttcaaaactgggtggggtgctgagttattaaattttttcttttcctctggaggctaagggcttggaaagctggaggctacatgtgaaatgagttgggtggtcttgggcaaattctgtgtaaacagcgttgctcatctaaaagtagcacaaaacactgcacatctgtctgtccatattatccaagcagaatctggactccattaatgtgctgaggaataaatgtatcctctaataaatgtttttgaaatcacagtgaaaaggaagttccaggacccctaaggaaatgagactctgctgtaccaatttgttggcggaagcctggaagaggagtgggagaaggaagccgaccacagctgtgtctgacttangttgtgccttctttgagcatgagaaatgtgaggttcgatatcagaagctactattgagtaccatagtctaggctgccgatgagcaatgc

SEQ ID NO: 51289 - DNA, 548 bp, Homo sapiens
  misc_feature 460, 488: n = A,T,C or G
gccccccctcggggtacttctagaattaattaacgcggggacccaagttctttctgtccttccgctctaccatcctagtgcttggcacccaacctcctggtccatgatggcagctggaacttcctcctttttaaagagacttcctggaagtttgacacactttagctacaccccatttgctatatagagttgtcagggaagctgggaaggacattttcattctggtcagcagtgcactcagctagcaataagaattctgttttaaagtaagaaaaagatactggacataaagtagggaactagcctagcaatctctgctacagcttcccaatccatgtgtgtatggagatcaggggagaagggagggagcagagataagcagaagaatatagacaacttatcagtacaatagaaggcaagaaggtaaagccagactgagaggttctagaggacagcaaanaaaaaaaaaagagttgcatttagaacanaataatatgatagaaataaatctaaataattggtattcatcataatgtaaatagactaag

SEQ ID NO: 51290 - DNA, 589 bp, Homo sapiens
  misc_feature 24: n = A,T,C or G
gccccccctcggggtacttctagnaattaattaacgcgaggatcttgccttggctctctggcctgggcatcagagcgagtactccgtgctcacttatatgatggatgctgatggtgagaggggaagagcttgaggctggctcacactggtaggggtaaaagccttttgcaagaaagattatgtgcgtgaaggcatgagagtttgtttccaaaaaggagtttgactactgactcagtgtgctaaccggatgcatcttcattactgattttacaaatactggaccctgctggcaagcatttgaatactattatttattatcaccaaaacattcttttgcccacagcatctatgcttaagagcacactgcctgcatgatgtaggttaaataaagaattaatatgctctgagtgagcagcgttggcccttatttaggatggtaaagaatacgtaaaggattcatctataaattgacatacaagtgcttagcgctttcctttaacctttagttttaatttggtttaacctttagtttcaggtttagctgtgcctcccagtgactataatgacaaggaagctgtaaatgtatttg

SEQ ID NO: 51291 - DNA, 231 bp, Homo sapiens
  misc_feature 16, 29, 46, 52, 54: n = A,T,C or G
cggggccccccctcgngggtacttctagnattaatttaacgcgggnactagngnaactggaaaaaaaaaaaaaaaaaaaaaaaaaaaaaaaaaaagaaaaaaaaaaaaaaaaaaaaaaaaaaaaaaaaaaaaaaaaaaacaaaagaggaacccaaaaaaaaaagtatattgattccgcttaggggccctcattgaaccctaattttaacggggccccgcctggggggggcc

SEQ ID NO: 51292 - DNA, 609 bp, Homo sapiens
ccgggccccccctcggggtacttctagaattaattaagcgggccataaaataaggcatttgcacaaaattatctccacaaccttctttctaccccaaatgctatggtcttccttactgcattattcttcattcctccttcatcatttacttccaaagcatagttcacaggagtcaagtatatgatgaaaaaaaaagataatgaataattacaatcagtacatattaaagattaaacaaaccaattttaaaaatacaaatagtaaatatatacattgcaaagaaaaaacacaaatggctgataaatatataaaaagatgcttaacctcactagcaatcaaaaaattaaaatgagatgccgttttttctccattgaattggtaaaaatgtaaaagaatgataatgtcaaccgttggcaaggatgtggggaaacaggagtgtgactcagcacagactccttagggacaatttcacattgtccacaagcatgtaaaagtttaggtaccctttcatctgaatctataaaccttatactgcagagtattcatatatgttgcaccactctgtgtacttttaaaaaatcgaatacaaactaaaggcctttctacagg

SEQ ID NO: 51293 - DNA, 211 bp, Homo sapiens
  misc_feature 27, 190, 191: n = A,T,C or G
cgggccccccctcggggtacttctagnattaattaacgcgggatgacccattgagcagccttcaccgtggattatttaggcactgttaagagtcagggctctataaattggatgtaaaatgcatgcgggtttcctgtagtttatcaagctggtaactccctaaaaccagaacacagagcaagaatatgcnncccaaagaagccctgaagaa

SEQ ID NO: 51294 - DNA, 582 bp, Homo sapiens
  misc_feature 29, 529: n = A,T,C or G
cggggccccccctcgagggtacttctagnattaattaacgcggggtgggcggtgttcatgtacaccagaaacagaatgtctctttcaacttacatgattactcgatgcagttgaaatgcttcagcataagattgaaataacctagtaaaggctgagtcctatcacattaccttctaaatgtctcggctgttcaacgtttctaaaaaggaaaatcaaatccaaccgcttcatgtttaaattggacacctttttaagtggctgagaataagtagggaaggtctgctggatggcctctctgacaggcggagctggacattgtcattcttatcaagaaaaggctctgcttttcaagaagcaaatctcacacagcttgatgaggcctcattaaaaacaccaactataactatagaaaatccttttgcagaagagctagggccgatgctgtgtgaattagaagggcaatttattcattaaaatggattccctaagccactgtgctattattacctaggccaatgtcccaacattnttgtcactgtgaaaagtgagtctctaggtatccattcttcccaaccagactag

SEQ ID NO: 51295 - DNA, 514 bp, Homo sapiens
  misc_feature 11, 35, 461: n = A,T,C or G
tgggtaccggngccccccctcggagtacttctagnattaattaacgcgggcgggcgcctgtagtcccagctactcagaaggctgaggcaggagaatggtgtgaacctgggaggcggagcttgcagtgagccgagatggcaccactgcactccagcctgggcagcagcgtgagactccatctcaaaaaaaaaaaaaaaaagaatacagtcctgtaagaaataaatgaatttattaaacaagttagccaaaaattacttgtaagtattcaataagcacataaaaatgtgcacaccattttagtcattaaagacataggaataaaaatccagaacctacccatgactatggcaaaagttgaaaattctaacagtgtcaagttttggcaaaggtatagaagtatttttactctcatactttgttggagagaatgtaaaagaatataagtgcttcaaaaaacactntgacaatttcctaaaatataaataaattctataacatgattcatttatccaaa

SEQ ID NO: 51296 - DNA, 593 bp, Homo sapiens
  misc_feature 28: n = A,T,C or G
cggggccccccctcggggtacttctagnattaattaacgcgggggtggaggctgcagcgagctgagattgcatcgctgtactccagcttgggtgacagagagagaccctgtctcaataaataaataatgtagttttctgatttggtaaatctagagaggggttcaggagttagtgttcttgatgaactcctaggtgaacatgactggcatttgaaaaatacggatctactcccacccctttatttttcagggaagaaataaacacagaagagcaaactgagtagctcagagtggcatggtcagtggcagaactgggtctcacacctgggtcctttttagtacacatctacatgtcaccttaacccattcccctaaagaatggaggccagggttgggcactgtggctcatacctataatcccagaactttgggaggccgaggtgggtggatcacctgaggtcaggagttcaagaccagcctggtcaacatggtaaaaccccgtctctactaaaatacaaaaattagctgggtgtgatggcgtgtgcctgtaatcccagctactcgggaggctgaggcaggagaattgcttgaac

SEQ ID NO: 51297 - DNA, 570 bp, Homo sapiens
cgggccccccctcggggtacttctagaattaattaacgcggggtggggagtggggaccagataacttgcctctcatgggaaacagaacttaatctaatcttctgaggaatgttgatggatatgactaaccatatgtactgttaagtagacacagtgctcaagataaccctaagcagtactgatagagaattatgaaaacaggacatcaagccaggcaatggtgactcatacctgtaaacccggcattttgaaaggctgaagtgggcagatcacttgaacctaggagttgagaccagcctgggcaacatagcaaaaccccatctctaccaaaataaaaactaaaaaacaaaaattagctgggcttggtgatgtgtgcctgtagtcccagcttactagggaggctgaggtgggaggattgcttgaacccaggaggttgaggctgcagtgagccatgatcatgccactgcactccagcctgggtggcagagtgagaccctgtctccgaaaaaggaaataggacattagagtaagcttaatgtaactactgatgcttgttgaaatactgatgag

SEQ ID NO: 51298 - DNA, 515 bp, Homo sapiens
  misc_feature 44, 485, 495: n = A,T,C or G
cgggcccccccctcggggtacttctagaattaattaacgcgggnacccaccttagggttccataaattcctgtgcaaatttggaataggctgaacagagttgaacaaatggatgaaatttgttattagtgtcaatgcaatatcattcaaacacactatctaaaaaggagaagaaaaacaaagacaaaaaaaagagcaagaagaggaagaaaaaaagaaaaaggagaagggaaaaaagaggaggaagaagtgacttgcatgagaggaaacgtgtgctttcttctcttcccatgtccaggaaagaccctagttcattgtctctcatactattaccaataaacccacatttatctggtggtaattaccaaacttgccggttcagaaatctggagatgtacagtaaatatagcttgttaagcaaaaatattaccttgaatgatataaataataagcctttcaaatgatactttcttcagagtaacaaanatccagattnttcatataaatgtttaatac

SEQ ID NO: 51299 - DNA, 433 bp, Homo sapiens
cttctagaattaattaacgcgggctccttgggctgcacccactgcccaaccagtcccagtgagatgaactgggtacctcagttggaaatgcagatatcactcgccttccgcattgatctcactggaagttgtagaccagagctgttcctattcagccatcttgccagcaatctctctcagcatgaattttaaggtaaaaatattagaatgtaataaaagagtccatggagatgtaggacaggatcctcctctctgcctctcggagcactcaagagtaaattttgagaaatgctgccacaatcaccagaaatgttctgacatggtcctctcacacctatcatgaatcaaagctactcatgttcagcaacacgcagattttgtgatgccacctggagctgctcaagctacagggctcacaaagctctctgctgaa

SEQ ID NO: 51300 - DNA, 154 bp, Homo sapiens
ccccctcgaaaatacttctagtattaattaacgcggggcgctagtaagctgaatataaattcttttcccatctatagcaaacagaatctttaaaccaaatgtggtttttagaagttaaataaggatgacagagtttgaatttcaacaatacctg

SEQ ID NO: 51301 - DNA, 508 bp, Homo sapiens
cgggccccccctcggaagtcttctagaattaattaacgcggggcgggaggattgtgtgaacccgggcgtttaagtctgtagtgagctatggttgtgccactgtactccagcctgggtgacagaggaagacctcatctctaaataaataaaataaatacaatagtcatatttaatcttaaattaggtctggtcttaaaatttaagtgaaaacagaacaaagtacctgaaataattggttgttattccctgaattccttcatatggattagtggtaaggcactgagtatacctatggatggtagcccacagattactttcttgcctagaaattagaaaacacacagctttcaactgtatatatatatatataataataggccaggtgtggtggctcatacctgtaatcccaacactttgggaggtgaagttgggaggattgcttgaggccaggaattccagaccaccctgagcaactgagacctcatctctatcaaaaaaaaaaaaaaaa

SEQ ID NO: 51302 - DNA, 526 bp, Homo sapiens
cgggccccccctcgaaagtcttctagaattaattaacgcgggacaacattattctcttattctttttcatcaagcagcattcttaattgccttctcattgtgtctagatttacaaattactcatttgctgcctcaaatgtacttgtttcatgcatctgaaaagcaaagctaaacaatgatactcaaaatgggcataaacagcaaatatttacaaagtacataagatgtgcttgtcctcaaagacccattggagataaaggaccaagatttagaaaaaccgatgaccagtcagtagaaagaatgtagtcttccattcgtcttattatcttcttattcattctatttcttttatttttattggatctattcaccacttgccttagggtaataattttaaaacaacacattttattgagtgtgtgtatgtgtttttataatggaataattatgatggccattattcatatttcttttctacaactcaaatttaaccttggaattttttttaaagcttgaaaatgtttac

SEQ ID NO: 51303 - DNA, 575 bp, Homo sapiens
  misc_feature 16, 500, 528: n = A,T,C or G
ccgggccccccctcgngggtacttctagaattaattaacgcggggagcggtggctcacacctgtaatccaagcactctgggaggccgaggcgggtggatcatgaggtcaggagatcaagaccatcctagccaacacggcgaaaccccgtctccactaaaattacaaaaaattagctgggcgtggtggcgggtgcccgcagtcccagccactcgggaggctgaggcaggagaatggcgtgaacccgggaggcggaggttgcagtgagccgagaccgcaccactgcactccagcctgggctacacagcgagactccgtctcaaaaaataataataataatgagcaaatcttctaaagtctataatgctagacacaaattttcaactactttctctctgaaaaacttccatcagctacaattggatatgatcataccagatacaacaatacacaacagtaatccaaaagtagaactgacttccactagatatggagacctgtngtatttgccattctcaggtttaataatnattgcaaatacctgacatgtaatgaccattatcacaacaatacatca

SEQ ID NO: 51304 - DNA, 582 bp, Homo sapiens
cccccctcggaagtcttctagaattaattaacgcggggagccatggagcctgactcacattcttgccatgacaaaggacagctgcatgtcaacatggagtagagctgaaagagtaactgcaggcagagatgaaactcatctcaaaaagaagcagctcaaaccagtatacaccaacgtgaaaacgatccattgctaaactttttttgtttctttgatgagtgtttcttttaagtagaattttgaaaataaacaggtaactctaaagatgtatttctttgtgtctcgatacttgctataatccccaaaacaccaatggaattttataaattttcaaccatcttgttcaatacatttatgataaaacatccattaggtatttctgagtcaaatactgagctggttattcctgctatgcagaaaaaaaaaatagtgctctatcattctcttggattggcagtgaattcctggagcactgcattgaggacaatgtccagcctcagtaggacaaggtgctttaatagatgaacagtatcttacctgggctgagaatggggaaactacatatgcaagccacatatatac

SEQ ID NO: 51305 - DNA, 581 bp, Homo sapiens
  misc_feature 9: n = A,T,C or G
acttctagnattaattaacgcggggaggtgcagaagcaaaagatgcacatcctcatttgacctcccttctcagtttcaaggctgagcatgcttcctgagcagacgccttcctcgggatgcctggagcccatgaggaatgcagtgacctaacgctcccagaacacaataatgagaccccaacttaagtttcttgcccaaagaaggagcccataaattgagtcaggtctcaagagaatcatacaacaaagcagattgtgcacaacaatgccgctgcctatcactcagcctcagtcttctaaaaaagaaaaaaagtgagtgctctctctctctcactggtttacctgtccctaaaacccattcatagaaagagtgcctcattttctttttacattaactttattgaggtataaattacatacagtaaaatgctcaaattttaattgtacagtttgatgggttttgacaaattttaacaccagcgtaacccctaccacaaccaacatatagagcatgaccatcgctccaaaaacttcccttggcttccttcccctcactctcccacctacctgtaccacagcctc

SEQ ID NO: 51306 - DNA, 432 bp, Homo sapiens
  misc_feature 48: n = A,T,C or G
cccccctcgagagtcttctagaatttaattaacgcgggccaccatganaaagctacagccaaaaacagaggagggaatgggatcagaaagtcccccaaaaaatgtaagtcagaaagaggttaatttccagataaaacagatttgagatcaacaagtatagtctaagaaagaatggatgatttttgctatcattgcacactttaaacaatgaataatataattggcatgagcgatttcagatattttgattaagaagctgggatctctgaagtcaaagttaccttgtgaggggttgcctaaactaaaagtgaattagaaaaggcaagccaacaagacactgcaggtccgacgatataagctttgtaaaaaagtgtatttccttaagataggcttgagacattacaaagctggcttcctgaaaaaaaaaaaaaa

SEQ ID NO: 51307 - DNA, 459 bp, Homo sapiens
cgggccccccctcggaagtcttctagaattaattaacgcggggtccaggacctgccttgttatcttaggactttaaaaaactaaatttaaaaactactcaacaaaccagaataatgtattcttttcataaataatgcgatgagttaaaattatgcctgttttggctgggcacggtgattcacgcctgtaatcccagcactttgggaggccgaggtgggtgcatcacttgaggtcaagagttcaagaccaccgtggccacatggtgaaagtgcatctccactaaaagtacaaaaattagctgggtgtggtggcatgtgcctgtagtcccagctacttgggaggctgaagcaagagaatcgcttgaacccgagagcagatgttgcagtgagccaagattgcaccattgcactccagcctgagagacagagtaagactccatctcaaaaaaaaaaaagcggc

SEQ ID NO: 51308 - DNA, 605 bp, Homo sapiens
  misc_feature 564: n = A,T,C or G
ccccctcggaagtcttctagaattaattaacgcgggctgcctggagtattgtctccaatgctaataatgaggccagtgtcgtgcgtgaggctggtgttgacggcactgtcaggaacctcccatgtaatttctgttaccaccaggggaagtgagcagcgcagattagatgatagacatttaataattgataaagcctcagattggccggggtaaggacttgcggggatgtgtgtgtgtgtaacttgtttcccttcacagtcatgtagctggtccgagctgggactgagagcctggcttctgatctctaactccatactctgttcatgacagaatgcagctaactgtattctgaattctttgagcaaagttgtctcattctgcgttggtatttcctgtctgtcatttattcatctatccatttattcctctatcttgttccataaatgaattgagggtgcttacaagaatatatgtatatctctctctatattttatttatataagaaatataaaggctggatgcggtggctcgtgcctgtaatcccagcactttgggaagctganggcagaggattgcctgagcccaggagttcaagaccagcgta

SEQ ID NO: 51309 - DNA, 539 bp, Homo sapiens
cccccctcgagaagtcttctagaattaattaacgcgggcctaccctactctaggactttaagtcagtgaatcatttccctctcttatttataaggtagtgtgtgttaggctttctttcacaacagtaagttctcttaagtgatacagaggatactgtgagagaggcaagctagcccttcaagacaacttgggcatgcctagcccttacacagtagaatgggggtaagttcaagcaatccatcctcactcccctaaggccttctggaaactacttctgattaaaaggaagaggacttcacctgacactgtgtagcctaggtaaaaagagactgagatggagtggaagagacttgatataaagaattagcattcaagtttcatgtaaaatgggttccaaaatgacttccaggctgtgtgcagtggctcatgcctgtaatcctagcactttggaaggctgaagcaggaggatcacttgagcccatgaatttgagaccagcctgggcaactcagtgagaatatgtctcaaaaaaaaaaaaaaa

SEQ ID NO: 51310 - DNA, 304 bp, Homo sapiens
  misc_feature 183: n = A,T,C or G
cccccctcggaagtcttctagaattaattaacgcgggtagtacatttttaaatctatttttgtttaatcagcatagtgccactattgacataggcatcgtaatccgtattttacttgtgagaaaactggcttaaggtctcctatccaaataaacaaaactcatcatctggaattagaaattcntcagtctaagtactttgctacatccaaaaaaaatttaaaaagtccatggtactaacatgaattgcctgtcctagtgcagaccctgaacattgaatattcaaaaaaatgatttgcccaattt

SEQ ID NO: 51311 - DNA, 603 bp, Homo sapiens
  misc_feature 34: n = A,T,C or G
gggtaccgggcccccccctcggggtacttctagnaattaattaacgcgggtggcgatatatgaagatatttcccaaatattagtacttatgattacttacacaaatagaatcttgcttctgtataccaatgtagattcagctattacctccctaccactgtttgtggtggtttatctgaacagaccttgaaaaattaccgttaattattttaaatggatctataaatacatatacataaacaagccacctaactaataacaaattgatcttgcagcagcagcatcaagctaatactatcacacagaggtttgctgaatgctaacagattctcatgtattatacatatttctgcttatgtctaaatcatggaggctgaatgactaaactcaccagccttcaagagaaatttttatttttgattccggtttcacacacatatactcatgagtttaagataagatgaaattttagataaaaaagaaagctaaactggatatcagaaaacttagactatagtcaaaattctagcagtgagtagttttctaacccgaagccatttaaaaagcttctatttaataatttcattggaaaatttgaggaaa

SEQ ID NO: 51312 - DNA, 507 bp, Homo sapiens
ccgggccccccctcggaagtcttctagaattaattaatgcgggctctacgtcatttcactcatgaccaatctgaacaggaataaaaccagtttcaaaaaaacatataattttaagtgctttacttaaagaaaacgattccttttttttcttgccacccccgccacccaaaaccaggactagctggtcataatagttcttgcttctctaaagaaaatgtacattttagttcagagaaataggccatggggaggtagtattgctgcaaattctgtgtctttagtggaacagggccaaaatgataaattaactttacattatgcctaaagaagccttccctaaaacccggtgctttttctttttcttctttttccatttttggggctccacactcaaacataacaagcacctgtttttctactgttggctttcaacctaatgttgttcaatgggaaggaagcaaacaggtgtgcacactccttttctacattacataaaaaaaaaaaaaa

SEQ ID NO: 51313 - DNA, 565 bp, Homo sapiens
  misc_feature 38: n = A,T,C or G
ctgggttacccgggccccccctcggaaatacttctagnattaattaaagcgggaggagacctagggcaggaaaaaatatgacaaggttagtgaggtaaacagaacatttggatcatgttaaggagtcttaatttctatcctgagagcaatgggaggcactgagggcctctatgcagaggagtgatgtggtcatatttggatttctgggattaggactctgcctattttgtaaaatttgaattgcatgaaggcaaggctggaggcaggaggtctggttaaaagtcgtatcagtggccaggcgcggtggctcacgcctgtaatcccaacactttgggaggcctaggcgggcatatcgcgatgtcagcagatcgagaccatcctggctatcatggtgaaaccccgtctgtactaaaaaaaatgcaaaaaaaatggccaggcgtggtggcaagaacctctagtcccggctactcatgatgctgaggcggcagaacagagtgaaccgggaggccgagcttgcaatgggcctatgtcactccaatgcactccaacctggacagagcgagac

SEQ ID NO: 51314 - DNA, 567 bp, Homo sapiens
cgggcacgcccctcggaatacttctaaaattaattaacgcgggctgacttagaactgcacatgttgggagcaagactccaaggaacccaggggagcaacagctgcttgaaagcaaaaaaaaaaaaaaaaaaaaaagttgcacaaagatcttggtagctacatggatattgggaagatagagtttaggactttgattcccatcagcttaatgatatttggaaaacatctcagactgttcacggaacccagaagggcatggattagaaataagaatcacatctcaggtataagggcaaaatggaaatggatttgttttaacagcctgacactacatcttcataccagtaatctgatcccccactaatttgtctgctagaacaaaacttcgtacttgtctgagaaagataggagaattttgtgctggaagctcaatgggcaaatggatcaataagatgaaatagtgcagaaacaaacccaaataaacatatttcattaatacctggctcagttgtatttaccagaaaagcataacaaaacaaaacccaaaatagctaacctcaaaatgac

SEQ ID NO: 51315 - DNA, 621 bp, Homo sapiens
cttctagaattaattaacgcgggcactctttattcttctttcaaaataaagccaaacatctcttttcaaataaaagtctaatcatgttacgatatttaattgaaatgccttagtcacttcatatgaccttgcagggattgtctatatggccttggtgccctattctgtctacctcttctgccccatcccaaaccactgccctcttgttctctaagctccaaacacactctcctcctttcagttcatcaaagattctaggttcttcccaccaatgggcctttgcacctactgttccctcttagtggaatattcacctcgtaagcgccaccttttatctggggaacccctgctcacttctcaactttcagatctctagtaccacttccctgaccgtcatacatgcaaaatctgaccattcccacagttaaatgcattcatcaaaccatcaagccatattcctttccataggaagttagctctgtttgcttttatactttcatgaatgtgatattctaactaatgactctaagctcatgaagatggtgactatatctgcttttgcattcatattatttatcctcagcacctagtatctggcacaaggtaagtactcaataaaca

SEQ ID NO: 51316 - DNA, 569 bp, Homo sapiens
cgggccccccctcgaaagtcttctagaattaattaacgcgggatcttccctaaagttttaaattgattgaagtactttccaaattaactaatataactaaaacgatagaattcattctttgtcagtgaggaatcagagttctcttcaatgattaacaactttaggcgactgcaaaagtcaacaaagacctgtgtgactgtaaaatttcctctggtaattcaaaaacattactcagagatttcccaagagataactgaaacaaaaaagaaaaataagtaatgaataagtacacctcctctgaaaagtacgaataaaaccatctacctagcatcttcaacaggagattccattagaatgcaagtttcgtgagggcaaatagtttagtcttcaaggcctaagccagtgccttgaagtacatggtaggtactcaagaactatttgttacatgaatgaataaataaatgaataactaaagtaactgcaaaaatcaatatctgatattgttgaattctgagtataattattcatataccattattatttttaataaaaatagtgtaaatgcctaa

SEQ ID NO: 51317 - DNA, 454 bp, Homo sapiens
ccgggccccccctcggaagtcttctagaattaattaacgcgggtacccagaatgtatacagggttatactaggtatctgaaatgccgcaaatgaataactatgcagattctgtcttgaattatgaaataaatgctaaaagtattcattgaaagtaaagatcagagaaactaatatttgtctttcaacctttagttggccttttctctaattagcagttggaagggcataaagggacaactttgtttaatcagtgtatcaataaaaaagtaaacactttggaaggtagataagagctgcatgttgtaaactaaacatagactggacagcatctgttgagacaaaagaggagaaaaatgatgggccatgcttccttcactagagcctgctctatgggcaacagactcatgggaagatctgtaggggacgtaaccaggaatggtggcacgcacctgg

SEQ ID NO: 51318 - DNA, 606 bp, Homo sapiens
ccgggccccccctcggaagtcttctagaattaattaacgcgggacaacagcctgttgcagtgaatccaaatctgttaccagactgatttggttcaaaatggccaaaaagaataaagtaaacggcagtacatttcatagacagaaccctatgtctaggaaccaagaatcctcttgattcatcaggctacaatataactcggcctccagcaacaacttaatgtatcaaaatcagaaatatacgtacacgatgcagcgactggctcaggtgtgtagcattactatcattgggaacactatttcgtcaaactgtaaagtgcaagcaaactgggttcctgacctgaatttcatggaagtctaaacaactccattactgtacacaggagtcgccccaaacaaacatcacacatctcacttctgcctcagcaacggcggcgaccctgggttcccctacagagatcagaggagaggagaggacaggacacagccccaccctcttgccaaagggtccacagccgtttccacaggccacgtgtttccccgtgatcccagactcctcgcccgctgtgggacggaactacagggcaaaccggcgccatcacctgtctc

SEQ ID NO: 51319 - DNA, 525 bp, Homo sapiens
  misc_feature 425, 500: n = A,T,C or G
cgggccccccctcggaagtcttctagaattaattaacgcgggttcttccttgtttttaattcttttcttctctccagagacactgtgttaaagaacattcagaaggaagacataaagggctaacatctttggagaagataaatatgtgttatctgagaagaataacctgaaccatcatttgcaaatgacataataatcatcaagaaatgctgaaaccaaagaatagtgtgttattgagttccacggttttctttgaatttttgccgtatctttgttttgttttccttgtgggagaagaccattatgcacatatcccaaaggattctggagagttggcttgttctgttctctctccacacctggctaaatactctttggcactatacagcttgggtaagatgtggatttattgaccaacagcctgngggtgactgtgtcaaaggaatacattcaatcatttttcagaaagctaaaagagcaggaggattccaaagacttangaatcttaaaaatttgaaaattgac

SEQ ID NO: 51320 - DNA, 462 bp, Homo sapiens
  misc_feature 9, 46: n = A,T,C or G
acttctagnaattaattaacgcggggaccatattatcatagtcagnaacacaaggaaacatcattggaacaatacactttcagctcatcacaggcagcaagttaatccatcaatctattaatttagaatttgtaaaaattaataagaaatatatcaagtacaaaaatgaagaaagtacataatgagaaatgtcatatgataactcaatatataatgagatgttaaagctctcatataggaagaaaaatacaaagaaaaattaaaatgcatctcacaccaatttcaagtgcataagaagcctacatgaaagggaaagtgatcacctgtaatcctatttactcgagagattggggcaggaaaataccttgaacctaggaggcagaggtttcagtgagctgagatcatgccattgtactctaccctgggtgacagagcaagactccacctcaaaaaaaaaaaaaa

SEQ ID NO: 51321 - DNA, 579 bp, Homo sapiens
cccccctcggaagtcttctagaattaattaacgcgggaagttggtgggacttaatatgctggataaacagctataatgtaagccttaaaattttgaggtctctgattatcacacagaaagttggatcttcaggaatctgaagaaagtataagaacaaaatataacagatttaaaaacaaattgaagtaagtcatggctggcatgagtgatttaaagcgcaagcaaatttgcaagctgccaagcctggtgagtaaggatgtcatagctgctactaacctaccagttgcttaaggaatgttaacattttactagagttataattactatggtttgtagattacggtatataattataaatgcatactatgtttaaaaacagcttgaagcttgtgcttattatcccagcagaagaaatattgcagtttttaaactacttataggttttaaactacttaaactaccataccttattgtggaacccattagtcatactatcagaggataagtatgtaagatactgccctgttctctatcttataatctaatagagaaagtaagacatgtacacagtcattatta

SEQ ID NO: 51322 - DNA, 600 bp, Homo sapiens
cccccctcgaaagtcttctagaattaattaacgcggggaggtgtaaaaactaaagggctagaggaagaaatttttttttgcatatcagacaattacatatgcagtaaaaatcacacaaatgtatcttggtcaacatacattttatgtaagaaacacaactattacaaattattatatattactcaaagtaatgctatataaaattggtttcttacagcattatgatttgctatcactacaatgtggaatctaggccagtaatttgcaagtgccaagtgacagcccctcccctccaagatacctggaaatgggggggaagaggcaggttttggtggccagaacatagcatttagtcagcagagtctgaggatgttcaatgtcttccaagtcaaagcacaatccagtcaaaaataaccaagatgcccctgatgagaaacactaaacaaaggaggctgcttcttgtatattaacaacagggttaatatttaagttcaattattgtgacaaattaatttgattctgataaaggtttgcgttctaccttaaactaccccctcagtttaattcaaaacttaaagcagacctatagttttaataaag

SEQ ID NO: 51323 - DNA, 530 bp, Homo sapiens
cccccctcgagagtcttctagaattaattaacgcgggatgtaaaggtacttaatgtccctgaactgtacacttaaaaatgatcaaaatggcaaattttgttatattagccaggattctccagagaaacagaatcaataggagctacgagacacatgtaaaaattagctcccacctccctttcctatactttcctaggatcttgtcaagaaaaaaaaatatataaaatttactacaagaaattggcagctaggtgcagaggctcatgcctgtaatcccagcactttgggaggccgaggcgggcggatcacctgaggtcaggagttcaagaccaacctgaccaatatggagaaacctcgtctatattaaaaacacaaaattagccaggcatggtggcgcatgcctgtaatcgcagctactcaggaagctgaggcaggagaattgtttgaacccaggaggcagaggttgcggtgagctgagatcacgcgattgcactccagcctaggcaacaaactccaaaaaaaaaaaaaaa

SEQ ID NO: 51324 - DNA, 386 bp, Homo sapiens
cggggccccccctcggaagtcttctagaattaattaacgcgggggacttcagtgtcttatacttttcctttgcctacaaaaaagtaccttggttcttcctagattggaaagacatgaaaagaaagactgatgaactctctagttggtttaaagaaaaaacccttaagcttctagatgtatttgtcacactctcagaaactatgccttagtggtagtagtagtactagtataactcaaaatagttatttatggctgggcgtggtgactcacacctgtaatcccagcactttgggaggccaacgcgggtggatcacttgaggtcaggcattcaagaccagcctggccaacatgatgaaaccccatcgctactgaaaataaaaaaaaaa

SEQ ID NO: 51325 - DNA, 350 bp, Homo sapiens
  misc_feature 28: n = A,T,C or G
cgggcccccccctcggggtacttctagnattaattaacgcgggggcccatcgctctttgaagaatgactcacagaaatgtcattccattcacaccactgccaaaggagcagctgccttgcacaagcacagcaaacagtgtgtgttaggaaacattccaagtggatattttacacctgagttttgggggatgtctgaatgtggttttgctaccttccaaagctggttaaaactgcatgctggccttatgagcttgtaggcccccagcccgttcctcctatttctgccatccccatctccttacttctgaatctactcatgatttccacatgcaggccaaaaaaaaaaaaaa

SEQ ID NO: 51326 - DNA, 318 bp, Homo sapiens
  misc_feature 28: n = A,T,C or G
ccgggccccccctcggaagtcttctagnattaattaacgcgggcaactaactaaatataaaattcaaatgtatttacgttctttacagcctcggtgtattccactaaaggtgtaaagtcagaactgtggtctaaaattacttttttcccccttttgtgtagttgttactaatttgataaagttaaatctatttgcatttgtattcagttttggatcgcctctccctggccccaattcttgcagattgtattttattctttgaacaagtgaaacaattctcatggttcaaaagcaaaactatataaaaaaaaaaaaaaa

SEQ ID NO: 51327 - DNA, 575 bp, Homo sapiens
cgggcccccccctcgaaatacttctagaattaattaacgcggggcccttaaacttacaaaattttgggaaccttttttagaagaatgaaaaattacaaataaaaaaatcatgtacagcacttggaagtaccccataaaatgaagtggcctaaggatttaagtttcactgataccacggtaacttcaccacagtttagaaatgataacagagtcctgagttaaaattgaaagagcaatgtgatttacaaattcaaaaagtggggccactgggtgtggtggctcacacctgcaatcccaacactttgggaggcccaggtgggcagatcacttgaggccaggagtttgagatcaggctgggcaacgtggtaaaacctcatctctacaaaaaaaaatttaacaaattagccaagcatggtggtgcacacctgtagtcccagctacttgagaagctgaggcaggaagattgcttgagcccagaaggtggaggttacagtgagccaagattgtgccactacattccagcctgggcaacagagagatacattatctttttatttaaaaaaaaaaaaaaaaaa

SEQ ID NO: 51328 - DNA, 606 bp, Homo sapiens
  misc_feature 28: n = A,T,C or G
cgggcccccccctcggaagtcttctagnattaattaacgcgggggaggaccctcaggcataccaataccttgttctctaaaagaaagaatcagtgatgtttagtactacatactttgttttctaaggccattaggtgggctaattagttttacaaagaaggctaagaattctaacagaacgggctttctcattaactctttgcttatccaagtagccagacatccacattctctgaacattccagttaataccaagcttcctgtaaaatttcagcggcatggaaaaatgctttaaaggggtgagtagtcccacctctccccactaattgatagttgaaaataatccaaatctaaatggcatgtgcttcagaattccaaaataggggtggtaagaattgcaataccctaaggaaattatattatggaagatttatctaataagtgaagatgccatatacttttctttttcaaaatccaaaatgctccagcaggagggttctaattttaacagaccacaagtctcaagactttgctagaactatgatagttttttaaaccaactagctggatattcattaaatcaaattgtcacaaaagcttgcacat

SEQ ID NO: 51329 - DNA, 470 bp, Homo sapiens
  misc_feature 14: n = A,T,C or G
taattaacgcgggngccctaataagtgtagaggatacaggaaggcaagaagaataggaactggaagaaggagggaagaagcaaattcatttatttataaggctttaaagccaaataattggcaagtcatataattggctagagagattgggtcttgctgatgattaattacaacctgtctttgtgtgaatcacctggtttcctgccaaagatgaagatgaaacatttccatgagtaggcaattcagtctgagtgtgtctcatgttattttcagatgaggagactccatgtgcatggttgcagcaggcattcttgggagctcatgagctgaatttcaggaaaagcccaagaagattccacatttccctcaggatatcctcaggaaaatgtctgcaggcctggaaacacttagccatcacttgtttatttgagagaaatcaaaaaggattatggaaacagattggaatgttg

SEQ ID NO: 51330 - DNA, 602 bp, Homo sapiens
  misc_feature 581: n = A,T,C or G
cccccctcgagagtcttctagaattaattaacgcgggtcctctacccattcaaagtctacctatcagggggacagatgccttgattacactcctccccttgatttacttagtcacatgaactcctataacctcctataacttgcatagtcaatatttatttatttatttatttatttatttttttgagatggagtctctctttgtcaccaggctggagtgcagtggcgtgatctcggctcactgcaagctctgcctcctgggttcatgccattctcctgcctcagcctcccaagtagctgggactacaggtgcatgccaccacgcctggctaactttttttggtatttttagtagagacggggtttcaccatgttagccagcatggtctcgatctcctgacctcgtgatctgcacgtctcagcctcccaaagtgctgggattacaggtgtgagccactgcacctgtcccatagtcaatatttataattggcaattacccgtaattatgtagtctcttgtacatatttcaaatctgttagccttgtcttcttagacaaactgtgataattaagacctatatntcagtggtctttatagcagct

SEQ ID NO: 51331 - DNA, 272 bp, Homo sapiens
taacaaaggggaagtcttctcttgacatagtatgtaacaggagcttgaatcaggctaatctcgattatgtgatggtaagatacaaataattcatatgaaattatttataaatgagtcctgaaaactgttctagaaatccaaatgaacactgtcacattgttctaatctggagctaagtgagccaatttatctcccatgcagactctgtatgatcatcgtttccaggctaaccacggggtctgtctactcaaaaattgagctcggcccctcag

SEQ ID NO: 51332 - DNA, 505 bp, Homo sapiens
  misc_feature 19, 32: n = A,T,C or G
taccgggcccccccctcgngggtacttctagnattaattaacgcggggacaacagcctgttgcagtgaatccaaatctgttaccatactgatttggttcaaaatggccaaaaagaataaagtaaacggcagtacatttcatagacagaaccctatgtctaggaaccaagaatcctcttgattcatcaggctacaatataactcggcctccagcaacaacttaatgtatcaaaatcagaaatatacgtacacgatgcagcgactggctcaggtgtgtagcattactatcattgggaacactatttcgtcaaactgtaaagtgcaagcaaactgggttcctgacctgaatttcatggaagtctaaacaactccattactgtacacaggagtcgccccaaacaaacatcacacatctcacttctgcctcagcaacggcggcgaccctgggttcccctacagagatcagaggagaggagaggacaggacacagccccaccctcttgcca

SEQ ID NO: 51333 - DNA, 407 bp, Homo sapiens
  misc_feature 28: n = A,T,C or G
cgggcccccccctcggagtacttctagnattaattaacgcgggcacaatactcagaacctttccaatgattgctagagcctgaggttcctgaaaaccaaacgcagagattacttattgggctgccttattacaaggttggttgaatttaaaacttcactgtatctcatgggtacattaggacaatcatcaagaaaaattcggatcctgataattagaagagcaacactggggcaccctcagagccctgaaaatcttctgaaatactcgccactgcttgcctttgccatggtagctcacctcccttgcagaagaaagctaagaatcacgccctaagtcttatatgtagcttggctagtaaccagaattcaaaacaaagtacagaaccagagtagaaaaaaaaaaaaaa

SEQ ID NO: 51334 - DNA, 506 bp, Homo sapiens
  misc_feature 458, 464: n = A,T,C or G
cccccctcggaagtcttctagaattaattaacgcgggcaagtctctctaatacaatgtttctatcttccagttctcagaagttttccctcttacataagacacacatttatacttaatgagcaccaaaaagaaccctgagccctctgaactaggccatcttttcaaaaagaggctgggcccatagactaacttgaaatgctagtcccatcagcaaaactccagcaagagctgcagttaatattgagaagcagaggccaggtgcggtggctcacgcctgtaatcccagcactttgggaggccgaggcaggcagatcatgaggtcaggagttcaagaccagcctggccaaatggtgaaaccccatctccaccaaaaatacaaaaatagccacacgtggtggtgtgtgcctgtagtcccagctactcgggaggctgatgcagaagaatcgcttgaacctgngatgcngatgctgcagtgagccgagactgtgccactgcactccggcct

SEQ ID NO: 51335 - DNA, 602 bp, Homo sapiens
ggtaccgggcccccccctcgaggtacttctagaattaattaacgcgggggtcaatcagaatctaagacatatgattaaaaagacaaaatgtaactgtgcaagtttggattattcatttctgctatcacctcagtttttgagttctaaagcaacctaggaaagagcttagctcttgcagtgggtggtggggcagagttacagaccttatttggtactctcattgcactatttataattctgtacaaaaacagacatttttacagcatgattttgtagttgtcctatctctaggggatgtgtaaaaacaaaataacaaacatttttgttaggttagacttgatatgtaaatttatgactaagatagatcgatattttcttcagactagtgattttttttctcttcataatataaaaataattttaatgagataacagaaacaaagtttagttaagaggcataaaatttgtagacatgtcagaatttcctgataaatttggattttcagcctacttacagctgtgattaaataacaaaattcaggctgggcgtggtggctcacgcctgtaatcccagcactgtgggaggccgaagcgggtggatc

SEQ ID NO: 51336 - DNA, 286 bp, Homo sapiens
ccgggccccccctcggaagtcttctagaattaattaacgcgggtctctactgtatacattaaacccttgtaagtgatacagaactgctaataaagtaaaattactgaattagtggcagtctctgatttggaaactttgacagctcccttgtggggtgacacagtaatcaggctaagctacagagcaaccttgaaaggtttgctttgagttgagttgataattgtaatctggtcatcatttattttttccttttttttctccctagtaataccaaaaaaaaaaaaaa

SEQ ID NO: 51337 - DNA, 554 bp, Homo sapiens
ccgggccccccctcggaagtcttctagaattaattaacgcggggagggtgtggtacctaacaaactgcttcattcaataaaacagctcagggtaaagagctctaaagtgtgtgtctttcccggtgacatctaatagctgagaaggctgcttagcccacaagtagctctgttttcctctatttcagatgtggccaacaaggataatgaaaaaggaataacttttcagaatgtagagtcagggccacagagaataatggaaaaataagtccctccacccactagagagtagatttaatcaaggaatattcacataaacttcccatccctgcaaggatagaggccttaacaatactcaccaactggaatttcaattgttatggaccagcgattgttatatcatggagtttttcttttccaagtggaagtgtttttctggttatgttgtacttgttttgtcattgtacattgggtgcttgtaatgaatccaatttgtctttttggcccaacaggcttatatcaagagtaaccaggccaagcgaggtgggtcacaccta

SEQ ID NO: 51338 - DNA, 579 bp, Homo sapiens
  misc_feature 28, 136, 142, 547: n = A,T,C or G
cgggcccccccctcggggtacttctagnattaattaacgcgggactcctgggtgttgaggccattttctgatccagaattctctttcccacaaacaagacagaattcctccatcagaaagaccagagagatagtgncccctngaaaaggcatgtcaggaatggcctgacctagcccttgtcttagaggcaggacaaggccaaagggggagtggacatgggggagccctgcaggtggggaaaggccaggcagttcctgctggctgagcaccctaatctgctgcagctcacttccctccaatgtgtacacgttgctgggtcacaggaggtgtgaggctgtgacggtatcatttccaagaagatgctgaagctgaaaattagctggccagcaaatgtagcacagagtatacaatgctaccacccagagcaccacgtggttctgggccgcctgtggctccaaccacaggctgctgggctcagagggctgcttccccgggttgatggaaccctgctgtcccctgtcccagggccttttgctaactgttggtntcagctgacgagtcctttctgttggcagctcc

SEQ ID NO: 51339 - DNA, 571 bp, Homo sapiens
  misc_feature 28: n = A,T,C or G
cgggcccccccctcggaagtcttctagnaattaattaacgcggggcccaggttggattgcagtggtgtgatctcggctcactgcaacctccatatcctgggttcaaatgattctcctgcctcagccttcccagtaactgggattacaggcaccaccatgccccggctaattttttgtatttttagtagagatgagatttcactatgttagccaggctcgtcttgaactactgacctcaagtgatccacctgactcagcctcccaaagtgctggtattacaggcatgagccactgcacccggcctgccattacttttaatggcaaaaaccacaattatgtttactccaacctaatagcagagacctacaggaaatgagtaaatgagtcatggagagatccagggaagatgcaccttggacgaggagaatgatcagagcaaagtctctgtggcacagactgcttgatgtgtgcaaagaacagacaggcctgtgtggctggaacagagggagggagagcaagagtggtagaagatgaggccagatagataacgaagggcctaacatgtgggatc

SEQ ID NO: 51340 - DNA, 453 bp, Homo sapiens
cccccctcgagagtcttctagaattaattaacgcggggctagcaggtagattattactgaccaagggtagtttattactgaccagtttctagttgaaatgatcaactagatgatttcaaagcttgttttaagtctttgttagcgcatgttcacggcagttcttaatctaggactagagtattcctagtcctaaaacatgacctttttacaatcccagctgaatcctagctcttcagtgatctatgactccgcctgatcagaatgccagactttcagcattgtgccatcatttgaattttcattcagctcacaggtccccagccactgctctctgtgaaatctgagtctctccttctcatgtggggctgagtctcaaccaaatccagcaatggccccaccagatctctgaagcagcttccttctgccctcatattctagttgtctcagcagcgc

SEQ ID NO: 51341 - DNA, 571 bp, Homo sapiens
  misc_feature 28, 546: n = A,T,C or G
cggggccccccctcggaagtcttctagnattaattaacgcggggaatctaaaataaggttgaaattacaaaaaataaagtaaaatacaaataaataatttttattacttccttcatattaacatctaggtaagaattcctccctatgaatgtgtcatgaagacaggagacaaattgaaatcactggcccttgaaggcatgtttccatggtttttggatgttctacaagtggaatggatctgcttacatccccctcatcaggataatagggcttcctccccttcaacatcagtggtcagtccagccatttatatcagccagactccacccaaaaggcatgatgtaacagggttggccataattcctctgtctactcctaagcaattgtacactcaactcagcaaaatttgtgaaaaaaaataaaaacgtctcagagcccagtaaaaaagagcaataaaacaggagttctagtggaaaaaacaatagcagcacttaagatgaaattccaaatgaaatagcccactttaagttttttcttattacaatntccagtttttctatccatgagcatt

SEQ ID NO: 51342 - DNA, 586 bp, Homo sapiens
  misc_feature 29: n = A,T,C or G
cgggcccccccctcgaaagtacttctagnaattaattaacgcggggtggggaggtgaaggagatagggtggaaagtcttttataaaacattagctggctttggaactaagcctgaaggtcaaatagggtatccatagcaggggtctggggcactagacagtctgttcattttcaggaatatatgggtcagttttgtatgtgtgacctaagaaacctgtgacacttcttacaggtcttgacttttctttctcagtacatgtgtatttctctttttggtggccttgaaacctttgagttgaaaattgccttcaccatctgccactttcactaatggtagaccaggaaatttggacccactgaacatagagaacaactagaaaagctgtgcaaaatataaacagcatctatctgaaagcatcagctggcaatatagaaccaaaattcaggacacgaaggaaactcaagagaagtgagcctgggacttagagctacttttcccataagggcacctgctgattctggaagaggcagctaagaagctgagtagaactttcacaacttcttgtgttaaggagccagcttcatg

SEQ ID NO: 51343 - DNA, 588 bp, Homo sapiens
ccccccctcggaagtcttctagaattaattaacgcgggcatctacagctttttaattccaattatacctcaataaagtgatttttttttcagcataaaagaaagaaactgacccaacagggatactgttaagcatttccataagaaaactctagaggtgcatgagttatctgtgaaacagcctttgtcttaagttcttgagtgaagtctttttttccctccaagcctcggtgtcctcctttctaaaagaaagaagatggattgaataacctcaaagcacctttaaagctgccatgaagatcgccagtcaatggggatggcaagaaatgatcaaatcacaaggcaaatctctcagagcaatcaggtcttcctagacaagttttgattgttggaatgaagttatctcagggcatcgatacctgagataagagaacagtagagacacagccatgtgaaaattaggctctaaataaatgtgtaaagcaaaaacatccagtggattcaaacatacccttccctaggaagttgctccgttagaaactggttaatgatctgacatagctatgtgtttctcccaactcaaggtatg

SEQ ID NO: 51344 - DNA, 513 bp, Homo sapiens
cgggccccccctcggaagtcttctagaattaattaacgcgggacctaactaaatatataccaccttggcatattaatcagcaatgtatatttttgtcccatgtggaaacttaataagcacaccacaactaacgggttttaggttcttccactaaataataagttccttaaagacagagattccctccctcccactgtttattatagactttacaaatgaggtgtccgataaacatttgcttgctaaaaagaaaaggcaggataatttttaaaaataaacaacgaagaaattcttttgtggacccaaaagcaatttgtctgaaggggaaacacatctcaggttaaatttgtaatctgcacacatacagaaagaatgctatattatccttatgatttacttaagatgaagtcagttcctacccattacacacaccttagctgaaaatccattagggtagtagattccctatactcacatatggaaactgcttcaactgatttttttccccccccc

SEQ ID NO: 51345 - DNA, 258 bp, Homo sapiens
  misc_feature 27: n = A,T,C or G
cgggccccccctcgaaagtcttctagnaattaattaacgcgggtagctaaccaaggagtttaaatctaggtcagcagtaccaccacatcttttttctgtgacattagtttttttctttaaaaatataataaggctgggcatggtggctcatgcctatggttttggaggccgaggtgggtggatcacttgaggttaggagttcaagaccatcctggccaacatggtgaaaccccgtctctactaaaaaaaaaaaaaaaa

SEQ ID NO: 51346 - DNA, 592 bp, Homo sapiens
  misc_feature 32, 490, 527: n = A,T,C or G
tgggtaccgggcccccctcgaaatacttctanattaataagaaggtgtcaacctattaactccggcttttaaaactttgacctttagagcaataaacatcctgtagtaatctaattttccatactaattttttgatgaggtgttaatttctttaactaaatgatactattaaaggctaactgcattaagaacgcccaaataccagttcactcaatagaaccaatgtctttttccttttctttttctttttctttttttcttagacagaatcttgctctgtcacccaggctggagtgtactgcaacctctgcctcctgggtttaagcaattctcctgcctcagcctcagagtagctggctttacaggcttgtgccaccaagcccagctaatgtttgtatttttagtagagacagggtttcaccacgttggccaggctagtctcgaactcctgacctcttgatccacccgggtcagcctcccaaagtacggngattataggaatgagccaccacgtcctgcccaatgtncttttcttaatggtccatctttccctctagtcttataaggcacaatttaaaaggtgtgactcttt

SEQ ID NO: 51347 - DNA, 592 bp, Homo sapiens
cggggccccccctcgaaagtcttctagaattaattaattttatgagacatttaacatgttcacacatcaggccaaacatctggggctatatggatggtggcatttatccaactgtttacacaccctgctttccaagtatcagccatgctcactgggtcccatccacttgcaagcttagtaaggcagaggccatacaacccccatctccaagctctgtgcttatgggtagaggagtgtccttatagtctgagacatcaacttgaattttcctcagaaaggaatcagatgtaatgaaaagagcatccttttagaagtcagcaaaagaggcattagccctggttttaaaatggactgttctatgatattgagcaggttcttaaccccattggccttgcttcctcatctgggatattggtggtggcggcagccatagcaaaagtaataatttctgccctgcttagctctcagggctgcagaaagaataagataagactgtgtagcaaagctctagaaactgagtgtggttcacaaattgttcatccaaaaatattaagtgtgtagatgtttcaggcattgtgcttagctgttatat

SEQ ID NO: 51348 - DNA, 282 bp, Homo sapiens
cccccctcgagagtcttctagaattaattaatgcggggagctcagaacctcagtgtgtacctccacactcattccccttagcaggccaactctaattttattaaagttccttaaatcaagcaaaatcaacttccttataacttcctgattctgctggcctgaaacaactcagaaaatatctattctggttttgttgttgctccacccaatgattctcatcctctaaacacttaacgcctatttaatatttaatgaatacaacttgatggatctacattgcat

SEQ ID NO: 51349 - DNA, 235 bp, Homo sapiens
ccgggccccccctcggggtacttctagaattaattaacgcgggcattacaaaacactgtgatcacttttgatttcttacattagctttattgacattcagcagaatatttatttaatattatcctcaaatgtatgagagaagaaagcaagacattaattatccagtgtcattttgtacatggctttatggaccttgctaagaactttagacattatcccaaaaaaaaaaaaaaaa

SEQ ID NO: 51350 - DNA, 527 bp, Homo sapiens
cccccctcgagagtcttctagaattaattaacgcgggtgccactctgtcagaaagagtcagagagataacttctcctttgcctttggagggaagattccacacataacacatctaccagggactacagaattcttgagttgacctccttatcaagctgtgcttcattagccagttcttcatattcttttctttcataacaccacactctcttgcttccttgcctgagaaactttccccaaagagctttttcccaggattaagagcacatgctcagacttttctcttcaaatcctggctatgcgacttcttacctgtgtggcctcatatatagtacctaagctaccttagcttcttcccctggaaaatggggataaataataataactcagaggctttgcagagaagtgatgacgtgacatgtggctttcttggaactgtgcttgcccctagcactcacacaatgaaggatcattattactggagcttctgttcaacctactgaattcctttcttacagctcctttct

SEQ ID NO: 51351 - DNA, 541 bp, Homo sapiens
ccgggccccccctcggaagtcttctagaattaattaacgcggggtattatagaattctagaattattgtcactttagaagtcatcacatctaccttttcatcctaaaggagtatctttctgatctttttaaatgggagttgttaaggtataaggaaagggactcaagataatttgggtattgattaaaaatcgtatacatctgaaattgtatgtattgggtaaactttgctatcagtctttatggtatagaagtattgcttggctcagtaatgaaaataacttgcatatatgcttcatgaaaatggattaacctcatgtttattactctaaaatgagaatggtggaattatggctatgttctaaccctacagcatcattaaattaatatcctaggcttttgtataactatttaaagaattacatgttgtagagttaggcaacctattagactgcagagtagctcttttacctttctagtttagcattttgttgttgcttctactatattgaaaacttttaacaattatttcaacctgtgaa

SEQ ID NO: 51352 - DNA, 612 bp, Homo sapiens
  misc_feature 15, 32, 576: n = A,T,C or G
taccgggcccccccnctcggggtacttctagnattaattaacgcgggcatcttcttgactaaagataatcgattctaataaaacaaccataatgtcttctgcctattttttcttgcacaaattaggaagagaactagccaggcatttccaattacacactttattatgtttttaaagatggccacttctaaacaacaggacaatgtgaaacctcttgtatctttgttaataaaaataaaggtcaacataatacttgaaagtgccctctttacacccttcatataagtcagccctacacaggtggggagtaaattggctataatttatgatggcctaaaatacaacctagaagagtctaggatcagaaatctgatcacctgtggaaaaaagggaatgtcatgcactttactatggtcactctactcagaatagatagattctcacattgaaaaacattaaaagttgccttggggagaataacagaataggatgcccaaatgttatagtggtcctgtcttctaatggtttcccctctgagggcatcctggggagaagttcaatctttctaatgggaantaaactgtagtacaactctctaagcgcatttaccac

SEQ ID NO: 51353 - DNA, 571 bp, Homo sapiens
  misc_feature 16, 29: n = A,T,C or G
ccgggccccccctcgnaaatacttctagnattaattaacgcgggggctgcagtgagccgagatcgtgccattgcactgcagcctgggtaacaaagcgagactccgtctcaaaaaaaaaaaaaatgaaaataaaacaactaaaaacagactattctccagagaaaaaataaaatggaaattgtacttaaaaaaaaaaaaaaaaaaaaggctgcgtgccatttaatcccaggctctagtatgtttatttgggttgtctgcaatcagtaacaacataaaatttgaactttttctgtaaaagatcaaagactaaatagggcagtttgctgtccacatactgactctatcacataatctttgttatttcctacaaccccttaaaaggtaaaaaccattcttatgttgggtgcggtggctcacgatgtaatcccagcactttgggaggccgaggtgggtggatcacctgaggtcaggagttcaagaccagcctgaccaacatggtgaaactacgtctctactaaaaatacaaaattagctgagtgtggtggcacatgcctgtaatcccagctacttg

SEQ ID NO: 51354 - DNA, 618 bp, Homo sapiens
  misc_feature 603: n = A,T,C or G
cggggccccccctcgaaatacttctagaattaattaacgcggggtggggatggctaatgagtacaaaaaatagaaagaatgaataagacggagtatttgctagcacaacaaggtgactattgtcaaaaataatttaattgtacattttaaaataactgaaagtataattggattgttcgtaacacaaaggataaatgcttgacatgatggataccccatttatcctaatgtgattattatgcattgcatgcctatatgaaaatatctcatgtaactcatacatatatacacctactgtgtacccacaaaaattaaaaattaaaaaatttaaaggattaaatgagctaatttgtgtatacataaagtgttcagtgcagttcctggaagttgataagtggaaatattatttattcatttggctaaaataactttagcatcatagccatcttcttctcataagttagagacttcttttgttaaaggacatacttttcagtggttttaaactgctttatctaaggctaatactttctcgcccgtgtgttgctcctttttgcttctgcttccactgcactcacatctattcctttcttattaaagcanatcatcactctttga

SEQ ID NO: 51355 - DNA, 600 bp, Homo sapiens
cgggccccccctcggaagtcttctagaattaattaacgcggggaactgaatctactgacagacattatcaaaacatttgtcctccaggaagggagccagtcaagactatttggtaacagtgtgcttgtgatttctgcaagttggtttcacatttctgttttactaaagatgtgtctcacacagtattccctccaacaggaggcagtccacccaagaagggcagccaggagtgggaaataagtaaaacagtagaaagttacttttaaattatttccaaggttgtgaaaacatctcatagttccactaaacatgtattgcctcttcaatgggtttctggaattttcttggcctaaaaccttttgcaacatttaacatatcagcttgtgctagctgcttctctctacccttctttgccctactgcaaacaaaagaattcatttcattcaacagatgtttttcgagcacctattattaggcaggtgctgtgacatggaactggggaaaaaaagacagtatgttcagaacacaactcttaaaggtatctcgatttattaaccaaaaacagtagtccactgccattccatctgacttaacctcact

SEQ ID NO: 51356 - DNA, 420 bp, Homo sapiens
ccccccctcggaagtcttctagaattaattaacgcgggtgggcagatgagtaagcatcacttcactatgaccagagcttgggatgttttagataacaaaaagcacagagggcatgatgcttagtggaacacgcactctgactcattcttatttgccatgaatggattttagagattcttcagatggggagtggggtgaggggctgaggacggctccagccagtgtgtgaatctccttgttagagaagtccccaccagggagggagcaactgaggggccctcaactgtagcctttgccatacgacagccctttgaatgtttaccctttcctgggctatacatctccaatttcttcagctactcccttatatcaacaaaaacaaaacaaaacaaaacaaaaaaacccaaaaaaaaaaaaaaa

SEQ ID NO: 51357 - DNA, 595 bp, Homo sapiens
  misc_feature 28: n = A,T,C or G
cgggcccccccctcggaagtcttctagnaattaattaacgcggggtagtaactggaaacttgaaaaataaaaacagagttcaatgattcaactgactctaactatgtaaagctgaaattaaatgagttgcatacacatttaagcctgatttcacattagcatttctttttatgacttgtttttaattttttttctctgtgcacaataacataatgaatgcagactcagtagaaattgaactcaaaggcataaacttaaacaataagcacaggaacattcacagcaattaataagcaagataataaaggtacaactcagagaataaaatgaggtgctctatgaatataataataagcaaccaagcatagttttattacattaagtaaaagtagcatttcctaatctgtatttataatagtcacaataaagacacaaaaatacccaaattcatagcattccaaggaacaaaggcataactctaagggatctgtacaattggaagtcttttaaaattacatttgtatactagaaaaggtttaaaaaatactttggatgatttttaacattttgattttcctattatatattcatggaa

SEQ ID NO: 51358 - DNA, 565 bp, Homo sapiens
cgggccccccccttcggggtacttctagaattaattaacgcgggtgggagaaagatcaccgatatgatgggcatttatcattatatccttgcttagttgtgtagcattgtcttaatgtcaggctgtgctctaagatcgtatattctcctgctgtttctaagaactcctagcatggacactgatgacaccagaggccctgccagttagttttagaacctggtttaaactcatctggacaacttgtgacaatgttatatataaaagaaaaccactgagggttataatttcaacttataaaagtgaatctctgccacaaatcaattttccagctggggaaaaggcttgaaactttttgttcctcctttaacacacgatcttcgctattgtggttgaaagcttactaagtatgagaaactgctaagcactaaaggcacataaagactgaggcttcattgccccagcacctcgcaatctaagtgaggaacaaaaggtgtgaaaaacactgaagattcaagaatagggtacagaatagagggcctttgatgtcagggcgaggtgccctata

SEQ ID NO: 51359 - DNA, 304 bp, Homo sapiens
  misc_feature 15, 17, 19, 31: n = A,T,C or G
ccgggtccccccctncnangatacttctcanattaattaacgcgggcttaatatagtggaaatgttatttgtcaatataaacaatgaactattgatacacataacagtggtgaatgtaaaaataaatacagagagtgaaaagaaggatacatagtttatgattctatttatatggaattctggaaatagtgtattaatctgcagtaacaggaagcagaacagtggtttcctgatgagtatgaggggaatggagaaggaaagaattacgtaaaggcataatgaatatgcttcactattttggttg

SEQ ID NO: 51360 - DNA, 519 bp, Homo sapiens
  misc_feature 40, 429, 470: n = A,T,C or G
agactgggttaccgggcccccccctcggggtacttctagnattaattaacgcggggatatgcaacagacctgggatgacattcacaggacaagaactcaagagtcagggagtcccagaacccagctggaagatttgctagaatagcccaggtgcaaagtaaccagcagtttctggttaaagaggagaaatggtagtaaaatgccttataaagaaagcaccagtggggcacagtggctcacgcctataatcctagcactttgggaggccgaggcaggtggatcacttgaggtcaagagtttgagaccagcctggccaacatggtgaatccctgtctctactgaaaatacaaaaattagctggccatggtggcacgtgcctgtagtctcagctacttgggaggctgaggcacgagaattgcttgaacctgngaggcagaggttgcagtgagcagagatcatgccactgcacntcagcctgtgtgacagagtgagactcggtctcaaaaaaaaaaaaaaaaa

SEQ ID NO: 51361 - DNA, 501 bp, Homo sapiens
  misc_feature 12, 25: n = A,T,C or G
gccccccctcgngaatacttctagnattaattaacgcggggacagtttctggttgtttcctcagagttatgttggctcattacagaacagacactccttacctgcagaatttgtacattgtggggagtaatttatcccaaaccagttcagacactaggactaaaatgttaatagtaccatttggagaatgctcagtacttgctaaacactttatattaatatttcctttaacctcatcatagcatccctattaggtagattattattcagattttacacacagtgcatttgtacatagagcttgcccaacaccacacaggtagtagtctgatctcaaattaagccctagaagccacagtgggagagtaccagaaggcaggccgttggggatctagccccaggatcctcacctcaatcgtggtagctctactttatttgtttttcatattaggttttctgattttgaatcattagagagttctgctgtaaaaaaaaaaaaaa

SEQ ID NO: 51362 - DNA, 603 bp, Homo sapiens
ccccccctcggaatacttctagaattaattaagaaatataacctttatttaagttatggatagtatccttaactgtattttcaaaaaattaagtataaaattgtgataacagcctaacagtcattaattcaaaccaatccctaaattggcagaagttcagctggtatcagtaaaacaatcaaatattgctacccagctgctcctattcctatctgctccacaaatactgagacatacaagtcattctttcatttaacaaatatgtattaaacacctatgcacctaccatgtacaagactgcctactaaatgatgggaatacaggtgtgaataagagacaaggtttccggactcacaaaacttaaaatctagctgtagagacagacaataaacaaaagaaattacaaaatgtggtcaatgctatgaaggaaatacaggctgctcagacaaagaataacaagggacatctcatttaataaatgacagcaattaacattcactgagcactttggatagggtagtgagagaaaacctctctgaaaaatgacggttaagttctataacataagaacaacaaggagtacaccatgtgatgactggggag

SEQ ID NO: 51363 - DNA, 597 bp, Homo sapiens
ccgggccccccctcggaagtcttctagaattaattaacgcggggggaaactctttgaataagcacacagttaatgacactcagcctcatcattaagtttaacagcagcctttttctctcaagtagcccatatatgatgtgccactagcaatatctacttacgatgctggtgctgttatttgcatactgcatcagaacacggccatgtgacagtactgatcaggagagaagccttgtgcttctcacagcttactaaagcagcagaatcattagcactgacatatttcactacagcagttggaagactatcttttaaatggtaggagccatcaaaaaatggttttcactccatcactttacagattggcctcagaaattagctttagaataattttatgttttttgcccccttttttttaataaggattgagccaaacacacaatgtctaaggtagcatctatgtgccaaattctatatagtataaatcgaaaggagacaggctatttaattttaaactctctcaataaaagttattacgggtaaaaagttgaagactagaatactgagaaggtgaagcagaattgtaatggttcccta

SEQ ID NO: 51364 - DNA, 586 bp, Homo sapiens
  misc_feature 27, 139: n = A,T,C or G
gggccccccctcggaggtacttctagnattaattaacgcgggattgcccactatatagccacatggttctaatgattgtacaagaaatgcctgttaaagagaactggtacttcttgctccagacccatgcatttgccancctgaaatattcataaccatgacagacagtgatattaataacaattaattgtacagtatctgggccaggcatttcttacacgttatttcaattatgtcctaaggtacatattctcactccaattccacagatgtagaaatgttctttgagagtttaagcaacttatccaaggtcaggtagggattaaatggagatcttgggatggcttgatagtcccaaagttcatgctctctgacactggctgtggttggttacagcctctccaagtatctgacgaaagattgtaagatcttagaagagagggagctccaaagaagggtggtggggtacaaggaagatgagaaggcatgaatgaaagtgaagagggagagccagcctgtcgaaggggaaaggcagaaggagggaacataacataaacagtgtgtgttggtgtggggtggtgttggc

SEQ ID NO: 51365 - DNA, 583 bp, Homo sapiens
cgggccccccctcggaagtcttctagaattaattaacgcgggacaataaagtggtgcatatgcagcaagtgatttttaaacaataattcttccagcatgcaatttaggggaaatttttttgtggtgactgtgctttgatatttcccgaatccccgtttgggaacccctttgtcacaggagaggtggcacttggtcaatgttgtgctccaggtacatgtggtatcggagtgactctgatgacagctagcaacagcctccagtgtcagaaaaattttagaggccgactgaggctatgtccataagagctataaggaaaaagtctcttccctctattacttttgcagtaaaaaaaaaaaaaaaagcggccgcttttttttttttttttctgagacaaggtcttacttcgtcacccaggctggagtgcagtggtgcgatcttggctcactgcaaccgctgctgccagggtccaagtgattctcatgcctcagactcccaaggagctggaattacaggcatgtgccaccaagcctggctaattttttgtatcttagtagatatggggtctcaccatgttgcccaggct

SEQ ID NO: 51366 - DNA, 628 bp, Homo sapiens
  misc_feature 607: n = A,T,C or G
cgggcccccccctcggaagtcttctagaattaattaacgcgggcttcccgtcaaggagctatagagtccccaagcctggtacttgagtcaggaaaatgtggcattctcacatttgttttggggcattataggagggactataatttctttttcttcttctttttgtccctactccttcctcattaaaagcccagagtaaaacccagtcaggatatattgaggtttagggagtttattcagggtctagcataaccagggtagggtagagagtggaatagaaagagacccatttcacatgtcctttatccccttctgattcagaggacagccatatttcacttacaaagtttaaaaggtaagagagaaagtaggtagcttaaatattttcatcctttttaaatggctgctttcatgattagatttctccccatgggaggccaggctcagtggctaacgcctgtggtcccagcactctgggaggccgaggcgggtggatcacgaggtcaggagatcgagaccatcctggctaacacggtgaagtcccgtctctactaaaaatacaaaaaattagtgggcacctgtagtcccagctactcgggaggctgangcaggagaatggcgtgaaccc

SEQ ID NO: 51367 - DNA, 319 bp, Homo sapiens
gtaccgggcccccccctcgaggtacttctagaattaattaacgcggggcttctaatgcttctattgttgtcaagttatcacctgatgaatactgttccagttcttcaggataaggtcagacctgtgaacctgtaatttgaacagcagtgcataggtcaaatagcctcagttgaagtgacaggagcttattgttttgtattgctgggattccttagcccatagttcattccataattcctaaatcaactctagtataaagtgatatcttcaatacatgtgaaccagttatcacatagaatgagttacttttgtcctaaaa

SEQ ID NO: 51368 - DNA, 610 bp, Homo sapiens
ccgggccccccctcggaagtcttctagaattaattaacgcgggtcttctctctcatgatcaagcaccttcagaaagcaccaagggcaggctccacggaaggaaataactttaaagttcataaggcatcattacattgcgattgcggtgcattataggaggccacgtcctgacactgtgtccgatcattactccagaggaaagggccctctgcagtgttgaattttctgagactgtctctccccattatctccaataaactgggtctattccatagagcagttaaattaacagtacctgatgacactctgaggctttcaatgaaataaaaatgatcacaaactaagccgagctgcctgtaccctcacggggaatctatatacacagttgactgggttgttacatttatgcctgttagaatgtatgcatgcatcatggcaggaatgaatacaggaagagaaaataccagggaatgaaacgggttgagatgcagatgaacagtgagcacggatgtggggtcctgcattctttttgctcccacccacggcccagagccctctcctccctcccacctattcccaggaacgctgctgaaacattgtccttttgaca

SEQ ID NO: 51369 - DNA, 290 bp, Homo sapiens
  misc_feature 28: n = A,T,C or G
cgggcccccccctcggaagtcttctagnattaattaacgcggggcacataattgatcttgtgacttgaaattgaatcactttcaaggtttcttccaaagtggttttgccctcctgaaccatactctattacagctacacttatccagtcagctgaagaaaaagaaaatgataattctctggtgttcctgcctttgttgagcagcctttaaagtcactctgagcccatttcaccctcaagagcagaggcacgccagaggcaaactctcccagcctggaaaaaaaaaaaaaa

SEQ ID NO: 51370 - DNA, 603 bp, Homo sapiens
  misc_feature 24: n = A,T,C or G
gccccccctcgaaatacttctagnattaattaacgcggggagtgtgcctcacagctaggtggctgctcatgatgctggagacagagaggccttgaggaggctgcattcggctagtaatcagactggttgggttctattcttgtaaccaaatgtattaatgatcctacccatactgaataccaagtatataccaagaattctggctgggcgtggaggctcacgcctctaatcccagcactttgggaggccaaggcgggcggatcacgaggtgaagagattgagaccatcctggccaacatggttaaaccccatctctaccaaaaatacaaaatatgagccaccatgcccagccgccattttcttaactttctattcaattacaatattcgggccaggcacggtggctcacatctgtaatcccagcactttgggaggcagagatgggcggatcacctgaggtaaggagttcgagaccagcctgagcaacatgatgaaaccccatctctaccaaaaaaaaaaaaaaaaaaattagctgggtgtggtggcaggcacctgtaatcccagttactccagaggctgaggcaggagaaccgcttgaacctg

SEQ ID NO: 51371 - DNA, 504 bp, Homo sapiens
cgggctcccccctcggaagtcttctagaattaattaacgcgggggggaagtgctgtcaaagtgaacacaaggaactcccttttatttaaagctcttgttcctcattcattctggatggtgagtaatatatcttaaggttggaggggaattgacaagcaatcgtagatgcctggtgatggttttcagcttgtgtggcaaagctgaaaagtgggggggaaataaatacagagaatatttaaagtcactagcatcccaaggtggccaaagtactcattaatagtttcaaacactgggcacagaataagtagttttcaaaacaagtgcatgaattcatcagctgttattaccacaagggccaagcttgggaattaacagggcatgtggctggaaaaactgcttctgttttgcctctaacacaatgtcatatgaaagtaggcatttaataaatactttagttaccctgatgagttgagttttacctgtagtaagagttataggaacatc

SEQ ID NO: 51372 - DNA, 337 bp, Homo sapiens
  misc_feature 24, 320: n = A,T,C or G
gccccccctcgaggtacttctagnattaattaacgcgggataaggaacaaaggaacaaatctgactccaagtttccacggttttagccatattccacaaatctgttcatcagaccataaagaggataggtttcagaagtccatttactaaaaccaagtttcattactgaaaaataactgcaagatgactaattacactctatgagcattgctcctatcacttttactgatctgaatagtagaatggaaaatacagcctcgattttaagtagaactgtgcacaatctgtattttctgcatgtgcactctactaatcagcanatgttaacttactcata

SEQ ID NO: 51373 - DNA, 581 bp, Homo sapiens
  misc_feature 19, 32: n = A,T,C or G
taccgggcccccccctcgngggtacttctagnattaattaacgcgggctagtcaataagtaccttaggtttttggaggcttagattcctaactgtaaaataagaataatacttactttcaagagatctatgaggattagaaatgagtgtttaaagcaataaacatttaatgaatgaaagttatcatttaataaaaatgccaattcacaaaaccgcatgtattttaaatagcctatagcaactagatcaagatattaaaatgtatacagcattttaattcaaaatataaattttttctttttcataagaaaattttaaaattttgataacatctttagttttcttctataacattgattctcatatgggaattaggaggctacaggctgctttaaaaatttcaagaactctatggatcttgtctccagaaaaaagcacatatacaaaaacttttatgttcaattttagggcattatggattctcttaaattccatgcatcccaacattatatcacactccctgataaggagttcacaaaatttcaaggggtgattctgatatggtaattataatgtgtaata

SEQ ID NO: 51374 - DNA, 600 bp, Homo sapiens
ccgggccccccctcggaagtcttctagaattaattaacgcgggccagtagctggccctgtctgccaagatataaaggaccataagtatgcaaaggaaaataatgctatgctccaggaacccaagagtcaagtagaagaagaaacagaacacccaaaacagatggctcctatcagaatagaagagatggagacagaatagcacttgaacaaaataacgtaagaaaacataccattaaagaccaaaaagactttctacaacaacacaaatatgattttctactttaataattcagtgaatacattgtaaaaagaggataatcattaaagcctgatttagtagcctagaagatacagaggaggaaataattcaagacatagagggggaaaaagtggggagaaggaggaattaatatctccagagtaaagataagcaacatatcaacagatccaaaaaatataacacagaaattgaggttttataagaaaaaagtaactacagaaggaagggtaattaatcaactgatagaaaattatattgcttgaattaatccaaacttgaatgtacaagttgaaagaatttataaagctccagagttccta

SEQ ID NO: 51375 - DNA, 508 bp, Homo sapiens
  misc_feature 482: n = A,T,C or G
taattaacgcggggagaatattgaaggctgggcgcagtggtttatgcctgtaatcccagcactttgggaggccaaggcaggcagactgcttgagcacaggaatttgaaaccagcctgggcaacacggtgaaacccgtctccactaaaaatgcgaaaattagcttggcctggtggtgcgttgcctgtagtcccaggctgaggttgaagaattacctgagcccaggaagccgaggctacagtgagccatgattgcaccactgcactccagccttggcagctggagtgagaacccatctcaaaaaataaataattaattttaaaaatatatatatatatatagcattagccattttgtttttggacaaaatacagcattgctaaatgtgtggggaacatgacaaaattaaaacaacatacctgatctaacatgcccagacagactaggaggcattgttaggatgtgtaggcggttttttcatctntgtgtaaacctgtttttttttttgac

SEQ ID NO: 51376 - DNA, 519 bp, Homo sapiens
  misc_feature 31: n = A,T,C or G
taccggggccccccctcggaagtcttctagnattaattaacgcggggagtgagactccatctcaaaaaaaaaaaaccaaaaacctagtcctaaagtatttataaaaagagtttccagccattctaccaccaaaggcaccttttaaatttctctttatagattgtttatcttaaaatactgaatatacaaactatattgatcatataactttttttttgagacagggtctcattctattgccctagtgcggtgacatgatcacagttcactgcagccatgaccccccaggctcagacaatcctaccacttcaacctcgtgagtaaccgggactacagatgcgcaccaccacgcctagctaatttttgtattttttgtagagacgggatttcaccatgttgccctggctagtctcaaactcctgggctcaagcagtccacctgctttagccttccaagaggctggattacaggtgtgagcaactgtgcctggcccatcattaactttttataccttctttt

SEQ ID NO: 51377 - DNA, 603 bp, Homo sapiens
  misc_feature 28: n = A,T,C or G
cgggcccccccctcggaagtcttctagnattaattaacgcgggcatccacagaaatatttatgatgaatatcttcactatatttagagtggtaaaatgctcctctctaattataataactaaaccattccatcactggaagaatactgtggctaatgtcaacattatacagtgaatcttagcattacaaaacaccagtgagttctacaaacttctatttgtaaaaattgaactatgttaggcaccatgaggcatagaaagataaacaagagattctacctgccattcaggtgtctattagaaggattcttaaaatctgtgcactaaaaatttaacaaaaaattgttaaatatatacgagaggcacaaagaaaatgccatgaaaaaccgaagtgtttgtttcaggtgagaaaaaatcaacaaaaacataatgaaagagttagtgcatgtgcctccactttcagtttgggtaggctgtcaagaggtgaagaggaggataaaacaatgtgggcagaataggtaaacaggagaggaagagacaggtttgactaaggcctcaaattacaaaagggacagacatacataaggaatctgaatacaaatgt

SEQ ID NO: 51378 - DNA, 569 bp, Homo sapiens
  misc_feature 38: n = A,T,C or G
ctgggatacccgggccccccctcggagatacttctagnattaattaacgcgggcactctcattgataggtcttcactattttatatctaactataaccttgggcatccttagggacactaatcttactacttcttcgagagggtacttagaagtggaattgttgggcaaaacaggtacacattttaaattgagaaatattgtcagcttaccattaaacaatagtttgtatcaatttggactctcacaaaaagaagtatgtataagttccttttagccatgtacagcagctcatgcctataatcctaatgctttgggaggctggggcaggaggatcgcttgaggccaggagtttgagaccagcttgggcaccatagtgaaaccccatctctacaaaaaatacaaaattagcttggcatggtggtgtgcacctgtagtcacaactagttgggaggctgaggcgagaggatcacttgagacaggaggtcagatctgtagtgagccatgattgcgccactgcattccggcctgggtgacagagcaagaccttgtcttcaaaaaaaaaaaaaaa

SEQ ID NO: 51379 - DNA, 606 bp, Homo sapiens
cgggcccccccctcgaaatacttctagaattaattaacgcgggtatgagttaggctaatagtttaataaatacaagcacagctagtgagatatgtctcctctgggaattctataaagaaatgagccacaatctcagcagtatccttgcactgtctactgtggcatgcctctgtgaaggccccggcatcacggcaggtgccagtcactaaaggtactgaaaggccagttgctgtggttcaggtaccctgttctatagggtctcacttaattcaaagtcagcccttagtgctatgtgtgaaccacgtgtactctgcaaaatcccctacaaatatcacttcccgcaaatggtcttatttataaagcagaggaatgctgtgagtttgaggctgtgctccaacacagctagctgaatgctgctccagtatatgcctgtttaatgactatgagtcaccagagaaagaactcacacctacttcttaaaactattaataagtaacccaagaaggttaagtacctgcatcagagaccaagggagaaattcaggtacagccaatacacaacccaataaataatttggggccttttctaatgtataaaagaacccac

SEQ ID NO: 51380 - DNA, 454 bp, Homo sapiens
cgggcccccccttcgaggtacttctagaattaattaacgcgggcggcagaacaaaacaagttgtgatcaattaaggcagctctgagcctgccccttgttttcaccatcacttcccttacaagctgcaattttgtagagacagggagtgggttgttaaaagaaagtaatagattcccaacaagttggaaaaggctttttaatatacagcttttgtttgtaattgcaattggggaaatatgtacagaataaaacttggctattttcaacttcattcttttcccaataatttgagatagtccccagaattacaaaaacctctcttgtagcccctgtcttaggtaagagtctatttggcacaggtaggaggcagaataattcttttaaatcagcagcaacagtgtgacatcaatgttactctgaacatcccgctagattatttgaaatggttctagct

SEQ ID NO: 51381 - DNA, 594 bp, Homo sapiens
  misc_feature 23, 36: n = A,T,C or G
tgggtaccgggcccccccctcgngggtacttctagnattaattaacgcgggccactgtctcaatgacacacccaacaatcttgtgagctacgcaggacaggtatgaataggaatgtgtccagagtacccagatcaaagaaaactctaaaatataaaagagtgctttttaaacagttttaaaatgtagtttccacacttcaaaaaattgtaccagatcaaaaatataaatatttgatttataaaaggaggaaatataagtggttaataaacatttgaaaaaaagagctcaacttcacttattaaagaatgcaaacagaatgagtagcatcttcacctgtcaaataatagcagttgtgatgacaccctcatattctgtagcaggaatttatagtgatacagtcttttaacttaaacccttaaaaatatcatactctttagcccagtaattcaccttctgggatctttccaaagaactaaactaaagtacaaaaaagactttatacctaaagacctgtgcctaaaaacgtattgcagcctcacagtgatgtttagggaaaccttagttgtaatgctctttacacatactttcatgta

SEQ ID NO: 51382 - DNA, 496 bp, Homo sapiens
  misc_feature 18, 20, 31, 449, 468: n = A,T,C or G
taccgggcccccccctcnangatcttctagnattaattaacgcggggagtgggggtgtgggaactaaggaaggacttgtattttttttctttttctttttttttagagacagggtttcactcttgtcacacaggctggagtgaaactgtctcaaaaaatgaaaataaaaataaaaataaaaataaataaataaataaaaggcatggttaaactggtttctttctgtttcttgttttttccagtggctaaaatgaatggggcttgatcacttctaacactgcagtgcctcacagtcctcagtgacagctcccatagaaagctaaagcagtccgggcgtggtggctcacgcctgtaatcccaacactttgggaggccaaggcaggcagatcacctgaggtcaggagatcgagaccatctggttaacatggtgaaaccctgtctctactaanaataaaattaaaaaaaaanaaaaagcgggccgccaccgcggtggagc

SEQ ID NO: 51383 - DNA, 610 bp, Homo sapiens
  misc_feature 16: n = A,T,C or G
cgggccccccctcggnaatacttctagaattaattaacgcggggggagaagatctctctatctatagttttaactatgatccatgtccacttatttattttaaaaagtttaacataaagagtaatttttgagacaacaaaggattaggaagtagccatgtaactgtaaattgtgatggttattatccttgaaataggttgggtttacaactctcatgcctggctgtctacctactgtaacaagaggatacaatccctttgaaagaggactaaaagagcaagagcaagagaaatagaacacttgggtagtcccagtgtcatagctctcattcacttctgatatgataaattttgcttaatgtaatccagtcctgcgttcacttgttatgtccaaattataaatatatttctgtggctgagtgatacataaacaatgcttaacatcttgtctgggtttagggagactggagaaaccctcctggatcctttaagctgctggtagtgtaaaatcctattacttgtctgcatataataattatattaatcactgctcagtaagagatgttggtcttttacatcaagttttccctttggaatcttagcctttaaaa

SEQ ID NO: 51384 - DNA, 603 bp, Homo sapiens
  misc_feature 38: n = A,T,C or G
actgggtaccgggcccccccctcggaaatacttctagnattaattaacgcgggggcccggcgaatactgccacaagcaatgtcgtattcccagaacatgctctcaatctagtttgcctgcctttcattctgtcattcaagtaacccttaaaaaatcttacctcctcctcagggcttttcaaggctaaagtgaagggaggtgctctctttcccttgcggctttagacactcctgagactctctcttataggtttaccaacacacttaacttttggttaaatgtacattaaccaaaagtgttgggggaagtaaatgattaatcttagccatttagctagagttattttcaatttatcactgatatctctgtattacattgtcttctacaaccagtgagtcagggacaaagacagtgacaccaaaccgagctcaaatgttctctacgaggatgacataacctgtaaggtttctaagcagtgctcacattcgcgatacaggctctctagatatctatgccctatgtggagtcagcgcaccaagagtgtagcattttatttatttatttatttagaggcagagtctcactctgttgcccaggttggag

SEQ ID NO: 51385 - DNA, 585 bp, Homo sapiens
  misc_feature 33, 568: n = A,T,C or G
ggtaccgggcccccccctcggaagtcttctagnattaattaacgcgggatcctttttcatcatgaccaaagtcacctgttcatctctttgaatagtattactgggaccactggatttaaggctgaagtgtgagctgttagtttatcctcttaagatattcaatgtttttatcctgattgaaactcagggtctaaggggaataagagaggaatggaacaattggacgggaaatgagaattaaatcttaactgggcaaagcctccagagagctttaagatagaaattctacagagggtaaaaaacctccagatgcatgagcacaaaaatatcaggaatgggcaagtgtcgtctaacttccagttgaagtctcctactgacaacaaacaaacaaacaaacaaccagcagatttatataaataagatcaggtctacagaaaaataaccccctaatgcacttgtcagattctccattggagagcagagggccaagtctactactgagcagaaaaatgtgaggaaggatgaagaagaatcagtgcaagggctaggaataagggaggaactaganaatgaacaactcaccct

SEQ ID NO: 51386 - DNA, 592 bp, Homo sapiens
cgggcccccccctcgaaagtcttctagaattaattaacgcgggagactccaaatcttattctctctctaccagatactaactaaaaaaatgtaaagggaaactgaacactggaaaacaagcaaaacactttccttcatccaccaaatattaattgactctctgtttgagtatatgcatgttctggggaaaaataatcagaaagaaaaatatttttctacatttttgaagcttctaggctagagacgggtgggtagatagataagacagatagagacaaaccaacaaataatgcaaagcttagtaagaaaagtaccaaagaaaaatgagaaaatgccatgggctcagataagaaaagatcacattattttaagagcatcaatagggccacattaggaaacacagaagggtagacaagtttataagaacgggaacaagctactccagatataaatgataagtaaaagcgtagaagtggaaagcacaatgcagatcaaggactaacaaaaagcaggagtgtgactgaagtgtaagatacagggagggaaccacaggagggtgacagacttcaaatatctggctaagatattatac

SEQ ID NO: 51387 - DNA, 590 bp, Homo sapiens
  misc_feature 23, 36: n = A,T,C or G
tgggtaccgggcccccccctcgngggtacttctagnattaattaacgcgggccaaaactacctttaactggttcttttcaactattctgagaaattggagtcaagtcactatgggaggcagagtcctcatctagaagcttataaactggttatgataatcagcacggcagagacccatttaactggcagcttagttaaaaaagccacaggggacactgtcttgaactccaagtttacgtattatattagcctgaatataacagtggtttaaacaaataatgtgtatacagctacacaaaaccacgcaaaataaatttccttatttttttgctcccagtttctcctacttcttggcacatcatagtattcaatttttccttcctctaaagactagtcttaagaaaatgcaggtcaggtgtggtggtggctcatgtctgtctgtaatcctagcactttgggaggatgaggcaggggatggcttgagcccagaagttcaagaccaacttaagcaacagagcaagactccacctctataaaatataaaaagttagccagatgtggtggcacacacccatagtcccagctactct

SEQ ID NO: 51388 - DNA, 503 bp, Homo sapiens
  misc_feature 36, 423: n = A,T,C or G
tgggtaccgggcccccccctcggaaatacttctagnattaattaacgcggggaaagccatattaaaacataaacatagacacatagcacacagccaaatgcaactgatctttaagacatttacctctacaccattcttagcatgaataacagttgtctaacttttttcatttaaatgttctctgtactggccaggcacagtggttcatgcctgtaatcccagcacttcgggaggctgaggcaggcagatcacttgaggtcaggagttcgagaccagcctggccaacatggtgaaactgggtctctactaaaaatactaaataatcctgtctctactgaaaaataaaattagccaggcatggcaatgtgtgcctgtaaacccagctactcgcgaggctgaggcaggagaattgcttcaacctgngagcagaggttgcagtgagccgagatcacaccactgcactccagcctgggactctgtctcaaacaaaaaaaaaaaaaaaa

SEQ ID NO: 51389 - DNA, 622 bp, Homo sapiens
  misc_feature 607, 608: n = A,T,C or G
gtaccggggccccccctcggaagtcttctagaattaattaacgcgggagacacaatatttgtcgaagctcttcttctcatactatacttttctaaaatgaatttgaaagtagtgagatgtcttatcaactttccataaaattctcatttccttgagcctgtgtaaacagctgactaaacacatggctattcactgtcaggacttgctcctcagcatctgccacggaaaagattcgattgcacacatacgaacccaatgccagcaccccaagggacagggcaatagaaatgggagggaaatgatcaagtcaatgaatgatacactccattaatcttaatgttaggacattaatattgcttggcaactgcctaaaatcaacaataagcgatcaaccaatttgttgcctaaaagttattgatttaaccatcaataacttaacagcataaccataacaataactttaatttactaactttaaataactaaagttctttaacaataacgataacagcatatatgtacatcagttacgcattaaaagatggatattttttgtgtacatctgaatggagaatattagataatgtagaaagacatgagatgaagnntgatatacaacccc

SEQ ID NO: 51390 - DNA, 585 bp, Homo sapiens
  misc_feature 25, 559: n = A,T,C or G
ggccccccctcggggatcttctagnattaattaacgcgggcctactaaacacatagattccgtataaaagatgttatggttcaaatctaaaactacatgatatcaataccagttcacttgagtctccatttttcacttaaatttagaaatgtatatttggctttagaaatgtaattttcttaaaataattaaattcagaaatcataaacctgagacccctacttcacataccaatctaacatggttctgtaacaacttaaaagtttaacagacaacaacgaaaatttcttcgatcttcaatggtaagtttgctcactgtacacaccaattgtgcaagagttggagaaagcaatggcattattaacagaacaaaggatgcccacgtgtgctaatccatagttaaactgaatatactagcaccgttagatttagtctttagtttcagaattttttttttccttaataaaaccagccatacagaatatctgttgtcctctggctaagaaaaggtgttctctcctatgtgtgtgcatcaaagattgccctatttacacagcanaataattttatcccaagagttctatt

SEQ ID NO: 51391 - DNA, 524 bp, Homo sapiens
  misc_feature 17: n = A,T,C or G
ccgggccccccctcggnagtcttctagaattaattaacgcgggtcttggggttggaatacttcttggggaactagaaagaacagcatcaagaaggcatcccagattgaggaccaagtaagatctatcagaaccagagcctctcctcctccatattatactttaaatgacagcattttaggatttaaaagagtctttcttcctttggaagccagtgcctaaggagaggattactttagataaagagtactttaagaaaaaaaaaataccaggagttagaatggacaaagaaaaagaaggatataggattgattgggagaacattccaagtgaagatcatagtcctaagcaatgtaaatattgcctttaagagatgttgttttcctactagatgcatgcctcataaaggctttcaaaactgctatttatttcattgttctctatggtgtgagttgatgttataaactggtttgattaagataaaagctgggtcaaatctcaagtcaaataaaaatacatttctgat

SEQ ID NO: 51392 - DNA, 519 bp, Homo sapiens
  misc_feature 23: n = A,T,C or G
ccccccctcggggtacttctagnattaattaacgcggggaggtccatctttattttccatctacccaccaccccatctgggccaacactttaatatcactgatgaatctctggggcccaagcctcccatcttgcattcctcatccctgccttggcgaggatcctctcctggtcttcctgaagggttcaaaagtcgcttctgtgaagtcttcctgagtatggtccctttcctctgcagcactctcaggaaccctctgcagcatgcatgttgctccttgtctctgttcactgaaccctcacaacttgtttacacattacccacccaccctgccctctgcaacccaggggaacgtccaggatggggatggcatcttgttcatcttcatatctgtttttttgaaatctaaatgtaacagaggccaggtaatctgtgatcatcacttaagaaatggcttcacaaccacccttggtcccaacactgtaacattctctgacagattcagggtataagtcagcaatc

SEQ ID NO: 51393 - DNA, 613 bp, Homo sapiens
  misc_feature 38, 68, 80, 91: n = A,T,C or G
ctggggtaccgggcccccccctcgggggtacttctagnattaattaacgcgggcattgttatcagggnagggaaaaaagnatgcttttggnaaatacaaggatttgaaatatatcactcatatgccaaatgtaagaaaaatattccaggaataattataaacaaagcagtaaatcccaacctatacgggaaaatgagaagatagtgaagagtggtaaattattaaactttgagttgtttatggatatatagaataaatgacgatgtatagcttaaatattacatagagatttatgaagaaatatactctaggttaaaaatgtaataattgcatgaagtaaaagtaaaagccatctaagatgtaggagcttaagtggctttgagattatagaagtcatagcaaaagtgtcttaaaagtctcactggaggagacagggagcaggggaatagaagcatctggcacgtcctatcttattaagagggatagaaagagaaaaagtgggggttagagaattttatatgataatagagaaatatatgttcatttgtaagtactatgaaaaagaaagtacctctaatataatgaaagaaattctgagaaatttcaaattaaa

SEQ ID NO: 51394 - DNA, 597 bp, Homo sapiens
  misc_feature 20, 33: n = A,T,C or G
gtaccgggcccccccctcgngggtacttctagnattaattaacgcggggaaataaaacattggttttatggtatctttagattttaagtattatttctcgtctccattatgttttagcctcttttttgactcatgagcaagtaatcaaaatgattcagtattctatgaaatgtactactagttgaaaagtatctcatagataatttaagctcaaatccccactaatttactttatgtgggtagaatactaaaaacagataatattgtttctgttaaattcaatcatgtgactcaaagaaatgagtgtctgtggatggagagacagaatcataattctgttactgtgtacacatattgggaatgcttttgacacctgcagtcattctgcatgataattctaatatcatttctctttgtccataacacaatgtttataacttggtcacagatacatttgacttttgccaaaaatgacttcaaaaaaaggactttgagtttcttcttcttaagtaaaaatataaacatattagggcccaatttttcatcttattctgaatcacataggtaatgcatcttacccagagaagatcatactga

SEQ ID NO: 51395 - DNA, 488 bp, Homo sapiens
  misc_feature 28: n = A,T,C or G
cgggcccccccctcgaaatacttctagnattaattaacgcggggtatcaaaaacgaataaataaaataagcccaccatttaaaaaccactaataagaaatgttcaaagtatgtccaatgtgatgaaatactaaatgttttaaggatatcaaatagtgattctatatatcttattaaaagtacacctatcaattgctaaaaagataaagatatgattcaacactagtttctaccaatgtatttcccttactctacatcatcaaaacagtaagctatttgctggggaatggaagtaatatcttatgtagaactggaagctataatgattattgaaaaataagactataattgatattcaaaatgttttagaaattctagaattctagaaattcaagattcctagataggcacaaaataactttgatagtagcataaataatttatattatattgataaaatactctttattttccaaaaaaaaaaaaaaa

SEQ ID NO: 51396 - DNA, 582 bp, Homo sapiens
  misc_feature 24, 70: n = A,T,C or G
gccccccctcggaagtcttctagnattaattaacgcgggaccagctagaacaataatattttttatggcntatggaaaaagaaagcaggaagaattgatttgacaacacttcttaactgtattttattgacctaaacgtctcatatgattagatcatctcttatatcaaagaagtggggaaagtctggacgcagtggctcatgcctgtaatcccaacattttgggaggctgaggtgggtggatcatgaggtcaggagttcaagaccagcctggccatcatggtgaaaccccgtctctactaaaaatataaaaattagctgggagtggtggcatgcactgtaatcccagctgctcaggaggctgaggcaggagaattgcctgaacccaggaggcggaggttgcagtgagccgagatcacaccattgcactccagcctgggcaacatagttagactctgttccccactaaaaaataaagaaataaataaaagaagtggggaaatgcaatcctctcatagtctcagaagaagaggttttagcagaaatattggtgagtaactgcaacaatttactctgtttattt

SEQ ID NO: 51397 - DNA, 570 bp, Homo sapiens
  misc_feature 31, 533: n = A,T,C or G
taccgggcccccccctcgaaatacttctagnattaattaacgcgggcctgacttttcctccataaaacattgtcatctttcatctcattatatgaggatgtttcttaggttcagagaaaaaaaaaatgagtagctatagtcaaagtgaggagattatattacataatatttaacagttttttttagccatgaatccgtatttcttgggttactacaattcagcacatagctctttataaagttccattataagaataatgatcttggccaggcacggtggctcactcctgtaatcccaacactttgggaggccaaggcaggtggatcacctgaggtcaagagtttgagaccagcctggccaacatggtgaaaccccgtctctactaaaaatacaaaaaaaaaaaaaaatagccgggcatggtggcgggtgcctgtaaccccagctactatggaagctgagactggagaatcacttgaatccaagaggcagaggttgcagtgagccgagattgggccattgcactctagcctgngtgacagagtgagactccatctcaaaaaaaaaaaaaa

SEQ ID NO: 51398 - DNA, 604 bp, Homo sapiens
  misc_feature 15, 588: n = A,T,C or G
cgggccccccctcgngggtacttctagaattaattaacgcggggggtctaggagcctaagagtggatgtattgggcatcaagggagggcctgttggccagggttggtcacagcaaggatcattccaatgctgccgggaccccaacacttgctttctggccaggcgcggtagctcacgcctgtaatcccagcactttgggaggccgaggtgggagggtcacgaggttaggaaatcaagaccatcctggctaacatggtgaaaccctgtctctactaaatgtacaaaaaattagccgggcgtgatggcgggcgccagctacttgggaggctgaggcaggagaatggtgtaaacccgggagatggagattgcagtgagcagagatcatgcgactgcactccagcctgggtcacagagtgagactccgtctcaaaaaacaaacaaacaaacaaaaaacacttgctttccaaaggggtggctgccacttcaattggaaagaccctttggacaatgcacacccagcatataagagggttcataggccaggcgtggtggctcacacctgtaatcccagcactttgggaggctgangcaggaggagaattgc

SEQ ID NO: 51399 - DNA, 600 bp, Homo sapiens
  misc_feature 30: n = A,T,C or G
accgggcccccccctcggagtacttctagnattaattaacgcgggtggcttttttttttctatgctggtctttggacatcaggccatgaatgtcactgctatgttgtctcttgttcaaactggaggccttttcaagcatgactttcaggcatatagagatccttatgcaatcatttaaatttactgtattgtttatgcacatgtttttcattttccagtaagggaaacagttgaaatccaaaagccaagcaaattccttatttttcttccttttatgagactgaataagaactgaaaaaatggaagaaaggacatgaggtaaagggaggtatctggggaaaatcttcaggtaatatttaaaaatatattgctacatacacatccttactgttctttgggcatggattcatgagattaaaaaatatttgaaagacatttaatgctcaaactaatatggcttcaagataagtaccttacaaattccttttaatttgaggtgactaggaaataagagacactgttatgaatatagaccaataaataggcagttaagtttacggggcagtaacttataaatctgctagaaataacttggccttg

SEQ ID NO: 51400 - DNA, 562 bp, Homo sapiens
taattaacgcgggcagtctgggtgggaactcctgacctcgtgaaacacccgtcttggcctcccaagtgctgggatttaggcgtaagccaccgcgcccagccaaaagttgattattgatcctaatccctgggcccagtgatggagcacatagaagaattctgtttttttgcctgttatttctcaactttgcctgaaaaactgtcaggattagagggatcttactgagtttctcatagtatcagaccatagacaagttgatactactggaggaattgatgggtataaatggtaggttcagcaatttttatatgttattgcaggtgtttagaatttcaccacagtgctgacttttgttgatttaaaaaaataaaaatgtaactttgtttttggctgaacaaaaagaaaaaccaagtttaaaatttcagagtcagcattttcctggtaaactctttcaaacctcggtagattctgaatgtagggtatagcttatttttcctcataattggtttcctggtatgtattgatgaaattaaaaatatgaaattcaaattagaaattaact

SEQ ID NO: 51401 - DNA, 589 bp, Homo sapiens
taattaacgcggggggtgtttttgtcattttttccttttccaggctccttgttcatctagcaatatctgaactgcagtgcatttgccttccactcacagaattcgtgctgattatatgtagttctgacccttaggtctctttccgtgttagctcctgccttgctttggctttgtattagcagtatcaagctgtgcccggcatgcttgagcattgacacaggtgtcagatttaatgttgaatcactttcaggctccaggttcattgtactttcaagcaatagaggctgcatgtcttcagcaccataacaaagagatactctttcatagtttcgtactataaaattaagtcctaagtctctcaatattgattatggcccttcagtaggtagagaatctgcaggacatgctttagaacccccatgaagggggacagttaattgtctttccttgagttttcagtcaattcatgacactgtgcaaataggagaaataattatagttttgccaagtggcagaatatgtttgatttaatcttttatgacttataactgtacttagttgtgaagagtccattaatgttaattttgtt

SEQ ID NO: 51402 - DNA, 499 bp, Homo sapiens
  misc_feature 17, 405: n = A,T,C or G
ccgggccccccctcggnagtcttctagaattaattaacgcgggctattagttagcatacattaagttacaagtattagaaaagtcattcttaaactagcttaagaaataaagaagttgattatctcagatagcaagaggtacagagatagggtggctcctaatttgggttacttcaacaacattgtcaagaaaccagattctctcctgttccctcatctctatctttgatgtgcatgctttgtctccaggctgtttcccagcatagttacaggatgttgcagtacttatatgtaagttacatcaagacagaatcactcagacactgaatgcctcttctggcatgtgctttatacaatttagaaaaacagttggagaagcacactcagtcgattgccccccatttntcattgatcagtattgaattaaaaccttttattgagacattcaataaattcttattaaataaattcatggaaattccaacagctctaaattaga

SEQ ID NO: 51403 - DNA, 529 bp, Homo sapiens
ccgggccccccctcggggtacttctagaattaattaacgcgggtaactggaggtatataagcatgggcagtatgctgtggcacaaacattaggcccatgatttctgaaaacctttttgcatttcttttcaaagtcatcactctcttcatggatccagtttccttttaaatacccgtaatattgaaacaatttgtccctttgatatgcaaaagtctcctgaggtttactggtgattagggcagcaggttttcttgcagataaatcaaacatcaagtcccatggcttcatgccatgcacacaaaatatctaaacaacttcacttaggcacacttacatcatattttatttaatgatatcttgctcctcagtttgaaaagaacacatttatgattttttaaaatctagagtgtatttctatactatttgattttcttggagttattggaaagtatattgggtcccactaaaagaggagagtttcaatcttttagctgtgcaatggttgtcatagcgaaaaaaaaaaaaaaaa

SEQ ID NO: 51404 - DNA, 610 bp, Homo sapiens
cccccctcgagagtcttctagaattaattaacgcgggaggcagacacattccatattgctcattttccaaattacatgtggttctgcagaaatgaagaaagtcacagatagactgctgccactaagttttcagtgtgatgtatttgggaatgttttgatgtcttaaaggaaggagacttttgtgaataaaacaccagttataaagttttatgaaatataaaatagctctcaacttgttccctaaataagctatgtgtccaaatagctttaagcccagggcaggcccatgaatggagagtctttataattggaactaatcttcagactgtcttcggtaagtggcagactctacgaggctttgatgaaatgcttaccctaatttccatatggaccaccatactaattcactaggataaaaatttaaattcttttataaatgaaggcagaacagattggggacccagacacaactccatgggtgaattttgtaatatccagtcttttgcatgggaaaaaaaagtctcagacaatatagatgttgatcaaaaagtaggccaggcatggtgggctcacgcctgtatcccagcactttgggatgccgaggcaggcg

SEQ ID NO: 51405 - DNA, 358 bp, Homo sapiens
  misc_feature 31: n = A,T,C or G
taccggggccccccctcgaggtacttctagnattaattaacgcgggggagagggagggatagcattaggagatatacctaatgctaaatgacgagttaaatggtgcagcacaccaacatggcacatgtatacatatgtaacgaacctgcacattgtgcacatgtaccctaaaacataaagtataataaaaaaaaaagagagagaaaagaaaaggaaagactaaataaacacctcttgggctgtaatttaaataagaataatatcatgtcctctatttttgtccctgactaaaacaggaaagtttagttatgtcttagtttactacattctatttccctggggaaaaaaaaaaaaaaaa

SEQ ID NO: 51406 - DNA, 604 bp, Homo sapiens
  misc_feature 564: n = A,T,C or G
cgggcccccccctcgaaatacttctagaattaattaacgcggggcttaatacctaggtgataggttgataggtacagcaaaccaccatggcacacgtttacctatgtaacaaacctgcacattctgcacatgtatcctggaacttaaataaaatatatatatatttcatgctaaagtttttatattgtaggtaaactttaagattacataaaaaataaacaaaattaataagcaaatattgaacttgagctacactttagaccaaatggacctaacagacatatgtagaattttccatccaacagcaacagaatacagattcttctcaagagcacatggaactttctctaggtcaggtaccaaaaacagtgcctggcatatataaaaggtatcaaatatataattgtttaataaatgaaaaatatatacctttattatatgtgttaggccacaaaactagtctggacaaatttaagagaagtgaaataatttcaagtatcttctctgataataatgctatgaaactaggactcagtaacaggagaaatcttggaaaattcacanatatgtggaaattaacatgttactaaacaaccaatgagtc

SEQ ID NO: 51407 - DNA, 613 bp, Homo sapiens
cgggcccccccctcggaagtcttctagaattaattaacgcgggcccctaatttatatgtaagggaaatattgagtcattccaggttagagggagaattcttggcacagttaaaaactgaaattctaagattctaatcctaagccatatggggtccaaccagcttaatatagcaagatgttctcaataactaccatggtgttattcagggactgagagaaccaaaagttaaccagacctggtcctcatccctgagactcttgcttacaagcaggagaggtaaatgtgaattcagaaaattgtctgatcctcctcttctgaagcaccagcataacaagtttgggtattggccaaatggattagtgctatgtttgggttcctggatgctggatcttgggtttgtaagtgctctgaagcaaccagaaatgggaagaattagttggaagtaaaaatatgaaaacaaccccaaaccccaactaaaccaagaaatagacaataaaaaatatttttggaccgggcgcggtggctcacccctgtaatcccagcactttgtgaggcaaaggaggtcaggagttggagaccagtctggtcaacatggtgaaaccccatctgtac

SEQ ID NO: 51408 - DNA, 535 bp, Homo sapiens
gcgggggagagagagagagagagagaggcatttttctctttactattcattattaccaagaaaatctaggattacagagatgcagcccaatagtgtaactagacttactatactgccttcccactgattaataaataaaaaatcaccagccagattcaacagggaaacttatctgaaagtggacaggaaaaaaggaggcatattctttcccctagaattatattctaagaattcagttgaggatatggaccatcacaaggcttgagtctggggtactttatttgacctgactatatccaacatgtaaataaagatccaagggaactcataagggctaataaaacaatactgaggtttcttctgtgatgttgatattgactaagaaaatgctgtgagtgatgatctgcatatgatccgctgctcttaaagactgatgacatctaacatagttccaggtgaggtgaggtttgctggctctacatgcctccaacaacggtagcctctaccagagagatccttcactggcactgatgct

SEQ ID NO: 51409 - DNA, 380 bp, Homo sapiens
taattaacgcggggagggcttgttacaatcaggttgctgggtccccttaccagatggctgattgattagcatttaacccgtttgcccacgtgatcccaaatctgctggtctgagagtcacacattgaaaaccactcgatctaggaaactcctagaaaaataagatagcattgtttttcacactagacaggcacgactctgtaagcctacatgaaggcatctctactgaaccagctaagttgaattagatagccagacctgcacatctactctaactatggacaaactggccgttgtatggataaactgggacttgctgacctttggctggctggtgggcaatgtaccactggtggtgaacgtgctgccagctcctgatgg

SEQ ID NO: 51410 - DNA, 603 bp, Homo sapiens
  misc_feature 33: n = A,T,C or G
ggtaccgggcccccccctcgaaatacttctagnattaattaacgcggggcccaggctacaaatattttttactcttaaacccaacttttcccatttttgctattgagttttctccagaattgcctatggaatatgcaagaaagttataaacctagagtattaatttgttcaacgttcgtgagtgaaaaggatattgaaatgtttctgaagttaagatatctctacttgtttaaactgaagttgattagactaattttgaatttgcaaacttaaaaattatcaataggcttcatctcattgtggaaaaatcttttcattcagaatgtctcctatgtgaactgaactcattcagagaaatcataatgatattaaaatagtaactattgagagcttcaaaattgctaaacaatattacctttttcacttctcagcctcaccatctcagttaagtattattttaacacaattttttaaaacttgtttttttagagacaaggtctcagtatgttgcccaggctggtcttaaactcctgagctcaagggatcctcccacttaggcctcccaagtaggtgggactacacatacataccaccatgcctggc

SEQ ID NO: 51411 - DNA, 406 bp, Homo sapiens
gccccccctcggggtacttctagaattaattaacgcgggcagcctcccagtagctgggtagtttaacttcttgattcagcaaaatgttcttagcccttttgaacagcatgtgacaggccatttgtcttataaagcatatcaggaatctatctctagtagtgtttcacggcatttgtgaactggggtagttaactcagttggttaaacccctctgttggagcttcagcccctggattgactggttcatttctttcagttttctgcacacagagccttcgtcttaaaagaggaatggatcctcacagatccatcccagttatgaaagcattttcagggtttacagcctggggatggaatgtttgtcagtactttttttttttttctttacccttttcctttttttttt

SEQ ID NO: 51412 - DNA, 409 bp, Homo sapiens
cccccctcggaagtcttctagaattaattaacgcggggtggagtgggggggttctgaaggagatgttatgcaagattcctttcagttcaaaggtttgatgccattgtatgaaaatttaccatcagctacaagttttcagaagtttgtaattgtaagaagatttatatagatagtattcccttatagtacctgccacccttaaccagaagacatcacatcttcctaaagaaagccagattacaatagaatgttaggcacagaggtgctcattaatctttctctaggctatttctcctgttttatggggaaagaggagtacataaaacacaggtttttttttttaagtatttcctctctctttttttttttttttgagacggagctttgctccgtcccaaaaaaaaaaaaa

SEQ ID NO: 51413 - DNA, 558 bp, Homo sapiens
cccccctcggaagtcttctagaattaattaacgcggggggtgggtgggatggcattaggagatatacctaatgctagatgatgagttaatgggtgcagcacaccaacatggcacatgtatacatatgtaacaaacttgcacgttgtgcacatgtaccctaaaacttaaagtataataataataaaattttaaaaaaaagaatataaatactttctcttctattattgctaactttcgtcatgcctaacaataacttattccgtcagcttttttttggttcctatttccgtggtgtgtacttatccacacttttcttttcaaaacttatgtttaaatttgtttcttataaacaacacatagcaagattttaaaacattcgttttgataaaattttaacagatgtacttaccctgattcctgacacagctggacttagttaaaatattttcttttttatattctattcagcgtgttttcctttgcttctttctcccttccatttcaatgttgtatagagaatcgattgcgtttactctatgttgtttcctctattgattt

SEQ ID NO: 51414 - DNA, 392 bp, Homo sapiens
  misc_feature 28: n = A,T,C or G
cgggcccccccctcggggtacttctagnaattaattaacgcgggggtaccagcagtaggacctcccaattcaaactaagaggcaatgctacctttgggagtgtcccaacagtgggaccccaatttgatggcgaagggatgacagacattggggcactagggttcccctggtcccactaaagattcccaatcctgtagaaagggatgatgttacaagtgggtgatgttataggtatggggagtttcttcaggatggaaattctttaccctggttggacgatgaggactgaaaagtttggatcaagtaacaagaacaatgggaaaagtgatagatgaaagcatccctggccttgggaggttcatggagtggtaggagagtggaaacattaatct

SEQ ID NO: 51415 - DNA, 574 bp, Homo sapiens
cccccctcggaagtcttctagaattaattaacgcgggggaggacgggtactttatttaaaatatgaagttggaagcaacataagagtaaagtgctctcaagcaactgagtttaatttgatataataaaagatttctatgtggtgggcagagaaaggagaaattattgaaaccgtaggctggattaattgggcactatagaataaaaagttggctttgcacctttgaggttctgaacattaattgagtatatgtttgcttcccaatttctcactaaaccaaaatggatttttaaatggcttttttctcttttttctttgtatgataatctttttatcacggctggttagagaaaccaatcacagaagatgagagccaaacctgtcccgttttggattttaaaatatgcactaatgtctataatcttgtaaaagactttaaagcgagaagtgaaatttggactgcatgttaaactccacaatcaaaaaaaagcagctacaagattctgactaccaaggagatgctgagtttgtcaagtactttccaatttaggttttacctgattgacaagtgttc

SEQ ID NO: 51416 - DNA, 423 bp, Homo sapiens
cccccctcggaagtcttctagaattaattaacgcgggaggtcaaaagtagggcacttacccattctgctctacggttatggctggtgcctggaggttctagcctgttataaacttcagacctgaaaggtaggagtgttgtactacccatcttctctaacaatatctaatttaaccacgttcccaggatcccagtctagagctagtgcgcttgagaatagttattctaaaattgctcttcttgtgacttgttgcaggcctttccactctctaacttttctaaaaggctgcattcagaattaaacaacagacttgttgttgatcacttttccaaattacaaacttttgcttaccggtgctttcaagagaaaggttatctaaggtcagtcatttaagtcagtgttcattacagagactgaacatct

SEQ ID NO: 51417 - DNA, 502 bp, Homo sapiens
  misc_feature 24: n = A,T,C or G
gccccccctcggggtacttctagnaattaattaacgcgggtcaccatgttggccacgttggtcttgaactcctcgtctcaggcaatccaccctccttggcctcccaaagtgctaggatgacaggtgtgagcgacctagcccggtctgcctgagacttttggaacctacatgtacacatgggttaaagatcattttgttttcttagtgtcctctcgaacatgtcccagtccaaatgtctggaaacaaaagacgtgggtcattcagactcatttttttcgttttaccatgtctaattacttttacaaagttactggtttttaggtatgttttcagcatattaataaatgggtggatgattgtcatgacagaacagctccaataagattttaactgctaatgactgtctatgttaaaataggcaagagttatcatcatttatttgatgaaatttcaaaccaggcgcggtggctcatgcctgtgatctcatcaccttgaggggctg

SEQ ID NO: 51418 - DNA, 613 bp, Homo sapiens
ccgggccccccctcggaagtcttctagaattaattaacgcgggattccactgaatgtaaatggaactaacaaaatatttagaaatcagattaaaggtggggtggtaaaatataccaaggtagaagattatgagggtataaaagcataacagtatttttgtcttttgttttactttatttttaaaagaaggaaagagtctagaaataaaaagacaaaaactctccattggctgtggtgaaatggagatcaccggtgtccttcataagtgaaatttcagagcagtggacaaaggtgttggagtgagggaagccagaagaaagtaaactattgagtaaataggacatgaggtgtggaaaaaaaatctataaagataacaattttgagaaggactgatgtgaatgagacaaagaagatattggatgaccaaggaaggtttcatgttgcatatatactttttactattttaaataggagttagtggtctagaatatgtttgaatttttatggaataatctataaggagtaggtcggctgtggaagactcagtgctgtgaagttcttgatcagatgagagaaaatggaataaccactacatacagtgtgaatggccttt

SEQ ID NO: 51419 - DNA, 529 bp, Homo sapiens
attaattaacgcggggtgagaaatgaaatttcttttagctccagttaagcaatggacacattgctgactctgtagtcattttatcctctctgtatagaaagggggaaaaaaaaggttaataatgttagggctttggcatttgaaagaattaagaattaagttctagttttacctattattacgtgggtaattttgggcaagtcaatggtttctttcctcccttctgtctcttccctctactccttcactctcactttctcttcccctgttcctccctctctccttttctttttctcttccttccttcttccttcccattttagtctctctcctccttttataaaaaacaaattcaaagttgaggactgagagatatggctcacaccggtaatttcagcactttgggaggcagaggcaggcagattgcttgagtccagaagtttgagaccagcctgggcaacatgacaaatccttgcctctacaaaaatacagtaattagccaggtgtggtggcacacacctgtagttct

SEQ ID NO: 51420 - DNA, 205 bp, Homo sapiens
  misc_feature 185: n = A,T,C or G
cccccctcgaaatacttctagaattaattaacgcgggtatcaaatggagaccaaatccccaggaagtctgattatgtagcatgcaggcatatgctaagaggccaattgactgctttctcaggttatgatcatcattaatgataatggacattctattctaggactgagggaagggtgtaactttntattgtctattcatgccgct

SEQ ID NO: 51421 - DNA, 596 bp, Homo sapiens
cgggcccccccctcggaagtcttctagaattaattaacgcgggatgtataccaggggagtcttaaaaggaaaagcaagtcatagcggatcaagctgccaagggagtgggggagggggctggcagcctcagcatctgccagatgagttttcagcagagagctggatttaaccgaggttggggttttgcgaggatccatcacagtaggagtaaagctaagggagctgagggtggatataagggagagattattaataatggactacaaaatataaactacagaaggaagtgaagtttgaggagagtgaggggcagtacaaaattggcagggccaatgcattgcaaaattaggtcagagacacccatcgagccaaaacatcctgggttaacccaactattttctccacttctgtatccaggttacagattacttacagggaaaatcaagtgggcagactggcaccatcagagtcatggtctttggatatcaatggtccctcaataattagtctgtttctccagtccattctcactccatttccacacagtggctgtttttaatcatctctggtatttctgtggtctctctcatcctata

SEQ ID NO: 51422 - DNA, 601 bp, Homo sapiens
ccgggccccccctcggaagtcttctagaattaattaacgcggggagggctttagatgtgtctattacaagtacaggtggagatgccacaggcttctctcctcagggactacagactaggttaagggtcagtgtataccccagtgagcctttcttcctacattccacttgcactgtgggcgaaaggagcaagctttaaactcgcagaggactgattcgtaactcatctttcattttcttttgagccacagaatgtacatggaaataggaaattgatatatataacaattcatttaagtcatgataaaggctttgtaggattttacttcctaagttttttttagtgataattctttttgtttttacttctgcttatcccagctcactttcatattgatagtgtttttcctctcatcttttccctgtagtctacaatgttgattttttcatttatttatcaatctgtcaatatctttcctatatctatatcaatatagatatgttcacctaaaagcaacccatacatttttaatggagcataagaatgaaagaaataggaaatataatttgaaggccaatgatccactaattatgatccacata

SEQ ID NO: 51423 - DNA, 333 bp, Homo sapiens
  misc_feature 17: n = A,T,C or G
ccgggccccccctcggnagtcttctagaattaattaacgcggggagtacatttgtgcctggcatttaccaaagtggtatagttatatgcctagaaaaatctgcctaggccttttacaaaagctgtcttccacaaaaggaaatttgaataaatggaaaggcatcctcgttcttaaataggaacattcatgttataaagatgtcagttgtaaatataattcaattccaataacattcaactagctgtttttatgaggttaagacaagttaatacaaaacttcatatggaaaaacaaacataagaataatcagaaaaacataaaagaaggacttgc

SEQ ID NO: 51424 - DNA, 407 bp, Homo sapiens
  misc_feature 24: n = A,T,C or G
gccccccctcggaatacttctagnattaattaacgcgggccttcttcaaatcccaaaattctatgttcttacttgaaattttcaccaagaaagctggtagtagaagtgccctatgaggtcaccaaatttcacaagaggcacaagcaatttctggtttggaatactgagtcagaaatgctgacacacatcaaaacctaggtgagctacaagaaaaaaaaaggtagatgggctataacatgagtaaatataccataatgcatgtcaataattttaggcagggtgtgatggctcatatctataatcccagcactttgggaggctgaggagggaggattcattgagccctggagtttgagaccagcctgggcaatcaagtgagaccttgacactaccaaaaaaaaaaaaaa

SEQ ID NO: 51425 - DNA, 416 bp, Homo sapiens
  misc_feature 24, 62: n = A,T,C or G
gccccccctcgggagtcttctagnaattaattaacgcggggtaatcactaaagatcaacttngaaaatgcagtaaagttttgaacaaaaactactaatccatggcttcactgtctcaaaaataaccaatgctaactaacattttagtggatatcttcttggccatttttccatggatgagttttagatggttatcatactatgtacatatgcatgtacatatacaaaatatacatattttttattcacctaatgttatagcataggatttttcaatgttatattttggtcttcatacaaatgaattttaatgatgattatatttaatagagtaaatgtattactacacttaactgttcctttcctgaacatgtagatccgttttcattttctcctgtggaacctagtgggttgaat

SEQ ID NO: 51426 - DNA, 510 bp, Homo sapiens
  misc_feature 17: n = A,T,C or G
cgggcccccccctcggnagtcttctagaattaattaacgcgggtacatagtagaatgccattttattattctttttccatctatctccagatttgacactgcacatacttgaaatacatgatgaggatttattttaacctcagatattaaatgaagtctttctctccttattcctctccatttcccttacactcttcctttgctctcctctctccctttccttccctgttattctcgtcaattagaaaagatgttgtgaacatcattctcagcaaactatcgcaaggacaaaaaaccaaacactgcatgttctcactcataggtaggaattgaacaatgagaacacgtggacacaggaaggggaacatcacacaccggggactgttgtggggtggggggagggatagcattaggagatatatctaatgttaaatgacgagttaatgagtgcagcccaccaacatggcacatgtatacatatgtaactaacctgcacgtcgtgcgcatgta

SEQ ID NO: 51427 - DNA, 422 bp, Homo sapiens
  misc_feature 24: n = A,T,C or G
cgggcccccccctcgggggtactntctataattaattaacgcggggacgttgcacaccatgccaagcccccgcctgcaggggagtgatgcaaggttgcgggcgctgcacactttcctgcagcctgaggtgtgatagtgtgcctgctgggtctcaggccctgccttagccttgaaggatacagcagagaatggaacaacagccccaactcatgttgcttatattcttgttggggagactgacaataagcagtgcacagattaaaaacagactataggctgggtgcggtggctcatgcctgtaatcccagcactttgggaggctgaggcgagtggatcgcctggggttaagagttcaagaccagcctggccaacatggtgaaaccccgtctctactaaaaaaaaaaaaaaaagcggccgtcacc

SEQ ID NO: 51428 - DNA, 484 bp, Homo sapiens
  misc_feature 458: n = A,T,C or G
cccccctcggaagtcttctagaattaattaacgcgggtctataatgtatttatcaagtgccaggacagagctattatggtttttctatgctttgcattggcttctgcaaattaagtttcatttcccttttgaccacaaagaagatggccctattcaagacttcctcgttcataatgcctcagtttgttatccctccctcttccctcttcttcctgtacttcctgcttctcagtaatgatagttgttcttgtgatctagtagagtggaaagagcgtagtatctgaataagaaaccagacgttgtaattctggagccacatctgactctgtgacttgggatgagacactccagccctcagcatctgcttcatattccttatttatataattggcacggccatctgtgtgtgtgtgtgtgtgtatggattcaaatattttaaaaaggatgtgagaactctntggaaacataatacatgctgtgagtg

SEQ ID NO: 51429 - DNA, 520 bp, Homo sapiens
  misc_feature 24: n = A,T,C or G
ccccccctcgggggtacttctagnaattaattaacgcgggtacgctatgattttgttctgtaaagtcaacaatttaattagctacaacaatatgtcatccactatgctttgacactccaggacgaaaaagataaataagattaagtccttgcccttccagccatctagcagaggagacaaatttaaggtaaccacaattccttatgataagactgtaatacagctatgtaaaagatgaaaataggtgatgaatcctgcctagagggtaggataggctttcaacagatggaacagcatgggtaaagatatagacatttaaaaatataaggcctgaacagaaccaaaagtagttttgtgtcattaaaatataaggtgtgtagaagagaatgggttgagatgagctgaaaagactggcgtcggaagttatcagtcttttaaataatagattattataaagagtttgaacttcatgctgtaggcgatgaatggtctatctatatttaaacagcatttatagtca

SEQ ID NO: 51430 - DNA, 584 bp, Homo sapiens
  misc_feature 28, 46: n = A,T,C or G
cgggcccccccctcgaaagtcttctagnaattaattaacgcgggtngagtatcaggaaattaaaaggcctaaatgatctggctctgccaccttagaggcatgtatgacagacagcctttcatggtaattcattgccttgatgtgggcattggagtgttacgtaaggctaactaggaaaaataaactacaaatagtaaggattcaacatttaaaatgtgtattcctgtgaaaagtgagaaataacaagcaagttactaggaatacaaaagtgacaaatgtacatttgaaaatgtcacagtcctttgaaaaagaagttacagaactttgtagaagttacttgaaattagaattttctgggagcaataaaaataaaataaattccaggctgactgattaaagacaaacaaaaccttttaaaattagattgtaaaaaacaagcacttaaataacttataactaatctcttgtttatataatcttgacaattctgtcacttgtgtttatcctaggtttacaagtaatttttaaaactattgatccctaatatctgtaaaatcagttttgtttctgattgaatttactca

SEQ ID NO: 51431 - DNA, 400 bp, Homo sapiens
cgggccccccctcggaagtcttctagaattaattaacgcgggctataaagtcttaaaacatcttaaaattttttaaatcttgaatttttgatgtacggttcagggtattccagcatttatattgactttggataatgtttattttctcatgatattgattctaatgctaaaaatatcagaaaatgaaataatgcttatactagttctcttaatgtggtaaaattataagaaaggataagtatattgactaaacttaaacatgaattccctgaaaaactcccgattgggtactatgcttattgccccggtggtgaaataatctatataccaaacccctgtgacgtgcaatttacctatataacaaacctgcaaaagtaaccctggaccaaaaaaaaaaaaa

SEQ ID NO: 51432 - DNA, 601 bp, Homo sapiens
gggccccccctcggggtacttctagaattaattaacgcgggatgaaagaattttttggttttaaatcccatacattctagtatttttgagacttttcactgcaaattttaacatgcaaaatgtacggcctggtttccataagcataaatagtataaatgccaacaataagaatgtcttctaagcagctaaatcttgtaagtttagttggaattgagaccagctatttgggtaagcgaattagagtcttagtattgtaagtgggtatgtttatgtggcacagggttgccaactgcctgagtctattcgtgagtcagaacgactttgctgatgtgttgggccaagccagccctggttggcagtctggtgcagccgtaaaattcagccttacaaacagtctcccgccattcccgcaccatgggactttagtgttgtgtgtaacaacagtataacctgctgttagcccattatcaactgactgctatgctaaaccaaaattataataatattgcttgtagaagttagaatataatttattccccctctccttgataatttagcaaaaatccaatataatttcttcttttctgcttttagttacat

SEQ ID NO: 51433 - DNA, 369 bp, Homo sapiens
  misc_feature 27: n = A,T,C or G
cgggcccccccctcggggtacttctanaattaattaacgcgggatatacatatgcatatacatgaagtaacaaaagttgtaactattcttatttttcttcacaaaaatgaaccctccatgatgctttaaaaacagattaaattataaccagtgtttatctgattatgattttttattcctcattttacaaactattttggacctatcagacgcagtcactgggataatatttgggattgacatgatgtggttgaagagctatattcaagtgaatttggaaaaagaaagtgctatttccagataaaggaaattgctttttaaagtccagtggactagccacctaaatgaggatggagaatggagaactgg

SEQ ID NO: 51434 - DNA, 565 bp, Homo sapiens
  misc_feature 20, 33: n = A,T,C or G
gtacccgggccccccctcgngaatacttctagnattaattaacgcgggcctaatagaaaataatcatccctgtcacgtgaatcgtccacagagctgtggctctggaaacttcctgtgagagagcagggctgacaactgtccttttgtggtacattcatgccctgcagtgctctgctgggatctcaggtggggaggaagtgggtgctgcagagagagttgagaggaggccagctatcagaggacattttagaaaatgaggatagcaggctgggtgcggtggcccatgcctgtgatcccagcactttaggaggctgaggcaggtggatcacctgaggtcaggagttcgagaccagcctggccaacatggcaaaaccccttctttactaaaaatataaaaaatgtagccgggcatggtggtacgtgcctgtaatcccagctactcgggaggctgaggcacgagaattgcttgaacccaggaggcggaggttgcagtgagccgaggtcacgccactgcactccagcctgggcaacacagcaagactccgtcaaaaaaaaaaaaaaagcg

SEQ ID NO: 51435 - DNA, 574 bp, Homo sapiens
  misc_feature 440, 497, 559: n = A,T,C or G
ggccccccctcggaagtcttctagaattaattaacgcgggttttcaagtaaggctttacatgaactaagattttcatggctaaaactattcagaaaattaaaagattatgtgatttctaaaatcccttctcactcaacattctatcgtttccgatcactttcatgaatgcttctgaagacattactgttttaacacaaaactccagggaagtctaagacaaccaatatatgccaagcccacaattcaacagcttgaagaatgatggctaggacagactgacggtagcagatcgaaatgagaagtacaaagaaagaagagcactcaccttattacagttctaaagtaaggcatagcaccataaactatgccttcctgtggtaatgacactgcgcagcagattctgcagatgcaggagaagcatgcttattgcatgcattcnaagttttcctcaacagaaatgatcagggtacactcctctctctagcctaatgctaanctaaaaggcaaaagattatactaagcaactggtttctgcttaagttgttttaaatttaacangtgtttcaacaccca

SEQ ID NO: 51436 - DNA, 346 bp, Homo sapiens
ccgggccccccctcgggagtcttgtagaattaattaacgcggggatcatgtttatgttgaatgcatgagatttcgttatttgtttttatataaattctctctactcacgctgagaaaacctctggtacagtgacacttattacagcttttgccaatcaatcaaccaatgtgtactgagcccctactatgtgtagaatacaggactgaacatgtgaggaatgcaaataaatagtgtgcacaggcttgtgttagaatcttgcacatgagttattgatcgaagggttagctacgtgagaaaagaaaatgcgcacagaaacttaagactggaaggagccttagggtgcgg

SEQ ID NO: 51437 - DNA, 603 bp, Homo sapiens
cgggccccccctcggaagtcttctagaattaattaaggattagtctttttgcagacaaactcactttctaatagtttcagttaagtcttactaatactttatcttatacttacaatacacaaagtactgtgacatctgttcagcagatgagcagttctggaaaactttccttactagctaatttctctaagaaatgatatttattatgtaagtgatgtgttttcaatttgccaaattaaattgtgagcgcatcattgatatgaagactaaaaacaacttacctacagtgtttggttgaataaaatataatgtaaagttttgtataaagtgaaaatggaataacactgggtttttgcctagggttgtaaactaaaatataatgcaaaatagaatcaaatttattctttcctttttcaaaaagacattgtagggaattagcaggtgctacaactgtacctacatattctacatttttggattttaaaccaaattaaagcaaaagcacattgtcaaaagaaagcttgagaataaatatttaatttagattgatatttgaaaagcagtggggatctggcgattctgaccccactctcccacccgact

SEQ ID NO: 51438 - DNA, 591 bp, Homo sapiens
  misc_feature 41: n = A,T,C or G
aagactggggtaccgggcccccccctcggggtacttctagnattaattaacgcgggggggaagctggcaaaatagcatgtaaaggacaacacccaggtacctgtggatgaaactggccttgccaaaaatatagtaaatacataattactctcacagaaggagggcagctaagaaagagaaatgaagactacagacaatgctgaatggaaaacaaagatcctctatcccaacagatcaaagtgaatctcctagcaattttaatttcaccactgacaacctcaaagcaagttgaagaaagttctactattctggaatcaaaataaagagtgaatatgaatctacaaataggccattattgattgcaaaatagaaaccctaaaggtcacaaagtcagttgtgcagtacagtaactgaggttaatgacgaacagcccataatgaaaatgtttacaatttctagaaatctggtccacaaacaatctaccctatgacttgtgattacacaaatgttaagaatactttcccagccaggtgccgtagctcatgcctataatcccagcactttgggaggccgagggggacggatcacctg

SEQ ID NO: 51439 - DNA, 360 bp, Homo sapiens
ccgggccccccctcggaagtcttctagaattaattaacgcgggtcaggtagatgtgggaagaaaagaaataataggatcttttctccatcttctatgagtataatctgaatcagaacagactgagaaaggagagctgaagcttgataatacttttagaggaaaaactggagcaatcaagagaatgagatacaaaaccatcgctgaccatgagacatactgggaaggagagctcctaaaagttatctgattccagagctaggccttagttgtcgggactgcacacagttccaaggactgaaacacctgggaactactttggaataaggatttaaaacacccccttccaaaaaaaaaaaaaa

SEQ ID NO: 51440 - DNA, 607 bp, Homo sapiens
ccgggccccccctcggaagtcttctagaattaattaacgcggggttcttcttcagttcttcctctatcctccttcctagaacatggatacctgaatgtaaatgtcactgtcctgaactaagtgcctgaagaatcataaagcagtcagatggaaaatgcctaggttttgaggccttgaagtataagcagaactaacacttgttttctggagtatttggattctgaaattattctaatattttatgaattatattgtttcatttataaacatatcaactgtaatttttgtattctttgaatattatatattgtttttagaagactataggaaataaattaaataaaatacgtatccatttttagcttaaaaaaatctccattacaaggccaggcgcggtggctcacgcctgtaatcccagcactttgggaggtcgaggcgggcggatcacgaggtcaggagatcaatcgagaccatcctggctaacatggtgaaaccccgtctctactaaaaatacaaaaaattagccgggcgtggtggcgggtgcctgtattcccagctactccggaggctgaggcaggggaatggcatgaacccaggaggcagagct

SEQ ID NO: 51441 - DNA, 367 bp, Homo sapiens
  misc_feature 27: n = A,T,C or G
cgggccccccctcggaagtcttctagnattaattaacgcgggctctccttctccaactattgtactcttattcatgcttcaaaacccagtttaaatttcatcaactctaagaagatttacatgagcttccccagcctccctacacagtcactgctgcctgtggacatacagaataccacccattctcaaaatgtattaatagaatgaatggttaatgggtacaaaaaaatagagggtcgggtgtggtggctcacgcctgtaacccctgcatgttgggaggccgaggtgggtggatcgcgaggtcaggagttcaagaccagcccgaccaacatggtgaaaccccacctctactaaaaaaaaaaaaaaa

SEQ ID NO: 51442 - DNA, 626 bp, Homo sapiens
  misc_feature 11: n = A,T,C or G
cccccctcggnagtcttctagaattaattaacgcgggattatgaataacaaaaaattatatatatatatatgggtttacatagtcttttctatgtattacctgatttttaataatctaattcttaaatgtgtatgattttgtcaatatttttaaaaaaatctttaacttaatattagaaaaaagaatttatcatttcttttcaattgtacaaggcctcaaactatttctcatctctatcatttactagcatcttctaacttaaaagaataacatctttcttaccctctttgtgcccacagatcagcatgaatttaaagagtttataccttctccaaaatgagtgcaaacaattagaaatggagcacttggcaggagcgcagatttatcttgaatacctctctctatcactatcttccagtcttatcacctgtagttcaatgggttgtttgcctttctctctagtattcatagaagttgtaagcattatattatatttacactacaaaatgaaaagttgtctgatgatgttgttacttctctgtaggttattgttagtgtaaagtaacttatttatttatacctactttcatatgctgagcttgtaaaaacagttgggaatttcttg

SEQ ID NO: 51443 - DNA, 583 bp, Homo sapiens
  misc_feature 28, 92: n = A,T,C or G
cgggcccccccctcggggtacttctagnattaattaacgcggggagctttttcttttatgggatttctgaggctctattcactactttgggngaaaagaaatcaaacgtggtcagcacaatgtgctcacacctgtaatcccagcacttatgggaggccaaggtaagagcatcacatgactggaggagttggagaccagcctggggagtgtagggagaccctgtctctatgaaaaattaaaaaattagctgggcatggttgcatgtacctgtggtcccaactattcttgaggctgaggtgggaggattgcttgagccaggaggttgaggctgtagtgaaccatgattgtcaccgcataataactattcttgaggctgaggtgggagaattgcctgagcccgggaagttgaggctgcagtgaaccataattgtgtcactgcacaatcatgtgtcagcctgggtgacagagtgagaccctgtctcaaaataaaataaaataaaataaaataaaacaaaataaaaataaatatgtatagaagattgaaaaagtatagttttttaatggcaatggaaaggaaaagggt

SEQ ID NO: 51444 - DNA, 606 bp, Homo sapiens
  misc_feature 541, 573: n = A,T,C or G
cgggcccccccctcggaagtcttctagaattaattaaaaacaactaaatcgcagggcgcggtggctcacgcctgtaatcttagtactttgggaggccgaggcaggtggatcacctgaggtcaggagttcaacatcagcctgaccaacatggcgaaacccctcatctctactaacaatacaaatattagccaggtgtggtggcgggtgcctgtaatcccagctattcgggaggctgaggcaggggaatcgcttgaacctgggaggcggtggtagcagggaggcggtggtagcagtgagccgagatcgtgctactgcactctagcctaggtgacagagggaggcactgtctcaaaaccccctccaaaaaaaaaattgcattccacttgttttatcatatatttacccctctatccctctttctgttcatcagtcgtgttattttaatgcatttcatcgtagtgttttgaacaataaatttttaccattgataagtttacgaaatgttggattcacctaatgcaataattagtcatagagcaangtaagctgtatgatggtatgtccaaatagttntgtaagtataaatgttgtgtatggaatgcatgt

SEQ ID NO: 51445 - DNA, 599 bp, Homo sapiens
  misc_feature 16: n = A,T,C or G
cggggccccccctcgngggtacttctagaattaattaacgcgggactgacccagtctgccccttcctgactccatctgtgtggcctggagcaggtcagtcttttcccacatctgtaaaacgatcgtgtctgcttatcacataatgtctacttcacggggctcttctaggggacaaatgaaatatttgacagaaggaaataaagctattcccccttagaaaggattcaatcttttaaaaggtcattcagtggcatgaaaatgactctccacctttgttttctcagcagagaggaaattaattgttaaggaatgccatggaacatttaggccaaaaagccaaggttcgaaaacaaataagctgcaaaaaatgtttccattcaaagatgctgggttctccccatacagggccattgctgtctacaccagccccactgagtctctgtcatggctgcactgtcgtctgcagtattccatgtgtgtggggctgcatgtcatgggtctcggcgtgaggagcccactttttcagctggacaacttgagaccaaagagttgactgtagctgccaagagacacatggtcaaatcataaaaagaatgcag

SEQ ID NO: 51446 - DNA, 614 bp, Homo sapiens
cgggccccccctcggaatacttctagaattaattaacgcggggtgaagaaggggtgatgggcttcagtgcttcagacagcagtgtgcagcccagggtaatgcaggcagcacatatggggccccacaggcaataatgactagaaagtggcattctttccttctacaaactgttttgagcccatgatcaacccaagatggcctactataccctgtaggcaagttgagagaaaaagacccagatttgttgggcgcggtggctcacgcctgtaatcacagcactttgggaggccgaggtgggtggatcacctgaggtcagaagttcaagaccagcctgaccaacatggtgaaaccctatctctactaaaaatacaaaaaattagctgggcgtagtggcaggcgcctgtaatcccagctactcaggaggctgaagcaggattattgcttgaacctgggcgcaccttagagcgagactagtagaaaaaaaaaaagacctagattctgctcttgagttaagaaaaagttatgatacgccaggaagactgacacactgtttagcaagtgcccaggagttcaaaggaggacacagtatgcttctctccgctttgtttcctttg

SEQ ID NO: 51447 - DNA, 597 bp, Homo sapiens
  misc_feature 24, 579, 585: n = A,T,C or G
gccccccctcggggtacttctagnattaattaacgcgggggagtattctcattaccactgcgttctctctttcagagatgtcaactacgtaatcccttcacttggtttcagtactacaaaagatggaacttctattcagccaaagcttccactaaggtatctgaataattttttggtatccttaatcatatctaatttttttagtattattaattttttggcagagacgggatccgactctgtcacccaggctggagtgcagagcgagattccatctcaaaacacaaacgaacaaaaaaaggtaaaagacagagagccagaggcaggaaagctgaatacaagtgagtgacacagctctgcaggcagcccccatccttgcttcattccatccaccggaggcatgggccctagcaggtcatgcacaggcaggattcggcccccagggcagcagacattcctactagagatagattcctaacaagccacggatacctaacgaactccagttgggtcagtcaatgtcattctgccttttgggattctggaatcaggtctcagacacactcttgaaactgaggngatggnaagtcatgagct

SEQ ID NO: 51448 - DNA, 435 bp, Homo sapiens
ccgggccccccctcgagaatacttctagaattaattaacgcgggtctcaaaacattttacttttctgcatgtagatggataaatacataaaaagaggtctgaacagttgtacagataacagtgattgcctcaatggtggataaagggagttagccggtgctgggaaaactggctaggcatgtgtagaaagctgaaactggaacccttccttacaccttgtacaaaaattaattcaagatggattaaagacttaaatgttagacctaaaaccgtaaaaaccctagaagaaaacctaggcaataccattcaggacataggcatgggcaaggacttcatgtctaaaacaccaaaagcaatggcaacaaaagccaaaattgacaaatgggatcttcattaactaaaagagccttctgcacagccaaaaaaaactaccat

SEQ ID NO: 51449 - DNA, 626 bp, Homo sapiens
  misc_feature 508, 588: n = A,T,C or G
ccgggccccccctcggaagtcttctagaattaattaacgcgggttattgttcaaggctccattgtgtttttatttgtaaagacttatgagaaaaaagctgacagtacctctgggggtggggaggtctgaattcgtctcccattcatgactctactggagctgaagataatgcagaacaagcacttaaaatgtagtcctaatgacaatcaaaatgagaatgaaaagcaagaacaggttttgctggagaatatcccttgaaaaggttgagtctggaaaaagatatagctattgattggatggcagcatctctttcttaggatgacctagaagaaacatcttcttaagtgacagtatgtgactgaaaatgacagaggttctgtataagagagtttaaagaaattagattgacttggcggatagaacttctttggcatggtgctgcttgaccaaacaactcaaattctgaactatgaagtttatatttgaatttctacatgacaatacattntacattcacacacaagcctacctcattgtactttcattgtatcattaattcattgaaaataatttagcccaccaagacanagattgagatcgattcactttttagctttgtatatagc

SEQ ID NO: 51450 - DNA, 528 bp, Homo sapiens
  misc_feature 16, 478: n = A,T,C or G
cgggcccccccctcgngggtacttctagaattaattaacgcgggcccaggagagtactagcataccaattaagaaaacaatgtctttctggaatgtgataaaaataagatacctaaacccaaataaatccctctctcctctttttcttaattatcagtatcaaaacctaccaaatgcattggacttctgtgttagagcctcataaccaagaacttctgtgttacagccacatagctaatgagttagatttttctcccataggaacaattgcattgtagaacttacttttatttgcagggaaaaatactagacagatctaggaaaatacacaaatcaacaacaaactacagggaggtaaatgcaaaataaggaaaaggctaattaaaatacaaatatgttggaaaaaacaaaacaaaatccattaatacaattttaggagaagcatctaaaattgacaatttttatgaaatgtatgcanaagaacatttttttaatgttctttttaatgcatgcaaaagaacttttaaa

SEQ ID NO: 51451 - DNA, 510 bp, Homo sapiens
  misc_feature 84: n = A,T,C or G
cgggcccccccctcgggagtcttctagaattaattaacgcgggtagtaagtattcattgaatgaaggggtgacattggtacctntaaaaacaggattataaactacagatataactagtggaattgggaagggcaacttgcggaaaactccacagtttctattaagaaaggaggaaggaaagagaatatgggcccaagatctcttaactcactgttggcagtccaatattaatgagaaaactttcagagctgacaagggagttagaataggtccaagaaaagaaacctagcaagctctacctaatgccccagtggcttcttgtgtatccatgaaaggacttattctaagcaggttctgagaatggaataacaacctacccttttacaatagcagaaataaaaccaggcatggtggctcaagcctgtaaccccagcactttgggaggctgaggcaggaggatcacatgtggtcgggagttcaagactagcttggccaacatggtttaaccc

SEQ ID NO: 51452 - DNA, 453 bp, Homo sapiens
cccccctcgggggtacttctaggattaattaacgggggacccctctgtatgtttttatgccgagaactaaagaattttaaaaataaacttggatagttttaaagggtgtaatatcctatgaattgtaacactgtatatatgctttaagtgtattatcaaagagtcaaagttatggacttttctccttcatacttggaaaatgttcatcattgtaaaacaaatggcagcaaaaccagtccttaggatgaagcaaatcagaaggagtgactttgtttttaaaatttaagtaaatgtgttaacatgtcatttcaaataatcatcttgcttctgaactaaaattcctaagatacgtagatagaaaaggcagtgagtttgtcacctggtagaaataagatccctcccaccccttattccatcctatctctgtttttttttttttaaaaaaaaaaaaaa

SEQ ID NO: 51453 - DNA, 621 bp, Homo sapiens
ccgggccccccctcgaaagtcttctagaattaattaacgcgggggggggtctcatcaaatatttgttcaagctatgaaatacctggaaatctgatttttgaagaagtgttagccctacatctgggaaatttatatcattaatgttaacttcatcacatatataactgtatgttccatatatcgtcaataaagaacactaacagtataaactccagcctagttcttcaaagacttttagtattttcatgataggacctttgtttcatgcaagcacgtacctgtattctgggcagaaattttgttagtctttgttgatttttgtttccttgtttctctgtttctctctcaaaacaaatccacattacccaaaaagtgacactgaatcacccatttccagtaacactaataaataattattccaatactttattaagaagcattcacctttttctcatgccaatgtttttaaaaatagaacttttttacagtgaccattctatcatacatatttgtaaaaatatacatgtaagaatattaatcttgggaataactataaggagttaaagagagggaatcaagatttcccttgtaagtttataagacataatccaacaataatct

SEQ ID NO: 51454 - DNA, 337 bp, Homo sapiens
  misc_feature 25: n = A,T,C or G
ctggggtaccggggccccccctcgngaatacttctagaattaattaacgcggggaggaacaggagggagcaagggataaaagactacaaatctggtgcagtgtatactgctctggtgataattgcacagaaatctcacaaatcaccactaatgaactaactcacgtaaccaaataccacctgtaccccaataacttacagacaatttttttaaagttatccaaacttgtactgtgaagtcatgggtgtaatcccattgtaattcctggagtagaacagggactaccaccattaagattcatctcctccaccaatctcaaaggaaaaaaaaaaaaaaa

SEQ ID NO: 51455 - DNA, 324 bp, Homo sapiens
gccccccctcggggtacttctagaattaattaacgcggggggggggagggcatagccttgcgctaaatacctcatgtcaatgataagttgatgggagcggcgcaccaacatggcacatgtgtgcctgtgtaacacacctgcacttggtgcccgtgtaccccagaacttaacgcataaggctgcataaatgacatatcgcgcaacgtatttatcaattacaaaagcagaccctattaatctacctactgaccaactactactggtgagacccactttggtattaaatgcaagtgagagaaagttcattattagaaccatccttgc

SEQ ID NO: 51456 - DNA, 611 bp, Homo sapiens
  misc_feature 23: n = A,T,C or G
ccccccctcggggtacttctagnaattaattaacgcgggaccatatgtaatattatatttaatattaaaagattgaaagctgctttttaagatagagaataaggcaagaatgtccacatctatcactcttactcaacatagtgctggaagttcaagactccacattatgggaagaaaaaaaaacaaaaacaaaaacagaaaatgtgttcatgttgaaaagagaaaaataaaactgcttttttggagattgcatgattttctttgtaaaaaaaatagcaacctttaaatacaaaacctcttggaacaatatgtaagatcagcaagtttacaaatataagataaacattaaaaaaatcagttttatttctatacacttgcaatgaatgagcatatagacactaaaacaaaaaaaaatacagcatgtataactactcaaaagaatatacttaaaagtaaatctgaaaaaatgtatacaattacaaaacatgactgaaagaataaagaagatataaataaacagaaagacatcccatcttcatagactggaagacaatattgttaagatgtcaatactactcaaaactgttgacagattctatccaatccctatc

SEQ ID NO: 51457 - DNA, 583 bp, Homo sapiens
cgggccccccctcggaagtcttctagaattaattaacgcgggcgagtctttctcaactaagatcacagacaggcttgattttattcaagctggagttgcttatgttgcactgctgtccctaaactgttttgccagtgatgaattcagacagtcacatattaggtcataaacatccatttctgattattatacgtttatagtctctactagccaaggtcaattccaaacgtatagctatctttactcttgcagtagggtctgtgcaattaattattacctacattgtttttcctttacaaagattggttctaaaaagcaacacttttttcattctatatgaatgcagtcctccagcattcattaggacatgtaatgctagttgctattccaaataacctcaaaatacctgtggctttccagaattagtttattccttgttcatgttacagaacaagatatttcttccaggtggctctgcttgcagtggttactcatcgtgtggccttgccctctcagaatcctttgcttgtaggcttgtggataggggaataagacagtatgaaaagctatacaggcgttatat

SEQ ID NO: 51458 - DNA, 360 bp, Homo sapiens
  misc_feature 11, 23: n = A,T,C or G
ccccccctcgngggtacttctanaattaattaacgcgggcttactgtataaaacacgtgatataggtaggtttctgccgtattaagatacatggctttactgctatttggaagaaaacagcagatttactatagagtctccttttatgatttatatgggacctttaacacaaccaggagaactctacagaaaaagtgttggacattgctccatgcctgtttctgagcccctggaataacatcttaacgaattctacttaaccgcagcttacctatcagttttcttgtcaggtgatttgaatggggatgaaactagtttacgcaccaccaagaaaatattgctcagtaaaaaaaaaaaaaa

SEQ ID NO: 51459 - DNA, 535 bp, Homo sapiens
  misc_feature 39, 40, 491, 494, 507: n = A,T,C or G
gtcttctagaattaattaacgcgggcaggcaggaggggnnccttggaaaagtcataaacagcagctgcaacgtgaagatccaccccacccccaaaacctcccccatggagtcaggtagactggcatgtactggaacggtgggactgggttgaactttcgaagccagctggtctcactacctcctctgacagacgtagagaccaagacctaggatcaggaagggtctcactcactcaaggtcacacacagaatgaggggctgacctgtttatagaatggagcagtcctaattccagtccaggacactgtcctggggtctccctttttctggggccagggaaagtaaataatagcaacttttggagggatgggtgtataagatgacaccaattgattaattaggcatttgttgactccagccacctattcacacattcttctagatgtcagcatttgttgcttcggtggctttaactggctgtagggtcttanganaactgcgtagatntgcatggttctatttcttcacctgcaaa

SEQ ID NO: 51460 - DNA, 302 bp, Homo sapiens
cgggccccccctcggaagtcttctagaattaattaatttgaatgtggggtaatcatttcaaaatgtatacatacatcaaatcattttgtataccttgaatatataaaatttttgtcatttataccttaataaagctggttaagaaatatttggaagactcttgaattttctatacatagttttccttctggtagatgaaggggggaaaaaatttttttttcttttttttttttttgagatggagtctcactgtgtcgtcaggctggagtgcagtgagactccatctaaaaaaaaaaaaaaaa

SEQ ID NO: 51461 - DNA, 488 bp, Homo sapiens
cgggcccccccctcgggggtacttctagaattaattaacgcgggagtctgttaagtcttttgcattacctacatacggtcaattaggtggacaataaagacaagaaaggaagaaggaactggttgtttgacactgggaaacaatccgttcatgtcgatcaattcagcagcccagggtaaatgattgtttttggcatagcaaaattcatgaaaaataggacacagaggtggaaatatctgagggcaagcagagaatgggaaatatgggagaaataaaatttgtaattttaaagaaattttagtaacctctggggaaaattgattcagtatttattgaacatacactctatgccaagtgttgcagtaggatgtttgttttgcatacattagtcctcacaacagtaccataaatttggttttgctatactggttatatagacaagaaaactgagctagaatgttcaaaagacttttccaagatcacacagc

SEQ ID NO: 51462 - DNA, 493 bp, Homo sapiens
cgggccccccctcggaagtcttctagaattaattaacgcgggacatccctaaatttttccatgctgttagttttaactcaattaaaaagcattttatcttactacctgcaaagcagagtatgggaaaatgggggcagaggcaggggaaatttaatgagccattaaaattgtgaaaatgggccggacgcagtggctcacacctgtaatcccagcactttgggaggcagaggagggtggatcacccaaggtcaggaattctagaccagcctggccaacgtggtgaaaccctgtgaaacccgaaaccctgtgcctactaaaaatacaaaaattaaccaggcgtgctggcgggcacctgtaatcccagctactcgagagtctgaggcaggagaattgcttgaacccaggaggcagaggttgcagtgagctgagatcacgccactacactccagcctgggtgagagtgcgagactccatctcgaaaaaaaaaaaaaaa

SEQ ID NO: 51463 - DNA, 409 bp, Homo sapiens
  misc_feature 28: n = A,T,C or G
ccgggccccccctcgggagtcttctagnaattaattaacgcgggctcctctacaatagttgctgtacaattgtgagtggtggtttgaattaaacagttttgtaatttgtacggaagttttctattgtcacagttagttttcttccatacctaaaagatttgagtttttaaatgaatactgtaaaagcaagatttttgttttaatttcctttcatacttcacctggaaagattatttctaaataccttaaaatatgttcttttcaagagattcagaagtatatagtaagttattcttgctatgaattcttttcctaaccaaatatttagaaacaagttcctttgttatatacatcttgacactattatataaagaacatttctgctattctgttatatccaaaatggaag

SEQ ID NO: 51464 - DNA, 588 bp, Homo sapiens
  misc_feature 28: n = A,T,C or G
ccgggccccccctcggaagtcttctagnattaattaacgcggggttcagctcagtgtgatttcgttaataaagccatccatgatctcttacactgacataatttatccctcttttggacaccaaaatcacttttatatgaatttaacatattctgtcatctttcagttactttacatatgtctcatatatataaatgcataatatacatgtatataaatggctgtcaatacatatggtggaggaaaacttagaagcacagttcataaggcttggacttgttccacaatggaaagaaaattgaactattccaactcagaaacctaaattaataataagaagacagttattcagcaggactttgtgcaggagctcctctaatgcaagaaggtgagaaaagtccagtgcagtggcttgtgcctgtgaccccagctactcgggagtctgaggcaggagaatcgcttgaacctgcaggcagaggttgcagtgagccgagattgcaccactgcactccagtctgggtgacaaaagtgagattccaaaaaaaaaaagataatgcagggacaaaggaatggcagcgtaaggttcta

SEQ ID NO: 51465 - DNA, 557 bp, Homo sapiens
  misc_feature 23, 50, 488: n = A,T,C or G
ccccccctcgaaatacttctagnaattaattaacgcgggggggggggcgngaaatcaccttacatcttaccagaccataagcatcttcatggcatggttgacatcttacataccgtagcacattacactggcattaagtgtcattttttttggttgtcaatatgtaaacattagtctggatgaaggtggcaaaagacttctatgactacctttattctcccttaaggaccattttgggctaagaaaaattatcccttagataaatttaaaagcttttccatgtaatttcctaagtatgttctgcttgtatttctatgatataaaacccttcaattcataaaattttcatagaaaaataaaaacattgctatggcttttaggtttatacttttttaaagtttcgagattttcttatttttctctaatattatttttctactctttacctacagaatttcacttgcttagaatcagcttctaaatgtatntttcactgggtctgtaattgctggccactcttgaaagttatgagaggtaaaccagtgcccactatttta

SEQ ID NO: 51466 - DNA, 596 bp, Homo sapiens
  misc_feature 13, 26: n = A,T,C or G
ggccccccctcgngggtacttctagnattaattaacgcgggttttatttgccactggcagaatgtagcttgaacccaaaagtaccaaggtaaggtttcaagcattgctggctccagtcacccaattgatgtcaccaagacccaatctctctctctctttctctccatcctttgattctataatagccagcaagcagctccagatttacattacaccctatcagcagctttagcagttccaataaagctctgagtatgcatctcactggaacaacttgggatatgtgtccatcactctgacctatctccttggacaggaaaatgagatatgttgattggacaaggctgggctccatgtccacctctggaatattattcaaaacacttgaactaaaagcaagaaagaaggttctccaaaggaaaactgtgagtaagtaaagtaggcaaaaagtacaaatgtctcttacagagaacaattattttagtgatgtttagaaggtgtaatgcacaagatacagttgaacaattggctgattttggtgaggggagggaagattctgaaatgacactggaattcaggcttaggtacttaagtat

SEQ ID NO: 51467 - DNA, 591 bp, Homo sapiens
  misc_feature 31: n = A,T,C or G
taccgggcccccccctcggggtacttctagnattaattaacgcggggggtcgatggctgagatacctggaagaatttccaaaggttgaacatggcaactacaactacaacatagcaagagcttcgtaggaaaccttactcatcatttttgttatccacttagtgggtcactgtgttatagggcttcaggtacatagtttcatttaatctatgttgaatcctatgaaacagcccctattctccccatgcatctcagtcacatctgcagtggagggaagtacacaggatttggaaatgaaggttataataataatatcaataatattaatacaataataacaataggcatgtaccatttgtgttttagggattcttataaatattaatacttaatatgttaatttatttaatctttccagcatccataagagttatgatcctcactttaaaattataagctatagttaaatatgcctaaagttaataagtaaaagagcaagagtttggaaccaggcgatccgactttagaggtcacatagaaataccaccatactacagagaagctcccacaaaaggcagccgatggaggggt

SEQ ID NO: 51468 - DNA, 550 bp, Homo sapiens
  misc_feature 37: n = A,T,C or G
ctggggtaccgggcccccccctcggggtacttctagnattaattaacgcggggggttcattccccatgcagaccacctcataagaaattgacaggtaaaggcagtatgatcttgttgaataatttctagttagagaatgtgtaaagccgaggtatttgcataaagaaataaaccatttatgatttgcagacactaggtcctggctgatcccatgtggtaatgcccactagtgccataaagttgcgtagggcttcataaaggagatgtcgtaagtcataaacgcctacagtctttaagatatcattaggaatttccttctgacttcagcataaactgtgcttacagtacacagaatgagtgttgaaagatcattagtaaagggaatttcatcatttcatcatgttccccaagaatggagtgtccatatgaaataattttctgtgtgcaaaattgtgtgtaacctcaatcctttttgcttcatttaaagtccatttccattaaatctatttttctgaggcagaagtattattaaataacatgactatctgtt

SEQ ID NO: 51469 - DNA, 400 bp, Homo sapiens
  misc_feature 26: n = A,T,C or G
gggccccccctcgaaagtcttctagnattaattaacgcgggggtggggggaagaacaaatgataaatcaaatccccaaatcaaaaaaggtccaaacttaattagtgtactttttgaaaagggactggcatttaatactgaaatacaacattaggaactgaatgtagctggtgtaaaagcgatcatgatactgcaaattaattctgtgacttaaaaaaaacagtttttgtgccttaagctattgtcagaacagtttgaaagtacaaatagcaatttgtctatttttgttattttaagataaccctaacagatggttttatagctaatatcctactgggtttaagcaagtaaggatagactcactgtttttgtaagtgctataatttagggctactacaaaa

SEQ ID NO: 51470 - DNA, 307 bp, Homo sapiens
  misc_feature 13: n = A,T,C or G
gccccccctcggnagtcttctagaattaattaacgcgggattgtatccaaaatcattatgtcataaaaagtttcttcccccaagtacacacaggctgttttccagcaattatcccaaataattttttacggggagatggggctgcggaggaggggcgaaaagggttcagagccagggagatgcacaatcccccgattcatctcttctggctcccaatcacctcacatgaataaggggtgatttccctagccccagggctctgtgctctcctctcgtctgccccatctccccgaaaaaaaaaaaaaaa

SEQ ID NO: 51471 - DNA, 567 bp, Homo sapiens
  misc_feature 513, 545: n = A,T,C or G
cccccctcgagagtcttctagaattaattaacgcgggccactataagtaaaaagaaatacccaacaccctttgtcaatcttcaggaaatgggttctgaattatgagagctgtgactaatgagtgattttcaggaatgcatttctgtgttagatgcactgcccttgtgctctgaaggctttgatgttcttaagggcagttggactcattattctgcattattttcatttttttcctggaggaaacatagctactctagtgtagcagggcaaaccttgtggatgaaacggaaatatcttacaaaatgtaaacctcttgtattaaaaagttaaaattccggccgggtgcggtgactcacgcctgtaatgccagcactttgggaggccgaggagggcggatcacgaggtcaggagatcgagaccatccgggctaacatggtgaaaccccgtctctactaaaaatacaaaaaaattagctggacgtggtggcgggcgcctgtagtcccagctactcangaggctgaggcaggagaatggcatgaacccangaggcggagcttgcagtgagcc

SEQ ID NO: 51472 - DNA, 579 bp, Homo sapiens
  misc_feature 482, 530: n = A,T,C or G
ccccctcggaagtcttctagaattaattaacgcggggattctgctttttattttatgatgtgataagctattgttagtaaagactatgcatcctataatctgaattttgaatatgacctattaggaactaaaaaggaaaagaaatatggtgtctagattgagtattggacttggaataggaaactctgagttcaagtgcaagccctgatacttcctacctttgaaactgtaaactaatcacataatatcactgaacgctgttcaaagctacaacatggtagtctcctccatgtattgattctgagaattaaaattaaatgatgggctgagtgcggtggctcatgcctgtaatcccagcactttaggagactgaggcaggcagatcatgaggtctggagttcaagaccatgctggccaacacggtgaaaccccgtctctactaaaaatacaaaaattggcaaggcatggtggcatgtgcctgntatcccagctactcaggaggctgaggcaggagaatttcttgaacctgngagatggaggatgcagtgagctgagatcgtgccacctgcactcagcctg

SEQ ID NO: 51473 - DNA, 639 bp, Homo sapiens
  misc_feature 523: n = A,T,C or G
cgggccccccctcgagagtcttctagaattaattaacgcgggtcagtggttctcaatttttgtcacacattaaacacattaaggagactttttaaaccattgatgctagtatgaaatccactctgatttgcttctgtaacatgtagccaaagcaggcagattttaaaaataacacagatgtttccaatttgcaacttaggctgagaacaagtgaccaggaagaatatttttctaatcattagtcttctcttcaagctagttttgtgatagctgtatttatatctagttggttgagttcattgcctcaaattcaatgtaagtgcctgacaattaaaaaataagtagccaggtgcggtggctcacatctgcaatcccaggactttcgggtggatcacctgaggtcaggagtttgagatctgtctggccaacatggtgaaaccttgtctccactaaaaatacaaagaaaaaaattagctgagtgtcacgatgcatgtctgtaatcccagctacttcagaggctgangcaggagaattgtttgaacctcagaggtggaggttgcagtgagctgaaatctcactattgcactccagcctgggcaacaagagtcaagctcagtctcaaaaaaaaaaaaaaagcgg

SEQ ID NO: 51474 - DNA, 351 bp, Homo sapiens
  misc_feature 28, 70: n = A,T,C or G
cgggcccccccctcgaaagtcttctagnaattaattaacgcgggggaagttgagagaaaggttatatagngaaaaaaaaccccaaaaatctagctcaacattttatgagctataagaagttatgatttgttattttataatctgacatgcttaaaatggcaaataaagatgaggtgaacaaggacaaacaaagggtaggaccaatggcatacctcactgcagtggtagtatcaaatttctccttacctttcctaattcaaattgcatttttgtaattcaccatgtagaaattacccaagttagatttaagtggcattcttaaaatgccacattaaaagaaaaaaaaaaaaa

SEQ ID NO: 51475 - DNA, 471 bp, Homo sapiens
ccgggccccccctcggaatacttctagaattaattaacgcggggtggtgttgatgtttgtcaaggattagaaagtctaggccactcacatcttcccgcaggtcagtctgtttagcttggagttgttctgctgctttatttgctactcttcaccctgggtttcaatacctgagctctgtttccatcactgcgagggtaaagctttctcctaccctcctggtaccttttcactcctcgccctggtgtacctttgcctcaactgatctggaatcagacttcaggaatttagtcatgttgggcactttttaaaaaatgataccatcctgtatttctttttgtgttcagttttttggggttctgtgtttatggtgctaatgatgttaaactaatgctcagaggaattctgaagcacagttattcacaaagttgtacaaccatcaccattatctaagtccagaaacagttcatcaca

SEQ ID NO: 51476 - DNA, 539 bp, Homo sapiens
  misc_feature 16: n = A,T,C or G
cggggccccccctcgngggtacttctagaattaattaacgcggggtgtttcccttgatatgtctctcaaacccacttctaactttatgtgcctagtggtcccttacaaatttcaggtttttatttgatctttatcacaataatgttcaaaagtcttgcttgttttatctcatccatcatctcaactccttttcattcttttaacctttcctataccctacaaccttcaccatagaatagtgtttatgataatatggtttagactcagtgcttcagtcaaatttcagatttgctactaattcactgagtgattttgggcaaatgaaataatgtaaaaaaaaaaaaaaaggattcggcacagagccatgaacaattaagcacatgatgaatatatattttatatatttctatatctcttttatatgatagctgtaatttcaaattttctttctaaaagccctcatgcaagccttttatcacataatttacataacaaaacatttttcaaaaggctcatagtgcttacccaaagtttaagtc

SEQ ID NO: 51477 - DNA, 590 bp, Homo sapiens
  misc_feature 5, 37: n = A,T,C or G
ctggngtaccgggcccccccctcggggatcttctagnattaattaacgcggggttccagcaattctcctgtctcagcctcccagtagctgggattacaggcgtctgccactacacccagctaattttttaatttttattagagacggggtttcaccacgttggtcaggctggtctcaaactcctgacctcaggtgatccacctgccttggcctcccaaagtgctgggattacaggcatgggccaccatgcctggccagcactggaacttttaaagcatttacatatgtgtcaagaactttatcattactatcttgatttccttttcacatcaatactctaagatcactattttccacatattactgttaagaaactgaggcctataaagaataataacttgctgaagatcaacaaaattaactgacttaacaaaaaatctgaagttcaaattccttccagtttaacgtcatattaaaataaaagttattagtttcctttatctgtcactctacaatcttagagcacatctgcaaaaaaatcacggcgtatgttgtcaccactcataaacaggaaaatgagaggacagaag

SEQ ID NO: 51478 - DNA, 480 bp, Homo sapiens
  misc_feature 24: n = A,T,C or G
gccccccctcggggtacttctagnaattaattaacgcggggaggaacaggagggagcaagggataaaagactacaaatctggtgcagtgtatactgctctggtgataattgcacagaaatctcacaaatcaccactaatgaactaactcacgtaaccaaataccacctgtaccccaataacttacagacaatttttttaaagttatccaaacttgtactgtgaagtcatgggtgtaatcccattgtaattcctggagtagaacagggactaccaccattaagattcatctcctctaccaatctcaaaggaaaaaaagcattattctgcaagggaaagtgtattcaagtggtagttggagggcactggtggaaagcaactagagctaagggaggaaggagaagaaaaaaaatttagacagtacacattgggggaaggacaagcatataggttaggccctgaattatgtctgaagatttgga

SEQ ID NO: 51479 - DNA, 278 bp, Homo sapiens
  misc_feature 24: n = A,T,C or G
gccccccctcgaaatacttctagnattaattaacgcggggctgtgatcatatataatttttttgagaattccaggactcccattctcttgagatttttaaataagcgaattgtgtggcatctgagggctaggggcaacatcagaagtccagtgtgccatgctttcctacattttcattaaaatattatttcattccttggctgcctgtttgaaagattgtattattaggttatgaccagtgttgtatttagcacactgtcttgaaaaaaaaaaaaaaa

SEQ ID NO: 51480 - DNA, 502 bp, Homo sapiens
cccccctcgagagtacttctagaattaattaacgcggggacaccgggggggcggaggtttcattgagccgagatcacgccactgcactccagcctgggcaacagagcaagactctgtctcaaaaaaacaaaaaaaaaacccaaaaacaacaaaaagtaggtatttctggggataaacgctggtataaattagtaagaaatctgaagcatgaagtcttttaacaggttaatggctgtcagataaatggacaaaacagaattaagggggtcaagtcaaacctggtggaagtaaacaggggaacagtgtgggtaacataacagcagcgtgccaggacacctcttactcaggtgagatgaacattgctgcactggccacagcgcccactggtttgaggccttaccagatgcctttacacccattacctcattttatacttaaaaaaaaaccctgcaaaaaaaaaattattatctccactttaccagccaaaaaaaaaaaaaaagcg

SEQ ID NO: 51481 - DNA, 589 bp, Homo sapiens
  misc_feature 27, 437: n = A,T,C or G
cgggccccccctcggaagtcttctagnattaattaacgcgggaagggacaacatatactttcatatttcaaagacaaataatttcagaaggtaacatttttcttgagagttgaattaaaaaatcttctgaattttggataggaagttttctaaaatatattatgcacttcatttccttcttaaacaaactatttgatgcatatttccaaatttttaaataaataaaataatcatcatggacgtcgactattttcctctgcctaaaacataatggtcttgggaataattaagctatttgtggctatttgctccataccaaatggtcctgtactgccagtcttttacaatcctttgtatggcttttgtaaaccatagattttgtctatggtcttcattgcttttacttttgtttgctttcacttcttgctgtgccctgngcactgctgagagcccttagctaataactgacccctggtgtatgaacatcaggacatattttgactgctagctcccttgagaacattggacttagctgatttccctgttccacatataactatgatgtacattactctgacattgaatggat

SEQ ID NO: 51482 - DNA, 566 bp, Homo sapiens
  misc_feature 470: n = A,T,C or G
cccccctcgaaagtcttctagaattaattaacgccgggacagggtaaataaaccacaagccaccttaaaacctgaagttaaacaaactttcatcaatttagaaactgaaggaccaaatccagttcaaacaattaaagttagatatcattgatatctgttggtgatttggttttcaagtagaaaataataagtgattatgtttcctgcttgtaaatgaaaaggaatctatagacagagatgtggacctaagtaaaggcaggcttgtagggggtaactgatgtataagccagcccataagacaacacctgtatttcattgggcagagtcagcgcagaataatagagaaaataggctgcttactaattccactttcaatggcattgggaaaataattttgcaaactcagtcaagttaatcaaatttttctcagtttcaaaataaaaaatattgatcatctaggtaacttctangatttgttctaactctaaaaattaaattacagcagccaggcgcggtggatcccacctgtaatcccagcactttgggaagtcaaggtgggctgatca

SEQ ID NO: 51483 - DNA, 634 bp, Homo sapiens
ccgggccccccctcgaaagtcttctagaattaattaacgcgggtacacaaaagaaataataaattttaggaagcatgtgtttaaaaattaaaaaaacttagtctaatcctactttctcacaaagaaatgtcacaaaaataccatgtaacatttccctttattcaaatttaaagatgatacaataaataaattagcagtcatgggccaaacatatataatatataatacaatgtaagcaatagtatcacagaaagaacatttagatatcttgtttgctagaaacatttcagaaactttccccagtttcaacaaatcattgataaactattttttactgcagaaaatattctaggagactctcacttgtcccttccaacaccaagtttagcctctatccaaaagttcaatgctatttttacatttatttggagtcctcaagtctgaagtcagagtgactcacaactcctatatacttgattcaaatttcttgtgttatagaaacagaggtatctgtgaataccagatactagatttaacccaaagacaatctgaaatagaggaggtatactataatagatcaacgagaagaagctcttacattctatccttaccaggacaaatcaaactcttagct

SEQ ID NO: 51484 - DNA, 573 bp, Homo sapiens
gccccccctcggaagtcttctagaattaattaacgcgggcaaccatgcatcactcccagctgctttataatcttcctaaaactacctttctatttttaatacttatttacctctaaaatgcagacatcctagactgtcttctaatgatttaagattgaataattaggtaatacacatatctgaaaacagataagatgcagtttctttctttgaggaaatggtcaggggaaactgctctgggctgtttttaaacgagacaacccctctctagggggttttaaacacatcctttgccctcttcagccagtgcttgttaacatcctgcagcattgaaactgcccatatttagatcaaacatccaagtaaaaatttgaaggaatggaggctaattcaagaatgtaagatccattaaactatgcaagtatgcatgaactggaaaaagtggatcccatacatagtgctatagcccttagctgttagcaggtgtgagtcagtcagttgtacaattcatttgtctacctaattgcactgaagataggcttttactttgcctataacatctctaatgagtag

SEQ ID NO: 51485 - DNA, 454 bp, Homo sapiens
  misc_feature 320, 323, 325, 331, 332, 342, 343, 349, 350, 355, 377: n = A,T,C or G
cgggcccccccctcgaaatacttctagaattaaaagcagtggtaacaacgcagagtacttaattatcgcgggtccatacattgtgttagtgtatgtaggtggctgagaaaagatagtgaagcaagctctgtgttcttccttggctaatggtggtcttccctggggccctgctggagggtttgcccaagctgtgtttcttccctgagcaagagcagaataaaaatagctgtgggctaatctaagagatagcagacaggagtctcagccctgttgtcaggaatgaagggctcagcctgggggtgaggggaggggttggggtnttntnaccccnntgtcccttcnntccccnncagcnggccccggctgctacacaccanaaacctcaggctcgtagtgttggtcaacttgcatctttaatgggccacagtgtctcagtcaaactgtggcctttggt

SEQ ID NO: 51486 - DNA, 484 bp, Homo sapiens
  misc_feature 23: n = A,T,C or G
ccccccctcgaaatacttctagnattaattaacgcggggaggcaggagaattgcttgaacccaggaggcaaaggctgcagtgagccgagtttgcaccactgcactccagcctgggtgagactcttgtctcaaaaaaaaaaaaaaaaaaaaaaattcactgacatttctgaaagtcagtgatttattgagcatttccccagcatttgatattgccagatgtttacatggtagatggtttgttttattcaaaataatttttctgaacctgagagttaatataaaatggaaagaataatgattatatttgatgttaaacctgagtttagagagctttaaaaataatacatgtggtggacatggtggttcatgcctgtaatcctagcactttgggaggctgaggtgggtgtatcacttgaggccaggagtttgagaccagcctagccaacacagtgaaaccctgtctttactaaaaaaaaaaaaaaaa

SEQ ID NO: 51487 - DNA, 578 bp, Homo sapiens
ccgggccccccctcggaagtcttctagaattaattaacgcgggggagagaacacagacagaggcaaagctggcaggtaaacgcacctcttctgacttcatgccactgctctttctctttcaggcaaggtcttcaggccagtgagggttggtgtcatttgtgggacagaagagcccaaatcaagctgagttgaggcaataaatatgctctcctgcttccagatcaaagtccttatttaaaatgcatatgccatgtgtagtaaggcaaagcctgccacctccaatgcttctcctgttcccccagcagtgctgtgagagaggtggcagatgtggcatggtggcccgcatacacatttgcaagcttgagttctgatgtcagctctgctccttatcttctgtatatccttaggcaaatgtctgcacctctgagtttccactgtttcctcccctacaaaatgggcagaagaagaactaagcttccttgttcggaggatccacaggtgcagagcaaggcaaagtagacactcagtaatggtggccaattatcccccaattcatgctagggagggaaaagaaaagc

SEQ ID NO: 51488 - DNA, 141 bp, Homo sapiens
  misc_feature 19: n = A,T,C or G
taccgggcccccccctcgngggatacttctagaattaattaacgcgggtgtcacagtcctcaaataatgctgatgagaatgcaaagcctaggaagcgacagaacggggatcacactaaagtggagatagtgaaagctgccc

SEQ ID NO: 51489 - DNA, 604 bp, Homo sapiens
  misc_feature 30, 519: n = A,T,C or G
accggggccccccctcgaaagtcttctagnattaattaacgcgggttttgtaaagactttcacaaaggaaatgttttaccttgaaaattgtctcctatgactgaattgattttgccagtttgttatagattgtccatctacaatgactataactctcaaaattcctaattgtgggactagaatgtgtataattataactggggaaaatgtcctctggtttcttttcctgccacgttcctccccatttttaatctttcctcatcattgtcattgtaattatcatcatcattctctccatcaaactaccatttattgataaattattatgtgtcaggcactgtttaatagtatgtaagagtagatgcccattggtggaaaatatcatacattattgacatgtactataaaagcttatttggaaatatttttaggaatatgttaaaatattaacctcaaaaattatattgattgagaataaagcagaattttactagatactctattatgcttttctagctntataattctcactgacttgatattataatttggagatttaaagatagtaatcaattgataaattcataaaccataaataaattac

SEQ ID NO: 51490 - DNA, 496 bp, Homo sapiens
ccgggccccccctcgaaagtcttctagaattaattaacgcgggaaccatagaagcaaaaatgaagagggcaggaaaagaaaagtgctgacggtggattaattgatcagacaattaaaacgttataatgccttgagaactgaaacagtgaagaattggtataaaaatatatcaatgcaccatttaaacagaatagcaagttctaatacagatcataatatgtgttagattttaatatataagaagagaaaaatatttaacaaacgaagttgtaaaaattagttaacttttctgataaaacaaaataaaatcctaagtttacaccaaaaaggaggtgttcctattttactctcttctcctttctgctaactgaaatgtaagcttgatggctacagcttaggcagccatcttaaatcatgaagtaaaagtctatttcaaggatggggaaataacaaacttgaagtctttgtccttgatagcagctggcaaacgactcct

SEQ ID NO: 51491 - DNA, 474 bp, Homo sapiens
  misc_feature 461: n = A,T,C or G
ccgggccccccctcgaaagtcttctagaattaattaacgcgggcacttacaaccttgctagattggcagctccctgaggccaggaactgagtctcatttacctttgcatcccaaaagctaacataggagaaatcagaaaatggggaatgaatgaattgattaatgaagtaaccaattgatggtcagaagcctgtttccaaaggagaaagaagtgttatcagtgagaggaactagaatccagaatgtctcataacacattattaaactaatggctttataagaatttacagttaaaattttatatgtattaattcagtgaaaaatctactctgttaagaagtatcatttccctgttctacagcttgggagtatagtagcaaagagattaactgagaattcaaagagaattcaaaaaagtaactgcactccagactgggcaacagacgaagactctgtctcanaaaaaaaaaaaaa

SEQ ID NO: 51492 - DNA, 405 bp, Homo sapiens
cgggcccccccctcggggtacttctagaattaattaacgcggggcttctctggtaaagatttggtcctatctttaggggtagagggtttatatcatcttgaaacctagaagaactacaggtctttaactcttgtggagagttcaattccatcatcatctcttcacttggcctggggtcagagagacttcccacactctttatgactctggggttctaatctggagtcccccagtcagatgcagcatttcttatcccacattctccactctttcttgggtcattctgtccccagccaggctgtgagtttttcaaaggccaagtccctgatttgttctatttgctccctttcatatacagtgggtgtttgtaagcttattaaataattaaaccccacagggtaatga

SEQ ID NO: 51493 - DNA, 536 bp, Homo sapiens
cgggccccccctcgaaagtcttctagaattaattaacgcgggggtgttccaaatgctagaagaagaacaaaaagagaatatagtcaaagatatatttaggaaataagatcattattctaagcaacctttccctgaaatgactaaactcagaaccactatctggtcaaacacactgtcttctgaccaacagtcacacactccaagatgaagtcctttaataagcttgagaaatataagaatgaactaagcattcatctgaacaagatttactatgagttctttgtaatagatgggcatgaaattttactcatccatacagtattcttaggtattcacagagaaaactcttgaagcttaaaaatatattgacaagtatgctaaaagcagcactgtctggaataagcaaagtctgaagacaacctgaatgtccaaaattactgatctgcttaaataaaggtgttacatctatataaagaaatatgatgtaaccataaaagaacaaggaagctcttcacatattgacatgcagaagtctg

SEQ ID NO: 51494 - DNA, 571 bp, Homo sapiens
  misc_feature 28: n = A,T,C or G
cgggcccccccctcggggtacttctagnaattaattaacgcgggattctaataatcactttcattttgtgtatccttttgtaatagtttatcaagtacatacattttaaaagaaagtatagtcatggtcacattcctttcccattggtgattggcaatgtcgttgtttttccgtgctagtatttcaggctcaagtaatggtaattggaggaagttaaaggtggtaccaaagtcataaaaagggaagggaggaagaaagaaaatactatgattgtctgggtgcggtggctaacgcctgtgatcccggcactttgggaggccgaggcgggtggatcacctgaggtcaggagttcgagaccagccttggccaacatggcaaaactccgtctctactaaaaataaaaagattagcagagcatggtggtacacacctgtatcccagctactgaggagctggggcaggagaatagcttgaatccaggaggcaaaggttgcagtgagccaagatcatgccactgcactccagcctgggcgacagagcaaggccctgtctcaacaaaaaaaaaaaaaaa

SEQ ID NO: 51495 - DNA, 430 bp, Homo sapiens
ccgggccccccctcgggagtcttctagaattaattaatgcaggggagagggacagtgggctccattgggtcccagcatctgtagcttcttttcctccttatccagtgtttcaccaggctctctgattcaatgaattcgggaaacacagtaccctgtgtcctcttgcacattcgtgatacacactaactataaagcagttaagagttagaaaatcttggcggccgggtgcggtggctcacgcctgtaatcccagcactttgggaggtcgaggtgggcgggtcacgaggtcaggagatcgagaccatcctggctaacacggtgaatgaaaccccgtctctactaaaaatacaaaaaattagccttgcctgatggcgggtgcctgtagtcccagctacttgggaggctgaggcaggagaatggcgtgaaccca

SEQ ID NO: 51496 - DNA, 263 bp, Homo sapiens
ccgggccccccctcggaagtcttctagaattaattaacgcgggctgtaacaatactgtcctttgagcccttaaatatcctgaatgtgctaaaatcatgcttcccggccctgcgtggtatgttgcaatggtgcctgcctgtagtcccagctactctggaagctgaggcaagagaatcctttgaacccaggaggccaaggctgcagtgagcccagatggagctactgcattccagcctgggcaacatctcaaaaaaaaaaaaaaa

SEQ ID NO: 51497 - DNA, 528 bp, Homo sapiens
  misc_feature 28: n = A,T,C or G
cgggcccccccctcggaagtcttctagnattaattaacgcggggatgtattctccctgccagcaccaggtcagcccccatgcccaaccccaccacaaagcatgtccaggcttcaggcccttctaaacctgcttcactccacagcaatctgttcctcaactcccgatattatagcttaaactgtaggtgatttaagaagatcagaccatggctgggcatggtgactcacgcctgtaatcccagcactttgggaggcctagatgggcagatcacgaggtcaggagattgagaccatcctggccaacatggtgaaaccccatgtttgtgtatactaaaatatatacacacacacaaaaacaataacaaaaattagctgggcatgggcacctgtagtcccggctactcgggaggctgaggcaggagaaccacttgaacccgtgcaggcagaggttgcagtgagctgagatcgtgccactgcactccagcctggtgacagagtgagactctgcctcagaaaaaaaaaaaaaaa

SEQ ID NO: 51498 - DNA, 584 bp, Homo sapiens
ccgggccccccctcggaagtcttctagaattaattaacgcggggattggtttcatttaaatcatatgcattttctaattattgcttgcctcaaaaattatgggaaagaaaagtcctgagccatttggcacttcacctatataaacagatgaatgagtgttttataataaacatgtgcatgtttataataacaagtgagattgtcctgataggctggtagcagtaaccacaccgaatatttgctgagtagttgctatttgcaggcactatgagaagcacttcactcacctaatccttacctcaaacctcagaagcagttactgctattatcctgttttgtagaggaagataatgagcctcattaagattacttgtgagctaaagcccccacagctagcgatcctattcagtccgacttcagatgctacactttgtttgggatcagtctctgttgtcaggatggagaattggaagggcactagaaaggattcaggaaaccacagaaggacctgttgcagctgtctagctaagagatgatggaagctgggactagaattttgaaggtgaaagtataaggaaatggag

SEQ ID NO: 51499 - DNA, 346 bp, Homo sapiens
  misc_feature 280: n = A,T,C or G
gccccccctcggggtacttctagaattaattaacgcgggaaggacccgtggacaggaaagcagggcttgccaaaggatgattccagatgtactgaatgctgggcagggacaggggaagccacatcatggagactccccagggcgtggggagagaagaacagacttttgctttcagcacattgtgcataccacatttcagcgctcattaaagatggagtctgggcagggcacggtggctcacacctgtaatcccaggacttcgggaggctgaggttggcanattaagagttcgagaccagcctggcctacctggtgaaaccctgtctctactaaaaaaaaaaaaaag

SEQ ID NO: 51500 - DNA, 583 bp, Homo sapiens
  misc_feature 28: n = A,T,C or G
cgggcccccccctcgaaagtcttctagnattaattaacgcggggttcaggtaagacagctgaatataaaaatttatttaaaaagagattcttaaattttattgttttgaaaagacagctgaaaacagtatcaatagtttcttagaatgagtctttaacaaatcaacattcatttgaaataaaatctgtgcttatatttaaggcacttacataggtttgcattttagtagggatgtagaaaatacatgttttggattgaacaatggtgaggcttcgtaaggagtaaaataattccaaaatgttccagactttacatttttttttttttgaaacagagtttcactcctgttgcccaagctggagtgcaatggtgcaatctcggctcaccgcagcctctgcctcccggattcaagcgattctcctgcctcagcctctcaaatagctgggattacaagcatgcgccaccacgtccggctaattttgtatttttagtagagacagggtttctccttttatataacactatgcatctgagatatggcaggcattttgtttcccaaatatttgtgaaaaaggcaaatgtg

SEQ ID NO: 51501 - DNA, 522 bp, Homo sapiens
  misc_feature 28, 480: n = A,T,C or G
cgggcccccccctcggggtacttctagnattaattaaaaaaatagatcctatagtatttttttcccctttctggtcctccatgcatttgttcagtgcctctctggcttcacgacccacagctgttacagtctcttagctttccagcatggtccccggagaggcagacctgaatgcctgagatggaaaaagttcagagaaatatttacttcagctattccatacagttaggcattgctcagtttcccgatccttatgtttagctgctcccaggacacaaggttgtgtagccttggctctgcccacaatagcttcatgccagcatgaacaaatctttgtaatccatctcagctcctgccctcctaacatgcagaaagacagctttgagtatcaggtttgctttcccatgttctctaacattatgtccatgatctatacaaggctttattacaaaaccctcagcttctgctttatctatgttntctcttcctaactcacagtatctatttttctaattattcccc

SEQ ID NO: 51502 - DNA, 604 bp, Homo sapiens
gggccccccctcggaagtcttctagaattaattaacgcggggattataaaagggacttggcttgccagatcaaaaaaaaaaagatgaagcaacagtatagtactgacacagaaagaaataaggaaatattatcaaacagagtagactgcatctaaaagagaacctggtatggatactttcagaatattaatataatagaaagatggcataatgagttgcccacattctattaatggtactggaactaaaaaacaaagtttgagccttatctcttgacaaccagaaactggcatttgggtcagtccataagttttttttattgccctacaaaattctttacatgcatcacaattaagcaagggttaaatgtggacagaatatgggtagttcagcaatgcccacctctcagcacacaccacccatcaccattttcatgagtatgttacctatatcaccactacatgtataggattactaccataaaaatcatccagtaagaagaaaggaaataacatccaattaaaagagttcccaagcactttgggaggccgaggtgggcggatcaggaggtcaggagattgagaccatcctggctaacacagtg

SEQ ID NO: 51503 - DNA, 344 bp, Homo sapiens
cggggccccccctcggggtacttctagaattaattaacgcgggtttctgttggttttttcatgctgagcaggggtttgaggctctagagaaggacttaactccttcttcgatcttgtagcacatcagagactatcccacccctactttcaccagacacttaaatatttaagcttgttactgaggtcattctaagaaatctcttcttcaattttacagacatgccttcttcaactgcccgtcacataatatgatttcccaattcattggcatcgagtctccattctgttggcgttcctcttagcattctgtgcccaaaactgggcaaaaaaaaaaaaaaaaaaaa

SEQ ID NO: 51504 - DNA, 607 bp, Homo sapiens
  misc_feature 29: n = A,T,C or G
cgggccccccccttcggggtacttctagnattaattaacgcgggtcatgacctttatataggaaagagtcctgaaatcctcctttaaggtaattgcttggtaaactgtatacacaattcaatcacagccatgctactgaattgttttgcagataacagacctaattttcagaattacctcttggtccagccagatcagagagaacaaagcaacacataatttctggattcctaacaaagtcatctagcaggcctaaaagaactccagtatcattcccaatctatctagtcagtgtgtgagacacaaggtaggaaaggaaaaagggggaaaagggagactcccaaaggatcccttccacaattaattatgcaaatcacaagtaaattagacactaaaattttaagattgattgaaaggcttgctcaaattgctttaactgtgattcataaaccaatcacacaaattcatctgttaggttgtataaaaaaattagaaagatgtagaatggaataagattaccttaatttaaatgtaaaagacatggttgctgaagtatgagtctcttataccataagcactagcccatcagatgttaacaaaatctgat

SEQ ID NO: 51505 - DNA, 579 bp, Homo sapiens
ccccccttcggaatacttctagaattaattaacgcgggggagtgtcctctgtaatttagtgctaatcactaaaccactagtaatcatgtgtgtactaagtttattgtgccagtactctgagaagttgtatatttgtgacagagtaaagtaggtgcttgagttcccttggaagtgaaataacagtaatgttgatagggcttagtaaccacacccagggacagattttcagttttttttcccttttcttaaaaataaaacaaatgatgcattcacacaaagaggtatgcatcttgagtgtttatatataatttaatttaaactctaccattacagcagattgctctgggaagccttgggctgtgaacactggaattgcacctgctccatccttaccccccggtgatgtgcgtggccagtttgaatggaccagcaactggacttggtgtccattttccccagtattagagatgggtttgtggggatgacagaattacagaccgctagactgacaagttcacttctccccaccctccccttttacaggaggcgatgacttgtgatgagaaagggctgatggga

SEQ ID NO: 51506 - DNA, 544 bp, Homo sapiens
cgggcccccccctcggaatacttctagaattaattaacgcgggggagcactgtatctagaggcaaaataagctcaagtataaactcagaggattgccaaggccagtaaataaatcaatcaataaaaataaataaataaaaggcattcagatctcaatatttatattctagttctttgtgggaataaatatagaacgcacatttctccattcagaggaagatccagactttacacactgcaaatgggtgcccctttctctctaaatggttttgaatccacctcatcaaggtttaaaatatactcccagcaccagattctatgtggtaaactgaacatgtattcagttcatccttgccaagacaaaatatttcaacaaattcctggaaattgaaaagcacctgggattaaggtaagaaaatgcatttggtatagcttaaatatctttagatcttcaggagctcaatcatcttttaaatttaaacaggcaactgacacttaatttgtaggtcatattgaaatgaattaggaagttttaaaggtaagt

SEQ ID NO: 51507 - DNA, 553 bp, Homo sapiens
  misc_feature 528: n = A,T,C or G
ggggtcccccatcttagatattagcttaccaggtgactgaggctaagtcacttcccctaccaagcctcaggtttaccatttgtcacatgccagttgttcttaaattgagttcttactaatactttttgtgtcctatgctgtctgagacataagtggctgaggcaatggtctaggaatctgttttctgacatgtgggaagaacagtagcaagtgtggaaggtagcatgagcagtgaatttagtagcaaagcttctagctttgttattactagttgtattactgtgggcaagttttctgaaaatctggttcatttcaaaaaacaagaatagtattatctacattactgtgttatggtgaggaataaatgataaatacaacttctagccaggtatttgactagatgcaagacatgtgtttgtatgccccctttttcctcctccttaagacactaggaaacaatattcccctcaacatctccagcagtggacctcaggggtaataactcatttggacagggaaaccatctangtatccagattgtttagggtaatca

SEQ ID NO: 51508 - DNA, 608 bp, Homo sapiens
  misc_feature 35, 581, 589: n = A,T,C or G
tgggtaccgggcccccccctcggaatacttctagnattaattaacgcgggttgtcccctcagagttatcttgctgcagtttccgttctaacctctgggcacaacctattcccaggttcctgtgggaacttgggaaatgagggggaagaggcaagtggacaagaggaacttccgactacaaatcaaagcacttggagaggcaagagaagggaagagagcggaggggaggtggctgatggcctaaagatagacctgtggcagtgctgaagacatgagtttgtccttcctgggacagatggacaccttccttcggtggcaagaaaagagcaagccagtggccagtcttgatgagacagaagagtggaagatcccagaatcattcttagccataagtgtctaggactgaatcctcaactacgtggaacactatttcaaataagcagacatggaagacagcagactactgtataatcattttgaaattataaaaatgtattattggaaaaacttaagaggaaaaaataagaatactgacaaaaaagatcacactgaggccgttgcctgctaaacagggataaaaancatggttntctcatatataaataaata

SEQ ID NO: 51509 - DNA, 567 bp, Homo sapiens
cgggcccccccctcgagggtacttctagaattaattaacgcggggggctcacctgtgtctctgcaatgcacagacattgttgcttccatttccaaaccctgagaggcctttgaaaggctgaaataagattgaaaaccccacctccatgaacccttccagagatttgatggaatgtgaccatcacctattgtaaatggctttcctcagatatgttgcctgcagtggggagtcgtggccctatgcttgcctaagcactctgctgagctgcctctctcagcctgctctgcttcctcattctaaacagagctgtaggcctctgctgtgggctcaccccatcggtctggtgccttgtttcaggaatatgtattggtcacccccagtatcctgagcaccccttgaagacagaggttatgtcttcttcctattttcatcctccttccacagcacccatgctatacttggcatagaggaagttcacggaattcttgttgcattgggctgaattacatcatggagatttccgtggattagcccagcagtgtgtgtgaggtaacaccctgaggaaca

SEQ ID NO: 51510 - DNA, 589 bp, Homo sapiens
cgggccccccctcggaagtcttctagaattaattaagcggggggacaagagtgagagttcgtctcaaaaaaaaaagaaaagaaaaaaagaaaagcaaaagaaaattaaggaatggatccctttgcctactctaagccagatgcagttttagttctttctctgccttgatcttgtgttggggcctcaggcacttcccttcccttttctgggatttaaacgccatacttttgctgcaatcctccttttttgtacttcacccagttttattattattattattatttgatacagggagtttcactctgttgttcaggctggagtacagtggcacgatctcagctcactgcaacctctgcctcctgggctcaagcgattctcctgcctcagcctcccaagtagctgggattacaggtgtctgccaccacgcctggctaattttttttgcatttttagtagagacgggctttcgtcattttggccaggctggtctcgaactcctggcctcaagtgatcctcccgccttagcctcccaaagtgctgggattataggcatgagccactgtgcccggcccacccagttttaaatgta

SEQ ID NO: 51511 - DNA, 384 bp, Homo sapiens
cgggcccccccctcggaagtcttctagaattaattaacgcggggagactctgtgctagagtcccagaatctcagaattctagaagcttgtagttttggaattacggaaactagggttccaaaaaaatatttcataagactttagagttgaattttagaggttgaacattgccagagatgggagttcaccaaactcacaaggcagctaaggccaaagggaagctgtcttccttcgggtagaataatgttgttaatgtgctattaaaaggaggccagttcccatccagagtgtaacagtcacaacaaaagcagaatctccctcccctttccctgtctcccgctcccataaacaccagagtgagatagccccaaaaaaaaaaaaaaa

SEQ ID NO: 51512 - DNA, 593 bp, Homo sapiens
ccgggccccccctcggaagtcttctagaattaattaacgcgggggtagctgggactacaggtgcatgccaccaaacctggctaatttttgtgtttttagtagagatggggtttcgccatgttggccaggctggtcttgtactcctgacctcaggtgatccacccgcccagcagtggacagcctctcctgcaggtacactggcctctgctgggcatgactgcggttcctcatgtgtggttttatctctgaagcactaattcctccattagcctctacaggtgcttctgctcttgcctgacagaccttatgttcttctgtggatgtccaagctgccttgggaaatctctgggtaccaccaccaaagtcttagagccctcaaagtgcctggattttccagacatttaaggtaaagtgggggaggagaatgcctctttttctctttaaatctcttttatgagaggagtaccaaaagggcatttatgtattaattcattggacaaacattgagggcaactatacatcaggcataattccaggcgttagagctaaagtgaaaaagacagggctcctgctttcatgacacttacattcta

SEQ ID NO: 51513 - DNA, 535 bp, Homo sapiens
cgggcccccccctcggaagtcttctagaattaattaacgcgggtcctaagaaagccagtggtttttaccttcattcagttggtctctgctactttcttcaaccatagggataaaaataaaggaagaaaaaattttcacctaggaggctaagacacagataacacattattacagcttgtatctgtcactagttaggctagaatttagtctatgactataagggaagaaacatgttttagaagttagttctgatttgagcaattaaattgcagttacctagtagttgttactgtgttagtccggtacagacacttagtcatactccagaaagtctagctacatatagccctgaggcctaccccgggctctgctttatggaggagactcaaggaaaaacgggattgtgtgcacagaataaagcatacagacccccgtgagcaaatattcaggcggtcggtgttacattagtctaatcaagtctgttcattgcataaccaatatgattgtataattgtccaaaaaaaaaaaaaaaagc

SEQ ID NO: 51514 - DNA, 342 bp, Homo sapiens
ccgggccccccctcggaagtcttctagaattaattaacgcggggagtttgaggtcatggcacaatgttgaagtggaattgtccagtgatggggatggaagtggtgacagtgagtcttgactagagttaatgacttgagtgtcatctatacagagggggtgggtgctaaagtttatgggcaacagtgagccttctaaaattaagtgtgatctgggcatggtggttcatgcctgtaatcccagtgctttgggaggccgaggcgggagaatcacttgaggccaggggtttgagaccatcactgggaacatagtgagaccctgtctttacaaaaaaaaaaaaaaaa

SEQ ID NO: 51515 - DNA, 590 bp, Homo sapiens
  misc_feature 9: n = A,T,C or G
acttctagnattaattaacgcgggacaacagtcctgttgcagtgaatccaaatctgttaccagactgatttggttcaaaatggccaaaaagaataaagtaaacggcagtacatttcatagacagaaccctatgtctaggaaccaagaatcctcttgattcatcaggctacaatataactcggcctccagcaacaacttaatgtatcaaaatcagaaatatacgtacacgatgcagcgactggctcaggtgtgtagcattactatcattgggaatactatttcgtcaaactgtaaagtgcaagcaaactgggttcctgacctgaatttcatggaagtctaaacaactccattactgtacacaggagtcgccccaaacaaacatcacacatctcacttctgcctcagcaacggcggcgaccctgggttcccctacagagatcagaggagaggagaggacaggacacagccccaccctcttgccaaagggtccacagccgtttccacaggccacgtgtttccccgtgatcccagactcctcgcccgctgtgggacggaactacagggcaaaccggcgccatcacctgtctcca

SEQ ID NO: 51516 - DNA, 604 bp, Homo sapiens
  misc_feature 37: n = A,T,C or G
ctgggataccgggcctttccctcggagtacttctagnattaattaacgcggggcctgtgagtataaaaaggaagaaagggttatagacaagagatgcccgagagagacaagaattatgaagacaaccaaatgttctctatcaggtaagctgaaaacagattgtagaaaacttttgacaccaaactttcctggaaccctgaagcaagtgagtgtgctcaaactggaagtttccacaacgccttggacagacccaggcttcagaacatctgtaggtgaaacgaaactaaacattttctcaagaacaaaatgaggtaagtccaaattagattgagcattgactgtgcttactggctttatcctttcttggacataagatatctgctctcttcctatctcagctttctcatctgttaaatctactcaaatatcctctcccactggattataataatgatcaattgaattgatggaagtgaaacctcaaacttcatacagaaataagacatttttcctaatcaagatttcacgaaaaggccgagcacggtggctcaagcctgtaatcccagcactttaagaggttcaggagggctgatctcctgagctc

SEQ ID NO: 51517 - DNA, 475 bp, Homo sapiens
cgggcccccccctcggggtacttctagaattaattaacgcgggctatcagcgaaaaaatgtgcttgtcaatccagcagattgacactgagctcagccgaatgaccttaactgaggctgggcactacacagagaagaaattcagcctaatccctgctctcaaggagcttatggcacagctgggaagaagagaccactttcagcttaaatccttctttcctcacacttttgcagttaagtaccagagcatctgaagagactacagacccccaacttccagcaacactgtcctatcacactactcagatcactcagccttcagtacccctctgtgtacatttcacagatcaactcctttctcgtctcctactagggttgtaagctttttctttacgtctttgaagaagtgggaattattctcatctctctatttccctccatcaccagtgagtatgtcaagagggttaacttaaggag

SEQ ID NO: 51518 - DNA, 554 bp, Homo sapiens
  misc_feature 31, 525: n = A,T,C or G
taccggggccccccctcggggtacttctagnattaattaacgcgggaggtgtggaatactagaagctcatattagccttactcccaatgatctggaatggcatggaaatttttgctctataccgatgcatgaagcattcagctttttgaaaatttaggaaatcaagggcttcattagtctgtaatatattcagaagtctgtgtcactaaaaattagagatttggatccagtggatgtgagggctcaggctgactgatctttcctcatcaaacaaatgcttttagatccatgtcagagttaggtctaacacacataatcttaatagcccattgccttcctggagatggagaaaagcagattatttcagagaacactgagaggacctctgctgtatattaatgctttggtacggtctgaggaatatacaaaaggcacataaatcaaagcctcttcttggggcagccatcaatcttcttgtaattaaagaattcaacctgacataatgatattatgacaccagtgctntagcatccatgattataagaatggtactg

SEQ ID NO: 51519 - DNA, 598 bp, Homo sapiens
  misc_feature 581: n = A,T,C or G
cgggcccccccctcggggatcttctagaattaattaacgcgggaaatgagccgcctgccacgcatgcctgcggattgcagtggaaatctcccaggattacaggtgcgcgcacacagcctccctcccctgccttcgtctgatactcctcttgtcaccaggagtccttgccctctggggccgtctgcagacagaacggagcggggaagtggctctttagagcaagcgggagctgcctccaaactgcagccctctgacggctggcagagagcacttcggagcctgcacactggagaacctaaccctctccttcttgctaccgctacctatgactcgctccccagatattttcatcagctggcaaaacgctgcacctttcattccttcctattaaatcatggagaaacctgcatgtctaaacgccattccaggagcagggtgcctgccgccgtcccagcagcctccccgggcctcgccgcgcgttcttcctccgcagaccccggattcgggaccacgaatgcagcgctgcgccgccgtgcagcgctgggcacctatgacgctcgtttagactccagctgcagctngaaagtgacctattcta

SEQ ID NO: 51520 - DNA, 484 bp, Homo sapiens
ccccccctcgaggtacttctagaattaattaacgcggggggcatttgacattctatggaggaaggggacagattttagaattaacaagtacttctacattttagctctatttacatgttattttttttttaaataaatgtcaactgccctatattcatgttagtaatgacactggatgccaaaagtgaacaaatactctgaaacaataaataaaagggtatgtgaataaatgcagccaggcgagaataaatcatctgtcttggaaaatcacagaagaggagcttagacctaatgaagggaaccaagtgagtaaatgtcaagtgggagatgagctttcttttgatatttcctcacttgtgactaatcaagtccagctgtgatgtgaacttggggggacacagggtaccctccagatgtcagtctttggctgtagggcagaaggtgaatggcaagttgctgcgtttctgacataaaactgacccta

SEQ ID NO: 51521 - DNA, 519 bp, Homo sapiens
  misc_feature 422: n = A,T,C or G
cgggcccccccctcggaagtcttctagaattaattaacgcgggtctctgccatgatactgccagaatgggtcccagagtaggcacccaaagctctcaaccaggcattcatgctgctgagtgtctaaggaaagtctcggagcacaaattggatcttccttacttctgaccttgccacgtgcatcttaaaaatgttggcatggggccaccaccctgcccaagggttttcttccagatgctcaaatatggagtggggacacaggctcccttccctgtcccagatctcagtcaatagatctgcctccctcacctctgtccctcttcctttctccccattgactcctgtgcctggaaggacactgctctttttcatttcttctatgttatatcttccttcttaccattttttggcctgctggctaantccgtgtgtgtgtgtgtgtgtgtgtgtgtgtgtgtgtgtgtgtgtgtgaacagggtctcgctcatcgcccaggctggagtggctaagtcttaatgtc

SEQ ID NO: 51522 - DNA, 441 bp, Homo sapiens
  misc_feature 29, 34: n = A,T,C or G
ggtaccgggcccccccctcgggggtactntctanaattaattaacgcggggagaggttctaatatctctctcgattctacatttctgtgacatgacgacttttggtaaatgtgggcgaatgtatgcaacaaatggcttataattacaaacataacgcttgtgttgttctctccattaattgagcctttccctttatctgtaaaataagtgtgtaataaagacacagaattcattccacttctataaacagggattaagaaatgttgcagctattgatttatgtgtgagctaatataatatcacacttaaagatataaaacattgtagtttttcatgtaaacgtgagaaatttgcaagtattatgcttcaaaattttaaaagaagttataaaattattgtgtttacaatcatctctttgccatgataaataattacacttgc

SEQ ID NO: 51523 - DNA, 544 bp, Homo sapiens
  misc_feature 12, 25: n = A,T,C or G
gccccccctcgngggtacttctagnaattaattaacgcgggcctgtcgttggatattagattgcagctcctagttaagcatttcttaatatgaaagatccaaggctttgtcatttttatattaaaacactcgaatcattaactgtcgagtgaagaagcccagccctatcaagagcacatgctgaaggctccgcttggataaggttcagaccacatggaacgaaccctgtgagacagaaatcctaacagagggccgggcgcagtgactcatgcctgcaatcccagcactctgggaggccgaggcaggtgggtcaccagagatcaggagttcgagaccagcctggtcagcctggtgaaactccatctctactaaaaatacaaaaattagctgggtatggtggcaggcgcctgtaatcctagctactcgggaggctgaggcaggagaatcccttgaacatgggaggaggttgcagtgagctgagattgcgccactgcactccagcctgggcaacagagcgagactccatatcaaaaaaaaaaaaaaa

SEQ ID NO: 51524 - DNA, 584 bp, Homo sapiens
  misc_feature 28, 537: n = A,T,C or G
cgggcccccccctcgaggtacttctagnattaattaacgcccgggttccattgtaagaagaaaaatcaacaaatttaaagaagatgggtgaatctcaagtcatattattatcatccgtaagaattcaaaactgaaaaacccctaaatagatatcaaacttcttttatttggcaaattaaatttcctctccaaatatcatggtaaattaacaaactttcttctcttctcatttttcttgaaattgagaaatgattaaaaggcataggagagaagaaagatatagaagggtgctgaatcatccatacccttagcagatatcctgtaattaaaatgttggatttgggctgggcacggtggctcacgtctgtaatcccagcactttgagaggctgaggtgggcagatcacttgaggccaggagttcaagaccagcctggccaacatgatgaaaccccgtttctaccaaaaatacaaaaattagctgtgcctgtagtcccagctgctccggatgctgaggcatgagaatctctggaacctgngaggcagcggttacagtgaaccatcacaccactgcactctagcctgg

SEQ ID NO: 51525 - DNA, 550 bp, Homo sapiens
gccccccctcggaagtcttctagaattaattaacgcgggctatcttttgtactttgtatcagacaactgaataactatagctatgtcccagaaacccaatttccttccaaaaatagagggctttaaagggatatatgcgtacatacataggtatttacgtaaatacataggcgcatagcttttttgaaaagattccttctaggcatgaacaaggcatctgtggtcttcctagtaaagaaggcacaggaatctaaactgcccctccctgtggccagtgtagccaggggcacattgacagccatgggcaactgttgaccccatttgcccctccctcttcttgaacctccccaggtgagggaatgatggccttaatgaaaacgtctctttctcctccctctgaagacagggataaggatatgctgggcgcggtggctcacgcctgtaatcccagcactttgggaggccgaggtcaagagatcacgaggtcaagagatcgagaccatcctggccaacatggtaaaaccctgtctctactaaaaaaaaaaaaaaa

SEQ ID NO: 51526 - DNA, 511 bp, Homo sapiens
gccccccctcggggtacttctagaattaattaacgcgggtatgttcttaatctatatcttcacaaaagatattactaaccaactttcattgttatttgctcatttctatgatttctggtacagagaagcatttctgaataaaatccttaatctttaagcagaagataagggttggaacctgattactcacataaatgcttcataaatcactgccaatatttatcttcatgaaaattctacaagagtagagatgggctcaaagaaggttgactccaaaggagacagttatattgagcaggctgctttaatctataagccatcacgctcataataaaagaagaaacatccttatccagaaggaagagaaaggcaaccatggtaacgctaccctgaacagcaataaaatgggataaattgaattaaattacaaaagtaataaaatttcaacaaacgaatatcatagatgatgatgaaaaatggactgtcacctgagggacgctctaagagtcta

SEQ ID NO: 51527 - DNA, 590 bp, Homo sapiens
  misc_feature 28: n = A,T,C or G
cgggcccccccctcggaagtcttctagnattaattaacagcaatcataaaaattgaagatttcaatgagtcaagactctcagctagtatatgatccctgattctagcctcaaacattgaccaaatcatcttttgtaacttcttttaaaagtaaatatttgaatcttgaattcagggcaaatacattagttgcaacaaaagtttggtgtacagatcaaggctactaatgttttacttttattccccttccaagaaactattgtgtaagatttatttggcaaaacctaatcagccagcttttaccagatatagccaaataaggacaggacattccaaaaagcccagagctgggctgtgtggccccagtaagatggacattctaataacttaaagagaagtctagccccttaggtaattaagaatggacattctgaatttttgttgtctatccttctttcagcacacatgtaattatattctgatgttttaaatgtatctattttccttcccagacttggagtctcacaatgacaaggactggttccttttatttttcactttggctccagcaacctaacagacggaactgat

SEQ ID NO: 51528 - DNA, 606 bp, Homo sapiens
cgggcccccccctcgggagtcttctagaattaattaacgcgggcctatgtaaatatcctataaacaatgtcattagaaggtccaacaccttttcaaagatctcggcatcttaaaggtgaagatttatattctctttcttggcaggtctctaatatgtctaacaaaatcattaaagggagatttagtcagatttgttgatcaggaaaacatccacagatggtaagagaaactgtgggtgattatcaccttgctattgtctttggccagtaggttcaatatttagggctgccaccctgaagacgttaacagaacccttctatctgctggagcaattggctaactttatactcagccatcacaatagctgtacttacaacctatcttcaaatacaagatacagaagacatggctaagagtacctaaaattccaacatatcctgaaaaagcacaatgcaaaacaactcaaggtctgtgctccaatgacagtaagtctgtcgtagcagcttcctatataaacggcaagctattttattttgtgatttgatgacaatcaaacctaggggaaaagttaaagggaaactacatgttgtaattaattttccaagc

SEQ ID NO: 51529 - DNA, 502 bp, Homo sapiens
cgggccccccctcggaagtcttctagaattaattaacgcggggtgtatgtaggattttgtgtgtatgtatgtttaattcttatcttcaaagatacataagtttttacagatgaaatgctactatatttgggacttattctaaaacaatcatgtcattaagctgaattttgaggagcaataaaaaagaaaacaaaaataaaaactaaggccaggtgtgatggctcacatctgtaatcccagcactttgagaggctgaggctggaggactgcttgagcccaggagtttgagaccagcctgggcaacatggggagccctcatctctacaaaaaatttaaaaatcagccaggtatggtggcacgcatctgtgctcccagctactcatgaggctgagacaggaggcctgcttgagcccaggaggtcaagactgcagtgagccaagattgtgccactgtactcaaggctgggtgacagagcaagaccttgtctaaaaaaaaaaaaaaa

SEQ ID NO: 51530 - DNA, 326 bp, Homo sapiens
  misc_feature 38, 279, 301: n = A,T,C or G
ctggggtaccggggccccccctcggaggtacttctagnattaattaacgcgggcaagctgtcaacaaaggagaagcaggtttggcatccggaggccgctcggctgcctgtcctgcgcccagctcagcccggacccatcggccaccttaagtagccaagggggcaaggaaaatgctgccagggcccgggaattcgagtcgggccttgcgagcccagctggcttggcccccgggggaatagaaggtctagcgttggggttaggggggagctcagaacacangaagagtgggtgagggcagtanggacagggaatcccccccattcgca

SEQ ID NO: 51531 - DNA, 608 bp, Homo sapiens
  misc_feature 600: n = A,T,C or G
ccgggccccccctcggggtacttctagaattaattaacgcgggtggtaattttttatccatgtagtgagaagtaagggtaacaatgaaaatccaaccgttgtatgacttcctggtctaatcttccttcatttgtgaaatcagtttattgagatactgtttttgccacctttgcagttattcatcatactaatcaaagtaaaacatggcatttctaagcaaaattaacaagcattaacatttatgcccaactgttgacgtgtataggctttcctttgaaataggaggcatttcaaaaaatacacatttcaaaatagaatcaactgacttttgagtttcccttctctttctcagtagtggaggtggtaaacaatcctaggtaagtagataaaagtgcagccccagaaagaatgaagaggaatcagagacaggaaaataaaaccctcagtttgtgtaactggcctggttgataaagaattggattacagtgggatgccatggctcatgcctgtcagctttgggaggccaaggcaagggaattgttaaaggccaggcgttagagaccagcctgggcaacacagtgagaaccccatccctaccanaaaaaaaa

SEQ ID NO: 51532 - DNA, 517 bp, Homo sapiens
  misc_feature 24: n = A,T,C or G
gccccccctcggaatacttctagnattaattaacgcgggttctgctgttttctcagctttgttcacccactgttaagttattaacttgtcagggtctagactccccgcttcctttccctcttttgaactcactgctggctcccttcccatttgccgcctcagaaagtcagcatttggaaggctgaggttactctgcaggtcagtattggcaggtacacagaattacagttaatataattagaatgtgtaagttttcttaaagacaatgatacaactgaaaaagaaataataaacacagtcatctctctgttatcttgtggaggtaaatggtgaacttaaaaaaatagactttattcaaagtagtgtctccaagaaggttcatctgtgaacatgttaaggatcgctggactcttatatgttaattcatggattcaattatgatcaggaatgatcctcagtttttaaagcaaactcaaagaactaggtaagttgttttaatatcagtgtcgctgttctg

SEQ ID NO: 51533 - DNA, 545 bp, Homo sapiens
attaattaacgcgggatcttgttgaagtctttttatctattttgttctttcgcagctcgtgcttttggtgtcatagctaggaaaccatgctgagatcaaaggtcacaaagatctattcctgtgtttcattcaaagagatatatatgttttagctcataggtggacaatccattcttagataattgttatatatagtgcgatgtaagagcccatcatcattctgcatgtgaatatccatttgtcacacatcatttgttgaaaatactctcctttccttattctgttttaattagaccatatgtgcatgtgtttatttttgggactctcaattatattccattgacctgtatgtctattctgatttcaataccacactgtcttaattatgtagcttgccatcaagtctcgaaatcagaagtatgagtccttctcacacctctgtacttcttttaaagatggttttaattattctgggtcctttgcttttctacctgaattttaagagcaccttgtcaatatctgccacacacaaaagaaaaacaaaa

SEQ ID NO: 51534 - DNA, 565 bp, Homo sapiens
  misc_feature 496: n = A,T,C or G
cgggccccccctcggggtacttctagaattaattaacgcgggtccagaggaaagtttttggaagtcttttagatattatgtgccaggcaactggtgaagttctcaagccagaaaattcaagtacaactctagtgtccttttctataagacaaatcctcacttcacattatcagatttcatagactcttatatgtgtctgtctattactgtattcattcagctagataaatagggaagagatgaggaatagaagaagaatataatacttaacagatgcacctttgggtgatagaattaaaagcacttaaaaattattccttggccgggtgcggtggctcatgcctgtaatcccggcactttgggaggccgagacaggcggatcacaaggtgaggagattgagaccatcctggctaacacagtgaaaccccgtctctactaaaaatactaaaaattagccaggcgtgatggcaggcgcctgtagtcccagctactcangaggctgaggcaggagaatggcgtgaacccgggaggcagagcttgcagtgagccgagatcgcgtcactg

SEQ ID NO: 51535 - DNA, 568 bp, Homo sapiens
  misc_feature 22: n = A,T,C or G
cccccctcgggagtcttctagnaattaattaacgcggggaagcaaatttcctatcaaattcctttttgtgtcattcaccagtttactgtgtcccaccctattcccatgccagattttacagcggttaaaacaattaatggcacatgctcagtgatgaagtgtagggataggagaaaatagagaatactcaacaaaataattgtgggattttcttctccaggttctgccatgtttgaaagtatacagaggggtgaatgtggagggacccttcttgaattaccatccatttatcgccagccccaaatgttaggtacaactatgacctattgagcacatagtatattcaaaatgttatttcacttagtttttgaaatagtctcttaaaagagttcttttctccatggattgaactgtgatttaagaggctaaacaagtatctcatggttacgtattaagaaatggcaagttggggccgggcgcggtggctcatgcctgtgatcccagcactttgggaggccgaggcgggcagatcgcaaggtcaggagatcgagaccatgctggctaacac

SEQ ID NO: 51536 - DNA, 455 bp, Homo sapiens
ccccccctcggggtacttctagaattaattaacgcgggggctcctttgggatggaaattgtctcagtgctgtattcccaatgtccagcacaaaacctggcacatggtaggcaatatttattgactgttgaacattcatggaaaatctaccaattggtttgacaaaacaatttttttttcctctggacatgtgtaatttggctgagattttatactgggaacgtataataaagccaagttttctactagggaaattgttaccagtttggatgagatttaaatatatcaagatttaataggatctttttgtatagtccagcaccacaggaatccccaagttacctattgaatacatactcatcaataaataaagttagaaataagggctgggcgcagtgactcacgcctggaatcccagcactttgggaggccgaggcaggtggatcaccgggggtc

SEQ ID NO: 51537 - DNA, 543 bp, Homo sapiens
ccgggccccccctcggaagtcttctagaattaattaacgcgggggtgagagtacacatgggtcacgctcatgtaaatattccagaccatatggcagttgtatttctcactgtaaatgaacacattggctttgttctatagaaaatcaatttcgcaaaaacttgagttcagttacttttggactggaaggataaaaatttcctaagccttcactgattgctgaaccttctataccaagtctacatgagttccacatccctgaatgctctctttcagttgattcgcttgctttactaatccaaggactcaaacattcacacagctgtatatggagaaaatataaaaacaattcacctttttggcaactgagctacgtaaccaataaaggtggtttcacttcaggccattacccagattagttttactaaacttagctggaatgccatcctgcgcctttgaggaatgtgcacaatatgctttggtactggcattgctaccactgtaattctctcacacaaatagaggcactacagtcgtaatatta

SEQ ID NO: 51538 - DNA, 610 bp, Homo sapiens
  misc_feature 575: n = A,T,C or G
cgggccccccctcgaggtacttctagaattaattaagcggggactgcatggatcctaagtgacaggatacagagcctctactgacccacattgaaagttcagaatatatgaaataaacgtctattgttttaagtctctgatagagagttttgcattttgtggcaataagtgcatattttcctcaatatatacagttaaaatgaggtacaaatacatacctattaatacaatccagaccatatatttataaaaatatatgaaaagttttcttactaacttgaagctcttaagaagctgaaaccagtctgaagcaaaaatagtcataatattaacatgaacattcagcagcatttgttggccaaatacagcatgtgctgcttgtgttacatttagatctagtatgtctttgtttgttttagtataatgaaggggaaattatctcaactgaaagttctttcagaaatgtgggcatactgacattaggctttaattgttataaatactcctgaaaaacaaaagaagaggcagaatttttgaagtggcatcccatgtaattacagaagcagcttcagctntatttgtactctagtactttaatgacaaaaaacta

SEQ ID NO: 51539 - DNA, 460 bp, Homo sapiens
  misc_feature 28, 201: n = A,T,C or G
cgggcccccccctcgaaagtcttctagnaattaattaacgcgggctctttttcctttcaatgtggttatgtcttgttgtaacaccttgaactactgttgtcaccattgtaagagccaatgggttgatgttaaaaccacactgaagacggcagatcagagagatgaaataaatctggatttttaatgacatcaatgaaccanctggaaaaaccagccctgaaacccacccacctggccctggactccttgttatgtagtagtctgtattgcttaagccagggcttctttctcctggagctgaagcacacaaacagatataatgggtaattttaacttcttcttttggctcatatgagttttctaagtctttttatatgagaatgtatttcttttgtatattaaataaaacactaaaatcggaccgggcgcggtggctcatgcctgtaatctcatcactttg

SEQ ID NO: 51540 - DNA, 602 bp, Homo sapiens
ccgggcccccccctcgggagtcttctagaattaattaacgcgggcggccgggtgactcacattatatttctattggaccagtgctggttacagaattccaataaggctgacatatgatcccaagtagaaaccagccaggcccttctctcccacttactcatatatgacccatgaccatggcagtaattatttttatggaacctaaaaagtggatgcataaaaaataattttaaaattaagaactaaaaatgtgcatctttattccagcccaacacttgtagtggcagcttgaaggtaaggcacagattcattctcctgaaaataagagaaaggaaaccactcagaaacccaatcaggttttgacatggtacctctagagcaggagggctgaaatcttactattaccatactcagtggcttaaagaaaatgaaagatggaataagaaaaatgaggctgcaaacagtaagattttttaattccatggcctttgtcacaaatacagtgagtatctgacaaatatttaccttgcatagacaggccctaacttcagaaaagtcaagaatctcatgacttctctccatgcccactaccatcaccctgg

SEQ ID NO: 51541 - DNA, 529 bp, Homo sapiens
  misc_feature 38, 44, 45: n = A,T,C or G
gggccccccctcgagaatacttctagaattaattaacngcgggnnatcattcgaaaagcccattttcccccactgatatacaaagtgaccctcatcacaaaaattttctaaataagcatatttatttctggggtctccattccatcagtctgtttatctctccctgtatcaatgccatgctatgtaaatgccacagtttatatcatatacttttcttatacttttcttcagaagtataacagcaaatgctatacttaatgtttttagtgggtttgtttttgcattttcatttgtattttcatatattttagaagtagtgaatcaatttcaatacataatctgctgtaacttatatcaggattgaaaggaacgtgtagttcaatttagagaaaattggtatgcttaagtaatactaaatcttctaatccatgaacatggtatatctcttcatttctttattttcttagatgctcaataaagttttattattttctctataaaggtctcctacacatttttaaaaccatta

SEQ ID NO: 51542 - DNA, 380 bp, Homo sapiens
ccgggtccccccctcggggtacttctagaattaattaacgcgggagggggaggccggacaggacagctgggagcagtcagggactcacatttctttttcttttttctttggagcaagactccgtctcaaaaagaaaaaaaaaaagacttttccaaacaaacaaaaggtgagggatttcatcaacaccagacttgtccttcaagaaatgctaaaggaagttcttcaatccaaaacctgaatagaacaataacaagtaatgagattgaagccataatacaaagtctgttagcaaacaaaagtctaggattccatggcttcgcttccctgctgaatgctaccaaacatttaaagaggaacaaataccaatcctactcatacta

SEQ ID NO: 51543 - DNA, 587 bp, Homo sapiens
  misc_feature 23: n = A,T,C or G
ccccccctcggaagtcttctagnattaattaacgcgggccagcaggcacttgttctaaatcataacacttcagtaatcttcattggaaaaaaacataagttgtgtattttttagaactcagtttagcaagaattgagtaaaggatttgaaatataagatgcttgccctcccagagtgctcaaaagaatgccgaagctggaaaggctaacgtgtcagtagcttggcaattcccctgagaactccatactattaatcattaaaggagtttttgtaatatgtcaggggcttacaattttgctgtattatgaaaacattttgtgacaggaagataatttcaatttctgtgttaatgaatctgtgtaaaaattttaatcacacaattacagaaagagttctggtctttggaaaacaaactttaggtaattagagtaatttataatttcttaagtataattaatctgcctggctattttataattataagatgggattttaacagtgaataggtggtgtctgagggcccctttcaatgcctttgtatgaaatgataatttatggccttatggaataatgttatatcaagagta

SEQ ID NO: 51544 - DNA, 518 bp, Homo sapiens
  misc_feature 38: n = A,T,C or G
cccccctcggaagtcttctagaattaattaacgcgggnaactttatttacaaagcatttacatttagatttgctctagaaagagtcattttgtgccacaactctgtgtgtaacatgtaataattgatatattttataacatttattatatcatttgggatacttgtgttaacattgaacatgcttgttatgatggaggtgaggtgatcagagaaatgcattcccctagatttcattgatattaatttttaaataggtatattaggactctctaggttgcaagatatagattatacaactcaatctggttacaataaaaggaatgtgtttgctcatataaccatgaagcatgacttgattcaggattcaccagggcttggttttcatttttctgcttagtctcttcaatgctaattctcttttcaggcaggtgtttttctcattggtgaaatatagctgcagacagctcccatggtttcatcctttctggtccttgtccaagttaaaaaaaaaaaaaaa

SEQ ID NO: 51545 - DNA, 419 bp, Homo sapiens
  misc_feature 345: n = A,T,C or G
cccccctcgaaatacttctagaattaattaacgcgggcaggctggtgtctattgctgcctgtgaattattctgagccagtatcttgctgttcatttgcttcctctgactttcataattattccactaggctgcataaagcctgttttcactcgggacacaattaccataggtaattgcgtgtgggcaaatatctgcccttccattgggtagtcacagcatcacccgtgttccaaagcaccaagcccccttttcagggatgcacttgacatgtcatcgttgaagtaattagcatgcttagggtttttaaaaactgtataaaagcatcaaattttcaccagagactntttgttcttgtcaaaatctctaccataacaacctgtgaatttacatagaaggtaattggaaacacacgttccat

SEQ ID NO: 51546 - DNA, 355 bp, Homo sapiens
ccgggccccccctcggaagtcttctagaattaattaacgcgggacctactatgttcctgggtactttttaaaaagtattgtatttaaaaattaagacattgacttcaattcattgtttctcttgtatatgacattcttctttttttctttggaatcacaatttgggctgtgaatattcatttccttaactttgctttgcttttcatagaatttatcccatagagcattgtgctgcttagctttgttaggtagttactttaagcaaggaagcagaggtatagaagcgcttgatttttctcaaatgaaaaaacatttgataccacattctctgtaaaaaaccaaaaaaaaaaaaaaa

SEQ ID NO: 51547 - DNA, 605 bp, Homo sapiens
ccccccttcgaaatacttctagaattaattaacgcgggccgtcttgatgacaccatacagaagatgcacacatttcctctgccaagatggcctctcccttctctcctcctgcccactgcccatctccgtataacccagtccatctgatttattcactgtcttgttcaacaaatatttattgtatgtctgtaagtgttagacggtgtgctcagtgcttggaataaagaggtgaaagagactcatggtcacctgtagagattaatttctttagcaacagcttacgtgaaacaaataacttgattacatagttaccaagtgtgacgtactgttaggggagaaattaataggatcttttgatagagaataacaggagattgggacaaaaacaaatagaaagaatgaataagacctactatttggcaacataacatgatgactatagtcaataacaaattgtacatttaaaaataactaaaagaatgtcattagattggttataacatgaaggatattagattgtcattagattggttataacatgattggttataacatgaaggataagtgcttgagtggatggtaccccattctccatgtgatgtgat

SEQ ID NO: 51548 - DNA, 618 bp, Homo sapiens
  misc_feature 28, 596: n = A,T,C or G
cgggcccccccctcggggtacttctagnattaattaacgcgggtcaccttccttcttctccacctcaaaatctctcactgtcatatctttcctaccagtctcttagcccctcctgagtctaagtcctttttttcacttgttctctagatagtggcatcttctccttcaggaactgctttttaaaaacatttctctcatttcattttttttcttttatttactgttattctttttattttccctgtttttttaaattttctctcttgcttttatcttcctcttctccctctccactgagtccttccattccatctacaaccttgtttgtcacccctaccctcctttcaaacctgtcatccctcaagttcctatcaagtcattctcctgccattcaacggagttctgttcctcacctcccatatcctcgtatattctccccatgagatatcgctcccactcagctaccatgtaccccacccccagctctcctgaaaccacttccttaaaggttgttgatgactttactattgacagatttaactacagtactagtggtctctagtaggtgaaaatagcatggattttaagacacctgngatttgccatgtcaccaaataa

SEQ ID NO: 51549 - DNA, 590 bp, Homo sapiens
  misc_feature 41: n = A,T,C or G
ggccccccctcgaaagtcttctagaattaattaacgcgggnaaataaataacagtacagccacacaaagaatattctgtagctctaaaaatgaataaagaagctctttatgaacagacatggattcatctccactgcatattgctcagtgaaaacagtgagttgtagagtatgtctacattatactactatttgtggttttcttaaatgaggaaaatatttatagcttttgcatgaacaaaatatctctagaatgaagtatgtacaaaaatctgttaatcatgactgttcatgggaaggggactggataggagagaaggtggaagggagaattttcaccatttatactttgaacccattgattttgggaccaagtgaatacactgcttatctaaaaattagaaatagttaaaatttaaaaagaaaatgtgcagtggctcacgcccgtaatcccagcactttgggaggccaaggcaggcagaacatctgaggttaggagtttgagactagcctggccaacatggtgaaaccccgtctccactaaaaatgcaaaaattagccaggcatggtggtgggcgcctgtaatcccag

SEQ ID NO: 51550 - DNA, 397 bp, Homo sapiens
  misc_feature 24, 37: n = A,T,C or G
actgggtaccgcggccccccctcnaaatacttctagnattaattaacgcggggtggcattaactggtattcagaaacacggattgcatataattctaaaacctaaagctgtactctacataattctacataactactcatttcatatacctacataccctgtaaacccaaacttttatgttctcctttgactcactgctgctacatatggctgcagagctccaattagacaactacaatgtgagtgactctccggggattatgcaacacagtggcccttttcgaatcagtctcattatatataaacttgatattcttccacaaataagtgctacacaaagattgcaacataaaaacacagctcttgaagaagacattagagaaaaaaaaaaaataca

SEQ ID NO: 51551 - DNA, 520 bp, Homo sapiens
  misc_feature 19, 32: n = A,T,C or G
taccgggcccccccctcgngggtacttctagnattaattaacgcgggcaggatgaaaggaagaacacaaggtcataattaatggatttcttacctaatagttattttaacaactttcacagagaagagttaattctcaaggcttgaaatataaaagtgctggaagcactttttttttcaaagaaaaagttattttaggacaccaatttgtgctcccttaaactgatcctgcggaggctatgtcctttctaacccaaagagtgattctagcctgtaatctcagcgatttgggaggctgaagcagtaggatcacctgagctcaggagtttgagaccagctggagcaatatagtctctacaaaataaaaaaagtagccaggtgtggtggcgctcgcctccagtcccaactactcaggtggctgaggcaggaggactgcctgagcccaggagctggaggcttcagtaagccatgcaactgcactccaggctgagtgacaaagtgagtccctaaaaaaaaaaaaa

SEQ ID NO: 51552 - DNA, 568 bp, Homo sapiens
  misc_feature 28, 545: n = A,T,C or G
cgggcccccccctcggaagtcttctagnattaattaaacatgaagccttcccaaaattttttaaaaatattagtcttcttgacccctcttactatctcattcccaacctaagagttttcataagggaaaaaaacacttaatcagggtataccaaaaagaatcagaaactatttaaaaagaagcataaactatatgaatctatacatacatatatatatacatacataaatatatataattttttttttttcgagacagagtctcactttgtctcctgggctggaatgcagtagggatctcggctcattgcaatatctgcctcccaggttcaagcgattatcctgcctcagcctaccaagtagctgggattacaggcaggcaccaccatgaccagctaactttcatgttttttttttttctagtagagacagggtttcaccatgttggccaggctggcctcaaactcttgacctcaagtgatcctcccacctcggcctcccaaagtactgggattacagacatgagccaccatgtttggccttganaattatatacatatatatatata

SEQ ID NO: 51553 - DNA, 295 bp, Homo sapiens
  misc_feature 27: n = A,T,C or G
cgggccccccctcggaagtcttctagnaattaattaacgcggggggtactagagaagaaaagcttaacagagagaaaagtccagagaattgtagaagatccttctttagtattaggtgaatactaatgagcagctttcaaaaatgaggaagttaaacatatctcagattgatatctaaattcataagccccatttgttacttatattgaagtacaaaagtgacaatgaaaatattaagaatccaaaaatatgtgtaagcataaaagtataactttatttgtatgattttatgaga

SEQ ID NO: 51554 - DNA, 327 bp, Homo sapiens
  misc_feature 16, 28: n = A,T,C or G
cgggcccccccctcgngggtacttctgnattaattaacgcgggggaaaaaaaaaaaaaaaaaaaaaaaaaaaaaaaaaaaaaaaaaaaaaaaaaaaagggaaaaaaaaaaaaaaaaaagggaccccaacaagggagggccccccaattcccctttgaaataccattttccccccccctccttggtcttacctctctccccacctttgggggttggttaaaacccttggggccccccacatccttggctttccccattttccttttttgggagttttccccccctccccaggggcccctttttaccccctttccctggggtaaccccc

SEQ ID NO: 51555 - DNA, 503 bp, Homo sapiens
cccccctcgagagtcttctagaattaattaacgcgggtcatccatgctgctgatggatatgtagtttctttattctcagtgatgtgcaggtttctcttatatgaaactgccacaatttatttatccattctactgttgattggcatttgggtaattttcagtttaaagtattacgaataaagctgccacaaacatgttttttggtgaatatatgtgtgcatttctgcttagcgtatacctaaaagtgtaattattaagccataggtttgctttactagatactgacagacagtttttccaaacaattgtgcaaagttaaactcctatcagacctatgcatttttagaacacaaggtttagcaacaatagctatcaatgaattaagttgctttcctggaagtgaaaaaatggcattggaggcagcattaatgtgcatgggttataacaaaaacacttacaagcaaacacaagaatatgctgtaagaaggaaaaaaaaaaaaaaa

SEQ ID NO: 51556 - DNA, 616 bp, Homo sapiens
  misc_feature 54: n = A,T,C or G
ccgggcccccccctcggggtacttctagaattaattaacgcggggatatctagnaaaaacctaaggactccaccaaaaaaacttctagatttgataaataaatttagtaaagttgcagaatacaaaatcaacataaaaatgagtagcatttccatacactaataatgaactagctgaagaagaaatcaagaagataattgcatttataacagctataagaaaaatacctaggaataaatctaatcaagaaaaagaaagatctctgcaaggaaaactacaaacactgattaaagaaattgaagagaacacaaacaaaagacatgacttgctcatggctgtaaaagttggaggacctggtccctgctagacaagaggtgcaggcactagagtggagttaggggaagagagtgatggccacaaagcacagctatttcatgaagctcctttagttaaagagaaacaaatgactgaaaaaaaagtctgagccccaaaacccactcctaccaccaccactagcaaaatatacatatacataatgctgtaaaaggattcggaaaaagaatgatacttgtttagtttcaaatatatatagtatgctcttctttataaataccta

SEQ ID NO: 51557 - DNA, 623 bp, Homo sapiens
  misc_feature 32: n = A,T,C or G
gtaccgggcccccccctcggggtacttctagnattaattaacgcgggctggcatggtggtgcatgcctgtagttttggctagtcaggaggctgaggtgggaggatcgcttgagcctgggagtttgaagctgtaatgagtcatgttcgtgccactgcactccagccttggcaacagagtgagacactctcttaaaaaaacaaaaaagtacttcttgtgctccttttggggcatatacaggaaaagaaatgaaaaagtcccataaaaattcaagctctgtaacacaggttacttcctaagaaaaatgaatgaacaatatcaattgataaaatctcttcacttttgttattatcaggaaagactaaatcagtacacacttagtaaatacagtaaggggaagaaacacaaactttactgttacacaattatgtttgcctggcaaggaatgggtacatgaacatgatccgaggggcaatatgatcaggcgaagagccaaacaccttaggttcttgtctagtttctgttacataacttccctgtgtttccatttttttcatctgtaattggaaagagtattctagacgatctctcatgttcctttcaattctaatactttattccacac

SEQ ID NO: 51558 - DNA, 337 bp, Homo sapiens
  misc_feature 262: n = A,T,C or G
cgggccccccctcggaagtcttctagaattaattaacgcggggtagcggactacgctcttccagctgtcggacctgggaaattctcctgtgctaaatcccgtggcgctcgcgggtgtcgccgcggtgcatcctgggagttgtagttttttctactcagagggagaatagctccagacgggagcaggacgctgagagaactacatgcaggaggcggggtccagggcgagggatctacgcagcttgcggtggcgaaggcggctntagtggcagcatgaagcgcaccccgactgccgaggaacgagagcgcgaagctaaggtatgtcgggctcccggggc

SEQ ID NO: 51559 - DNA, 445 bp, Homo sapiens
  misc_feature 15: n = A,T,C or G
cgggccccccctcgngggtacttctagaattaattaacgcggggatcatgcgattgccttccaacttgggtgacaaagcaggactctgcctaaaaaaaaaagtttgttttcattccttgttaaaaaaacaaacactgttaatgcaaaagaataataataataaactgaaaagttcaaatgtcttacaagagatatagacattcagatacaggaaactcaaggatccccaaatagatcaacctgaaaaggccttctctaagacacattagagtcaagagtcaaaaacaaagaaagaaaaaagagaattctaaaaacagcaagagaaaaacatctagtctcgtataaagaaatccccatcagactaacagcagatttctcagcagaactcttacaggccaaaacagcatgagatgatacactcaaaacactgaaaaaaaaaaaaaaa

SEQ ID NO: 51560 - DNA, 572 bp, Homo sapiens
cccccctcgagagtcttctagaattaattaacgcggggcatagcaaaagaaactaccatcagagtgaacaggcaacctaccaaatggggagaaaattttcacaacctactcatctgacaaagggctaatatccagaatctacaatgaactcaaacaaatttacaagaaaaaaacatggttgtgcttatagcttcagttacgttttcatcatctggacatgagaatatcttttgtcgttacttaatgtaagaattccaaacaatagagaaagataaaagtggatgaaaatctactttcctaattttactcctcagaggaaagtactgtcagcagttgttgtaattgcttctgactttttaatatacagataaacaagtaatgctctcatgtatacatctgctcattcaataaaatattatggaatggcttggtatttttctaggtgccggcgataccatggagaataagataggattggtgcatacaccctcacagaatttgcagtcaagcagggttgggcatgagaatgagcattcctaagaaagagaacattcggccgggcgcggtggctc

SEQ ID NO: 51561 - DNA, 596 bp, Homo sapiens
ccgggccccccctcggaagtcttctagaattaattaacgcgggtaatactgtgtagcaatgaaaatgaacaacatggatgaacctcataaacatgctgattaatcaaagaaaccagcacaaaaaagtacgcaatgtataatcacatttatataaagttcatcacaagcaaaattaacctgtggtattagaagtcaagatagtgttgccttttggggaggagagaagtgggcattgacggagaaaaggcatgatctaggggtggttacctgaacatattcatttagttatagtcattacaacatgcacttattatgtggaactttttttttctaagtagtttatacttcaccgaaaaagtgagaaacgtcaatctaaacattcgaatgtaggagacttgattatgttaagatgaaccttttcaatcagtttcttactgaagaaacttattaaattaattccaaatcacttgtgttctaaatataaaaatattataaaatacatgaaagtaaatttaaaaataaaaaaatatatataatgtttttatcaatatttttctcctatagttggtagctgaatccacagagggtaatgctgt

SEQ ID NO: 51562 - DNA, 639 bp, Homo sapiens
  misc_feature 39: n = A,T,C or G
gactggggtaccgggcccccccctcggggtacttctagnattaattaacgcgggatcatccacaatccagcctgatgtaatcaggcttgatcagaactgcacagatctagggtaaacacttcagccagaatttcctaggctcctaggtctctagaaatgtatctctgaagtaggatatcatcctctccttttaattttcagaaccagtagtaactactgactcaaccggtgtaattctactgactcaattgtgtaattctggaaaccctttcttacgacctctggcaatatctataagcttaagataattaatctaatagtttaggaacaaagaattttaaaataagagaaaaggaaaaatgcatagtttataatgcaaacatgaacttttggagggcctttaattattagatgatagagtaacagtatacatcaccagactgaatggataaaacctttttttttaattttccctatgtaggtttcctgaggacaaaatgaccctaaaatatgacaagatccctcaatctcataatgcagctcattttaaggtaccacataaatgatatttggaaacaagaaatttctctaatgtcccaaatgaatccggttactatctcaaggatgggaaatattctt

SEQ ID NO: 51563 - DNA, 623 bp, Homo sapiens
  misc_feature 27, 29, 40: n = A,T,C or G
gactggggtaccgggcccccccctcgngngtacttctagnattaattaacgcggggtatacctgaagtatatgatgtttattgtacatcggttatgcctcactaatgctttataggagtgagagagggagtaggtggaggtagatgaaggaggaagacaaagcagaaggtattctttttcttctttttgaaaatagttttaaataccccttttaaaaagaatcaccttttgaaattaaactttccagaatatactttaacatgttgttatttcacttttgataatgttccctatcttctatcttcagatagattttaacatgttatttcacttttggtaacgttatctatctcctgtcttcaggcagattttcacaagttatttcactgttgataacattacccatcttccatcctcaagacagatcttcacatctgtctacctcctatctatcttccatcttctgtataaattctgaccccagttcaagattaggtcatttcaatttagtctgaaacttaaattgtttattttgaaccattttacttcctaccattaggattctcactccctcaatgtataatgcctttttatcttttgtaaaaatctgttttaatgatgag

SEQ ID NO: 51564 - DNA, 581 bp, Homo sapiens
ccccccttcgaaagtcttctagaattaattaacgcgggaaggcattcaaaaatataattttagctttttttgttcctattttcattcctatttttaaaattccttctttattataaattacttttccatcaatttttaacttattatttgaatataagggattgattttttttggactctatttagaaataggatcattgatttgtgcatatgaaaggttgtattaccttagcaaattcactaatattatctaacagctttgtagttgacaatcaatctggaaataattactttgacagtttctatttaatattttgttatttattgttttataacattggttaaaccatttttgtgctttgtttgatgtgatgtgaacagaaatgttcactctctcacctctaaatataatatttgacaatcccagcactttgggaggccgaggcaggtggatcatgaggtcaggagatcaagactttggtggctaacacggtgaaaccccgtctctactaaaaatacaagaaattagccgggcatggtggtgggagcctatagtcccacctattcgggaggctgaggca

SEQ ID NO: 51565 - DNA, 476 bp, Homo sapiens
  misc_feature 33: n = A,T,C or G
gtaccgggcccccccctcggaaatacttctagnattaattaacgcgggcgtgccactgcactccagcctagggacagagtgagactccatctcaaaaaataaaataatgagttaatatggagaaaaatactccagtaaataatcctgtagtatcaggtagctattacttttcttgggtaaaaataatttatgtttttacctttgaatcacacattattttagattttagagagttttgttatcaagtatcctgcatttgaaatactatttaattatgatttgcttccttggggattatatcatcatgtgatttaatttggtatctaccctaagggagagcatatttcaattataaaatatttcctccagaaacaatagtgattcaatgatttatttcaggatatctgttattaaatggtttattcaactagaatttgaatgaaattgagtttaaaatatagcatgagtccccccaa

SEQ ID NO: 51566 - DNA, 597 bp, Homo sapiens
  misc_feature 28: n = A,T,C or G
cgggcccccccctcggaagtcttctagnaattaattaacgcggggataaataaaatcggacgctggaaaggagtcgggggtagggcagcggtggtagagaggtggttgggggagaactagaatacagagcaaagggatttagtcgtagaggaattaatcttcagattaaaggatcaatatgacactaaaaccatttatgcacttggcaagctgtgatcctgcacacttgagcagcaaaatcgtgtgtggaagaaagaaatgcagctttatcagctccatgtttagtctcagcaacaacaggtgagacagacaggtaaaagattggctaactaatgttaaacggaggcagaaatatctcccttaaagtaaataactgactttcaaacatatgttagtcacaggccacgaagacactataagacctaataggaggctttctaatcaaaccatccaggccatattctaggcaatgatacctactgccatgcgatcacagtctccaaacacaaggaaccaaaaaaagaaaatcaagattcaggaaagcctaattcaaagtaaaaaattactaaataaaatagaagtttctgttgtccaaaa

SEQ ID NO: 51567 - DNA, 610 bp, Homo sapiens
  misc_feature 25, 38: n = A,T,C or G
ctgggataccgggcccccccctcgngaatacttctagnattaattaacgcgggcttctaagaaacacaattaatctgcacaatctgactccatatatttgcttataaagtcaataaaattattttttagtgcatactctctagcatgtacccaaagcatttccaaatattatcttataaaatcctggaaaacagcagagtatattgataatattactcccattgtataaattaaagatggaagctaaagagaggtacacctgtaagcacaacatcaaacagtgaggtaatgacaaaggaggaattcctgtctttgcttctaacatatccattcttctcaaataatctataaatttttaaatattatcaaatttttatttaaatgtgtccctttggacaaatgcattattgtggcaatctcaaagaactttcagtataagtaactctgtttagcggtttggatgatatttcccaccaatgatcttctaaatctgtaccatgaactgcaggcaagcttcaaaaataattttcaccaactcgggccatcataagttcatactgcttttggatcacctgttcttatgtgatagaagcgtcttctcatggtatga

SEQ ID NO: 51568 - DNA, 568 bp, Homo sapiens
  misc_feature 481: n = A,T,C or G
tcttctagaattaattaacgcgggaaatggctaaatccacgtataaaataagatttctattccccccaaaatataaatggtcaaaagtggcccaattttataatatgttattaacttattcctgcatacacaacttttcatgaaaagatcccacaccaaatactattatttctctccatccatgtgcttgtttctatccattcatctctccatgatatttatgtctattatattaaatgaaatggaatgctgagaatgcttaagtactttcttagtaatatgactacacaagaatttcttacagggctcaagctttgttttattgatggaacactttcttcaaatgaaatattgtagatatcttctaacaagcaaaacagtaaaaagttgaactgccctgggaatgagggagaggcaataggaggaacattctctcatttaacaactttttcttggtcctccaaaatacatttgaggaatntttagggctccatggaagaggaatatataatatgttctggtaagatacagagtatattgtgtgcttaataaaaacttttgtcccaaa

SEQ ID NO: 51569 - DNA, 465 bp, Homo sapiens
cccccctcgagagtcttctagaattaattaacgcggggccccaatcagtgatggaatcagacctttggatccctgtatcagctcctcattggttgtgagccgctccaagaaggagctgtaaccttggtgagacagctccctgtgtcccagggcaacaggcagtgaggaattcagttgttcatcaaatattaatttttctttcctgttcatgaatttctgactttcttgttcccaggagctcattctccatcacagttcaaccacttccacagatggttctctcatttcatccagggaaataatgttcttggtttcttagcagcacctgaaagaagattctttttccatacaagtttggctgaaagccttgctttgtctatttcttctatgcctaaaccgaaatcttggatattattctaatgagaggagagaccagactcacctgtgctagaaaaaaaaaaaaaa

SEQ ID NO: 51570 - DNA, 592 bp, Homo sapiens
ccgggccccccctcgaaagtcttctagaattaattaacgcgggcacctgcacacgcatgtgcacacatgtgcgcacacacacacaactataagaaattattgagaaattgaagacataagtaaatgaaagttatccatcatatttatagctggaaaattcaatattaaaaagatgccagttccccccaaattgatctattggttcgttccaattccaatcaaaatccagcaggtcttgataattttttttatactttattaaatgaagttttctaaactttcatcttttccctgtcttttgggggcttggtaggagctccaagtcaggacacagagataccacctccattccaaagccaccaatcacttttactctttggttgtaagcagaattattattttttcctaatgtctatttttccttctataaaatatggaaaattgtaattatcccttttctgaattaaaaggcctttgaattatgtaaataaaagtgctgtgtaagttcaaagcagtgatagtaattgtagctattttaagctttggaaatgtttctgacctgttttcatatacatgtttagtaaagtgtagc

SEQ ID NO: 51571 - DNA, 618 bp, Homo sapiens
  misc_feature 527: n = A,T,C or G
ccgggccccccctcgaaagtcttctagaattaattaacgcgggttccctactatattcagagattctgaataactcccttacttcatttatgtttttaacttgaagttacagaccttgatcaagtgtctactagtcattttttgtgacctcctagagagatactctgccctctcagtatttccctacattttatcattgaaccttttttgtcatttttgccacctttccccctccaggtttttctgtccctttcattaacctgcaggggcttgtgctgcaccacaatatctctattgattgtcacactaggaccaggtggcccttcctattcatctgcaaggaagctgctttatcaagtccttgtattgtgaatctaccagctgcgtatttttctttctctgtaatgctagtaatattcagcactgacttaagtggcttaagtgctgaaaatcacgtttcaaagctattcagaattgtgtcttttcacttagggtgaaattccattggtcttgagaaggaagtgtangtgatttcacaattctaaacttgttcctaatgttttatcagggcttagtttggaagaccagaatgcttccgtgaatgatagttgaaggaga

SEQ ID NO: 51572 - DNA, 601 bp, Homo sapiens
cgggccccccctcgaaagtcttctagaattaattaacgcggggaagtatgtaagaaatattctaattttctctagagtttaatttcagtataaagaccaaagacatttttagtaacatcttgatgagatttcagtgaaactgtctgcctgcatcattaaagcatctgtcttaaactgtgacaaaaacaggtaatatgtttcaactaagatgtgtcatacttggaagtattactagtccacattcaatttctgacatcatatgaaaagatgctttgagtttaaatatagattctattgaattgtagccacttacatttctaatatcatactgaactatacagtgaggtaatagagtgatgctgtatttttacttataccatgaaaggcaatacattgcttagtcattctcatattcacaagacaatatcataatggcataagaaacagattgatgatttcaaaagtctctctaaaaccattcattaatttttagatgaatgagattatttcataaggcaagagtgtttaatatttctaaattatcagtgatgaaattttgttgttgtcattcttctttattataacaaatataaccctgtat

SEQ ID NO: 51573 - DNA, 614 bp, Homo sapiens
  misc_feature 606: n = A,T,C or G
ccgggccccccctcggaagtcttctagaattaattaacgcgggtcaccactcattctaatatagtctatttttctctcagtgttatttcttacatagtttaataattaattgatttttacaagtgaactcattgtcagtctctgtgctagtggctataatgaatatagaaaaatgcacaattgatactcacagatttagtatgagacatacagcatacctataaaaaatagagggcaaagcagaaagtacagaaaaaaaccttaatatttttactcctcattgacaaataacaatgttacatcaataattcagagtggcatcttagtactaactcttggtgcaagtatctttcatacactttaagttaaataccgtgttataatgtgttgtgaaaatttaaatgacagaatttcctttttacattgagaatttgaagtttatggttctagcccattggttacaactgagaaaagtaaggcacttacctgtaacctcagctctttggcaggctgaagcaggaggatcaaggctgcagtgcactatggctctgattgtaaatagccactacactctagcttggacaacatagtgagatcttgtctcanaaaaaaaa

SEQ ID NO: 51574 - DNA, 612 bp, Homo sapiens
  misc_feature 25, 38, 580: n = A,T,C or G
ctggggtaccgggcccccccctcgngggtacttctagnattaattaagaaattaacctttatttaagttatggatagtatccttaactgtattttcaaaaaaattaagtataaaattgtgataacagcctaacagtcattaattcaaaccaatccctaaattggcagaagttcagctggtatcagtaaaacaatcaaatattgctacccagctgctcctattcctatctgctccacaaatactgagacatacaagtcattctttcatttaacaaatatgtattaaacacctatgcacctaccatgtacaagactgcctactaaatgatgggaatacaggtgtgaataagagacaaggtttccggactcacaaaacttaaaatctagctgtagagacagacaataaacaaaagaaattacaaaatgtggtcaatgctatgaaggaaatacaggctgctcagacaaagaataacaagggacatctcatttagtaaatgacagcaattaacattcactgagcactttggatagggtagtgagagaaaacctctctgaaaaatgacggttaagttctataacanaagaaacacagggagacacccatgtgatgact

SEQ ID NO: 51575 - DNA, 583 bp, Homo sapiens
  misc_feature 454: n = A,T,C or G
cgggccccccctcgaaagtcttctagaattaattaacgcgggggaataggattaggtaaggattctcaaagatcttggaataccattcccagcttggtcatagttttgattataatctaatgactatgtctaatgtaggaaatatagatctattttttgaactgaggatgtcactttgcctgggtgtgctttatacagattatggcatattgaggtttcagttagaaaaatatatgggacttaacccttcaaattgatgggaaggaattatgtcattgtaggcttttgtgttttgcagtcattgtacaaagcactggaattggggaaatagcagggtgtttcccccacaattagaagcagtgttgcttttcattttccttttactgattagcactaagtagacattaacctatatgaatttttcaaaaacagcatttagggtccacatttattntaattctgatcttctctaatctaattggtgaaacttatggcgaaaaaatatgcatagttacttttgacatagatttgtttaagcatgaaagctaggaattgattaaaaccaatacatatatttagtttt

SEQ ID NO: 51576 - DNA, 550 bp, Homo sapiens
  misc_feature 11, 23, 36: n = A,T,C or G
tgggtaccggngccccccctcgngaatacttctagnattaattaacgcggggtagctgcttcctttatagaactcattctcttattctgaacttcatttcttcactaatcaataaattaacattactaattttgccttttttacaaggttagtatgaggttcttatttaaaatctgcataatgtgtaaaagatctatgttgtacaaaatgaaaggcaagatgtcagcagtttaccaaatgtcaatttaaattactttctcaatatttttaatataaaagcataccaaattatatatttggcatgatattcaaaagtaatgaatgttttttaaaataggtgttattatttgtttcttttggtctgtaatgtttttttaaagttctttacaaacaataaatgattagacttcttagcagcccactgacccagcattgttatgaaggagaatctctccctgcaacaatgtagacctgtatttattttctaggttttaaaaactcgcttatggaagctttggacattagcagtcattttaaacacaattaagct

SEQ ID NO: 51577 - DNA, 525 bp, Homo sapiens
  misc_feature 24, 37: n = A,T,C or G
ctgggttaccgggcccccccctcnaaatacttctagnattaattaacgcggggggtgtatcttacaaccaatgaagctttgtttctcttgatggaatacaaaagtaaaaagtaccacttatattggtgctatcttaaattcgataaaataaggtatataggaaagtatttaaaatgtatataaatgcaaataaacagcttttattatttgatgtgaatattaaatatcagtgttaaacattagattttgaaacattgttctagggtggcataagaacatagttccaggacaacattctagcacattcccttgtaaaatcagcactgtgtatatctcttctctattctgccatattttgtaagacgttagaagtcagagacccagggaaagatacctcttgatattctctacaaatagagcaataaagagcagtcaggaagccctgcaagtgaaataatgagcaaaacgtttgtatgaaaaaaggaactgggccaggcgcagtggctcacgcctgtaattccagca

SEQ ID NO: 51578 - DNA, 528 bp, Homo sapiens
  misc_feature 26: n = A,T,C or G
gggccccccctcggggtacttctagnattaattaacgcgggtgtcccttaattttatgctaaatggtgttttctttactgtatatatagccattgcatttctataacaaatagtttcatactttgattagaatactgagcatgatttcatttcagtgttcggagcctgtcaagttcacataaaataaaatataaaaacaaccatccttgtattagcaagcaaactacccttcagtgagtgccaccatccccctgagctacagaactggttagcgccagcctcccctgagtttacagcaaattactgaaagcagggctcgcataaaattaaatcataaattatctgactgctatctcgctgccttctgatatagactttctacacattttaagtggaactgacgtgaacagagctcacttacttgcagctgccagctgaaggtgcaaatatagaggtcacctccatgcaccctttgttgctgtcacctttgaactgttcctaaattactaggtgaaaaaaaaaaaaaaa

SEQ ID NO: 51579 - DNA, 449 bp, Homo sapiens
  misc_feature 28, 431: n = A,T,C or G
cgggcccccccctcggggatcttctagnattaattaacgcggggaatattctagaggtaaaatttctgatgttactgaactgcatttttaaaaattatttgtgatgagtacaacttcctattaaaaggaatgttttttaaaataatgtttaatatttgaagatccagccatcacagtaaaagggagatatccattttaaaggataaataaaataaaagggagatatcaatttttaaaaatggattctatttttaaagttgagatccagtaattcagcactattgttatttgaaatagagatgaggccaggcacggtggttcatgcctgtaatcccagcactttgggaggccaaggctggtggatcacttgagatcaagagttcaagaccagcctggccaacatggtgaaaacccgtctctacaaaaatacnaaaaatagccctgcctgt

SEQ ID NO: 51580 - DNA, 600 bp, Homo sapiens
  misc_feature 588: n = A,T,C or G
cgggccccccctcggaagtcttctagaattaattaacgcgggtttgattttagggtccttaacacaatattttcattatgatatctttataaaatatttttgtatctggtcctcctcactgctcttcaacacactttttcagtgattctttccagatgaattttagaatcattttgtcatgttccccagataactccaatattataagttcatttgggaaaattaacatctttatgttattgagtttctccatataaggtattgacacatttatatttagttaacttcttttatatcctcaatgaaacattgtgattttcattatctaggccttgcactttctctttctcttctaggcatttaagtctttgctgttactgtgtgtgggattcttttctcttatattctttaaataattactgttagtatattaaaaagttattgatttttgcatgtttactctgtaatgaatcaccttattgaattcttattaattctatgtgtgttcaatagattctcttgagtttcttggatacaaaaccatattgactataaataatgatagtttttctcttcctttcaataacntatacacttact

SEQ ID NO: 51581 - DNA, 516 bp, Homo sapiens
  misc_feature 50, 51: n = A,T,C or G
gggtacccgggccccccctcgagagtcttctagaattaattaacgcgggnngggaactaggaaaggagataacatttacaatgtaaatatagaaaatatctaataaaaaaagaataaatacaagaaaggagaaagaaattgaagaatatctcagaaaattgagagatctctgatgttcatggattggcagaattaacatagtaaaaatggccatcctaccaaaggcaatctatagattcaatgtaatccccatcaaaatcctaacacatttcttcaaatatatggaaagagcagttctcaaaatcatttggaaaggtgaaaaatccagaatagtgaaaataattcttaacaataaatcattcaaatgtaaccattaggatttacttttgagaatggacatatgccattgatatttgtcacttagtataaattttctgatagttccatacattttcttgccaattttctgatttcagttttctttgtagctaaatacaattccccaaaaaaaaaaaa

SEQ ID NO: 51582 - DNA, 358 bp, Homo sapiens
ccccctcgaaagtcttctagaattaattaacgcggggtgggggagggacatcaggaaaaatagctaatgcatggtgggcttaataactaggtgatgggttgataggtatagcacatgtttacataggcacacgtttacctatgtaacaaaactgcacatcccgcacaggtaccctggaacttaaaataaaaataaataaataaatagataaataaataaatggtgtgaaaacttacaggttttctgagaagtctcagttgacaattacgttttacaacttccctcacttctgtatttagggctacactgagtttaggccccatactgaagaggaccaaaaggggaaaaaaaaaaaaaa

SEQ ID NO: 51583 - DNA, 602 bp, Homo sapiens
  misc_feature 28, 594: n = A,T,C or G
cgggcccccccctcggggtacttctagnattaattaacgcgggggatatttgaaacaatggttagtcagatgcttatctctcctctttatatgctaaagaacatcaaagtttaaatcagctatttttgctgatgtcgatgacaaaatgattgtcctatgaatcaaatgacacagatgctgctgctttgttagtgtatgtagtcttggtgttcacttactgttttcagtatcaatacatatagttatggagataactagaatcatcacttaggaaattaccttattcattaatcattaaggtaaaagggattttattatgttgggaatgcgtacagctcattccattgctgaaatcaacaatttttttccagccagataaatgaaaaactcccatgttttcttttattgttgctttttgaataatgttttgaagtactcaaccgatgtattgtgtgtgtactaagtgtactttctaacaaaattaattctatttaaagggctatttcttgccataggcaatcttgtgtgtctttggaaagggtgcttgtataaactagtgaagtgttttggatttggtatggaaatgttactganaaaatatc

SEQ ID NO: 51584 - DNA, 372 bp, Homo sapiens
  misc_feature 330: n = A,T,C or G
gggccccccctcggaagtcttctagaattaattaacgcggggccgttttatacagcgtggctagcattctgatttgcttctcacaacaactttgtagtgttcatgagaagaaaaccattgactgactaattcctattagatgaactattttggtagcaagtccagtgtcaatcacatatcagaaaagaaccccagaacacttgcataatacttgttgagcacctattcatctatttatttctggatactcagttataaataagaaatttgataaatactactgaaacaatttgctttttctataaccctttatactgttccaacaaagtntgaactaaaaaacccctctgtttctccaaaaaaaaaaaaaaa

SEQ ID NO: 51585 - DNA, 593 bp, Homo sapiens
cgggccccccctcggaagtcttctagaattaattaacgcgggtccttcctcatctagagactaaaagctagactaagccatccaataaaactcagagctgttcctttaattttctcatgagtcccttcagatgacttaaacaaatggatgtatttgcacatgattatgtaaagttagatagaacctacattaggccagttacagtggctcacacctatcctttcaacattttgggagaccaaggtgggaggattacttgagcacaggagttcaagagcagcctgggcaacatagtgagaccccatctctgcaaaaaataaaaattagctgggcatggtggcacatgtctgcaacttcagttactccagaggctgagatgggagcattgcttgagcccaggaggtcgaggctgcagtgagttgtattcctaccactgcactccagccacagagcaagaatctgtctcaaaacaaaaaacgaacaaatagaaaaaccctacattaattagtacctattctaaagcaattttcaatttcacatactgttattatataccttaagttgcattatatttattttgtattcttataaaa

SEQ ID NO: 51586 - DNA, 423 bp, Homo sapiens
  misc_feature 39, 382, 401: n = A,T,C or G
gactggggtaccgggcccccccctcggggatcttctagnattaattaacgcgggggtgtctcactggcttagagagactgttttaagtcacgctgtctttactgcctgttttctggaaaaaggaaagtggttctcatgggttagttgactccctaatatatcagctgctacccctgtctatttaatcactaccctttttgcatgagtcctgtgttagagataattgaagtggacaaagcaggcacttgagaaaaactagaaagaagaatttcaagtcatggctgctcctttttccaaatgatagaaacccaacctgaattagtacaggtagaagggtaaatttctgtctcactggttctgtgctgggcatcttatatttatntaccccctctatatctatntctgcctgtatctatctgctct

SEQ ID NO: 51587 - DNA, 454 bp, Homo sapiens
  misc_feature 17: n = A,T,C or G
cgggcccccccctcggnagtcttctagaattaattaacgcgggggatatagtataatcgtttaaactgctacattatagtcaatgatgaataggttatatttcatttagttttttctattaatggattatttttagtctatttaatttggttcctagattaatatctatgttgtgtcttctcttaaaatttcatatttccaaaatgctgtccaaaatatctgtcaataatatagatggataaaaaatattcatttttagaaacttaaaaagtgtgattaaccaatttacatttatttttattgttgttcttattctagaatttgacttcatatttttgacaggcattcttacccttatattttcttgagaaagttaatttctaggaattacatttatcttcatgtaactgaatccaagttaacatcaatataagtaaaaagttgtgtttattga

SEQ ID NO: 51588 - DNA, 574 bp, Homo sapiens
  misc_feature 547: n = A,T,C or G
ccgggccccccctcggaagtcttctagaattaattaaatggcaaacataactgggcaataaggattggattttttttcccctcaacctacataaggtcattcactcccaggatcagactacaaagagttttcttagtcgagaaatgcaatctttggccccacagggaacttcccgctccaacaccgcactcaattgtgtggctccctgtcagacatgcacctatgggactcatagcactttatgctactcctgatttcttccaaaaatgagaatcaaatattttcaaaggaatgctgtcaccgatgatgcttggaggaatagggggaatggtgacaaagacagtcattgtgtaagggcatgctggggggacacacctgttgccactagagtagccaagaggatctgttgtggagtggactcattcagaactgaggacgaggggcaggaggaaaccaagggagaaaaataattcactcctgctctatggcaaaagaggggggaaatacacaacattttctgatcatttgacagtttgtaaagaatgtntatggagatcgtgccactgcactccag

SEQ ID NO: 51589 - DNA, 613 bp, Homo sapiens
  misc_feature 29, 42: n = A,T,C or G
aagactggggtaccgggcccccccctcgngggtacttctagnattaattaacgcggggagggatatggggagagtcaagccacaatactttattttggggaatttatatcatcctctccctggatagatttgaacaccacaggcaggaaatataaacaagattttctcttattctcagagcatttccgggacaataatatctttgagaccaggtttggtttggttttctctagtttctctgtagctgttagcaaaagcctattgtgataatgcgtgaatctctgtgagaaaaatgacaaaacacaacagggtgttttcctatgtaggagcaggctcaacgtggctccccagcaaataaaacccagttacagaattcctttctcctcttaactcatgtagtacattgtccctctattcttctgtttcacagtcacgctgccttccattagttacttctgggtctatttcttcctccatgtgtctctccactatactaaaacaatttttttaaaggtcagagactaagacatgcatctttttttatcatcagaaactgtccagtagaaacaggatgtgagtcactaaattttcttcatactaattgctctcataa

SEQ ID NO: 51590 - DNA, 632 bp, Homo sapiens
  misc_feature 25, 38: n = A,T,C or G
actgggtaccgggcccccccctcgngggtacttctagnattaattaacgcgggcagtagctgccttttattgagtatatctactaggtgttaagtggtagggccagttgttacagcaacctataagatttgacatattcattggtgtcaccatttacagatgaggaaacaggtttattttggcagagtatcttgcccagggtcacacagtaaattggatttgagcctggttctgtttgactctaaaacttaatcctgaaatatgaccctgtgttttcccactcaacaacgttgccttagtatctctttggatattatcgttgagaaggcaagggtaattagctctattttgcatatgcctctagttttagaacagctaaaatacattgctgctctttggatgcccttaaaaagctggcctgctggaggtgaggagggggagagatttgcaaagagcgacagtgaacagctgggctctgatgagactggtgtactctatttactagtactggaaggtttggattctgactagtttggggtgaactgacctgttcacactcaaatcacttaatagctttgactaaactttggatgtttaagtaatgttacatatcggttgggatggtttctcct

SEQ ID NO: 51591 - DNA, 592 bp, Homo sapiens
  misc_feature 36, 529, 571: n = A,T,C or G
tgggtacccgggccccccctcggaaatacttctagnattaattaacgcgggggggggaggtcaaaaataaggaaatattcctgcatagtatggtcagttaagaataagtactcgtttttcattgttgcaaagctaataccaaatgtgttgaactccttagggaataaaaactgcataaaagcaagggctattatatctctaagcacataatttaccttataaatgtgagcacacatatatttgccatcctatgggaatgaatgagaacaagtacactagggaattttgtttcatttcagcagaaaactagaatatggcaatgtattaaaattattcattgcagaaataagtctctaaatacgactagtaatgcatatagtccttacattcaacattgaagaaaatgttttcactatgcatattctttgataaatgttgccaaaagtttcaattatttgtatcacatacagcaaagttggtgaatggagattttagaaatactgactacaagagttcacacactgctctntaaataatttatttatttacttacttatccattctataaatntctctacctaagcatgcttgc

SEQ ID NO: 51592 - DNA, 122 bp, Homo sapiens
gaatgtaacaactataggaaaaaatagtctctaatttagctagaaaataacactcatttgcttgctaaggtctagcaacaaaagaatgttaatgcacattactaccccaaaaaaaaaaaaaa

SEQ ID NO: 51593 - DNA, 484 bp, Homo sapiens
  misc_feature 33: n = A,T,C or G
gtaccgggcccccccctcggaaatacttctagnattaattaacgcgggtacctttcatcctagcataaaccaggtctcttacaaatcattatttgagagggttatctatcagccttgaagtctttcttccagcttgggtggccactctagttagggtttgtgcctttcattggcatggtactttactgactactttcgtacataagaagatatctagattctattaaattctcatggtttactaattaacttctgctcattcctgttgcattctttttttgggttgtataaataatttctattatttttattcatcaccacaaaatgacatgacctgcttctttctacaggcctgctgtgtttctcaaaatagaagatgaatctataaaggagatatgcttctccctattaatgccagctttttacttaagcaccaaattctcagaggaaacagaacatgtgttcccccaaaaaaaaaaaaaaa

SEQ ID NO: 51594 - DNA, 396 bp, Homo sapiens
  misc_feature 9: n = A,T,C or G
acttgctanaattaattaacgcgggttccctactatgttcagagattctgaataactccgctacttcatttatgttactaactagaagtcacagaccttgatcaagaggctactagtcattttttgtgcacctgctagagagcatactctgccctctggtatttcgctacataatatcattgaaccttgcttgaccatatatgacacctttccccctgcaagtttttctgtccctttcattaacctgcaggggcttgtgctgcaccacaatatactctatagatagtcacactacgaccaggtggccctttctattcatgctgcaaggaagctgctttatcaagtccttgtattgatgaatctaccagctgcgtattttcctttctctgtgatgct

SEQ ID NO: 51595 - DNA, 588 bp, Homo sapiens
  misc_feature 106: n = A,T,C or G
ccgggccccccctcggaagtcttctagaattaattaactcgggggagcacaactacatatacataaagtagaatatcttttatatgctctctaaccattcattttnatctgaaaatataaggaatagtatactcactgtgagaatgttcattttacatttaaaatttagtatgtatttgagcatttttctgatcatcagcttataccaagctaagaagcacagctttacataatttatttccctccttttccagcatagtttcttacttttcattgctgtagttatgatttttacaagttttttatcagaaatcttctgtgagattattcttcatatatattttttacttatttgattttatatgttcctcctctcacctcacttaaatacatgaagttttatttttagacgtcttagccactcctatgctgcttttcttgttgtgcttctaaatatagtgaccagttttggagctctcccagtttccattctttgtgttcattgaattgatttcatgatctggccatattgtttattggagagagccagaatattttcccttactcagcacatcatgacccctgagt

SEQ ID NO: 51596 - DNA, 405 bp, Homo sapiens
  misc_feature 40: n = A,T,C or G
agactgggatacccgggccccccctcggaagtcttctagnaattaattaacgcggggagcgggatatcaaatctgacagtgctacttcaagatctgctgctaccctatatacaaaggaccttcattaggctactacaatttcattgccattatcatgttcgtgagaaagcagaccgaccgagcagctgactgctgggacctgtagctggttcctgtacagcgaagccttgttgtgatggtgcctgctgatagaatgatttgaccttctgggtcattgtccacacattaagtgtatccatgtccttaggatgggccgatagctagtgagcctgtggacgaatcagtcaagagagcacttttacttagacacctaaacatataccttgagcttcttgtcctgtgcta

SEQ ID NO: 51597 - DNA, 496 bp, Homo sapiens
gccccccctcgaggtacttctagaattaattaacgcggggatctttaaagtttacataatgctgtagtttgctgtgaatttgaatgccttataaactaaagtattattggcttaacaatcaaatctaaagaataaggagaagttgctgagcaaatattaaaatggatattcaacgcaagttgtggcatatgtttctacaaacagctagagtttatattaacattcgccaaaaagattgaaggacataaagtattgggaaagttcactaacttaattcatttcttttactaatgaaaggttattatgtcttcaaatgggatttagagattattaatagatatagcaatgggaatgagcttatgataagtgagatgattcaagaaaaaatctctatatatttcttgccaagaaaaaatacatttgtctttttcttcatgtgctacttttaattactttaagttctttctgaacatacatgtattattaataattccta

SEQ ID NO: 51598 - DNA, 431 bp, Homo sapiens
  misc_feature 13, 15, 28, 34, 35, 47: n = A,T,C or G
ggccccccctggngnagtaccttctagnaattannattaacgcgggnatgggcttgaaaaataaaaagattttaaaatctcagtgcgaaatagtcataaaatattaatagatagttttgaagaaaataattactaacgatcaataaacatatgaaaatataattaatttgactatttgccagaaaaatgaaattttaagaaatagtaagataatttcatgcaatctatttgcttaaaagtgagaaaaaatgacaccttggtgccggaaaggattgggggaaaaggcacttgcatactttgcccgtgggaacaggaataaccgcaactgttttggaaagtgatccggcaatatccattaaaaagttaaaatgcgcataccctttggccctacaatctcatttctcagaatctactctaaaaaaaaaaaaaaa

SEQ ID NO: 51599 - DNA, 515 bp, Homo sapiens
cccccctgcgaaagtactgtctaaaattaattaacgcgggaggtagctgaaagcgccaggcatggtggctcacgtctgtaatcccagcacttggggaggccgaagcaggtgaattacttgaggccaggcatttaagaccaacctgggtaccagggcaagatcccatctccttaaaaaaaaaaaaaaaaaaaagctgaagactaagtttagtattcaaattgctttactttgttgctctcttctatttacccatcaaatctgatggtaactaaaaatttcctgttacacttttctgtatttcatgaaggacactataaactatggtagttacataagtacggattcccaatgatctaagagtatgcctttcataaatgtcaaaggtatactatttgtataaacagtatttgtgttgtatttttaatctggtggttgtaaacagtatttgaagtgtatgtgtaatctggtggttgatttacatttgttttttttttttggtagtgaacccaaattac

SEQ ID NO: 51600 - DNA, 594 bp, Homo sapiens
  misc_feature 14, 27: n = A,T,C or G
gggccccccctcgngggtacttctagnattaattaacgcggggcgtgtcaaataatacatgacgatcttcaattctcaaacgtatgcccagtcctgacaccatcaccactaaacacacattcacacacacacatacgtatccataagtacatttttcttgtaacttccaggttaagatttggttcaataaagcagatctggtatagctagtgtatcacttatggattggggcttttatttctctttttaaattcatggaattttataactttgtgggaaagtaagttttgtttctttcagccttttcattgcatgagaatacagtgtctcaggaaggttaattgacttcatttgagtcatacaaacatggatccacttaataataaatctgcttatacaactcagatgccttgatttttttaaaaaaaatctttatttgttttagaattttttaaatttacggaaatactgagacaatactatggagttcccatatacactgtacccagtttcttcattattcacattgtacatttgtgtggtgcacttattgcaattaatgggcccatattgataaatggtcattaactgaag

SEQ ID NO: 51601 - DNA, 538 bp, Homo sapiens
  misc_feature 12: n = A,T,C or G
gccccccctcgnaaatacttctagaattaattaacgcggggtccatgccactttctgtgacatttccttagaaaatcaaatatttttgaaaaattctagtgctattaccgttaacttttctttagacataaaaagccttatgctcaaggttcagatctgaaaatttgcttagttatcacatttttgtaagcacacattttaaaaaatttatgataaatattaagctaggttgtcctggaaaaaaattaacttcacacatattcaggttctgtctgtgtataaaatattgcactggttcttgttttaagagatgataaaatcagatttacaaattgggtgtaaattttaagatagtctaaagggaagaaaggttcataaaatatcagtcaggaacagagttacaaagaatgcagactggaatttagtttttatatttggcacaaaataatgaaattgtattcttattgaatgacttgagaccaataccatttcatctgttcgttttttaaactatatatatttccaaaaaaaaaaaaaa

SEQ ID NO: 51602 - DNA, 494 bp, Homo sapiens
  misc_feature 23, 36: n = A,T,C or G
tgggtacccgggccccccctcgngggtacttctagnattaattaacgcgggcttactgttgaagatataaatctgaactcagattatcacagacataacactcgttaaaggcatctggactgccttagttacattatttttatcagtcacattatttgaacattaaactagaaaagattacagaacttggtatggctgtggtcaaatttattttaatgtattattctaacagctttcaggtaaataattgattgctcatagaacagattgattgtacaatgctatcatatctacaaaaagatatattggaaacatctacataaataaaaaagaacactgaacatagttcttgcaaaagacaaccttggcaaattattctccagaaaactgatgatgttttctgctgggaaaaacaggaattctcattgctacagttctcttgggaattagatacagtaacatcacataagtgtcattcatctaaaaaaaaaaaa

SEQ ID NO: 51603 - DNA, 594 bp, Homo sapiens
  misc_feature 24, 54: n = A,T,C or G
gccccccctcggaagtcttctagnattaattaacgcgggtcctataataataangaaaaaaatagaactggatatttaaaaactccccacaaagaaatgcccaggcccagatagcttcactgtttaattctaccaaacattagaaaataattaatatcaattcttcataaactcttccaaaaaacagaagaggaggataaatattctaactcattacataaggccaatattactctgataccaaaactagacaaagatatcacaagaaaactacagaccaacatctcttatgagtatagatgcaaaaattctccacaaaattacaagcaaaccaaacccaacaacctatataaaaggattacacaacattcacgatcaagtagcatttatcacagcaatgtgaagttggtttgacaaccaaaaatccattaattagttatactacagtcataaaatttggggaaaaatataagtatctcaacagataaaagtaacacatttgagaaaattcaacaccatctcataagaacacttaacaagttacaaataaaagagaactttcacaaactaccaaagggcctctaaagaaccctg

SEQ ID NO: 51604 - DNA, 560 bp, Homo sapiens
cccccctcgaaagtcttctagaattaattaacgcggggcgcttaaaagtctttctgattcttagaagtggcaactgatttgtgtgatagggggtgtgtgtccaatatttaccccaaaaagctgtaagcgagaaaaataaaaaccaactgacagggtagctgtgcagggtcctggaaatagaaggctgtgccgggatgaggggaatccggctgggactcactcagctcgagctgcataagtgctgggctcagtctgaacaactgcccataagctgggctcactttgaacaactggggctgcccaagagctctgattttcaacggcaagggaacatcaaactatccagacactttttctatgactacagagtacttttaaaattttctttcttagaaaatcattttttttcatgtcatagattactaaaaactgaatgaaagctttttaaaagccagcttccctcaattcccactctaaggaccaagacaaatgagaacattctaaaaatccttaaaaccccaccaagcagcctgtgttggctctactctgttttttttttt

SEQ ID NO: 51605 - DNA, 514 bp, Homo sapiens
ccgggccccccctcggaagtcttctagaattaattaacgcgggccatagcagaaggactacatccataattctttctaagatgcgcttttctgtactttgggccacatgtgaggctgctatggtaaatgctcttaagattcttagaagtccaactgtctagttgagaaagtctactaggtgctgccttaaatcttatagaagttttaataagggatcttggctgggcacagtggctcacacctgtgatcccaacactttgggaggccgaggcgggtggatcacctgaggtcaggggttcgaaaccagcctggccaacatggcgaaaccccgtgtctactaaaaatacaaaaattagctgggcatggtggcacatgcctataatcccaggactcaggaaactgaggcaggagaatcgcttgaacccaggaggcaaagttttcagtgagccaagttcatgccactgcactccagcctgggcaacagagtgagactccatctcaaaaaaaaaaaaaa

SEQ ID NO: 51606 - DNA, 617 bp, Homo sapiens
  misc_feature 584: n = A,T,C or G
cgggccccccctcgaaagtcttctagaattaattaacgcgggaggatctcttgagcacaggagtttgaggctgcagtaagctatgatggaaccactgtactccagcctgggtgacagagtcagactctgtcctctgaaaaactaataacaaaaaaaaaacccctaaaaataacacatgattcaacttcaacaataagcaataaaatgaagtaagtaccttcaaagcttctgccagtatctcaggtttatgcttccatttctgtttgatgcagataagattatactcaatgaaagatgtcaagaagaaatagtcagagaaaggatatttgtacgttaaaatccaatgacttgtccatgaacagatatttacaagtatgcgtttcagaatctggtaagaaaacaaaggtaggcaaggtgggaaaagattggtgtggaagtgtgtggcactggttatcaataccacagcatttccagtgtgctgtgtcagctagaagctgttgttctcactcttcaatgtgcatcagtatcctccgggttaggggtattttgaaaaaacaaagatgcttgagtcttacccaagagtntaaagttcaactgtgcaaggactgggcccagct

SEQ ID NO: 51607 - DNA, 428 bp, Homo sapiens
ccgggccccccctcgaaagtcttctagaattaattaacgcgggcccatttcatttttaatgattttacactgatttcaacaagttctctattgtccagcaggatatttataaccttacccttccactcactctctacagaggcctattcagccttggaatgcagcaatacatttcactttgaagtttgcgttcaactttgaaattttcaaccaccatccttttagaaaattatatatacatagatatcaaaatattaagagagacataaatatacacagacacatgaagacacatgtatgtatatatatgtgcacatattatgttccaaatttaatgtaggtgtggcaaacattaacgcagtcagtctgctttttcagtgcctcagaaacttctcccaaagtaaagccctcagaaaaaaaaaaaaaaa

SEQ ID NO: 51608 - DNA, 618 bp, Homo sapiens
  misc_feature 40, 605: n = A,T,C or G
agactggggtaccgggcccccccctcggggtacttctagnattaattaacgcgggagctgtttcataataccaagcattttatctttaatgcgataaaaatctggcaaaataagtcatctataaatgtgtgtgaaatttttataaatccatttacaagatccatgtagtatatgcatcctcatcatatttaaatggagaaaaggtctattaatttatgcccctcccatatgctcattttgtcaaaagtacaaaaaaagtaggaaaaacaatggaagttttcttttacactttatttttagatgagaaaacccttttttcacattggctaatgacatcaaatatgcctcacaggttacacattccagatgatccttgaaatataaaatgctattaattcatgaaataatggatagtcccattttgaatctccaactttctgcattttaaaagtttaaagattgtgagttagcttgagagctatcactccacatatcatcactctaaactggtagtcccactacatgtttttttcttgttagttttgttttgtttatttatgacacatgagtgagctgagattggttttagtttgtgaatggctganaaacaatcaaaag

SEQ ID NO: 51609 - DNA, 607 bp, Homo sapiens
  misc_feature 37: n = A,T,C or G
ctggggtaccgggcccccccctcggggtacttctagnattaattaacgccgggtcctcaaaatattaatatatcgtatgtacacaatagctctgaaacacatatttgtgaaaataaaagagtatatagcttaaatacaagcaattaaattattttcctactagaacttaagataatcacatgtgctcaggttctttataaaaaagaaatattgtatatcaaaataaatttcaaaatcaagtgatttttgtctttatttttctttttaataaatcatgtccaatcattctgtaagacccagtgtatctatctttacctaggttccagcaaagtctttgactcttaagcctctagtgtttgagttgattttggaagcgtagcagtggatgtctactgcaaccaagatgggaacacaagactcatggaaagacagagcgccttgctcaacttgcccttttaggtttacaggcactgcgtgactgccagcataagacaaccggaagcatgaggaattgataatttgtgtagctttgtcgaatcttctaaatcacaggtttttatttttctgtgttcttattatggtttgtgttcacaataattgttttcat

SEQ ID NO: 51610 - DNA, 581 bp, Homo sapiens
gggccccccctcgaaagtcttctagaattaattaacgcgggacctagcataactccccagatgagtttaggcttttaggaagaaagaatccagaaaatgcataatctttaggcaaattcttctttggccatacaacatgaactcctctaagaagaaaacctaaagacctggtgaccaccttggagccaggaagcaaaatgacaggagaaataagacacatattaatctctcaccatcttggttcaacactggtttcagaatgtagaacatgggagttttctctgaagttcgtgctgacacttctttcacacttttaaaagtcatcttttcagtcactcactaaaatccagtcatgttaaatggcagtctacacagttttagtaatttctggcctatcttatagcccatatatatctttcattggcacatgcagtatgattcttcccacaacagagatctcaaatgatggagttgcaatgcacaccagcacagatcttgaggggcccaaacacaccaagataataatatgttaattatatttggtctggaatctagaatagatttttttgattcatagaatt

SEQ ID NO: 51611 - DNA, 471 bp, Homo sapiens
  misc_feature 23, 36: n = A,T,C or G
tgggtaccgggcccccccctcgngggtacttctagnattaattaacgcgggtgcctgtttcttgaattagatggtgtctaagttagatttaggtgcataaacacagtcttttctattgtgaggctgaagtcttctcttcttccatcagggtctcctccccacttttacgatcaaagacatctttacgggttccggttcattctgaggtgataataatcagatgctaattttatgcaagttctgcagagaaacagatgagatgtctctactgcactaaatgtctcttgacactctgcttagctctgtgttcctatcattgttgaaaacattcactgaaaaactgtccccatggaccattctgttactgtcaagcagcacccaaagaaaatcaattaatcagaagatctgaagttacaggtttctctaggtagtttctgttgataattcactaggagaaaaaaaaaaaaaaaa

SEQ ID NO: 51612 - DNA, 604 bp, Homo sapiens
cgggccccccctcggaagtcttctagaattaattaacgcggggttgtatgaaacctgcctttttcctatgtatgtttgtgataattccaagtaatttacatgcatatgttatcctttttaatggctgtttagtactttgcataggtataccatagttcatttaattgacatacaagataattagattgtttttatttttactatgtttgagaggagtatttctgcacctttacggatttgagtgagcatcacttaacatgtttttatcagagatcttactgtagccgtcagtagtagtgcagtcagtgatttctgttattgcctgtaagctaatttgttagcctaacacttcaatttgctatgatctgaggaactgaaagctaaggcctaaaattttatatgtgctaagtgtcgaataataggtcaaagctgcattcttccacaagtaaagataatatggggcttaacacaattgctttagcaatgtgattttctcccctttttctctacttggtaaggagggcttatacccccactaagcaggcacatgcctgtaatcccagctactcaggaggctgaggcaggagaatcacttgaacctgag

SEQ ID NO: 51613 - DNA, 582 bp, Homo sapiens
cgggcccccccctcggaagtcttctagaattaattaacgcgggacagatgtggaaaccgaggcctagagagggtcagggacttgcctgaggtgaccccggcggcctctgggcattttgaggtttattctcgcatagctccctcacctcatcagcttgtggggagccgatcagagatagctgtggtcccctgggcagcttcctgttggcctgtcttagaattttgctatatttggggggtgtgaagagtggatatagatgtgttaaaactgtttaaagtggagaaggaggaccgggcctggtggttcatgactgtggtcccaacgctttgggaggctgaggcaggaggatagcttgagcctgggaggttgaggctgcagtgattgcaccactgcactccagcctgggcgacaagagtgaaaccctgtcttgaaaaaaaaaaaaagtggggccgggcatggtggctcacacctataatcccagaactttggaggctgaggtgggtagatcacttgagatcaagagttcgagaccagcgtggccaacatggtaaaaccccgtctctactaaaaatatgaaaattg

SEQ ID NO: 51614 - DNA, 592 bp, Homo sapiens
  misc_feature 16, 29: n = A,T,C or G
cggggccccccctcgnaaatacttctagnattaattaacgcgggtctctatttaaatggaatgccatatttataaaagtaatagcttgcaagagattgtcagtggcattcaaatcagaatctaaaatatatttctttcattaaatatttgcacaaagttgttatatatttatataggtcattccctgggacgttttatacattgtcatttaaaaatattcattcttaaagagatacaatagaaacatgctttatgtatacattccaggtgcatgcttgtatagtactgtgctgtatccattatctgcttttgaggctgtagctgttatttatagtgttacagttactgtacattaatttgttcttgattttagcttttccaactgtccattttcattatcaaggagagaatctggctcacagataaaatttctcacccccataagtaaaataaaaatgaactctccaaagttaaagtaacaatgaaagaaacaaattgtagcaatggaagtaatggatttagatgaacaatgtttgtattagttgatggccttcacaagatttttaccaatatgaaagttcaataattcaag

SEQ ID NO: 51615 - DNA, 523 bp, Homo sapiens
  misc_feature 23: n = A,T,C or G
gccccccctcggggatcttctanaattaattaacgcgggcagagataaagggatacattatgtatgatagttttaattcaccagaaagatataaaaatcctaaatgtgtaagcaacaaacagcagagttgaaaaataacataaagcaaaaatggataaaaataaaagaaaaaataggcaaatacatgcttatagttggagacttctttacccttctctcaacaataaatacaacaattagaaaaaaaattagcaaaatgtaaaggatttaaaatatcatcaacaaacagaatctaattgacatctgtagaatactacactccaccatagcagaatgcacattcttctctactacacacaaaatatacatcaagatatactatttattgagccgtaagaaaattagcaattttttggaaaattaataacgtgcacattgctttctctttccacaagggactgaaactgaatatcagttacagaaagataacaatatttcaaaattaaacaatatatttttaaat

SEQ ID NO: 51616 - DNA, 546 bp, Homo sapiens
cgggccccccctcggaagtcttctagaattaattaacgcgggctacttttatagctagcatatacattttagtttacatttttccaggaatatttgtgttcctctatatttgatatatatataaacctatagttctgcaaagcaattaaaacagcaattttatttaagaagtcttatagtgtaatttattgaaatattccagagctaggaaatatttccaattcacataatgagaaataaaagtttttttctcaattatagaaacacaaaacatacagagattcatatttgcttttacaacttcatagtcaaagtgaacacaaaacacaaaaatcactccagttgagatttcaaaatgctgtctcttttccagtgtgacatgatattgcatcaacacaaatgactggggagcagattccttgtcacctcttgtctgccagagaagagatctgtattgcttcaagacagagatggtagattagccagacaatgaagccacattctcagccattactagggaaatggccatgaggaagccagattaga

SEQ ID NO: 51617 - DNA, 532 bp, Homo sapiens
cgggccccccctcggaagtcttctagaattaattaacgcgggggagaaagaggggaaagaaacagtcgtctcagttttctaaaatgtcagaataccagagaggacattctacctctcagcttggtttatctgtttcaaccaaatcatagatacctgacagcccatgcctatttttcattcagccttgtttaagagtcaccttctccccattctatagaataggccagccactgtttaagctattctggctaaattcctaggaagaggcaaggattctacaagttacccaatgagtgcccaggtctcacaaacccacccagagggtcagcagcatgcagcaactttcagcacagcatggtttataaagaatgtccacttttgttttatgtctcagcataatctgaatattttgtttgaagccaagatttctcttctcttttcctccccttcccactcccttccatgagagagagtgacatcagtacataacagtgccattagctcaaattacttgaaattaaatgccaaaaca

SEQ ID NO: 51618 - DNA, 406 bp, Homo sapiens
ccgggccccccctcggaagtcttctagaattaattaatgatttcatgtttagtttttaaaacctaattgttggcattttaaaaatattatctcttaatgagcatacaaaaataggaacaacacaggaacttacttcatataatacatttccttataaaacggtagagtattatttattttttaaaaactctaccttgatcatcattgttgtcatagaaatactaatactttgtattgttattatggctgctattttatcttgtatcaagcctaaggaaggttgtagcatagcatttcagcacattctagagcaaaaaactgtcctaaatgtaatacaaaatagaatgaaataattgttaaagaagtataaacaaagttctaggccaggccaaaaaaaaaaaaaaaa

SEQ ID NO: 51619 - DNA, 587 bp, Homo sapiens
  misc_feature 572: n = A,T,C or G
ccgggccccccctcggaagtcttctagaattaattaacgcgggcatgcaaattgaatactcaagtgatagaaaagaaaaaaaaggtagaaatgagacagtccaccctgaaagccataccttcaaggaccccacatgttttgttcctgtgtcactttatgaatcaccaatatcttaagaatcatataatcctggaatacagcggcagctttaccacgttcccaggtgaataaaatgataactccatgttctgatgattcaaagtggttccatctgagcagaccaagaaagacccggcagcataacaccaggtgactcccaggtttaaagatttatctgaatttgttctacagccctactgggagaggttccctgtacttcttcctccagtttgcctaatggtagaagatggccaaatgtaattacatttacattttattatgaagtcagtgagtcactaaaagtcgatgctagaaggtacgttttatagtttttcattatgttttgtgtgcttcattgcctttagggtcatatttttgttgggggaggagttataagtaaggaattcttattntgcagaggacatacc

SEQ ID NO: 51620 - DNA, 462 bp, Homo sapiens
  misc_feature 16, 29: n = A,T,C or G
ccgggccccccctcgnaaatacttctagnattaattaacgcgggggacctatcaggactagcttcaggttcatggtgaattttccagttaatacttcattttccagtggtgtcagataaatgaggtacagctatatttttgaaagattacctgtttggcatttaacatcattcctctgggattttaccctgttttgaatggaaggtagccttttttgaaagaagatgagccacttttgtaaatttagtatgaaacattttgagctcctcaagaaatttctttataatttctaaataaatgggacctaattaaactaaaaagcttctgcacaccaaaagaaataatcagcagagtaaacagacaacccaccgagagaaaatattcacaaactatgcatttgataaaggactaaaatccagaatccacaaggaatgcaaacaaatcaacaaaaaaaaaaaaaaa

SEQ ID NO: 51621 - DNA, 377 bp, Homo sapiens
acttctagaattaattaacgcgggggaaaaatctgatttaccagaaatgatttcatgtacaccagttgtgaagttccagtgtcccacctttataatatcctatttataaaccttatttatattgcatgtctaggtggggctagacattgctcggaaattagtgttaatagaaggagtaaaattatagattgtggtttgggtgtgtgtccaaaaaaaactgttactctaaacgtgtaccttgaagttggtctagctaagcatttggttataaattcttacatccagaatattgaatttagtactatttatgtagtcctcagttgtgatgggcagacagttgaaccttgtacaccatatttagaaaaaaaaaaaaaaaa

SEQ ID NO: 51622 - DNA, 616 bp, Homo sapiens
  misc_feature 33: n = A,T,C or G
gtaccgggcccccccctcggaaatacttctagnattaattaaccggggatgttcataatgatatctaaggtgtaattatttcatgaaataccaattgcattaatagattaaataatgtctgtttctgttttgttagtaatttcattgtatcgtaatttaaaaaaaattagtaaatagttactatatataattctcaacataaatatatttttcaatcatgttggataattaaaagtctgtgtaacagttgtgacatttacagtaatgtttcttctcattgtcatataaaaaatattaattctgggaatttaatgtgaagttatcaattgtcccaatttatagctatctgtattacttgtaagtctgattaccactttttatattgccatttattttatatctttataatagattataatagattaccatttattttatatctttgcaaatattgatcctagctgaattacccatgataaaaagctgctaataaaaagtggtctcgcagcagatttctttttcagtgacattgtttaagttattgtaatttttaaattgtcctgtataggccaggcacagtggctcatgcctgtaatccagcagtttggaagctgac

SEQ ID NO: 51623 - DNA, 303 bp, Homo sapiens
tcttctagaattaattaacgcggggttactcaaatttaaaatgtttcactagtaaactgaatttaacgaattctctttcatagagaatgttgtgttatttttacttattggtgaaaacctagctggtgcagatgaacaggaatcgaacctattatcagtaaaattagattccttttacaatttggccatttattttagctttattatttaatctcatttttacaaagttatgcaatagtatattggaaaaatatattgctttgaaagtgtgaagtatttaaaatttcttaaataaatatatag

SEQ ID NO: 51624 - DNA, 306 bp, Homo sapiens
  misc_feature 32, 49, 55, 147, 269: n = A,T,C or G
gtaccgggcccccccctcgaggatcttctagnaattaattaacattttncgtttnagtaaacatctttgatgtctggacttacctaaggagctctcttagtaccatagtaatacatgccttgaaacccaccttgtagtattggtggnatagaactaaattatagggaaatcatgttataaatagcgttcattctgttatgtgtttgcaaacttgagttaatttagtatatatagatatttcaagggaaaaaatgctattcataacattntaggccaaagtattaaataataatagttcagtagtca

SEQ ID NO: 51625 - DNA, 328 bp, Homo sapiens
  misc_feature 28: n = A,T,C or G
cgggcccccccctcggagtacttctagnattaattaacgcggggggaaaaaaaaaaaacaataaaaacaaaataaaaaaaacaaaaaaaaaaaaaaaaacaaaaaaaaaaaaaaaaaaacaaaaaaaaaaaagtacaatggactcgggggcccacctccggggggggcagccttcacttttctgttggggggcccccgtggccgcccccctttgccctcttttttgaagagatttttcgccccctaccttgcctcttctctacctatcccctttggggaaatacccgctttccccagtttgtctcttgcgtgacccgccccccccgtt

SEQ ID NO: 51626 - DNA, 570 bp, Homo sapiens
ccgggccccccctcgaaagtcttctagaattaattaacgcgggtccattccactcctaactccctgttcaaagtcagtgtcttctcttgtatgaactattaaagtaatttctctttgttttcaatcatggttctttatgattcattcttcacacagcagccatataaatatattttgtcacttttcaatggcttcactggggacttaaaataaatattaaacttttcacctatggctacgaggcctgaattacttggcatctcttcatctttctggacttatgttctgcctttcttacccaatctcatgacattttcgacatctggaatttcttcactttttctatgttaacttagctcattttcatctttggctcttttgcaggtctctgcctggaatgctcttctggaatgttgcatcactcacctttcagttcaaaattaaacattgtcttctcaaatagtctttctctgatcacaagctctaaatcagtcacattttaaatttcttcaaactcaaggcattttaattatcttcatagtaggtattatattttctttattattatta

SEQ ID NO: 51627 - DNA, 384 bp, Homo sapiens
  misc_feature 37: n = A,T,C or G
ctgggttaccgggcccccccctcggggtacttctagnattaattaacgcgggatcctccttagggtgacagaatggaaacagtccctcatttagtctagccaaaatttctgtagtaaattaatttgcagactgtatttgtaaaatagtgttggagaatgtatgagtaaccttatataagtccgttatgttttattatgtttacagaaacaataaagatgtaatactaaacaaagataaaagcagaggagttgtatttcgtttaaaataatattggctgggtgtggtagctcgcacacctgttagctcaacactttgggaggccaggagtttgacattagcctgatcaacatagcaagatcctgtatctaaaaaaaaaaaaaaaa

SEQ ID NO: 51628 - DNA, 536 bp, Homo sapiens
  misc_feature 485: n = A,T,C or G
ccgggccccccctcgaaagtcttctagaattaattaacgcgggaccctgtctggcctaaaaatactgtttaaatgcaaaaattataataggtacacattttgttataatttaagaaaaaattttctttcctgttaatacctacaaagcaatatgtacatttttaaaagtcaacttatttcagaaggtttactgtgaaaacccagtttacaaatgaagaatcttaatgtacctgtacattaagaagcattagaaaaacaaccactgacaataacaataacaaaaatgataatatcagtttttgaagattgaagatgtaatttcaatctgcccttttaaaagaaaaagataatgccaatcaatacaataaaaaactgattaactggacctcatcaaaatgtgaaacttttgctccacgaaagaactgtgaaaagggcgaaaagacaagctacagactaggagaaaatatttgcaaaccagtatctangactagtatctagactatataaagaattctcaatactcaaaaaaaaaaaaa

SEQ ID NO: 51629 - DNA, 257 bp, Homo sapiens
  misc_feature 36: n = A,T,C or G
tgggtaccgggcccccccctcggagatacttctagnattaattaacgccgggggaaaaaaaaaaaaaaaaaaaaaaaaaaaaaaaaaaaaaaaaaaaaaaaaaaaaaaaaaaaaaataaacacaaaaaaagagaaaaaataaaaacgcgccctctaggccggcgtttaacacacgctctttctggaaaaaaccctggcccccccccccgggggaacccctgtggcccccctaattgtgggcgtttggcccccccccc

SEQ ID NO: 51630 - DNA, 453 bp, Homo sapiens
  misc_feature 405, 421: n = A,T,C or G
ccccctcggagtacttctataattaattaatgcgggcttgcttaaagttatacagaaaacacctgataagtttgtcattggtaaccatttctcattgttctcctgtacagtttctagatttctagttattgagagggtacaaacatccattgctctttgtcaagttgaatatttaaccctcaaacacaagacagaagaattccctttcataggaggaatagcagttaccaaatatgcaaacacctttatcaataataaatctccctcataaattaaccatgagacacaatattggcaggtcttcatattaaatagagaagagctaggtaatgccatcattgattagaccagtaggaagcagatggttaaataacacaataggaaatgtcacaatcgttttaattntattattgaaacccanactttcagtggcggtagacagattgccttcat

SEQ ID NO: 51631 - DNA, 614 bp, Homo sapiens
  misc_feature 23: n = A,T,C or G
gccccccctcgaaagtcttctanaattaattaacgcggggaatgcttgttgaattaaattttttatttctttcttagatatgcctgaagtatacaaactagctaaatgtcagtcatgtcaaacaattattgtaggtcaactgtattatctccaaatattaccaattttcttttgtttgatacaaacgtaagtggaataagtttaactgaaataaaccaacacaatttttattatagatttggtgggctaaaacttattttctaaacccaaatctgcagcttgttgctgagttcctagcctggtagtagtgctgaagccaaaacagttatcacctttctgctatgtctactgctagaattattgaactgacatccttactgcttcatttcaatccatagataaattttagggagaaaatttaaaactaacttggttgttttttgagttgcacaaatgaatataaagaagctttgaattacaggcatttcatacaaattagcaaagctttcatcttactactgtgaagcatatctagaccctgaatatgcaaaaagaaaaacgatgttatatttccttgttcttccctttgcattaatctggtcatttagttctct

SEQ ID NO: 51632 - DNA, 567 bp, Homo sapiens
  misc_feature 28, 547: n = A,T,C or G
cgggcccccccctcgaaatacttctagnattaattaacgcggggaagggacaggagcaacatatagaagacaaaatgtattgaaaggacacaaggaacaactgtgtctatcagaactgctctcaatttaagcaactggctggcagatgagtcaggggtcaccaattctaatccctggccttccactaaattttaagaccaattcctagtggaactcacgtatcctctccttgtttatcactttcatccacctgctccaatttctaatgaagaacaattctgctttttaaaaacaaattaagaagaggaaacaactgcaatgaaagcgcaagaggaacttacatatctacaggtgttaaaagcccttgtaattctgatgaagtgaatgacagtgataggctgatgagaattatgtccctaggtgccacacagtccaagatcttagcctttaatattagcattttaaaaatataaataagcagtttatggcatatacctcaaccttgaggcatatgcctcaaggcataattttggggtaaatacctaanagaaaaacagcacactgcta

SEQ ID NO: 51633 - DNA, 602 bp, Homo sapiens
  misc_feature 28: n = A,T,C or G
ccgggccccccctcggaagtcttctagnattaattaacgcgggcaatctatgattccagcccattagctagcttggatttaatggctagaagaaactatgaagctgagttactactgatatcaaatttttgacagaccctagcagaatgaaataataatgaggttcacatttgcaaaaaggtatctagtttctttcacaagaaagctgagcatcaggtgagatgcctggcatcagaatgtagaaaatttgaaatagaaaccatctttctgaggatgaggcctatgagtttgaggtgtctacaaaggtaggctaatttgtgcatataatgcccacgtggtacgcaatatctacaacactggccttatagatctaacctatatcatttttacctgactgcaagttcctttttaattttcagttttgtagttccaaatttgtttcatttacattagcaccacaactttataagagacaactttaaaattcaatatctttcacaaaaatgaaatagagctgggatagagttaaaatagcattcatgtggacaataaaatgaaactctcccagaatattatatttaaggcaaaatgtgaaattctta

SEQ ID NO: 51634 - DNA, 329 bp, Homo sapiens
  misc_feature 42: n = A,T,C or G
aagactggggtaccgggcccccccctcggaaatacttctagnattaattaacgcgggacatcatgtgatataaataatgtctctagtaatttaccagtagcacatctgtgccttaattagtagctttcctattattgaaataaaatatgtatatgtacatatacatttctccaatgttttaaaatataactgtgtagcataacataataaaatgttaaaagatgtggattttaggtcatatcccgattctgatttctatgacctgcacggcttagtcaactcattcggatgatctgaagtacaatttcgttatcaccaaaaaaaaaaaa

SEQ ID NO: 51635 - DNA, 576 bp, Homo sapiens
gccccccctcggggtacttctagaattaattaacgcgggtctgttctgttagtgcattttcttttttcttttttttttttttttgagatggagtctcgctctgtcacccaggctggagtgcagtggcgctatctcggctcactgcaagctccgcctcccgggttcaggccattctcctgcctcagcctcccgagtagctgggactgcattcgcccgccaccacgcctggctaattttttgtatttttagtagagacggggtttcaccgtgttagccaggatggtctcgatctcctgacctggtgatccgccggcctcggcctcccaaagtgctgggattacaggcatgagccaccgcgcccggcctgttagtgcattttcttaaagggcatgctgcaagttcatctactcagtgaaattctcagtggaagctgaagggctatgctatatcagcgtgaagcagtttatagagttgggtgatcctgactgctcttgaaggggaagcatttattgctccctgcctcttgtgagaatgagcttgagaatgttcaactgttgatgtgcagctctctctttt

SEQ ID NO: 51636 - DNA, 611 bp, Homo sapiens
cggggccccccctcggggtacttctagaattaattaacgcgggtgatgttagctgacttaaacacagatattaaatgacaaagctaggcttgtctagctacagttcccacagtttaaatcattacaatatacgtagtttctactctcaaggaacttaccttcttttgggaaagcaaaaggaaaacatggttggttttaacaaataaagcaatcaaaagccagatgatataacactacagaaaaagtaatggcctggcactgtgggtcacgcctgtaatcccaacactttgggaggccaaggtggttggatcacctgagatcaggagttcgagatgagcctggccaacatggtgaaatcccgtctctactaaaaatacaaaaatttgctgggcatggtggcgggcacctgtaatcccagctacttgggaggctgaggcaggagaatggcttaaaccctggaggcggaggttgcagtgagccgagatcatgccactatactccagcctgggcaaccaagcaaggtcgagcaagactccatatctacagattcaaaagaaaaagtataatatgggccatcatgaattgcaaaatgactaggcatttagagatac

SEQ ID NO: 51637 - DNA, 523 bp, Homo sapiens
  misc_feature 28, 496: n = A,T,C or G
cgggcccccccctcgaaagtcttctagnattaattaacgcgggctgtctacaggatactacagcctttagctgtcagatactcacagactacatgttcgcttcctaaaatctatgccaccttccctgccaattctacagtttctccagggtcactctgggggtaaggaagcagcatgctacaactgttcactcttgcaacactaactagaaagtctgaaatgtagttgttattcaagcaaccatgtgtgcacgagtttgtaaagggaaaattagtcattggtttaagatatatattggtaattctttgaggaaaaggaaagaattttgcacttaatgaaatataacttctgtagatagaactcaatctccttttaagcttcagcataccaattggcacaaatcaccccatgtgatagcaaaggcaaatattttcaatctattttggcattgactttcactatacaacttaagaagtgttcttaaagggaaaacatnttctcctaaagcatgtacataatgata

SEQ ID NO: 51638 - DNA, 414 bp, Homo sapiens
cgggccccccctcggaagtcttctagaattaattaacgcgggccctagaacagctgtaaatcacagagccctgaaaccacgccttcccacatgaccattgcaagtcccaaagcatcgcagtgaggcgtgccagaggccaagtccggcacacacacgccgctcagttcttcacttgctcggttttcatgatgagcagacaaggaaaggacagccaggcaactgaggagatagcagggaaggaaggaaatcatcacgaacggtggggagaactgctcacagctgatgtgtgtgtctttattttcaaagcggctgctgagtgtctggcccagtacatgtaaaagaaacaagtgattataatattttgaaatgtcagtaaaaggagagattccaaaatctccccaaaaaaaaaaaaaa

SEQ ID NO: 51639 - DNA, 500 bp, Homo sapiens
  misc_feature 24: n = A,T,C or G
gccccccctcggaagtcttctagnattaattaacgcgggtctatatagtagtaaagataggttgccaaaatttattgcttaaaaacacatttaattatttcaatactatatcacactaggtttaaccaaaaagaatgagtttctcagttataaggtatactatttatttacagtagaaaaagtcagtgtttccagccttttgaaattcatgctatacattggtccaatagagagaccaattttgcttaatcaaagtgtagctacttaagtagcacccagataaatataagtaaaatgtgtacccttaagtggattcactgagtgtggccaatccttttcaacacagatctgacagtcatgtttctcctcattgagtgtggtaggaacaacgtcattgaggaactaattcattaaatcgtgcttactaacatcagcagtgtatacattgtatgcctttttgtagttttacaatctcagaggaaaaaaaaaaaactttgagt

SEQ ID NO: 51640 - DNA, 569 bp, Homo sapiens
  misc_feature 27: n = A,T,C or G
cgggccccccctcggaagtcttctagnattaattaacgcgggttcattaatgtgtgatatgtatcaatagttcattcctttttattgctgagtagtatctcgttgtgtgaatatagctcaatttgtgtgttcattcatttgaagatgggcatttgaattgtgtccagttttcatctgttataaataagctactatgaccatttatgcacagatggtcatatgaaaatatcctttcatttctcttgagtaaatacctagacaaggatagctatgtcatatggtaggtatctgtttaacatttaagaaactgccaaattgttttgcagaatgtttgtctttatgccaaattgctttggttgattttattatggtaaactaaacttgaattactggtataagtcaattttttgaaactttgttaagatttttttgcatctgtggtcatgaaggactgtatttttattttttttaaatgtctgtctaggctgggcacagtggctcacgcccataatcccagcactttgggaggtcaacgtgggtggatcacgaggtcaggaggtcaagaccag

SEQ ID NO: 51641 - DNA, 619 bp, Homo sapiens
  misc_feature 31: n = A,T,C or G
taccgggcccccccctcgaaatacttctagnaattaattaacgcgggatcctcaacaagattaggagctaatttctcaagtgaaacctgaaggccaaaggcatgggtattatatatttataatgctgaatgaaaaaaaaatgaatgccaaccaagaattctatacctgacaaaactattcttgagaaataaagtaaaattaagacattttcagataaccaaatctgagaaagttgattactactagacattccttacaaaaaatgcaaaaaggaattatttaggttgaaatgaaaggaaactggatgtaattcacagcaatacaaagatataaatatcaccaatcgaggtaaatatatggacaatatagaagctaatatttttgtaattttgttttgtaactctaaatttgtttttgtttatgaatattaatcaatgaatgtgtcaatgaagattgcaaaaaattagaaaatacttagagatgagttaaaataaaacacaacatgtaaaaccttaatagatgtaacaaatgtagtgctcagtgggaaaattatagctgcaaatacctatatttaaaaaaaagacctcaaattagtaacccaaatgtacatcttgaggaa

SEQ ID NO: 51642 - DNA, 437 bp, Homo sapiens
  misc_feature 373, 413, 423: n = A,T,C or G
ccccctcggagtacttctagaattaattaacgcgggtagtgcttgtatgtttattgcagtactattcatgatgccaaagacatgtaatcaacctaggtgcccatcagtggggaatggaaaaatagaacatggtacatatacaccatggaataccacacagccataaaaaaagaataaaatcatgtcttttgtagcaacatggatgcagctggaggccattatccaaagtgaattaatgcaggaacagggaaccaaatactctgcacattctcactaataagttttctagaagaaaacttagcaaacacaattatagaactaaaaaacatggctaaaagaaatttttgatagttcatagacataaaaatggcanaaatagagagtggacactactagagtggggcatgaggganggatgcaggngttgaaatactaac

SEQ ID NO: 51643 - DNA, 556 bp, Homo sapiens
cccccctcgagagtcttctagaattaattaacgcgggcagaagtaaacaaatgagacattctgccaggagaacaggctgaatccggcaaactgaatgttaatagggagaaatgtgaagtattgaaattaagccttaaaaacgaatggcacaagtgagatctattatttatttatccagagcttcagtggatttgaaactcactaggaatccacacctggaaaactggagcctccactcacataaatagatattcaaagcccagggccaaggaagtggtgctgccccgttccccaccaagcggttcttttgttttgttttttgttttgagacgagtttcactcttgtcgcccaggctagagtgcaatggcatgatctcagctcactacaacctccgcctcccggtctcaagcgactctcccgcctcagcctcccaggcagccgggaccacaggtgcccgccactacgccctgctaatttttgtatttttcgtagagacggggcttcaccacgctggccaggctggtcccgaactcccgaccccaggtgatccgcccg

SEQ ID NO: 51644 - DNA, 102 bp, Homo sapiens
  misc_feature 37: n = A,T,C or G
ctggggtaccgggcccccccctcggggtacttctagnattaattaacgcgggagtatcaacagcagaggttacagcatgctctgtgttctttacagatgctg

SEQ ID NO: 51645 - DNA, 589 bp, Homo sapiens
  misc_feature 527: n = A,T,C or G
cgggccccccctcggaagtcttctagaattaattaacgcgggtcccttatgaataagatttagggtatcagcccaagagcccagagagctctaatccctccaactcagagagattacctgcctcagctactcactgaacccttggttgtggacacccaaacccctattcttagatgctccaatccatcataacatacatgaaatagccaacacacacgcacatgtgcacaattacccatacctactgcagggactgggtatccttcaggaggtgatgaaaatgttgggtaaggcactctaggcccttgaaatagtgttgatggtgaaggggctttgagaatgctacttgaaatgtttatattatgccaaacacattgattaaaactgaaaatgaaatgccaatgaaatcttcatattctcaaatatcctgaatttgggtgttgtacaaacaaaaccctgatcttctctgcctaaattttgtactttaaataatctttgaatttcaaagttttatgtctctgtagctntagatcatgagttaccttgagttctctgacaagttaatatattgttagagaaatcatttctg

SEQ ID NO: 51646 - DNA, 615 bp, Homo sapiens
ccgggccccccctcggaatacttctagaattaattaacgcggggaggtaggcacttgggtgcctttgttccagcagtcatactgctgtgaggtatatgttgttatattatccgttttatcaatctctatcctactctttctaatatctggtaatatattgtgtctgatttttctgtctttttctaaactttgaaaagcacaatcaggttgtttgcaatctctatgatttaaaaaaaatgtttgtatttatatctatacattttcattcttgcccttcactggattaacgttatagttgttgatagactgtttgatcatttttatttggtttgaggaatatttcaaattctttcatgaagtattcaaggattcagtcttcaaaggtacattcttcaatctgcaattgtgttgtttcttagtttcttcttactgattatttcaaatgctattctatcgtagtctaatgtacaaagatatattttaattattttgtatgtttgtcttttggagcttataatttgttctattttggagaacattctgttccatagatgaagatgtaaaatattattctgttaagtggaattctgtgtgacctatattaaatacagttta

SEQ ID NO: 51647 - DNA, 453 bp, Homo sapiens
cgggccccccctcgaaagtcttctagaattaattaacgcgggcccaagtgctgggattacaggtgtaagtcactgcaccaggccccttctgtgcattttttaatggtagaaggatgaacaagacagttgctgtattttaaaaggtgtcaacacaggtttctgtttcttccaggccactatatcttatgcaaaatgagaattaaaacagatgtcttgtcacgttaaatttttctctgaccttatagctcagacataactatctaataaacttccctgatatcccatgttatctatcaattgaaatattaggaggaaataaggatgttgacaagcaaatctattataagacattaatgataattgcttaagtttatgatgtcactgaatacagagatatcacatattctgtatctcacatactaacggcttatacttgccaaaaaaaaaaaaaaa

SEQ ID NO: 51648 - DNA, 487 bp, Homo sapiens
cccccctcgagagtcttctagaattaattaacgcgggcccaaggtaagaaacaaattattataatggtccacatatctctaaatgttacaaaaccatgtcctctattactttcaagattttatcactaccagtttccatcttgctttctctgattcaactgaattaactactggcctccatgcttttccttgaacatacctggaatgttgttgtttttgtctgtggtgattgttctcagatatccaatggcctcttttcctgaactctttttcttaaatgctacttttcaatatatctaacttaaccattttattttaaattgcaccctgccccagcaacattctggatctttttcagttttctcttgtatttgcttcttttgtgttgctgctctgtattctggaaaatttttcaacaaattcctcccactcttctgaagatttttttgttttaaattttatcatatattttttgggtttttctatg

SEQ ID NO: 51649 - DNA, 408 bp, Homo sapiens
  misc_feature 18, 31: n = A,T,C or G
taccgggcccccccctcnaaatacttctagnattaattaacgcgggaagtaccctaaaacttatagtattaaaaaaaaaaaaaaagctacagcaaggattaaattacaggcaacacataacctcaggggaggcactgctttgactgcactgctgcagcttttccagggcaatgattcaattataagaaaaggttcaaccctaaaacttaaagtataataaaaaaatacaaataaaaaattaaaaaaattttaaaaaagaaaagaaaaagtgattttataggtctttaaggcatttgtgaactgaaaaatatttctgtgttgtgtgtgtgttttttttttaacagcaaagcaactgagttgagtctggtaggagatattagaaagattattgggtaaattattagtatc

SEQ ID NO: 51650 - DNA, 513 bp, Homo sapiens
cgggcccccccctcggggtacttctagaattaattaacgcgggaaccatgcatcttgactttgaagttaaatgtatttccctgtgacttcatattgggaacagcttttattaaattcaattacttttccctctggtctgctccataaaggtgcactcatagagaaggatggctcttagcagaaatatttccactggaaaagatggtgatcaagtgggttcagtcactaaaaagagttagtcctttataagcaaaatgccagatgagagggtgtgtttctggtggtcttcaagtttcaccactttctcatcagccagtaaaacaaagaagaagtaaaaatagaaggagaagggtctctttattttccattttgccttcttcttgcctgtatccctacttaagacccttactctttcccagaggggtcatctcaactcatctacagccccttggatcatgtgattattctcaagatgctcccagagttatcacttgttggcattggagaaagcct

SEQ ID NO: 51651 - DNA, 532 bp, Homo sapiens
  misc_feature 509: n = A,T,C or G
cgggtccccccctcggagtacttctagaattaattaacgcggggacagcaatgtttataataacatacagtaataatcatcattggtacttggaatggttaaatggataaaaataaagaaaaatagccaataaattttctccatcaataaatttggatggagaatcaaagttaagaattctaaaaagttatttggaaagaaggttaagatataacattatactttgatatacatacattgtacatttttaagaataatcactattagaaaagaacaaatgagtgaactcccaagccaatagagagaaaattttgagtatcaaaaacagatttcaaagtgcaaactattggttatgtaaaatagaaaagacaatattttttaaaactctaggaaggagtggggccaataaaaaatgatgaaatacataatttgtaataaaatttaaatatatcattcaatataatataggtaaacaaattgacatataaacatgttatcaaacacattanaaattaataaaaccagatgaggc

SEQ ID NO: 51652 - DNA, 585 bp, Homo sapiens
  misc_feature 65, 226: n = A,T,C or G
cgggcccccccctcggaagtcttctagaattaattaacaaaattatgaatattaaatgacaaaantaattgcaaatatcttaagcacatctggaatatatggggatctgattttgagactatgttaaaaagtttagttaaagagaaaatcataattctggtagaaatttttaaagtataaataagacattaaaatccatgcatttctcatctatctgtgagcacgngaaaaataccatctctattcagagacaagaaagaagtaagttctagtttttcagttttcaaaagtcttccccttccattgcctccatgtgtgtcttgtagaaagtaacttatttaaaggatgctgtcttcatttcttggtctctgaatttaacatttggcaaggtggtaataatgcctcagaagaatattgagccaatacagaagagaatgaagcaaaatcaaatattggtttttctaatatttgaacaaccagtggtctgtggcataaacaccagagtctacagataagatattttgctttgtttaattctagagtgagccagaaacaaaccaagagtacaggaccccatcctcacat

SEQ ID NO: 51653 - DNA, 422 bp, Homo sapiens
cccccctcgagagtcttctagaattaattaacgcgggcctctttattgttctccttccataacttcagtatcattttcttaatgcaggcacaggtctgccttgcactagatttctcctgataatacatgtatccagagttttaagagaaggccaaagggagagaaactcaaggtcaataatatctactatatctcaactagggaaagaatttcttcaggtcttggagtcctgttatctaggaatataagctacctactctggggaccaaggtacagctattatgcagataatactctgcttctccaaacatctcttttcacattcagccttctgcataggggacctcttgtgagtgttttatccactacaagttttccaatggaatcaatcatcctatcacatagctttaaaaaaaaaaaaa

SEQ ID NO: 51654 - DNA, 551 bp, Homo sapiens
cggggccccccctcgaaagtcttctagaattaattaacgcgggggacaatttaagatttaatcagatacccactgaggaatttttaaaaagtccttaagaatgaccatgtactccattttacttttcttggtaaagactctaaagtgctaaaggcagctctgttttgctttttcctcctcctcctcctattattattattactgttatttttgagaaagggtctggctctgtcacccaggctggagtgcattggtatgagcacaggctcactgtagccttgacctcctcagctcaaacagtcttcctacctcagcctcccaacgaactgggactataggcacactgtaccacatctggctattttttacatcttctgtagagatggagtctcactatgttacccaggctggtcttgagctcctgggctcaaactatccttacaccttggcctcccaaaatgatgggattataggcatgaaccacggttcccagccttgctttcacctcctaaattcaacagtcagagagtacttacccaaaaaaaaaaaaa

SEQ ID NO: 51655 - DNA, 357 bp, Homo sapiens
  misc_feature 51: n = A,T,C or G
ccgggccccccctcggaagtcttctagaattaattaacgcgggtacatatnggaaaaaaatcaacatcatttctgttgacttatattatgatgtctaaaatcaagtataaaatattaaatctaccatttgacagtacatatgaagacatgtaaaaagcagtaggaagctctcaggaaaactacattttagaagttaattccatgttccagtaacagatataaaaaatgaaaatgatgttaactttgaatgtcaagagttcacagtaaacctactaaactgcttattaaaatcttcacacatctaaagcagtaatataattcacacctctctctattctcaccaaaaaaaaaaaaaaa

SEQ ID NO: 51656 - DNA, 619 bp, Homo sapiens
  misc_feature 30: n = A,T,C or G
accgggcccccccctcggggtacttctagnattaattaacgcgggacacgacagagcaggacagtgaacaatcttcctcagaccactttatttagttcttgtgccctagagtagctggtttatctcaagtcttggagcagatttcttaatgacattttggtgaatcttcctttactgttctagtgtattttgtttcagccataataagcagagactggaagaaattacaaatatttggaaagataaaaggcaatgaaattactttgaaacccactttgtacagccctgtaagcttgaccaggcaacattttgggcaaaactgcctagatttttaaagtggatgttagaaacaggtaatatagaaaattgaagtgaatcttccctgaaattactgctaccattaccactcttctttgaagaccagtctaatgcaatttatacctcttcagcctaacactaagaggtcagagctttaaaatggcacttgtaacaaagggaagagtcaaattgttcttgtcactaattagttcagatgttatttcaaattcactttggctccgttattgactcaagaaatcaagatctgaggaaatcaactgtgagaaatgtacaaacaggg

SEQ ID NO: 51657 - DNA, 459 bp, Homo sapiens
  misc_feature 425, 439: n = A,T,C or G
gggtccgggccccccctcaagtctttgaataataaagcgctgaaagatttaaagataaaacaaaggacaggagcaaaagaagagaagcaaggttttaatgggcacatgcaatgagcagtaactcaatataatactgtttatagactctgcatttcttactcagacctcaaaacaatcccgtgtgctggatatcatcatacatactttgtggaaaagcagtctggattcaaaaaaatttaatgagttttcttaagatcatacaagtaacattctgatcctggaattgagcttcagtcatttccccccatcaatgcaagtgttatatccactctaccaaacagactctctacaagcaagtggagcttagcaaaggcataatcccccatatataggtcactgttattctttgatcatgtaaatatatnttacatctcacatntcattcactaatcacaaata

SEQ ID NO: 51658 - DNA, 620 bp, Homo sapiens
  misc_feature 24, 84: n = A,T,C or G
ccccccctcgggggtacttctagnattaattaacgcggggccatcatacttcaaatctattttaacatttggtactgtgcaaanacatattttgaaatcattattttttcatgtattttggagcattataactaatctcattaagttaaaggaataaaagaaataaatatgtgtttccatgaaaataatccataagtaatagcttttctaaaagacaatttcagttaaagaaaggcaaaagagtctcaaatagaagacatttattatttctaattattagcacattttcactgttttggtagaaatagtttcttgaaaaagagacaggcatttctatgatatctttctgtagcacgtaaaatataatttaaaaataaagtttaactggacaaaatatacacacatatgctgtaggcataccccaatgtatatttactacataacaacaagcaaattttgcatatagacagattccattatcagaaaatatattacaaatatattaagaattattattaacatattagaatgaatataatgaatatactaatcttagttcatggttacatgaactacatatgacagaagcatttatatgtaattatgtgcaaaaatacatg

SEQ ID NO: 51659 - DNA, 551 bp, Homo sapiens
  misc_feature 534: n = A,T,C or G
gccccccctcgaaagtcttctagaattaattaacgcggggtgaggacacacggggttccctctaaggacttccacaaataactggaggcccttgaagaaaagacagatgctccatcactaacacagaagaaagttttcaatgcaatggctgccaactgcatcattatttcacagagccatgtcactgcccaataactatttcctatgatctcttgattgagatgtctcacaccattcatgcagctgggccactccctctcctaattaaatacatacatgttctcagcatctttcacaattccaggatagctttacttctaaaaccgacaaagattgaaaaaaggaaaaataaaaacaaaaaaacacagatatttttcccctagtactggtgaaggtatttggcaatgagatggaaatataaactggaataatgtttccaaagaataatttaaccatcaaatcaaaagcctcaagagtgcgccagacattggccctgtaacttcatttatgggaaatgtcttaagacagacttancaagattgtcatcacag

SEQ ID NO: 51660 - DNA, 558 bp, Homo sapiens
  misc_feature 28: n = A,T,C or G
cgggcccccccctcggaatacttctagnattaattaacgcggggtaactcttaatagtagcaattgcatatttatcagtgtgaggggctgttattaatgtaactgtcaggcccaaacacatttctgcattaaatccatttagtatgtgcattattcgggctcgaatgtcaccgggacatcaaagccccgtaggcatggagagctcagtgccctgctgtggctgccgaacaggcccttgatcaataaatgtaacatgttaatgcagagcaaatagaataaaagatttctttgacaagacatgaaaaatcaccttgtggcagctggcatgtgatgccgtttctggggagacactagcaaagttgatctgacaagtaaagaggagagatgatggttgtaaggtgcttttgtttcaaacttctttcttgacctgtcaggttttgaaggcgcctcaatggctcttttttgtcatgtgaaaattgtagtcttaggtagttatgaagcagttatctcttctcaaatgtgaatgctgctgtttattgatcactagcatttgaactg

SEQ ID NO: 51661 - DNA, 633 bp, Homo sapiens
gccccccctcggaatacttctagaattaattaacgcggggatatattcaaggtatgtgtgttcatgtggacatagtttaagatgggctgcctggaaggcaagggttctaggcattcattctaaaactaccaccaggtcatcatacaaaattaagctctctgtttaaataataatgggcttttatgtcagtaacattggctaattctcttatcatcaatctaggtatccagtagttccagaataattgcatcatccacttataattctttctcttttcctctagtataaactatttatctatgagcctgtgtgagtagatcaagatacgttttatttcataaggtagtgatgagcaatttataatccaagttttgtgtcaagaagttgaaaagtaggtttaggggaatattggcaattgaccagcaatgtctgttctgcgtgcaagagatgggaaacattggctcatattctagattcttgtgatcccattcacaaacaaacccacaacacactcacattatagatatttactctacagcataagactttgttgttactgggtatcagcagattcagtttgtgaaactgagtcacactgagaaaatcacgttcagtctttgactgcttttcaac

SEQ ID NO: 51662 - DNA, 632 bp, Homo sapiens
  misc_feature 27, 40: n = A,T,C or G
gactggggtaccgggcccccccctcgngggtacttctagnattaattaacgcgggcacgtaattttaataagaagtcatcagcgttgggtaattgatcggatgctggtactatagaaagaaagggatgtagaaggttttcaaattcctatatttgaagatgtgggtgagtccccaaaatatagagaaggggtagcagttagtcaacagtaggtgaagtaaaatgactgataatcatgatgaagtgaatcaaataaaagtcactggtgtccttagagggaacatttgaaagaggctaattgctcttgctcccagctgggcttctggggagaagagactaaactcactgtggccaattccttaactcatttccccttcagtttactgttcagttgacactgcaatctagtttcttattaaatggtgactatagtgtttgaaatgtattgaacagtaataaatgtatgctcctagaagtgtgagaatttctttctaaggatcaggtcttcctcctgcatggttcccaaaaatgatatacatgaagaaaaatggaaaatagaaaagtttctctttaacattcattactgaagtgcctgatacttggttccaatagaaatggaggatataatttagt

SEQ ID NO: 51663 - DNA, 604 bp, Homo sapiens
cgggcccccccctcggggtacttctagaattaattaaccgggcttggtggtgcaagcctgtagtcccagctactcgggaggctgaggcagaattgcttgaacctgggagacagaggatgcagtgagccgagatcccaccattgcactccagcctggcgaaagagcaagactccatctcaaaaaaaaaaataaataattttaaactattactcaaaactccagtgttggagagcttattttggtaaatatactgaagatgaaatgatctaaagtaaggagaggaaagcacaataaaaataatcacgagataaattgtgctaagctaaagaaaatatttattattctacaacggaaacttgtataataaatgttaaattactattttgcccacaaccagcattcaaaattctatcctgccaccttgtgttacttatcggtgaagtatccatgtctgtcaatactttttttttttttgctgcctgttaattcctccaagcagtatgttgccacagatagcatgaaaaagatctaattcaaccaagtgaaaatagttacttactagaagaagctgggcacagtggctcacgcctgtaatcccagcact

SEQ ID NO: 51664 - DNA, 607 bp, Homo sapiens
  misc_feature 23, 36: n = A,T,C or G
tgggtacccgggccccccctcgngggtacttctagnattaattaacgcggggaacaaaagcttttttttttttttgagatagagtcttgctctgtcgcccagcctggagtgcagtggtgcgatctcagctcactgcaacctccgcctcctgggctcaagtgattctcctgcctcagcctcctaagtagctgggattacaagtgcccgcctccatgactggctaatttttgtatctttagtatagacgggactttgccatgttggccagtcttgaactcctgacctcaggtgatccacccacctcagcctcccaaaatgctgggattacaggtctgagccacggtgcccagccaacgaaaacattttgaactatggctccagctgtctcactggaaagaaacctgcactgatactggatattctctaccacatttaacaataaacattctcaaatatatggttcattccaaccataaaaatctctggcactactgtatgtcacctacttaattttatagagaagtaaacaatgtaaaaacaggtaacttttcaatactcgctattgaattaaatttacagcatgtattttattcactactttatcata

SEQ ID NO: 51665 - DNA, 608 bp, Homo sapiens
cgggccccccctcgaaagtcttctagaattaattaacgcggggcctcactttatagattaaggacaaaaaaactctaaaggtcaatctacccttatcaaagggaccttattcaaaccgtagtatataataaaaataccaaaggtaagctgtggatgaaacttttacaatgattttcaatgccttgctactctaaaatgtagcctaaattaactttcaggcatatgcttgctagttggtaagtaattaaaaacaatcaatctaatctttctggaaagaatgacttttttgaaagaatataagtatctcaatttttcaaacataccaaattaaatttcaagaaaatacaatatctatttcagatatgttaccataacaacaaaaaatccataatataaccataatactaggtgtaccttttgatggtagaattctcaaaccattttcccaagtatagaatttgtattcatggttttgacaacaaatttatactgttagttttcacaaaaataagttaatacccaactttttccttttttctcggttactaaaaatgtgtgtgaaatagcttcctcttccacacatagccacttcaccaacatcttcctga

SEQ ID NO: 51666 - DNA, 543 bp, Homo sapiens
  misc_feature 37: n = A,T,C or G
ctgggataccgggcccccccctcggggtacttctagnattaattaacgcggggcgggcacatacttgactctaacacatacaccttgaccactatagacttagttgtgcctctgaaactttttcaataccgattcacctctttgcaatattttgcactatcttgatgctacgtaattcttattaagctccaatgctctgtctcttctctcaagaacttcccaaagtttgtctgaatttctacttctagctaggagatgaatccacccatcaaaaacaacagaaaaagatggatagagtaattaaaatacattgttttaaggcatcagagaaatattaaggcatctgcatagaagggttacatctcagagaaaggaaaaacattgtgctaagtgaatggaacatattaccctgtctttctgagagattgactgatgcctaagagtcatgactcaagaagttgagatgctgagtagtaagtagctactaagaagctaagaagttcaaaacagctttttggacagtctcatgcgtttgtgaatatt

SEQ ID NO: 51667 - DNA, 565 bp, Homo sapiens
  misc_feature 550: n = A,T,C or G
cggggccccccctcggggtacttctagaattaattaacgcgggttccattaaagtattttaatgcttcattaaagctgacggatggcacacacctttgattattcaggtgctgattagttgtaaaaaacacttacaccaccaaagtgtcagctaaatagagttcacatcttacgatatgttaaggctgtgcctgcaaggaatagataaaggcagtcttaggagctctcctgggcattatttaagaatcatttttatcatcatattttgttttagtatttccattaatgtgtgcaaatttaaacgagggaaactataaaaaggcagttctttaaacttgtaaaatgtgtgaaaaataaaaaatgaaaaacaatgaaacaaagaattatttttttttattgcaagcattttaaaatacacagttggcaagtctctacttaaagcaactattttatcattaagaagtaatgttctttcttctttttatgtttaatggcaacatgaccaaaataaaatagaggtgagaaaaaaacatgattacaaaattgagtntataacatcaaaact

SEQ ID NO: 51668 - DNA, 519 bp, Homo sapiens
  misc_feature 23: n = A,T,C or G
ccccccctcggaagtcttctagnattaattaacgcggggaggctgaggcaggagaatggcgtgaacccaggaggcagagcttgcagtgagccgagatagcaccactgcagtccgacctgggcgaaagagcgagactccatctcaaaaaaaaaaaatattattgaattgtgtggactcaactatactccatgaaagaatgatctaaaacataatgttggcatgacttaacctttaaaaatggaaagtttaaaaaaaggcagagggagtgtagctcattagtacctgaagggactcactataatatatgaagctgaacttgtcactttgatttcctattctttaaatatagtataattgtttagtctaaagaatgtatgttttaattacaagtatataatatttctacctccagtgcagcatattagttagaaatttaaaccagtgcatgtaacttaatataaattaacttaaccaacttcttgaaagtactcagaaagccctaaaaaaaaaaaaaaaaag

SEQ ID NO: 51669 - DNA, 355 bp, Homo sapiens
  misc_feature 23, 25, 27, 35, 39: n = A,T,C or G
ctgggataccgggcccccccctncngngatacttntagnattaattaacgcgggatgtccaattctaacaaaaaggaattaattgtttttcccacattgcctttggcacacccaattgcattcactttcagcttcaaataaatctaggttaatgttacgtttgaagaataactttcgtttatattattgttgttgctcttgtatttaaaaaaagctatgtaagccaggtgtggtggctcacgtctgtaatcccagcaatttaggaggccaagggaggaggatcccttgagctctggagttagagatcaatctgggcaacatagtgagaccctgtctctacaaaaaaaaaaaaaaa

SEQ ID NO: 51670 - DNA, 200 bp, Homo sapiens
  misc_feature 29, 40, 193: n = A,T,C or G
aactgggttaccgggcccccccctcggangatacttctanaattaattaacgcgggatgctttcctcattatacctgatccccagcaggttgtgaagagatgagatagcgtgttgtatatataatgcatgacacaaagtaaatgcaaaattaaatgtgtttctattatttctactttagcattcttaatgctntattttc

SEQ ID NO: 51671 - DNA, 613 bp, Homo sapiens
ccgggccccccctcgaaagtcttctagaattaattaacgcgggggtattatactaaaatagcacctaactaaccactgttcacaccttctcctcttacctaccttcattttatatccaatacatttgcatgtcccccttataatctctgcttttgaatctgccattactgaacttccactattccttacttaactgaactaaatcacatagctgaactcctttgaaagcatgggctctcttgatggaatactgatagtgcagtgtgggagaggggggagtggattcaaaggtcctgcttctcatcctggggggtggggtagggcttagacaaaccctcaggtccactgacaaagacctgcagccaaaagtaactccctaaaaataaaataaaggctaatattaggacttgtttagttccctacttaaggtcttatagcttccccaccgcaaatttaaaactcagttaatataatgaaggcaactggcatcatgggtaagagtgcagaccctggaatcagaaccaatctgggattcagccccatacctgctattgatatgaccatgggcaaattaactactctgtctcagtttcctttcctgtcaaatggggat

SEQ ID NO: 51672 - DNA, 588 bp, Homo sapiens
  misc_feature 22: n = A,T,C or G
ccccccctcggggtacttctanaattaattaacgcggggtggacaaagcaaagaggaatgaaagaggcaacacattaataatgtattatttcctcaattgtctgtaagctacagaaaatctggggtatacctgaagtatatgatgtttattgtacatcggttatgcctcactaatgctttataggagtgagagagggagtaggtggaggcagatgaaggaggaagacaaagcagaaggtattctttttcttctttttgaaaatagttttaaataccccttttaaaaagaatcaccttttgaaattaaactttccagaatatactttaacatgttgttatttcacttttgataatgttccctatcttctatcttcagatagattttaacatgttatttcacttttggtaacgttatctatctcctgtcttcaggcagattttcacaagttatttcactgttgataacattacccatcttccatcctcaagacagatcttcacatctgtctacctcctatctatcttccatcttctgtataaattctgaccccagttcaagattaggtcatttcaatttagtctgaaact

SEQ ID NO: 51673 - DNA, 618 bp, Homo sapiens
  misc_feature 551: n = A,T,C or G
cccccctgcggaatacttctagaattaattaacgcgggtcacctggaggattgtcaatactctcaaggtaattttagcccctgatatcttattataatatataatatttccaatataaaataggaaaagtgacctggtaataatagctaagaaggcgctcagcaaatcccattaaaaaaaatagacaactgccagagtaccatcattttactaaggtgcttaaagaccacaatgattgttaccaatctactgaatatttctattatattcccttgggaattacatattcctcttcttcccatgaaaagaaaggggtgagctgagaaggtgtagaaacactgaaaaaaagtcgttgtcttaaccaatgagtcaatgagttacataaaattataaaaactagtgtcttcactgtgattatcctttgatgtctccttgaacagactgtccctcattgctttccaatgagggacaaagtggcaataggccaatgaactattaatatttacacctgagttatatatgcaaacaaatgctaaatattagctttattntgctatgttacattaaaggtctcttgatccttaaaactaactggcaattttgttttcccctatagca

SEQ ID NO: 51674 - DNA, 419 bp, Homo sapiens
  misc_feature 32: n = A,T,C or G
taccgggcccccccctcggaaatacttctagnattaattaacgcgggtcatgcttaaaaaaaaaaaaaaacagatgaactttccacagaggtgtcaaggttgaaatcttagttggtatatgacaatgtgtggccctcttctctaatgcctactttgtagggtggctaagtggattagggtggatcacctaaggtcaggagttccagacaagcctggccagcatggcaaaaccccgtctctactaaaaatacaaaaattagccaggcgtggtggcaggtgcctgtaatcccagctactcagaggttgaggcaggagaatcacttgaacctgggaggcagaggttgcagtgagctgagatagcaccactgcactccagcctgggcaacagagcgagactcaatctcaaaaaaaaaaaaaaa

SEQ ID NO: 51675 - DNA, 531 bp, Homo sapiens
  misc_feature 27, 40: n = A,T,C or G
gactggggtaccgggcccccccctcgngggtacttctagnattaattaacgcggggggatattgaggttaaaatgtacctactgagtaggtaatgcatttggtattaaggatccatcatatgcgtatgtcttctgagcgtaatggttcctttggagctattataggtatgccgtgaatagatattagaaataatacacaaagagtgactgaaggagatcccatattaactactgtcagactttaaacattattctaaaataagtttttaattcctagggtttaatacctctatactttgtaaactgagcacttttcaaagagagctccaaattcctacagagctgtctttaagtgagctttgatctttgcagagcacctatcttgtgtttctataattgctgtggtttaacaaggctccctagcatgtgaaggggggcaaatccttttattaaggctataaacctaactgaccatagtgacggaatgtgcagcttggtggtagcccttagctccccaaaaaaaaaaaaaaa

SEQ ID NO: 51676 - DNA, 511 bp, Homo sapiens
gggccccccctcggaagtcttctagaattaattaacgcgggggaccacatactagatagagtacaactatctatgttagtaactactggaagctaaaatatccattaatgtagaacagataattaatgtgggatataatcataatattggataccacagaagagttacattccatgttgttaaaaacaatttatggaatggttacacagtaagatagtatttatgtaaattgctaaacacaaagtaaaaatcttttagttcaaacttaaaataaaagctaaaaaacaaaaggaattggaaagcttaaaaagcagcggcctctatttgtctactttgctgtataaaatatgatacaatgctctgcatttctattttgtctttaaacttccaccgcaccaggtgcgtggctcatgtctgtaatcccagcactttgggaaataagggaccacatactagatagagtacaactatctatgttagtaactactggaagctaaatatccattaatgt

SEQ ID NO: 51677 - DNA, 585 bp, Homo sapiens
  misc_feature 28, 49, 502: n = A,T,C or G
cgggcccccccctcggggatcttctagnattaattaacgcgggcccctngactagaagaccccaaaaaggaccccatcaaaatttgaatgattccacccatcaatcactgtgctgggattccaccaacccttcacttgactggagaataaagaataaagactatgagtccactaaaatgattgtgaaatataaagataggtcttaccacatctgtaagtctttttcttctcctgtagcctgaaataaaaatagacaaagagactgggcgcggtggctcatgcctgtaatcctagcactttaggaggccaaggcgggcagatcacgaggtcaggagttgcagaccagcctgaccaacacggtgaaaccgttaagttaggaaagaacctaacttcttgattttgtattctctactgaaaatacaaaaattagccaggtgtggtggcacacacctgtaatcccagctactcaggaggctgaggcaggagaattgcttgaacctgnaagcggaggtgtagtgagctgagaaatgccgctgcactccagccctggtgacagagcgagactccatctcaaaaaaaaaaaaa

SEQ ID NO: 51678 - DNA, 449 bp, Homo sapiens
ctggggtaccgggcccccccctcggagtacttctataattaattaacgcgggcagattatcagagtaaaataaattcagatatgtatacccctcaacaagctatactttggtaagttatgttttgacagaacttgtttagtggacagaggtaggccatgttattgtcccacagggtaacctcaaatgaggtcattagccctggaagcagtgatttccaattagcccatatgtgatagagttgcaaactcttaccaaagactttattaatctctagataatttatcttctaatactttgtgcccttctttatttctttttttattgtagtggcattattcttgaacttatccattaagagttgtaactaggttccaatttgaagaagcccagatgaagcttcagattgtgtttgtatagaacaagttaagaactggcaatatgaataact

SEQ ID NO: 51679 - DNA, 378 bp, Homo sapiens
gggccccccctcgaaagtcttctagaattaattaacgcgggaatgttctattaacacaagtagatatttcgttttaaacaaaactgattttttttcctacactaatttaatctccttgcctaatgttctttagtcctccaacaggtctgcctacttaaacaatttctagtcacaggatgtggctgccacagttttatctccatctggcagaacataaccaacctgcttgagctctcagctcctgttttatagcaactaaagtttccttgttcacccgctcccccacgccacctccatgacgtgcatttctcgtaaaactacagatcagtaaacttcctcagggaacttgcagtaatgtatgacaaaaaaaaaaaaaaa

SEQ ID NO: 51680 - DNA, 469 bp, Homo sapiens
  misc_feature 26: n = A,T,C or G
ggccccccctcggaaatacttctagnattaattaacgcgggcctcgccgccattgtgccgcttcccacacgcgccccggagcctgtcccctagtgcaccacttccatctgaccagccccttgggctctccctcctgtctgccaagctacctggggctgctgttttaaaataatcatcggccgagcatggtggctcacgcctgtaatcccagcactttgtgaggccaaggcaggtggatcaagaggtcaggagttcaagaccagcctatccaagatggtgaaaccccatctctactaaaaatataaaaattagccgggagcggtggctggcgcctgtaatcccagctactcgggaggttgaggcagagaattgcttgaacccgggagacagaggttgcagtgagccaagatcatgcaactgcactccagcctgggcaatagagcgagactccatctcaaaaaaaaaaaaa

SEQ ID NO: 51681 - DNA, 394 bp, Homo sapiens
cccccctcgagagtcttctagaattaattaacgcgggcagtcgaaaggatagcaaaaatcattggcaaagttgaggcatctgactagcttaactaaatttgcaagtgtaatcattataataaatctttcttctattaatatttttgaataaacacatatttcctactataaacatatatttatgaatataaaattggaaaatattccagaacagtagctacatattaaatttgtcgtggcttataatgtacagcacacattcttctattgtctttttaaaaataaaagtgtttattatattctgtatattcagattcttacattcatttcaaaattttgcctcaagaaaaactgaatatgaactgtttcaagcggggtcccaaaaaaaaaaaaa

SEQ ID NO: 51682 - DNA, 583 bp, Homo sapiens
  misc_feature 545: n = A,T,C or G
acttctagaattaattaacgcggggcatcaaatacataaaacatgtctactttggttgtcttctcttccatttctcattatgaacttgtgcacactggtaaaaggccccacaacagtaggataaagtctaaaaatacaagaaccttagctttgttgatgaccataaagacaaacagtggtcaaatttatatgatcataattgatatgatttctattaagcatctagaataaaatatttagtaagtatctactaggtacagaatttgttaagtactttcagatatatatcttaatcattataacctttgagaaattattcctatctcagggatgaagagacagaaactcagaagttcacctcccaatgtcaaactccgagcatcatacagtttgtgttctgactgcaagtccatggggactttcttttaatggtagaattaaggactttgtaatcagttttcatgactaaaaagaactctaattctgtgaaacccaagccatgttttcacttgaatatctgacatgtacacaatgtgctgaaaatntgtttccacttgattctgacctttatagttctcaccac

SEQ ID NO: 51683 - DNA, 270 bp, Homo sapiens
accgggcccccccctcggagtacttctagtattaattaacgcgggaatgatggatacaaagtgaaaccaaccaaattgtttagtcaaggagaatgctaaatgagaccacaaagggtaggaccaacgttagacgatggttctcaaccaagagtgcacatcacaattacccaggcagctttttctaaatacagaccatctcatggccagactccctaggatagtctaggcatatgtatttttacaaagctttctcccaaaaaaaaaaaaaaa

SEQ ID NO: 51684 - DNA, 419 bp, Homo sapiens
cggaaaacacatgctggctttagtaaaagagatcattactgttaaatttgccctaaccaataaacatcagcattgtaaatggacataccatccgacccagcaattttacttgtagacatttatcctgatgaaatgttgcacgtttatacaaaataaatgtacaagaatgttcactgttgcaacacggatagcagggaaaaaaatgggaagaattaaaatgctcaataataagagattagttaaataaattatcagtaatccctatgctgaaataccagaaatagtcaaatatatctttatagcaaataaataattttacattaactaatgtttctatcgcttacagtttgtttgtttaccctacatctgcttccaggtttaaaacaaatatatatggaagctaagcccttctttgtttc

SEQ ID NO: 51685 - DNA, 269 bp, Homo sapiens
aattaacgcggggcccaggctgcacctctagggggctgatatcaacactgtggctgaaaggcaaggggggtcaagtctaaagttcagcatacttctcctttgaggagtcaacctcccgtcttccaggcaaggcatccctatgttctgggttttcctggacagtctcaactttaaattttacttctaaatgtataattacatttgacttaaaaaatactgtgccgagtagctatgctgattattggttgggaaaatatgctcaccatggc

SEQ ID NO: 51686 - DNA, 588 bp, Homo sapiens
cccccctcggaagtcttctagaattaattaacgcgggggaagtaaaataagaagtcaagaagtcaaatgtatgcaaattaaccatttttatatttattgctagatggccatatagaaaagtggtgttatttcaacagagaataagagttctccagaatgggtattgccatattcatttggagaggaaaaaagctttaccattgttaatagattttcttcatgttaattctagactggaatgtggctgaatgagtttgtgtatatgtcctttcgaaattacagatcttacaccttgtctgtaggatcttgatgaaatccactgcctttccttccattcggtttcagctggatctgtaaaccattcttgcctcctttatttccatctcttctattctccttaagataggggaaaataaagcttggtgactttggattttcttagcatgccagatagaatacatgatgatttagtgactaataaacataaggctagtagtcagtattatgctttccatttgattcatttgacattccattactaatttggcaggttattgtgcagctttgaatacattttgtataagcaca

SEQ ID NO: 51687 - DNA, 586 bp, Homo sapiens
cccccctcgaaaatactgtctataattaattaacgcggggcgcctgtgtgtgtgcacatgcatgggtcttgcccccgcccctgcaatttggatagagcaattttgggttgaaaattttttttcccctttcttaaaagtcaatttctattcacttcctgtttgtatagataaatcatcaatatgatttattgtcattatgtccctttgaatgactataattttgttttcctttgccttaaattaaaacccctaacagataatttattttcaaaattaaatatgtctgtgtatgcaaaagatgattaaatacacacacatacatatttattagttttctaaagggtctaggcatttgctacttaagttacttttttatttctttttcacattggtaaatgtgtcaactatctctgctgtaaatatacttaataagaaggctaactaggcaacctaaaatttaaatgaagatacttttaataatgaaagtgaacatgtctgtgcacttccctgtttctagatttactgtctgaactctcttcaagtgcaaaggacaccatatttcattcatgtgtttcataattataaa

SEQ ID NO: 51688 - DNA, 597 bp, Homo sapiens
  misc_feature 24: n = A,T,C or G
gccccccctcggggtacttctagnaattaattaacgcgggcatgcttgcccataacctgtgttccataagaaaccatataaaataatcccgttcttttcttttgagtagtgtcattagaaattattaataggggccaagcatggtggctcatgcccgtaacccagcactttgggaggctgaggctagaggatcacttgagctcaggagtttgagaccaacctgggcaacataatgagatcccatctctttaaaaataaataaataaataattttaaaagaagaaattattaatagacttttattagaagaagaaaaccattatatatcatgtctggatttcagttaactctctctggacctaatctactttgacaacagatggtgtataacacagggcatgtttacttgataagtaataaaaaaagatgagtatttaattatattaaaaacaatactctaggctgggagtggtgtctcatgcctgtaatcccagcactttgggaggccgaggccagtggatcacgtgaggttggagttcaacaccagcctgaccaacatggtgaaaccttgtctctactaaaaatacaaaaattagc

SEQ ID NO: 51689 - DNA, 282 bp, Homo sapiens
cgggccccccctcggaagtcttctagaattaattaacgcggggtccccataaattattaagatgatatgaaaattagaatttattataaataagacaatgttgaatcgatgcagaattaagcgtggtaggccaatgcaatagtatcgagaagaaaatagattttgtatatagtaaaactgatagatgacagatgtgtaattactaatgggtagaaatatagactagtggtttatggtgctgagacaatgggttatccatacacacacaaaaaaaaaaaaaaa

SEQ ID NO: 51690 - DNA, 600 bp, Homo sapiens
cgggccccccctcggaagtcttctagaattaattaagctgaatattttaaggatattgtaattaaattttttttagttaaaattagtaaaagcaaatttcaaatataaaataaaggaatgcatcagatgcagaatcagttgaaaatgaagatgctagtattttgatagacacagtaaaaagaaaaagaaaaacataggtcaaatagtaatgatgaggggcaattatgctttgttgtcatatcaaaacaaaaagctgcttgctcgtgtaaaaaaaattaagataataaagtggacagtgtttaggagatgtgtagtaagtttgataatttttttctcaacagtcataaaaatttgcaaacttagtcacataaaaaaattataattcaatctttaaagaaaaatgtttaaataattttttaacagaatctgagttggacaagtcataaaatggtttgaattcctgaacaaaaagagaaaatcatttttagatacaaggtaaaataaattgtgttgtttcatgggccaggcacagttgctcacacctgtaatctctgcactttggaaggataggtgggaggattgcttgaggacaggacttcc

SEQ ID NO: 51691 - DNA, 634 bp, Homo sapiens
  misc_feature 35: n = A,T,C or G
tgggtaccgggcccccccctcggggtacttctagnaattaattaacgcggggacacataaattgtggacttgatgaatacctatgtagactgatgggaaatgaatgttttaaggcataaagctttattcgctcatgcttttatgatatttactcatgtctatttattttacttcagctgctgataaatgttaatatttatctggccatttgtctgtattggtctacaaggctggcatgaattgaaactattctcttctcagcttcacaattgattgctaacgttattcaaagtgatttaatctacttccatcccaaggccttcctaaattaaaactctctgaccttttggtaccctcaaattcagtttaacaatgtatttaacattttctacataataatgatctaatttgctaacatcatgcttttttaatacgatattataatgttgtataaatactgtattacagggaagcttttccaattacttgcgtatagagaaaggtgcattttgtttaactgttagtttgttttcattttgtttagttttgttttgccaaatgcagttgaaagcaaaggtaggagtaagtattttgagcattggtcggaaattgcactaccacataaattctaagg

SEQ ID NO: 51692 - DNA, 353 bp, Homo sapiens
  misc_feature 23: n = A,T,C or G
gccccccctcggggtacttctanaattaattaacgcgggtctctgattacaagttttctcacctattaaaatagggcataataacctcaacagagcataagagtaaagaacaattttagcagtaattaatcttatcaaacagcaagctctctggttgattctttaactttggtgaatctcctctaaaacattccatagttttagaaagagtgaactagagtgaacactttggagtaggtaattaactgacataattaagccgatatccagggtcttggcttttccatcatgattaaatgaaaaccaaatctttatctcctacttatgtggcacgtcataaaaaaaaaaaaaaa

SEQ ID NO: 51693 - DNA, 521 bp, Homo sapiens
ccgggccccccctcggggtacttctagaattaattaacgcgggctgtatattatagtctactaatattcagaggccctctctggctatacattggcaatactgtatgtgagtgtatggatgttgccatctgtacatacaaatcacagtttgtatacagcatgtgcttatttctctggtcctcgtctatggttaaagactcaagacttctttattaaaaatggatcttgggcagtcgcggtggctcacgcctgtaatcccaggactttgggaggccaaggtgggtggatcacctggggtcagaagcgagaccagtctgaccaatatggtgaaaccctgtctctactaaaaatacaaaaattatccaggcatggtggtgcgcacctgtagtcccagctacttgggaagctgagacaggagaattgcttgaacccgggaggcggaggtagcagtgagccaagatcgtgccactgcacttcagcctgggtgacagagtgagactccatctcaaaaaaaaaaaaaa

SEQ ID NO: 51694 - DNA, 547 bp, Homo sapiens
cccccctcgagggtacttctagaattaattaacgcggggcatatggtatcatcacagtatctaatgatatgctacagaattaataatttacctctatagaaaaaaattataatcagttaatttgtacagttaatacattttctgagttttgactattaatttctaacataacaactatcacatatgtaagtgttttataagaccattatcacttccagcttcttccaaaatctcattttcttaactaatgtttatagtatttttgccagagtatatatcctaaaaaaggtgcccataatcaaaatgtctaaagtactggaaatatattatttaaaaaaaaaactaaatacctagctgagatttcacagataaataataaaaaatacccacaggaccaaactattgaaaaggaatgaagcaaaaaaagaagtgaggactgaagctgaagtgtgcccaaggggaaacaactgatctctcttcgactagagcttccattttaactcgaggcccgcagaattggagcaatgactacagcccaaacaaagcc

SEQ ID NO: 51695 - DNA, 500 bp, Homo sapiens
cgggccccccctcgaaagtcttctagaattaattaacgcgggtatctgcaaaatccacttgagagtgttcagtattttattgttttcttcttgtcatttctgacagtgtattgctttatgtaatgtattaaaaaccttctgaatataaaaatgtgatggaccttcttttaaaatataataatatatatcagaaataatatggtcttttaacaaaaaccatgtattttctgacaagattttttttcatatgcacagaatgttgtacgattagtggacaattctgactaatttttggccaaatcaataattgtatactccaaaattaaaggaaggcatatttctgagtaattatcaataaaaattgagaaaattgtatttaaataatcttagagaatcaagttatctgtctcatatattattttttgatgttttagttagaagaacaacagaaaataataattaagacactagggatttattataaagacaaattacaatag

SEQ ID NO: 51696 - DNA, 558 bp, Homo sapiens
  misc_feature 28, 540: n = A,T,C or G
ccgggccccccctcggggtacttctagnattaattaacgcggggttacagtgatctatgattgcatccctgaactccagcctgggtggcagagcaagaccctgcctcaaaaataaacaaacaaataaaaaaaccaattctttcacttaagtcaaagtttgaacaatagcttgttttaactttttgtttatacttggtttaaatcctaaattgagacctttcattctgagcattagttttattacaagactagaatataaacataaaggaaaatggggccactgtacaccgtatccattgcccctcttaactgaactcatccctgtgggaagactgaatctgttcataagaactgtacttcctatctgattaatatcagattaaaccttcaagaggagctcttacagagcatctggttgaatgtggtacagatgcctggtcagggttattcctgctctttaacagtttcccaagcaatccagaaagacagaaaaatattaatacggattaaagtaggttgcaggtactaatggcagcctangtaattcagaccaactgt

SEQ ID NO: 51697 - DNA, 494 bp, Homo sapiens
tgggtacacgggccccccctcagagtacttctataattaattaacgcgggcggtggctcacacctgtaatcccagcactttgggaggccaaggcgggtggatcacgagatcaagaaatcgagaccatcctggctaacacagtgaaaccccatctctactaaaaatacaaaaaattagccaggcatggtggcgggcgcctgtagtcccagctacttggggggctgaggcaggagaatggcgtgaacccagcaggtggagcttgcagtgaggagagatcacgtcactgcactccagcctgggtgacagggcaagactccgtctcaaaaaaaaaaaaagaaaagaaaacacatgtatacactgcatgtgaaagtactgttgtttaatgaagcttttcagttgtgtgtgtgcacgtaccaagtcttaatgaaaaatgtaaaatctgaggtctttcagtacagatacatgctgtctaatgaagtagccactagccacat

SEQ ID NO: 51698 - DNA, 589 bp, Homo sapiens
  misc_feature 37, 541: n = A,T,C or G
ctgggataccgggcccccccctcggaatacttctagnattaattaacgcgggtgtagcagtatactatatggtcacttagaatacttcctaaatatgctattgaatggagtcataatttagggtgatttgaaaatcaaagtaaactaatgcacagaagatctaaaatatattttatgtacaaacatatataatatgtatatgtataattaatatatatgtatatataatatatatgtatatatgtttatataaacacacaaacatgtatgttttaggtatgtattgtgtatatattctataaaatacaaatgcaaagaagaaacttaaaatacacatagtatagaatttttttgtagttcttttatcttttacctaaattatgttccattgtcctagacttgtagtttcataagtttatatgctaacggattaagcacccctcagaattaagttactgtctaatggtgggaatgtggtagctagagatagccataacctcttttcgtcattgggctgccttttagaacatatgactcctgngaataatgtcaatttaattataccctaagtgactgaagttaataaatg

SEQ ID NO: 51699 - DNA, 606 bp, Homo sapiens
ccgggccccccctcgaggtacttctagaattaattaacgcgggtataccattaatgatctctacatctatccccaatcagctaccacctctcttcctcagctgtgttatgccaggtctgaaaattaaattttaaaagtagttcctaagttttcaacattcttaaagtttttttcctggaaggacatgatgagtaacctgactgtcagcaaatgccttaggtattaaggagaacaatcataatggcaatagctaatattttttggcagagccaagtttcagtatctctttgcaactctgtgacatcatgatcatattaattcttattacaaacctatgaagtggctatccactttattttaattttataagggaaaaaacaagtccttagagagtctaagtaacttggctctggatttgaacttcaatctagctatctctataacttgacctttaaacattataccaccttatatgtcaaacttaccttgaaaaccaacaagtaaaccaaataaataaaacaataagaacaacctataataaaaagccttctcagctgggtgcagtggcttacacctgtaatcccagaattttgggatgatgaggga

SEQ ID NO: 51700 - DNA, 626 bp, Homo sapiens
  misc_feature 25, 38: n = A,T,C or G
ctggggtaccgggcccccccctcgngggtacttctagnaattaattaacgcgggggaggctgaggtgggagaatcacttgagctcaggagtttgagtccagcctgggcaacatagtgagacctcatctctaaaaaacgaaataaaaaaactgattaccataaacgtactgtataacctctaccttcagctcattgataacatgggaataagtatgaactggctatcatcaatacccttctgtggatgacgtgaggattcattaacatctactgaccagttattttttatttcctgattcctctatctcttgtagcacagtatggcaatgcttagatttattctttagagtttggtcaaaagaaagcaggtttatcaagatatttggatcctaggaagaaacagaaatagaaaaaaggttattcagagtactagacgctaaaaataatattctatgaggaatatgccccaccttcctctaatatgcagactgttgttaattattttggaatatacgctagagcttttcaatagctagagaaaattttagttgaaaataaagatctatttctactggaaatacataaaaattactgtgtggtataacatgagaagaaaaaatcaagtc

SEQ ID NO: 51701 - DNA, 464 bp, Homo sapiens
cgggccccccctcgaaagtcttctagaattaattaacgcggggacgcaactttgctcttgacttttgattgaattacaacaattaccaaattctgacagaacctgaaaatcctacctatcagataatatctattattacatattccaatcaaactttacagttgtcctgtatctttgaaaaagctagcactggtgtgatgaaaaccttaatgtgaccaatatccttttcaaaactgtttccaagtagcattgtgttcatgcaatattttaaaggttaagaaaacacccttgcaaaggttgaggtttctttacatgaagaaataacagaatatagccgggcacagtggctcaggcctgtaatcccagcactttgggaggccgaggcaggcgggtcacctgaggtcaggagttcaagaccagcctggccaacatggtgaaaccccctctctaaaaaaaaaaaaaaa

SEQ ID NO: 51702 - DNA, 524 bp, Homo sapiens
  misc_feature 27, 484: n = A,T,C or G
cgggccccccctcggaagtcttctagnattaattaatgcgggctgggattacaggcatgagccactgcgcctggcaagaaaacccatttctaaccttcattttgctacttaagaaagcctctgttattggttgagctatggctaacagaagcatctgtagtggctagaataggaaatatggactcctgaccacccctggtgtataaagtcctaagtggggtcatttccagctctaaacacaacacactcctcctccacctcttccttctctatctttgctgacagtaaattacaggcctcatcataccctataatatgatcacagatattaacatagctaaagaagcaatgtggggctgggcacggtagctcatgcctgtaatcctagcactttgggaggccgaggcgggtggatcacctgaggtcgggagttcgagaccagcccgaccaacatggagaaactctgtctctactaaaaatacanaattagctgggcgtggtggctactaatcccagctacttgg

SEQ ID NO: 51703 - DNA, 566 bp, Homo sapiens
  misc_feature 25, 38: n = A,T,C or G
ctggggtaccgggcccccccctcgngggtacttctagnattaattaacgcgggctcagggctatgagctgtcctgaatctctttccagggcaccacactgaggtgagccccacaatgtcttcacaaacattctgttctttaacttacttgtatattattctccggattctctgcgcttaccgatcaaaagcaatctgaagtaaataattaataccaataacaaatccaaattccttacacaaaaggaatacacagatttttttttaagtagatctttaccatgtttactttgcaattatcacaacattacttaaaaacttataggcctattacagggatatatttcttacactttttgcttttaccacaaaacatttttaaagcaaatacaaaaaataccagaaaactcaaataacattaatgttatataatgggccaggtgcggtagctcatgcctgtaatctcagcactttgggaggccgaggcagggtgaatcgcttgagcccaggagtttgagaccagcctgtgcaacatgatgaaactctgtctctacaaaaaaaaaaaaa

SEQ ID NO: 51704 - DNA, 390 bp, Homo sapiens
  misc_feature 37: n = A,T,C or G
ctggggtaccgggcccccccctcggggtacttctagnattaattaacgcgggtagctccattggtacaattttttgtaacattggacaagtcactttccttcctttacgtctccattggtacccgctaagtaaaaccaatatctaccatcaagtccaccatagttatcctaaagcacacaaaatattctgccatgcatatcaaaagaaaatcctcaattttagagacactagataagtatgtatctaagagtaaacattcatattgtacaaagaataaattaattcaaattctgattttaaaaaaattcctggaggatggcttgaggccaggagtttgagaccagcattggcatcatggtaagactcccatctctacaaaaaaaaaaaaa

SEQ ID NO: 51705 - DNA, 584 bp, Homo sapiens
  misc_feature 519: n = A,T,C or G
cgggccccccctcgaaagtcttctagaattaattaacgcgggcctcctaaagcagtaaactcagaaatcttgtctggcacaaggtattaaatgcctcatatttcacataaactgatggcatttccctcaacataagggatgtaacaaccactgctcacctcctcactagtgtaatatttataatacacgccaagaaagctgctatgatagtcataaccatcattcccaccactatatttccttcttttacttgtggtgatacatcttcgctttcacccatagaagctcagatcaaataaaaggtctatactccatgacctctgttgtgttcttactgaaatgagccatgtccaattcgggggtctgtagttgtcagcataaggtgataacggttgggttgtttcttcactgttcttgtggggacatggcctttcccacttagatgaaagagttaccctacagagttgaacaatatctatgtctgtctccagggttataagtcttgggtttgtgggactntacaatttctctcccctggccagcgtggtggctcatgcctataaatccagcactttgggaggctg

SEQ ID NO: 51706 - DNA, 333 bp, Homo sapiens
ccgggccccccctcggaagtcttctagaattaattaacgcggggggagtcgattaagaacatgattgtcctttagcacagcccactgtagcatctcacaatcaaacacaaaatggattttgaatcaagatgactgaccccacagtttcataaggaattttgccagcctggcttgacttactacctgcattgaattcaattcagatttcattaattccaacacattttcatggactatcttctcatagacagggacaacctggagaatataaagttaaaagaatgtgcttcccacctcttggaggctgctgtgccctcaaaaaaaaaaaaaaaa

SEQ ID NO: 51707 - DNA, 609 bp, Homo sapiens
  misc_feature 24, 503, 573: n = A,T,C or G
gccccccctcgaaagtcttctagnattaattaacgcgggcattatccacttgaatgtcttctgttgaaaagtattcatgttatttgcctattgatttgtttgagctcatcataaattctggatattagacctttgttggatgcatagtttgcagatattttctcccattctgtaggttctctgtttactctgttgatagtttcttttgctgtgcagaagctccttagtttaactaggtcccatttatcaaatcttgcttttgttgaaattgcttttggtgttgggacccttttgaatggaagacgttcaacgtagagatggggtcttgctatgttgccccagcttgtctcattgtctcctggatgaggagaatccaggtggtgctatagtgaccatggtttacagaaaagtgtaatttacatagttaaatgcattggtcaaaccttatcgtagactgggcatggtggctcacacctataatcccagcactttgggaggctcangtgagtggattgcttgagcccatgagtaatctgccctggattcataagcccagcctaggccacatggtanaaccccatctctataaaaattagaaaaaaaaaaagc

SEQ ID NO: 51708 - DNA, 467 bp, Homo sapiens
  misc_feature 28, 439: n = A,T,C or G
cgggtccccccctcggagtacttctagnattaattaacgcgggaagatcaactgagcacaggaggttcagactgcagttagccgtggtggaaagaaaggcagaaagacagaaagaaagaaaaaagaaaaatgttttcaaaatcaatcaagcctctaaaatgtgtccaattaaaatccactgatctattaaaatggaattctatctcaaaaaatataattttaagagagaccatgagagcagcatacctcctctactcaaaaaactattatgacttagagatgagccatgataaattcaaagcacagggaaaagttccatatcaaatcacatatttccaagccccttatccaaaagcaccgctgaaagaattctatttcgatcacactactaactacctgtgagaacggcaaacaccttttagttttagttcttcctttntaccaataggtggcaagatttattgcta

SEQ ID NO: 51709 - DNA, 325 bp, Homo sapiens
  misc_feature 39: n = A,T,C or G
gactggggtacccgggccccccctcggggtacttctagnattaattaacgcgggcctaacctgatgaaattccttcggttatttcaaatattagaaatgtaaccagtaaaatccccaacactgctccttcagcatcaatttcgcaccaggaaaacagaaccttgtgaaatatatctcctctcaaatcccactgtacttttccattcttattaccatgccccaagtcagaaattctgatcttccaccagattactcctatattgtcttccagttcataagccccctcttccaacaaaccttacatactgacaccaaaaaaaaaaaa

SEQ ID NO: 51710 - DNA, 547 bp, Homo sapiens
  misc_feature 453: n = A,T,C or G
gggccccccctcggaagtcttctagaattaattaacgcgggaaatcttggaaagtaagtcataagtaattgatttaatacatcttttgaaggtaaggattgattaatttatggaaaagtagagaatttgttttccagtattaaaatttaaatattatgctaattatccagaataagcaacaatgagatgacataaataattagaactagaaattttagaatggaagatagttcatgcattaaatttttttattcaaaagtataatttaggctgggcatggtggctcacacctgtaatcctgacattttgtgaggccaagacaggagaattgcctgagcccaaaggttcaagaccagcctggacaatatggcaagaccctgtctctacaaaaaataaatatataaataaactagccaaacatggtggcacacactggtagttctagctacttgngatgctgaggcaggaagatcacttaagggtaaggtagaggctgcagtgagccatattcatgcccctacacttcagcccagatgacagactgaga

SEQ ID NO: 51711 - DNA, 553 bp, Homo sapiens
  misc_feature 34, 76, 79, 80: n = A,T,C or G
ggtaccgggcccccccctcggaaatacttctagnattaattaacgcgggtactacggatcaatactataacatggnatnngaaacttgaaatcatcatgttaggtggagtcagtcacaaaacaccacatattgtatgattccatttatataaaatgtccagaatacttaaatctatggaaacagaaggtagatttgtggttgcctggggcttatgggaaggcggggagtgactgctaatgggtacagaaagtgaagaaaatgtcctaaaattgattatggttattgttgcataacttcatcaatgtaataaaaaactagtgaatcatagactttaaatgaataaatcttatggtaggtacttatatctcaataaagctattattagtttttttaaacctataagctacaacactgaataaacaaatgattaaaatttttatatttatcaagactgcaacataagatcttcccaggctaaagaggatatacacatagaccagaaataataagaaaaatattctctagttctctctttaaaaaaaaaaaaaagcg

SEQ ID NO: 51712 - DNA, 549 bp, Homo sapiens
ccccccctcggagtacttctagaattaattaacgcgggcctgccataaaatttagaggttatgagaaattcaaacacagtttacattctctccatggcactgaaacatttttgaaggcaagaaaatccttttgcttaaaaaaagtagtcatttgcctaaagaagtgacgtgtaaacaagatcctcattctaaacttgtcttccttgtgtagatatgaatatagacatttggatttaagttgtgacatgtgtatatctgtcttgaagactgacatatcctttcctctctttattcttttggttagtataagtttctttatcaatcccatggtttttattttttctttctattcgaggaacattttgaacacaggctaatgacttcagttatcctggtctatttttttcatgtcccctccagaggcacatttcagataatcacatgctctccccatttatcctactgcagcctagaatttcttgagtatcttctggagctcaagtcatttctacatcagtgtgtatgtcacttgatttgggatttattgat

SEQ ID NO: 51713 - DNA, 436 bp, Homo sapiens
ccccctcgggggtacttctagaattaattaacgcgggtaccaaacagactctctacaagcaagtggagcttagcaaaggcataatcccccatatataggtcactgttattctttgatcatgtaaatatattttacatctcacatttcattcactaatcacaaatatttatatctttaaattcatttgtcttagtttttctttgagttcctaatacgtgtcaggtactatactagagaatggtgtacatcagccaagaaaagagataaagctatattcaacatagttatgggtttctgtttgttttgcttttagaaaagtattttcgagactgagttaggtatatggtaggtaaacaatgttagtatctccctcagaaaaaagcacaaagtaatgtattatctaattatcattctactgccctaaaaaaaaaaaaaa

SEQ ID NO: 51714 - DNA, 517 bp, Homo sapiens
ccgggccccccctcggaagtcttctagaattaattaacgcggggattattttcttgaccccttcttttattcattcattcaatatttagatagccaaagaattgtaatagcctggttaatgagtttccttgtcaatctatacttctagggaaaaatcagtgaatacaggctttttcatcttttcttattttaaatgtgtttatttaaaaagtctttcttctggctgagcacagtggcccacgcctgtaatcccagcactttgggaggccaaggcaggtgaatcacaatgtcaagagttcgagatcagcctggccaatatggtgaaaccctgtctctactaaaaatacaaaaaaattggccaggcgtggtgacacacacctgtaatcacagctactcaggaggttgagggaggagaattgcttgaacctgggaagcagaggttgcagtgagccgagatcacaccactgcactccagcctgggcgacagagtgaggctccatctcaaaaaaaaaaaaaa

SEQ ID NO: 51715 - DNA, 545 bp, Homo sapiens
  misc_feature 29: n = A,T,C or G
ccgggcccccccctcggaatacttctagnattaattaacgcgggtgatgcctcctttaaagcttccatattaatttctaaatctcagttacaaagtaaatgaaaaatggttagtaagtaaagcaggaatttgaaggcagtctaattttttaaattacacttttaatttttaaaatatttaaatattaaatgttaagaagagttttgaagggaaaaatactttaaaatgtttaaaagcagactctggcccttttcctattcccttttcttattgttccctaaaaggtaccagaattattctccatgtaattccacccactttaagcctgttcataggagaatctccaacacagaatgacaatgataatcatccaatggcatgtgacaaatggcagcataatcagctgctgaaagaaagaaacatttatagatctattaacttatttgttaaatgaaccatttcttgatgagatttttcctactctctaacctgcattttcaaagttctgtaccattacatttctaaacatcccaaaaaaaaaaaaa

SEQ ID NO: 51716 - DNA, 567 bp, Homo sapiens
  misc_feature 38: n = A,T,C or G
actggggtaccgggcccccccctcggggtacttctagnattaattaacgcgggggacctacttcaacacttccaacaactctataaacagatgcgaatttctctagacaggctcagagaagttcagccagttacttgagatgaagcaccagcaagcctcagaactgagatctgaatccgctgctgagttctgcgctgtctagtattccacatccgcctgttcagtcccacgccctcgaggagcggggttctctaaggccaggtttctaaatgctgaggtctgcctcttccttcatcttcccgtttaaccacatcatttgtatccaaaatcccagcatcacccagtatgcccatttaacatacctgcacacgtactccctgcctctaaaataaaagttgaaattatataaaaattttaatacatatattaaattttaaaaaaatagtttggaaacccctgcataaaattgataacttgaaagggaacaatttcaagtaaaattctgaactagtaaaacaaaaaggaagaaatgagggatagcaagaaaatgttcttgtctccaaaaaa

SEQ ID NO: 51717 - DNA, 599 bp, Homo sapiens
  misc_feature 14, 21: n = A,T,C or G
aattaaccgcgggnacatggnaagagagtgactatatctttttcatctctcctgaactcccccaaacactgtcctttatgaaaggatttctctcttcaagatatgataatttttctatgttttggaactcaaaagagacagtcttcctatgcaattttcacagtaaattaactccatcattccagacaggtaagcataccaattggtagcagttctcatgctcatgaatcttttggtaaaaaatatctcaaatggctttcaatgtgagcattagtgttgagggtccacatcacacaactgggaaaataaatcaaaaagagaatcaaatgtagttcttactgacaagacaagtgactgggctggatggtatcacattcccttctctacataataggaattccctatgataaatcacaaagtacttgaaaattatcgtataataaggatgatacatccattaaccataaagcataaaacaaactgccaggctgggtgtggtggctcatgtctgtaattctggcactttgaaaggctgagacaggtggattgcttgaacccaggagtttgagaccaggctgggcagcatgacaaaaacctca

SEQ ID NO: 51718 - DNA, 583 bp, Homo sapiens
  misc_feature 26: n = A,T,C or G
gggccccccctcggaagtcttctagnattaattaacgcggggctctgccacagacacctttggctttggttctcttcaaccctaagcactcattccataaaatgttgcactggcctccgttgaagcatttgaagcagaaaaaaataacagaaaaccaaaatcagttcttcaaaatcaaaagcagttcttttaaaagactgctctaagactcaaactccaagctaattatcaacaactatctaaagcataaagggactttgggataattttcggtgccagtaatcacaaatgactaagaataacttattcagttagatccttgtgacagcacatatgcttgtacatatgcactggaaacagtgttttttttactctcaggttaaaatcttgaaaacagttatctaataagaatcttcacgtatctgttaaaaaagaattcagatttccaagccccttccctgaagtttcttccctgtaatttgtatgctaattattgcttctagttattattagtgtccgacagttgagagatatttctctgaaacaaatggaaagatctttctggaaaagattctaaggctca

SEQ ID NO: 51719 - DNA, 514 bp, Homo sapiens
cccccctcgagagtcttctagaattaattaacgcgggccaccaatgaaacttgtttccattgtctcctatccagtaggagacagcacatttgtcaacccattgtatattgtttaatccttgccatttgagtaactgtaaacctgggttaatgcttgcttgtagtttctattattccatattgaataattaaatctaaatctctctatgtaccatttgaagacagggtgaaaatattgtttgacggtagggtgtactaaaattagagtgatgtggtttgctttagttcctagactatgagattcatttgacactaatctaaaaaagagagaactctacttatacatatataagtgtgtgtgtgtgtatatgtgtatatatatatatatagatagatagatagatatataaatgtgtacgtgtgtgtgtatatgtatatttaccccgcacatctctcaggataactctagcctctcccaggatatgtacttattcctccccaaaaaaaaaaaaaaa

SEQ ID NO: 51720 - DNA, 381 bp, Homo sapiens
cgggccccccctcgaaagtcttctagaattaattaacgcgggctcttataattttttaaatgggagagtttttaaagtaaatagctcactttaagaaatctctcttaaagaatattctaggtccacaaaactgaaagtttagggtagagcttccacatacagttataccaaagaccttggatagtcaaaagggtcatactgcttacctggagcaggggcaacatcagcatggagtaagaggacactctttggtgttaaggcattttctgttctcctgaggccatcttcccagagacagatccttttctaaagacattgaattaagctcacagtgggcttgactgtggacacctcaaataaattatgtgataatcacacaaa

SEQ ID NO: 51721 - DNA, 611 bp, Homo sapiens
  misc_feature 583: n = A,T,C or G
cccccctcgaaatacttctagaattaattaacgcgggggtgtgttctgtaacctgatcctgaaggaactataaggtacatcgtttttttcaggctcttgtctatcttctagaatagttgtaatattctttaaaatagaaaatataattattgggataattaggatataattatttgggtaataaaagtattggaaggagattggtatcaaataactgttcatcatcctattgatatttaatagtttatttttataatcattatggaaatagtgaatactttttaaagtaatgtaattatttataataataagagaattgtcaagttgtcattgcttccctaacacagtatacaaaggaagaagaaaacgctgatccaattctatcttacattgtgactttagtattccaactagattgtaaaagacaaaaggttaaagattatctactaattcagtttcacttttgctagagtttaatatcacacatgtaatgaataaagtaatagaaaggaaggacattaggggaagtctgggggaaaataatatcttagaaattacttattaattcatgttcaattaaatntgtttttcactgatgataaaatcaagtt

SEQ ID NO: 51722 - DNA, 295 bp, Homo sapiens
  misc_feature 23: n = A,T,C or G
cccccctcggaggatacttctanattaattaacgcggggggcatttaaatctcagtgagactgggagaaaaagtcagtatattcaggtgtcttttactcaaagctaaaatcattggtaaacttttgcctattttatgtgattcttaaattttcttaagttttgaataataaggagtggttttaataataaaaatgtcacttttatttaaagttaaaaaccaaaagttagtgcttaatacaatataagggctatagtataatctttttttatattcaaattagatctatggacagc

SEQ ID NO: 51723 - DNA, 523 bp, Homo sapiens
  misc_feature 501: n = A,T,C or G
cgggcccccccctcggggtacttctagaattaattaacgcgggttctctacataagtaattgcatcagccaaaagaaagttttatttttttagtacctttttattcaaacatattagggcccagcagtctgtcaccctctttcaaaatgaacccacaggaaagagaagagtcaaaagatgtctctaatggggtaccaaattagcacatggaaaaagcaaacgtgtcttgctcattatgaattgttaatggcctgtttactgccgaagctgtcacagaaaacaagaaagtctggtaagtcaataatttatttcagactgtggaattaattaggaagacaattaaataattgtgagaaagcaaaaatatgtttggacgttttgtttttaaaactcagtggtgttttacatggtatttgggtactgtttgagagagataaaagaagttagaggcagaaagggaataaactttctaaacgtttttccactataagatgttgatanactccactttctatcaaccctt

SEQ ID NO: 51724 - DNA, 385 bp, Homo sapiens
  misc_feature 51: n = A,T,C or G
cgggcccccccctcggagtacttctagaattaattgaacgcgggggcaagnaaaaaaaattcgattcttgttaggaccaacaaagaattaatatatctttgtttgagaaataaccataatgacattgcaaagaactgtcactttggtaccaaacttctacctgtcagtagcttgcagtactttcaagagaaactgtaacttcaaataatatttaattgttaaaagggaaaaaagaaagtatgatctcaaccaaataggaaaaattcaaacaaaaccctgttttcttagggatgcttcagaaatacacaatggataacatcattttatttcacgctttttaatttgccaaattaaactttgcatgtttaacctaaaaaaaaaaaaa

SEQ ID NO: 51725 - DNA, 222 bp, Homo sapiens
  misc_feature 118, 174: n = A,T,C or G
cccccttcgaaagtcttctagaattaattaacgcgggggtgataaatcacttgtgctctgctggatgaaaaaaaatccctaaaatcaacatcaaatctcatccctttcatatggctgngagaattttccacacatcagaattgacaagttccttttaaaatccacacatcgcanaatataaattttcatactataatggatagtgattaccgcatatcatga

SEQ ID NO: 51726 - DNA, 487 bp, Homo sapiens
cgggccccccctcggaagtcttctagaattaattaatgagctcacttctgactgatccccaagaaatggatatctgccactcctccagaactctagaagttggacctggaatctggactacaccctcgagctaaagaatccaaaggctttttggcaaaatataaaacaaagttgttataagctcttccaacacaatgtatcccttatatgaatgagcctttctaggttttaactgtaccaataatcaggaaaagtaatgacataaccagattttacagatttctggtaaatgcagattatatactaattatacagttataaacatcaatagaacaataatggggtcgggtgtggtggtgtgtgcctgtggtaccagctactcagaaggctgaagtgagaggattgcttaagcacaggagttcaggactgcagtaagccatgactgccacggcactctagcctgggccacagagcaagatactgtctc

SEQ ID NO: 51727 - DNA, 637 bp, Homo sapiens
gggtaccggggccccccctcgaaagtcttctagaattaattaacgcgggttcttattataatatacccccagtagcacccgacatatagtagaatctaaaagatatttactgaatgaatactgtctattaggcagtaactgcagccaacaaaccaacctggaatataatacattacattataatattaaaatattatattatgggtagctaaggataaaaagtaaaggcacactaaaaccagaattaggcttagagaaacatctcagaattaaacttctctgtggttgaacactcagtaattcaatatgtatttatcaaaacattaaattctcaagataataatgagggctggagcagaggctcacgcctgtaatcccaacactttggaaggccaaggcaggtagattgcctgaggttgggaatttgagaccagcttggccaacatggtgaaactccgtctctactaaaaatacaaaaattagccaggcgtggtggcgtgtgcctgtaatcccatctactagggaggctgagacatgagaattgcttgaacccaggaagcagaggttgcagtgagccaagatcgtgccactgcactccagcctgggcaccagagtgagactctgtctccaaaaaaaa

SEQ ID NO: 51728 - DNA, 541 bp, Homo sapiens
cccccctcggaagtcttctagaattaattaacgcgggcgtgttcaataagtaattacggaatttaaattgagcctgtaagagggctttattctaagaattttttcttctgttgaaagcaatcattatgctttttacatctttcaccctccttttctacattttatggagctatgtatgtatttagtttataagagatgtcacaaaataaaaacagtgtttacctcttgataatcgtgggaaaatgtctttggtgaatttcacagcttatcacaattgctttggaaatgtttatgtaattatagctagataagtagagtaggcaagggttcctattagtttcagagagaaacttcaagtcttttgtgagtttgtttttatcacatcaaattcattcttatccttagccttctctgttttgtggcagagatcatggtttaacttatcagttcctcatctttcttcatcttatgcttcaacttcagtgtccctggtagaaaatttaagtcattctccaattcacatagaaaggcttttttactg

SEQ ID NO: 51729 - DNA, 526 bp, Homo sapiens
cgggcccccccctcggaagtcttctagaattaattaacgcgggactgcctggtcctctcaatgctgagacctcagcatcctccattcaccctaagaaaggaatgagaccaagaaatggcccggatgcattatgcaagatatcgcaggatgagatgacaccagtgatttacaaacccctccagcatgtagaccaataagaaattttctaaatagttttatgaatttcacaggaaatcctgagaaaacacatatagaaagaaaactacagcaaacctcacatataaataaatgctgattcgaaacttctaaataaatattaacatagaatttgggagcaaatgaaaaaatcaataaatatggaaattcatttcaatagtattacaatgattaaacaacaggatatttcgtgtattggtagattttagaaaacaatattttaactaagtataaatattaaaattcgtagataaaaatttagcacacattttggattgagctttataaatgtcatcaaaaaaaaaaaaaa

SEQ ID NO: 51730 - DNA, 581 bp, Homo sapiens
cccccctcggaagtcttctagaattaattaacgcgggggacccaagccaagtgtagtccctgccacacccatttgctttccttcccacaagctctccagtcaggccactctccctctccactactcaccctcggccaagccgcaccttgtctggcctgggttaccacagggcccttggcctctgtggctcgcatccctctccagcccacttctatcacaaaggccagtggcagcccctgtcctgcctctgcccagacctttaatggcttcccactgctcttgcagcaaaacacatgttcttcactgccacctagaatcatctcagcattgcctgcttgtccaaacccaccttctacacctctctatttctcttactggcctcccttctgttccttaaatatactaagccctcctgcaggcctgtacctgcctccagctctttatgcacctggctcactcttggtctttgggtcccagctcaaacgtcacctctttagaggggctgccttgtctacctaaataagctcctgcaaaaatgtccagccattggcacatagtaggcccccttatccatgggttca

SEQ ID NO: 51731 - DNA, 424 bp, Homo sapiens
cgggccccccctcggaagtcttctagaattaattaacgcgggatgtatttaggcttagtctgaaatagagtcagtgcatgcataatacactaggatttcaaatgagtagaaaagaactctaggaaaagtatgattcaggattgatttatggctgaaacattctgtgagaatgcatcattcacagccacttcagtaaccggtgttctctggggaaacccaaatctgatgtttaatgttaaaaggggtctattttcttctgcatgcatctgcataactactgtcagtgtcgatgagagtttcaggcacatactgagaagagaatatacacctcactacttaagtttcgcctgacttctttttttttaaataatgtcatagcaaaatgatttctctatcttgatttaaaaccagaaaaaaaaaaaaa

SEQ ID NO: 51732 - DNA, 573 bp, Homo sapiens
  misc_feature 28: n = A,T,C or G
cgggcccccccctcggggtacttctagnattaattaacgcggggtgtggcacgcttgtagtaccaattactcagcaggctgaggtggagggatcagctaagccccaggaggttgaagctgcagtgagctatgatcacaccactgcactccagcctggatgacagcatgagaccatgcctcacaaaaataaaaacatacgaaaataatatttatcataaagcaatggaagcttaactggatgaacaaagacctttctatgttaattctccattaagtacagaagacctcaataagttggttttataagttttcatagcatcaccaaagacaaagggtactaaaacatatcttggacagaaagcgatacgtacaaaaattacttcaacaatcaagtcacctatgatgtagtcagatgcacagaagaaaaatgctactattcatgatacagttctcaaggtatccaggacatatctaacctagtgtattaaacacagtgatgctatcacaattgtatataaaattgagcattcatagcttgatctgaaatacatgtacctaaaatgctaaactcat

SEQ ID NO: 51733 - DNA, 382 bp, Homo sapiens
  misc_feature 149: n = A,T,C or G
cgggccccccctcggaagtcttctagaattaattaacgcggggtggtaacatcacactcaacagtaaaagactaaagacttcccttccaagaccataaatgaaccaaaggtctcttctctcaccacttccattctacagtgtactgggngaaaagaacatgctatttaaaacaatgccgaaaaaagagaaagaaaggaacagacagacatgcttatataagcagaaagattaggaggaaaaaaacctgctaaaactaataggtatagaatatataagatgactatcataaggtgaatatacaaaaaagaaatgtatctatgcgtaagcaatagcagcttacatagcttaaagtgtttgaaaaagggacgaaaaaaaaaaaaa

SEQ ID NO: 51734 - DNA, 606 bp, Homo sapiens
  misc_feature 15, 28: n = A,T,C or G
cgggccccccctcgngggtacttctagnattaattaacgcgggctccaagacacttaaatatatttggctatgaaatttctgttgcaaatttcatggtgcacggtgtgatttgtggctactttctcatattctcatcaaaatatatccagaattgacattctaaaattaattttctgtaccttccagtttgttttatatcgatatctattttaagatctatcttagaaaacatcaagtaatgtttaaattctattctacagcccttggcattaccgcataataatcattttaactactggtggtgtactacacttcctaaagaaactgcattagggctccattctccttaccctacacataataagagagagagtacaaaacagaaaaattccctacattccagctttgcatgcagtgcaaattgccaagcacaacatgtaattcttcaagcattacttatgacagagtccaatttaaaatagataccttccccgacattcataatgaacaaaaaactggaaaaaaattgacagagaaaattatgcattttatggtttttgggaagttgaatacaaaggtaaaaaattttccaaggtaccccatga

SEQ ID NO: 51735 - DNA, 377 bp, Homo sapiens
  misc_feature 35: n = A,T,C or G
tgggtaccgggcccccccctcggggtacttctagnattaattaacgcgggacccctggtctagtcctctttctcttaaactgtgctattttaaagagtctttttgttgggtaagatgtgaatgcacattatcacataacatgtcctaatgatatctcaataagacagtttcctttcagattcagaaatcacttaacagctttacaataaaaacagataaaaagccggaacaacttcaggttctcatagacaatcaaatgagagcagcagtaactagcaggaagaaatttataagcattctaggcaaaaatagagaaaagacttatttctttcaagtttacctggacttagaagtgttaacccaaaaaaaaaaaaaaa

SEQ ID NO: 51736 - DNA, 343 bp, Homo sapiens
cgggccccccctcggaagtcttctagaattaattaacgcgggggatttgtacatttactattaaatgtgttacatatacgggttatttaatgtatattaaagtatattaagtatataggttatttagtatgattccatactaaataacatttgtttatcatcgtgaagtttttaacattaacctgcattttagattcaataaaacttaaaaggccgggtgcggtggcttacgcctgtaatcttaccactttgggaagcccaggtgggtggatcatgaggtcaggagttccagaccagcctggccaacatggtgaaaccccgtctctactaaaaaaaaaaaaaa

SEQ ID NO: 51737 - DNA, 347 bp, Homo sapiens
  misc_feature 62: n = A,T,C or G
cgggccccccctcgaaagtcttctagaattaattaacgcggggaccctgtcttctactgggnggaaaataaaccatctgattgggactatatagcctcaacttcccaccatcaaatcccaaaactatcattttctccacctttctgttgcaatatggagattgtcccttaccatcaaaagcaattccttcatctggacttagaatctttttccctagagtcttctccttaggaatcaggcaccaacaaatctctctatctctccctctctctctctctccctctccctctctctcccaggcctccttcaaactagcattattcatgtctctccaaaaaaaaaaaaaa

SEQ ID NO: 51738 - DNA, 610 bp, Homo sapiens
  misc_feature 27: n = A,T,C or G
gggccccccctcggaaatacttctagnattaattaacgcgggctatagtttagttcttcccaggaaaatggcttccatgaattgaatcattttccaatattccaagcatatgaagaccctaggatggcatcaggatcctccttcctctccaccaccatttctagacaattactcttctcttctcttgttaaacctcacctccaaccctttctcagtcattctcacttattatttattaaaacctttggcctttccttcatcttcaaatcctgtcatcaccctgaggaaacacataactgatttatcttaaattttttctgtttagatttcatcacctccttatacctagggatctcttcttagctctattttgggcactcgcttccatgaacacattctgggcatggttgtcaaatgcagctacttcactactgaaataataaatgtagtacctttaggccgggcgcggtggctcacgcctgtaatcccagcacttcgggaggcggaggcaggcagatcatgaggtcaggagatcgagaccatcctggctaacatggtgaaatcccatctctactaaaaatacaaaaaattagccaggcgtggtggcggg

SEQ ID NO: 51739 - DNA, 566 bp, Homo sapiens
cgggccccccctcggaagtcttctagaattaattaacaggggccactgggtgtaggattggggagggaacacagggagtcctagcagctgtggattttcagtggtcacagaggatgagtagaagctgagaagctggtggtcttgaaaacccttggattatacctatgttgtcgatttaggaatataggtagaggggcaggaaatagaagagataactttaccagatactcctgatgagctgaatgtcttgctttgtcctctgacttatgaagcaatgaaaggtccatgtggacctgccaaagccttcattggctgggaagtaatttcctttggttcaagttctgtgtctaccaaagaccctgctaaaaattcaaatatattactcaagacgggtaaatcattcagctgtatcacaatcatggttaataggttaacaagttatttacctagcatgtaccttagggaaaaggactatagctttcctccctccatcattaggaaaattaccaaaattccccccaaataccaaatgaatttatgtttattccaaaaaaaaaaaaaaagcg

SEQ ID NO: 51740 - DNA, 543 bp, Homo sapiens
  misc_feature 22, 35: n = A,T,C or G
tgggtaccgggcccccccctcnaaatacttctagnattaattaacgcgggtaatgaattatatgtgaagtctccatcttcacatataattaagttcttctaataggaataaaataactgcaaaaatatatccaaacagaaaaatggtacataaggtttaagcttaagccaatatatacttaaggggaaaatctaaactatatttaagattcattggccttttataatctatattctgacttagaaaggggatatggaccgttctttgaatacttacttgttttatagctaaagaggtcctcacagttatgggccacatcgtatgtaattttgaaaacattacaacatgcaaagacttcgaatgccgtatgtggttctggttgcagcatctaagaaagatatatatattttttaaatctgagaaaattttggagtggtaaaataaaatactttccagtcttagaatattaggatttaggaacataatcttcaaggtgaaattaggtaaaaggggccgggcatggtggctcatgcctgtaattct

SEQ ID NO: 51741 - DNA, 435 bp, Homo sapiens
cccccctcggaagtcttctagaattaattaacgcgggccctgtgagttaaaatagcaaatgaccatgatgaaatatttccacctgcacataaagatcttatcatatgttacagccagcttcatcacgtttaaaactggtggattttctgagagtcgttaactattaacaaaacgttctttaaaatcctctacaaagttcacagatataaaatatctctcatcaaatagctataaatatcatttgccccatcagaaaaagcaatcttccatctcttgcgttcaatcatctagatgcatcaaatataaatgttttcaattaacgagtttctgaataattgcctcatgtctacatgttttttttatgttgttgaatggtccatgtggtatatgacacatttctaaaaactgacctggctattgctaaactttaaattt

SEQ ID NO: 51742 - DNA, 585 bp, Homo sapiens
  misc_feature 46: n = A,T,C or G
ccgggccccccctcgaaagtcttctagaattaattaaggcaaacantaattggcctaaatctctggacaatacaagaaaagaaagaggtcccaattaatttgtcatttcctcctgctgcttttaggactacggcagaaaatcagtggagtagggcgtcaggttgtgggcaaatgctgtagccctgggcttaaggaatgtgcattctcccagagacatgggacacacacagagaggccacagaggtgagggccttgagagtgagggagctggagttccagctgctcagataagggagccaggccagaaaggacaggtaaggtttagagcagcagaaagacgaagacaccctaggccgtggagatccaggggcacaggcatagggcagagagaagagagccaggcccagcagcagaatgcctgagatgtgtccagtctgctgcttgcttatggttaatttgggcaactcatctaacctccaagagcctctggttcctcaactctgacataggggagtggtctttaccttacaggactgttgtggatggtaactctcctctagtaagagttaccatctgccaggcatt

SEQ ID NO: 51743 - DNA, 566 bp, Homo sapiens
  misc_feature 28: n = A,T,C or G
cgggcccccccctcggggtacttctagnattaattaacgcgggtagtgcataaagaatattgggaccatattctttgtttaatgggtatgtgtctgttccattttatcttattttacgtaaatttacgttaatcaaaacatcatgacagattttaaaaaatgaaagaggctagacttaaattcttttagttaatgtagtagattcttcatcaagaatggctctctatacagagatagcatttaaatctcatccatgtacttggctacttggttcatagctgattactatcaaagtgagcccctatcctaatttaggatagaataggtgttttgtcttccccaagagacacaaatattagatgattgcattaaatcttttcaattctatctcatatactttaaacctgctatttagatacatagaatgattttgttgcctgtccttaaaaaggcttagttcaattattccttaatttctatgacagcctgcattattaatcaggggtgtgtgtgtgtgtgaattctctgaatcaagtcctttgttgaaaataaatatgcctcctcag

SEQ ID NO: 51744 - DNA, 589 bp, Homo sapiens
  misc_feature 12, 463, 488, 529: n = A,T,C or G
ccgggccccccnctcggggtacttctagaattaattaacgcgggccactagtatatgtactgaagtcacatcagcattctttttgaaacatcagggttagctcctcctttatgggccaggcatattcatttctatgggtatctcttgcttgacatcatgagttgtgcctcccatctaaaagaagaccccaaattcactggtccctgaaccaaatttcattccatgatcaaccagcttctctatattctcactttgtttacagaatgctcttgttatttctttaccagaactaaaatatgacttcctcatgaatgtatgtcatttccactggatctcctcaaattcagggaccataaagtcaaaagatggtgtcaaccttctgccttctctacaaaatgtaatttcattattcttccatcttcatgagaaaacattctgccattctgaagattctgccatctangatgatgtcctttctctctcatccncagcatctacttcccttgttagttccttatgtgaattatanatgtgggcaactgtttcaccatcatcatgtccaacacaaattctaacattattcttgcta

SEQ ID NO: 51745 - DNA, 513 bp, Homo sapiens
ccccatcgagaatacttctagaattaattaacgcgggtatgatagaggaaatactatcatctgttgtagcacatagaaagtatgccctatttcccatgccagaaacctagcagccaacctgaatttatcttgtttcctcgccacccacattgattcaattgattactgaacacttcaatttatattttcccaatctacctactttttatccccacaactaccactcctttagcctggatgatataatttcctaactagtctcattgcatatagttctcattgcatatagttctgctccccttccaaccattcctgacacagcagccagagtgacctttctaaaacacatatgccctgctactctcctgacttagactttccacattttataatgtcatttacagattccctctctacccttttcacagtctccaccacaaactccacactgcagtcttatgcgaattcctcacattcttaaagtgcactgaaatcttagattctttgcatatg

SEQ ID NO: 51746 - DNA, 509 bp, Homo sapiens
  misc_feature 456: n = A,T,C or G
cgggccccccctcggaatacttctagaattaattaacgcgggataggcctagtgtgacctggtgttaaactaatttctctgttaagtttcctcgccctgagcaaagagtgagcctcaaaaatccaaagacattttgaaatatttaatggtaatcactctctcttccgtgatgggagaaactctgggatgtgggcccacaaatttagacatggaaggacaagaattaataagataagggcccctcaaacaggcagcgtctggaaaacatacagatcttctttcatttctggtagagactgtttcatgctattccatctgaaatgatccatcccaatttgtgtcagagttggctctttgataaaaattaatgattgatcaaaaaatgattcattacacattcaaaccaagaattctgattagcatgtgactgattggttccccttctctcccaagaanagccaggacacatgagttaaaattttgggggccacagaaagcaactacatgac

SEQ ID NO: 51747 - DNA, 411 bp, Homo sapiens
  misc_feature 28: n = A,T,C or G
cgggcccccccctcggaagtcttctagnattaattaacgcgggtccctccccttcccctcttccctctcctttctcattttacttttagcactttcaagatatagttccattctcttctggcacctattagttctaatgagatgtcagagaaaatttataatgttctgccatgaaatctgccatttttctcaggctaaatgcaagatttttgaatctgtaaatttatttcttcaaagatttttttcccttccaagctatcagtccctttttcctgggattccagtttggcacaatcatggctcattgcagccttgacctcccagattcaagcaatcctcccgtctcagcctcccaagttgggactgcaggtgcataccaacacatctggctaacaaaaaaaaaaaaaaaaa

SEQ ID NO: 51748 - DNA, 455 bp, Homo sapiens
gggccccccctcggagtacttctagaattaattaacgcgggcagccatgaagataatgatattttatacttaacaatttttagctcttagtgttcatcttcctaaacctaaatattttctacatagagtttactttactacccctctctgtatttcattaacatgttaaggctggaactgccatatccccgtgtatctgtattaacctgttttattttctatgttttgatatgttaatatcagggactttgctgactgaagccttgcttgtttctcccacggttagagatggtggccaaatctcctgagagtgtgtcttccatgcgtaaactaactaatctggaacccatatcccaactgccttctgtatcaagttcttacatgggctcctacattcaggccactatccacctgtcctacaaaaaaaattagcttggtgtggtggagtgcaactg

SEQ ID NO: 51749 - DNA, 351 bp, Homo sapiens
cggggccccccctcgaaatacttctagaattaattaacgcgggaggtggagactgcagtgagccgagatggtatcactgcactccagcctgggtgacagagtgagactgtctcaaaaaaaaaaaaaaaagtaaatattatctgtaagagttatatggatatattaattttcatgtagtagtacaaaaatcatattggtatgcagagcatagtggcagtgagattatacccaaagtaagagtcctttgtgtgatacttccttatagcattttatcaacacttcaaaaacatttaaaatctgacttcactaattccaaggttctacatattgaggcccaaaaaaaaaaaaaaa

SEQ ID NO: 51750 - DNA, 266 bp, Homo sapiens
cgggccccccctcggaagtcttctagaattaattaacgcgggtgatctagttcaataggatttttatgtcttaattatatcaccaaagaagctattttcatatggcttcacatgaacaccttatacctgaagtattttcttcaatttccaattcactacatcccatttccccctagaaacacacagcattccaaatatttctatttatcttaatttcctcccaactgcaataaacatacctatttcttccgaaaaaaaaaaaaaaa

SEQ ID NO: 51751 - DNA, 508 bp, Homo sapiens
  misc_feature 27: n = A,T,C or G
cgggccccccctcggaagtcttctagnattaattaacgcgggttattgttatgtacatcttaaaatctcagatctgaaaggaacttaatcattcatttcaatcatctttttacagactaacaaaagcattgagaaattgagtgaattaagtaatggaatttaacaccttaataaaaaatttttagaattgtttattaaatgatttttgactcctcaagatgaatgtgaaatgtagcatagcaatatttcttacccatttttctgttattttgatgtagcacacgttgagtcttttgtgtcttcccatgttgatttttaagtggttaaaaatagtataataatttgaagttatttaaggacagaaaatctttatacacaaagtaaatacattttaagaaggtggtttttggccgggcgcggtttgggaggccgaggcgggtggattgtgaggtcaggagatcgagaccatcctggctaacacagtgaaaccccgtctgtactaaaaaaa

SEQ ID NO: 51752 - DNA, 533 bp, Homo sapiens
cccccctcgagagtcttctagaattaattaacgcgggtgttaccagaatataaacaaaaatgaatttttccggttaaaaccattttacttgttagtaatatgtaactattaaccattaaataatttaccaaattattccattacgtaatccatattgctccttcttgtccacaagaatatagtaaagtacattatcaaatacatacctctgactttagtgggcatttaatgtattattagaggatcccaatatctgtctttcttaagaaaattaaactcatccctagtgattatacactttcttcatctaacactataatattaataacatttgaaaaagtaatgtcaaataattaacactagatttacagagtatttttagacagttttctaaaattatctgaaaaatttggccagaatcagtgtaaaattcacatctgagcttatggaagccaactttattccactccaaaagtacaacattttatagttttaaatttatctttaaaatggtttaacctaaaggtagtgga

SEQ ID NO: 51753 - DNA, 323 bp, Homo sapiens
  misc_feature 12: n = A,T,C or G
cgggcccccccntcggaatacttctagaattaattaaccgggttctcatgtgaatgccttcttatttcttttttctaaaacaaacaagtaacaatttctcctagaactatcttttagacttaaaagatgaaaaatactggttaaattaagtaattaaattcaaatgaaatcaagtgagaaatgatactagaggggtatttgcatgctctgagcaggagacagacatgttggcaaagagaggaagtggctttatctgtgaattctcttggcatgacaagactctttctaactgattcagactctctctgccaaaaaaaaaaaaa

SEQ ID NO: 51754 - DNA, 564 bp, Homo sapiens
  misc_feature 27: n = A,T,C or G
cgggcccccccctcgaaatacttctanaattaattaacgcgggtatgtcctactttattttacttataaaataagcactttttatcatttttgtaatgtactttccatggttccataatattccaatatacaaatccatttagcacatgcataattgccatgttttgaatccatttatggttgaagttttatttaaacattctaaatacaaatgtttagttggctttcaatagcagaggtcaagagaaaaaaaaacaaaagacaccaggtgtggtggctcatacctacaatcccacactttggaggccaaggtgagaggatcacttaatcacttaaagccaagagttcaagaccagcctgggcaacattaacaagaccctgtgtctacaaaaaataaacaaataaaccagacgtggtggcccatgcctgtagtccttgctatacaagagattgaggcaggaggatcacttgagcccagggaattgaggctgaaatgagccatgatttcacctctacactccagcctgcgctacagaacaagaccctgtcaaaaaaaaaaaaaaa

SEQ ID NO: 51755 - DNA, 446 bp, Homo sapiens
  misc_feature 28: n = A,T,C or G
ccgggccccccctcgaaagtcttctagnattaattaacgcgggacattagtgaataagcagactgaatcagactgggtacaagaaccctgctaactctgatgatctaaagttccaacgtggaaaatcaggaatagaaaatatgattaggctgggcatggtggctcacacctataatcccagcactttgggaggctgaggcgggtggatcgcttgaggttaggagttcaagaccagcctggtcaacatgatgaaaccccgtctttacttagaaaacacaaaaattagctgggcatggtggtgcatgcctgtagtcccagctacttgggaggctgaggcaggagaatggcttgaacccgggaggtggaggttgcagtgatccgagattgtgccactgcactccagcctgggtgacagggcaaggctctgtctcaaaaaaaaaaaaaaa

SEQ ID NO: 51756 - DNA, 495 bp, Homo sapiens
  misc_feature 28, 486: n = A,T,C or G
cgggcccccccctcggagtacttctagnattaattaacgcgggctcccaaaaattaatctcctgtaatctgcataacctgcattttaaaagagactattttaaatggctcctataagtttaattgcatttatatagctgactacagataagggttttgtttttgtttttgaaattcctaaaagtgtcactttacaggatgccagatcattgaggcatgcccattcttagcacaacatagaaactcactgaagctggaagggttaaaatcaaatttccacacccccatgtaaactctaccatcctgtagggtgggggacaggggaagtcttagtaataagatctctaacacaaaatgttaattcactatataatcctaaatcttacataaatgtaatttttttattggagtttttttttgggggggcaaatcatggattcacttccttttgctgatagcctcttatttattcaattcttgctaactncagtacctt

SEQ ID NO: 51757 - DNA, 556 bp, Homo sapiens
  misc_feature 534: n = A,T,C or G
cgggcccccccttcggggtacttctagaattaattaacgcggggtgggggaggaagccaaaaactccagcctcagggctgctcagtcaggctgatggctcccctatacagggagccccagggggtgaaccagaggagcagttggctgccaggggaccagaggctaagtgtctaggactcagtctaacatattctggagacagactgggaggccagcaagagacagcagacagtccatgtgagtgttagaaagccctggggctaggtcgggtgtggtggctcacgcctgtaatcccagcacttttggaggcttgaggcaggcagatcacctgaggtcgggggttcgagaccagcctgaccaacatggagaaaccccgtccctactaaaaacacaaaattagctgggcatggtggcacatgcctatgatcccagctacttgggagactgaggcaggagaatcgctcgaacccagaggcggagattacggtgagccaagatggtgccactgcactccagcctgggcaacaagagcanaactccatctcaaaaaaaaaaa

SEQ ID NO: 51758 - DNA, 600 bp, Homo sapiens
ccgggcccccccctcgaaatacttctagaattaattaacgcgggggaagggaggagggatagcattgggagatatacctaatgctagatgacacattagtgggtgcagcgcaccagcatggcacatgtatacatatgtaactaacctgcacaatgtgcacatgtaccctaaaacttagagtataataaaaaaaacaaaacaaaacaaaacaaaaataaatggttacctgaacaaatatcaaagcatcaaaaaaaaaaaaaaaaaactgtttccaaaattaatctatgcagtcagtgcagtcacaatcaaaatcctaacaaagtttttggcaaaactttataagttgatgcaaatatgtatacagaggagtaaaacgccaagaataaccagaacacttttgaagaagaaaaataagaaaggaatgtactatatcagttgacttattattccacaataaaaatgaaagataatgaggcaggcatgaaggttgcctacccaaaatccattctcccctatgaatctccaataaaactaattttattttagcaatgtaaacagttaaaatgactcacttttcagactctcttgcagatgggggcc

SEQ ID NO: 51759 - DNA, 578 bp, Homo sapiens
aattaaaaaatcaaaaacacctggggaaaaaggcgagtacctaaatcaagaacaaataaatactcataaataagattcttgttaaaattattttaccggataattgaagtgttccagtgattaagggactcgtcattttatcaaaattaagccccatacattttttttttcctttttttcttgctgagattgacttctttcgttatcttccatatccaaaaaaagatcaaatttagacaaccatatattctgattttattacagatgaagatctaactaaaatttcaagttttgctcagtaactgatggacccaaattggtatctcagaatgttcctggcatattctgctttctttgtcaattcttgcatgatagtatacctaattgactgctaatgcaggctctgttaaagtgaaatttcagtttagctttttttttttttttttgatatggtgtctcgttctgtcgtccaggctggagtgcagtggcacgatctcggcccacggcaacttctgcctcccaggttcaaacaattctcctgcctcagcctcctgagtagctgggactacaggcgaaaa

SEQ ID NO: 51760 - DNA, 573 bp, Homo sapiens
ccccccttcgaaagtcttctagaattaattaacgcgggtataaaagaaacaatgatgactccagtgtctttggtttgagcaattggagaaattcaggtggcattaagcaaggtggggaaactgttaggagcaaactaaagaatttcatttggatgtattatgtttgaagtaactattaaataccaacaaaagatgtcatttaagtagtgcatataggagtttggagtccaagggagagttacaggctagaactgtacagttgtaaatagtcatcatatagatgatatttaaagccatgagatgggatgagactaccaatagatagttcaggtacagaatggaagtccaaagacagagccacagggggaaaaaaaaggaaagttgatcaaggcaggaaccagaaaagtagaagctcttggtttaaagattactgtgactataacttgatatacagtcagtcgaataataaacattaaccccttacaacatgccatgcactattccgtaaaaagtgtgaaagtcttataacactaaattgggttaataatgaagatgacattcgataaagaaatc

SEQ ID NO: 51761 - DNA, 627 bp, Homo sapiens
  misc_feature 11, 35: n = A,T,C or G
tgggtaccggngccccccctcggggatcttctagnattaattaacgcgggcttttagtactgaggatactgttggaaggtctgggctttcaagcatcaacttaacattccccattcagtcccgacacacgctcttgctgttgtctgaccttgcagccagaacctgaagaggcctgacctctggactcttctgacatttctcaagtcgcccccaggggataagtcatgtcatgttaactagacctaagaggaaattacaggtttagcttctaaaaggcccatcactgtgacaggtcaacatttaagagtcagaagtagccttaaaggcttcatcaataatgtgaggcagtttggtctgtaacgtcagataaatggtctggatcatcatactcagtgaatcagccagttgttccagaggatggaatgggtcactacagggtactgtggttcagagctgggagtcggggtctgactgacctgcctttccatcagctcagtggaacctggtgagtctgcagttcctcatctgtataaagggacagtcatgagaaatgaaggagatagataatagttctttgcacatgtgcacactgtgagtgaatgtgagacggatgccctgtcctctgtc

SEQ ID NO: 51762 - DNA, 633 bp, Homo sapiens
  misc_feature 23, 567: n = A,T,C or G
ccccccctcggggtacttctagnattaattaacgcggggcattttccaatatgaggttttcaagtatagtctcttggaagcaatgtctttaaagaaaggcaattattttatttaactagatcagcataccgaattcccaataaaataatgtttcagaatgcctattcgtctatgtaaattgagctacaagctgatagcagctgcactgctaatgaaaaatgattcacccagtataaaagagagtgtctttttttttctgaagtgatctcacctatgctcagtgacttaaatcttgcactagacacttaggactctcatgttgtttttcctttgagattcatactaacttaagacggagtctcttgtggccacgataaattatactcatttgtaaagtgaaatttaggtatctgaaaatcaacatatctaagccttaactcattatttatttctaaaacttccctttttgtaaatttatttctatttttattgctgtcacattggcagaatacattattatcttccacttgacctcaccaaatagatttcttactggcttatctgctntatgcttatttcttttagatctttaatacacataacgttgagaattaaaactacatttgaatatgc

SEQ ID NO: 51763 - DNA, 404 bp, Homo sapiens
cgggccccccctcgaaatacttctagaattaattaacgcggggggctcacttagagaaagctttctacttaataaacaatgcattctttgatcacttccactctgattctgtcctctcaaggcatatttcataaagttcctattttcttaccctctgtcacagtattctgtgattcaagtattatacaaaggtacaatgataaatcagaaattttatttttgaaattatctttattgttacagaattttttattgaatacccgtaagatttttgtgcactcaaatcattactgcactgatacacttagaaaaaataaattagggactctgacttccttaattttacagtctagcagaggtataattgtaatgtgaagcatcgtgtgacatggcacaaggtctta

SEQ ID NO: 51764 - DNA, 625 bp, Homo sapiens
  misc_feature 34: n = A,T,C or G
ggtaccgcggccccccctcggaaatacttctagnattaattaaccggggagtaaagcttcaataaataagttatttttaaaaagctaggctttgtaaatgaaaatgaccaatggtaaattttactggagtccttatctgtaaaggagagctgttaatagtgtcactttatatgttgttattatcttaacaaaatatctattaaacattcaacagtcttgggctacagaaagcaatccgtggatgttatgtcttattcttaatagaacctgtcttctccaacttgcttcttactactttctggggttgttgacgtcaaagcagaggttgaaaagtggtaacccacatactggatctagcccttgttgtgttttgttttgcctaacactatataagtaatgaatctgaaaacatatgggtgtagcacatacttcctaggttgtcacagtccccacactgtcttttgttttgtacctggcacaggggacataggctatctgtttgataattaagacaacctattctaaaatacttgtctatcatgttttcctttgctctttcatttctctcattcccatttttaaaattcactacttattttcaagctctgtttaatatatgaagaat

SEQ ID NO: 51765 - DNA, 589 bp, Homo sapiens
  misc_feature 44: n = A,T,C or G
ccgggccccccctcgaaagtcttctagaattaattaacgcgggnaagtttacagcttataaggaaatattcttgcccttctgttaacagtgcatctgcccagtagactggaagcccaggactcctgcccctgccaagcaagttttctcatttgccaagctggaagtttaggctctctttagtgatatcaatacaaatgtttctgtcattatttacttgtttcatggacttgattcaactaacatctatttattaccctttatatgccaggccatcttcacgatactgaatattaaaagataaacaaaatgagggctatttttgcaataaatttgaagtctatatcaaaatcatgtggaaatatattaacagagaattaagtctaggttaagaacaagaaaatcctaaaaactaatttagtatattgggaggctgaagtgggaagatcacttgaggccaggagctcaagaccaatcagtctgggcaacatagccagactgtatctctacaaaaaataaataaaaaaaaatagctgggtgtgatggcatacacctgtagtcccagctactcaggaggctgaggtgagagga

SEQ ID NO: 51766 - DNA, 587 bp, Homo sapiens
  misc_feature 27: n = A,T,C or G
cgggccccccctcgaggtacttctagnattaattaacgcgggggttcaaataaataaaagttaaaactataatgaggctgggattacaggaatttcctttccttttattctcagaaatcttaacagcatgattatatatttatattcatatatttaagtggaatacatgtatgatacatgtgaacccaggtaggtataggtctgaatataaccaccagtctagggatcgtatttggcataacaccatttgaaggtgtagcagtggcactctttgattaacacgatgttcattttattctgtttcttcttggtgactactgatttcatgtaattaaacttcattataaaatttatatactaccgaaagcaatctacagattcagtgcaatttctgtccaattaccagtgtcattcttcacagaataagaaaaaaacaatcctaggattcatacagaaccaaaaaagagccccaattgccaaagccatcttaagcaaaatataaagctggaggtatcacattacctgatgtaaaattatactacaaggttatagtaattgaaaacagcacagtactggtataaaagtag

SEQ ID NO: 51767 - DNA, 402 bp, Homo sapiens
ccccccctcggagtacttctagtaattaattaacgcgggcctggcaacagaggaagactccgtctcaaaaataaataaataaaataaaaagtttatagttactatatatatgtttgtttaatatacttatgatttacttcctacagaaccctcagtcagaaatgtttcctatcacatttgggattaaggaaaaaaaaagaagtagcatggtgaaacctcatctctactaaaaatacaaaaattagctgggcgtggtggcacacctgtagtcccagctattcaggaggctgaggcagaagaatcgcttgaacccgggaggcggagcttgtagtgagccaagatcacaccactgcactccagcctgcgtgacagagcaagactccgtctcaaaaaaaaaaaaaa

SEQ ID NO: 51768 - DNA, 588 bp, Homo sapiens
  misc_feature 550: n = A,T,C or G
cccccctcgaaagtcttctagaattaattaaatgttaagacacagttttgattaaagaaaaaaaaaaacaacttgcataaacagtagaaaactttgagatggaaatgaaccacttgctttaatttttaaataataatgaaaagccatttattcaaacaattctgaggcatgctcacttgaactgtgtttatattaccttttcccattatttacacttttcttattcagacgcattttagaaaagcatgacaaaattaagacgagtaacacatgttaagagactaaatacaaccagctgatattcttttacaaaataaataaattctattaaattaaaaatctggctcccagagtgatacatacagaatattttggaaatccagaaaatttaaagaaaacataatacccgtcttatcccattcaccaaagattcctggtctttttttctctatgataatatatatgtagattaaatttttacatagttgaattattctgaaagtagaggataatttctgaattttagtaatatagtacaagcactcccttngtgctagaaattctttataaacaagttttaatggctgc

SEQ ID NO: 51769 - DNA, 614 bp, Homo sapiens; identical to SEQ ID NO: 39929
  misc_feature 16, 29: n = A,T,C or G

SEQ ID NO: 51770 - DNA, 370 bp, Homo sapiens
aattaacggggatctcaaagactaatttcaatgctttatccacctccaggaagactggccactaaagcataactcttcaacttactggtccaggttgctgtgcacatttaagttatctcaacagtttctgtatctagtcatggtgctatgtgggatacagaaatatctttaaagactgcattttccctcaaggaccttatgtttgagatagggtaacaaggcattttattccttcattcaaaaaaatatttcctgggtgcctattatatgccagacatggtctagggcaaaaggaatatacagtaaatgagttagacaagagtccagctcttagggagcttgtattctagtgggagaaaaaaaaaaaaaa

SEQ ID NO: 51771 - DNA, 628 bp, Homo sapiens
  misc_feature 572, 586: n = A,T,C or G
cgggcccccccctcgaaagtcttctagaattaattaacgcgggccaagtgaaatcttactgaagagccttatatataaagtaggtaaaagtaaagtaattgggttgaagcagttgagggtgttggaatgctgcctgctggattccagcatgggaccctgaagttcaaagaccactggtataaggacacgcatattggtcttgggaataaaaactaagtttgagtcttggtggtggaactaacttgcttcttagctgtgcctattgaagccacctctctatgtcttaatttattcacctgcaaaattggattggactagaggtcttcaaaggctcactttcggtttcaatactcaatgtagtgatacagaataaattaaatactgcaattgagtaggacatttcactgcccaactacctcattgccttaataactcaagagaacatcctgcgactcacggtggaaacttgagtgtgacatatttgaagtattaggttggtacaaaagtaattgcagtttttgccttggatgtctttgatgcgttttgcctttgtttgcatcaactgaatactnttctttgtattggngtagaatgttggcgtgtttcttgcagttgtatgatttcacat

SEQ ID NO: 51772 - DNA, 471 bp, Homo sapiens
  misc_feature 16: n = A,T,C or G
ccgggccccccctcgngggtacttctagaattaattaacgcgggtctggggccaatgagcgccatgctgagcaaaagcaaatttcacacttaaaagtgctgtgggttttctatttttaacaaaccttcacaggttgtatttcttttattatgatttagtttatttttaaaattagaaaagtaatgggtttgactatcacaattcacatgtatatgctaacgtcaatgtgtactgtttgtctttttcctcccctatgacccttctttgtatcccctattcttttatggtcacctcattcaaaacaggtccctgttgtgtaatggtttcctcacagagatcttctgtctctgaggggagcttgttacaatacagaacataaaaggagaggtaaaataaaaggatattttaagataggatgtttttcagggaggtgaaacaacaggatgttctaagtgtaaaaaaaaaaaaaaa

SEQ ID NO: 51773 - DNA, 569 bp, Homo sapiens
  misc_feature 34: n = A,T,C or G
gggtaccgcggccccccctcggggtacttctagnattaattaacgcggggctgttccatctctatcatgctggcgcatttctttcggagcgctcgctattgacagggaggctgactatcaccatgatcagtgactgcgctgttcttattcttgagcaccctatgcaccaatgcaccccataccactcctgtgcctccgaacttacaatcaagattgaacactcaaaatttaccttcacatctctccatgggcgaaacatagtagagggatggggttgtgggagatctaccatggaatattatgcagccataataaagaattgaaataataacatttggaggaacctggatggaatcggagactatgattccaagtgaagtagactgaaggatggaaaaccaaacactggatgctgtcactcataagtggaagctacgctctgaggatgcgaacgtgtaagaatcatataatggactttgggaactcaccggtcaaggccgaagtggggagaaagataaaagactacgagtggggtacagtgtgtactgcttgggtgatgggtgcactaa

SEQ ID NO: 51774 - DNA, 534 bp, Homo sapiens
cccccctcgggaagtcttctagaattaattaaaaaatcaaatgaaattcatgtatacttacttgtcttaattgtggatgtgtcacatcagagtacgttatttatttacttagctctagagcataacaaaattccttgggacattgtaggtgcttaataaatattttgcaaacagatctgaataactgtattccagtttctccatacttaaaggctatggctttaagtatatatagctgctaataattccaacctccacctgaattcctccccctcccccaggataatcatcacagtttcttcagctatttattatatgacaaggtgtttgtcaatgtcttacctgctttattcttattttcaaatgcttacagatctttaagaaattccgtagctatcttttagtctcatagtaggtataaaactatgcattccacaaaactatgcattgctttaagagaatattgaaaaaaaaagagttgcaatcataccctatatttctaataggatgcatactagcgaaaataaaaaagac

SEQ ID NO: 51775 - DNA, 582 bp, Homo sapiens
  misc_feature 13, 26: n = A,T,C or G
ggccccccctcgngaatacttctagnattaattaacgcggggaagcctaaaactatactctaaaatgtgtataaaggttttttctctttagcctgatatatagtatgtattagtctacattgcaaagaatgttttcaaaagtaccatgagttaattatttttctgcattgtcagtctaattacgttattcatttgaaatacaattttatttggttttgtttgtacgtaattatgtggtctccccatttcttgctgattttcttttttaaaaaatatacgaaacattagcattgtcccaaaagtcagaactctacaaaaagggacatcacagtgtcatccctctcatttcctccctcctctacccatgcccactcatgtcctgtagaatctactctcattaatctcggtttatccttcctctgcttctttttgcactaaagaagagattcggccgggtgcggtggctcacgcctgtaatcccagcactttgggaggccgagatgggcggatcacgaggtcaggagatcgagaccatcctggctaacacggtgaaaccgtgtctctacccaaaaaaaaaaaaag

SEQ ID NO: 51776 - DNA, 558 bp, Homo sapiens
cgggccccccctcggaagtcttctagaattaattaacgcgggcttcacttcttttaactttactcttctagatatcctctattactgaatctactacttaccatttctggaacatgaaatgtactttgatatctatgaacatttgctgaaattgttcacaatgctcgaaatattcttccaacttcaatatctagtaagatcctgcccataacttaaggctcagctcaaatgatctctcttctataaaacttattccaaagcctcagagacaccacacactataatgagaagactaagggctttggacttgggttaaaatcccagctgtacaatataacagctgctttctgatcttcattacttaatcttgtttttctcatctataatattaagaaacatatcggataatacttgaggaaattaagtaaagatttattcaaagcacttatgaaaggtagccggcacacagaaggcattcattgaataaagaacaatgtctccagagtgggtgtgctagtaaatgtttaacaaccagttttccaaactgaaaaaaaaaaa

SEQ ID NO: 51777 - DNA, 516 bp, Homo sapiens
  misc_feature 488: n = A,T,C or G
gggccccccctcggagtacttctagaattaattaacgcgggtaccacatcatgaaattattttacaaagaacatttgaaaacactaggctatatatttttatcctcatttctccaaacacaaaactgattgaagaaaatacttaagagatttcagatgtttatatagcctattacaattaactcaaaactatattatactagggattattttgctcaataacttccgggtttttcaaatttccaaatattggttggaaagcctgctaactaaaatgactgaatgccaatatcaccacaaacttcatcagcagtgacactaatatttccatatacttgaatcatgagcttcttctctggactcttttacctaaagttttttatcttgactattgtgattcttcaggtaaacagtgtggtttttccaatgagttttcgtctcagaagtcctatgtttcccttcataagtcattattgcaagtattaattntcaaattaatattggtattttaaatgat

SEQ ID NO: 51778 - DNA, 333 bp, Homo sapiens
acttctagaattaattaacgcgggccttgtattatgttctcctgcattaaagaatgagaaagctttctcaagatgctatggctactaaaaggtagtatctgctttcaccaaggccctacgttattgaacaatttctgtgagagaaacttatcattgtacaaaaaactgttaagatttgggggtaaattaatcactgcagcataacttagaacacttctatgaatataatatctaaaaattaatgtctgaaataactttttttcttaaaaatatttattcttcaaactatctataattgtaaatgacatcatctttatccagttaacagatcaa

SEQ ID NO: 51779 - DNA, 435 bp, Homo sapiens
  misc_feature 43, 417: n = A,T,C or G
cgggccccccctcggagtacttctagaattaattaacgcgggnagaataaatgggaaacttcctacatcatgtggtacaggtacagatggaaaccaactgccccagtactcccagcaagcaagaccccaagatcagtgtagaattattgacatatattcatccccccagctttaggttaatcagatgtagaagacatcttactctgttaggactaccaagaactgtgaacatcagatatagttcaatgagataaaacagagcagtggagaaacctgtccacttcctttacattgctttggctgctttggaagttctgcttacccatcctcaaacctggaccacacttcatgatatggcttattaaaaggggtctgctttataatatcaaaaattattatcaaagcacaataattcanattgtgtggtattcacac

SEQ ID NO: 51780 - DNA, 535 bp, Homo sapiens
  misc_feature 28: n = A,T,C or G
cgggcccccccctcggggtacttctagnattaattaacgcgggtatgcaaacattcagaccacggcagagatatactgtgtctatggttcagaacagccagtattaagacgccaattctctaattcatctttagattaaaccaaatctcagttaaaaaaaaaaaaatcccggcaggctttttatggaaaccagtaagtttacactaaaatttatgtgaaaaggccgggtgtggtggctcacacctgtaatcccagcactctgggaggccaaggcgggtggatcatgaggtcaggagatcgagaccatcctggccaacatggcgaaaccccatctccactaaaaatacaaaaaaaaagaaatacaaaaagccgggcgtggtggcaggcgcctgcagtcccagccactcaggaggccgaggcaggagaatggcgtaaacccgggaggcagagcttgcagtgagccgagatcgcaccactgcactccagcctggatgacagagcgagactccgtctcaaaaaaaaaaaaaaaaaaagc

SEQ ID NO: 51781 - DNA, 566 bp, Homo sapiens
ccccccctgaagtctttgaataatacgcgggtcttaaatgctcaactcacaaaaatgatgttgaaagtaataaaaaaaaaaacttaaatccccaaaccagtaaaataataacacatggaaatttgccaaagcagatgacactctataaacttcccatgatttgaacttcccacaaattttgtaggggttacctctgggaccccctattcaaaattcacagtttataattttatgtatttttatatattttgttttttcatagtatctcttaaacatacagtttgttttgtagctttttaaaattgatgtcaacaattttatattgtattttttagcacctggtttttttcactcaacattatagttataggttcatccatattttatgttgctttagttaattgtttttactgttgtaggatgatatttaagctatttcaaattttttaacgtttaatacaattcttcccataaatataacttaaatgtctttgtaaatatttatctgagagcttctctaaaaatatacctatgtgtggaatggctaagtcacaatttttatacgt

SEQ ID NO: 51782 - DNA, 573 bp, Homo sapiens
cgggccccccctcggaagtcttctagaattaattaacgcgggctctgcagtgttaggcatcagaaaaaccgagtaatttctagtaattctgaatgaaaatattatttctcaaaaattctacatataactaaattttctttagctctatagctttttctatagttctaaactttctgaaaagttttagaaaatgtattactaatatacacttttgaggaaaaacacaacgaatacatacttaagccttagaagatattaatcaaaataaattaaaagcaatgaagatatctctgtatgaaagaatatcagacaacaaacaaaactttaagtgaaatcaatattgtgaatgccataaaatttaacataaatgctaacaaatagcacaaataccatactgattctaacaagaaacagatgtccttaaagatggttaattttgcaaagacaacataggttggacttgaagaagaaaacaaaaagttatcggttttgatttttatttcaaaaaataataatgaaatattattgtgaaaatcatagaaacccactggtagaattagaaagaatgatgac

SEQ ID NO: 51783 - DNA, 533 bp, Homo sapiens
cgggcccttcctcggagtacttctagaattaattatacgcgggggtgggaaataattaactatagtaaatatatactcgaaaagtacttagtaatgagttcagggaaaaaggcacacgcaatttacatgagttttttttttgaaactcgtaaaacaagatcttattaaatggaaaagaaaataatattcttagctggaaagacttcttataaaaaggtcagttgtccccaaattaacataaatttaatacaattctatttagaataccgcataaatttttaattgtataagatggtcttaaaatttatgagtaaccataaatgcttgcaaatacctgaagaacaatgacagaatatattataaagtgcctgcaaccaatttaatatggttgtactatgttgaggaagcaaataaatcagtggacacaaatatatcccagaatatttgagaaaggaaatacatgatacaaatatgataaccaaccatatgatgggtgtatgaaaggaaaatatcccccaaaaaaaaaaaaaagc

SEQ ID NO: 51784 - DNA, 614 bp, Homo sapiens
cgggccccccctcgaaagtcttctagaattaattaacgcgggggcaagtggccaggtaatgggagaacagattatcaatctttaaataaagcatatgatgaacaaagtttttttaatcataaatagtgaagactgattattcatcaatgctagaaagtaaatttttgaggacagggacttgagcttctcatcccagtacccacataggtactaggatagtgccatcacattataaacagttagtgtatgtttgctgatgtgaacttaaataagattatgaaatactaaaccagggacaattctttgaaagtgaaggactagattaaatttgaaagctatttgatcatctgaaattacacagcacatcacaaaactgacacaactgaaaaatacttacattttaaaatataaatacattctcaagaagatccatttctggttaagataaattaggataatttaggttatgtttgtaattagggagaacctttgctctcccacaaaatgccccttgacaataacaaagggaccttagggctcatcctatattgttcttctttcatttctaccagtgtattagaactacagtttaatttttaaatttttattacttc

SEQ ID NO: 51785 - DNA, 372 bp, Homo sapiens
cgggccccccctcgagagtcttctagaattaattaacgcgggtctgccatgttttggaattccagagacttccagtgtggtgttttctacttcggggtgactgcagaggacaatagaatttctcctcctcaaggcacctgctgagccctaattgccttcagacttccagatgtcactaagtctgtttgcctgcacatattataagataaacattcaaaaaagacaggaaactggacccattgccttcttttcagcttctgctggtaatgcactttaagaccttgggtggtgcagtgattttttgccccatcatcaagcttgaagatattttaagtttccataaatcatcttgtacagtatgtattatacaac

SEQ ID NO: 51786 - DNA, 596 bp, Homo sapiens
  misc_feature 25, 38, 556: n = A,T,C or G
ctgggataccgggcccccccctcgnaaatacttctagnattaattaacgcgggttcctaataagaccataggtgatacttcctaagttttgtgagaacaaaattcatttacctttgtgaggtaaataagtgatgctatgatcacctgtggccctgtgggcctatggtcctgttagctttcattattggattaatttttttgattctcaaagattcatttcttaacctatttcatttgcacccaaatcagtgctttttcagtgggtgagcttcatattatattgtgaaatctctgaacaagttctgccttttaaaaatcatatgtacacatttttaaacaagttgctttctttttcttgagattgttatgattattttatagtgagatattttacatgtttcacaatgtttgacttttcctttgttcccttgttatcctaagctattagacattcaaataacctatagaagatagacttaatttttaaaatcagtgctaattaggaaagggaatatatagtaaattctgttagtgaaaatttgttcttctcaagtanagtatttgcagttcttgctatgcatttatgcttaagtact

SEQ ID NO: 51787 - DNA, 396 bp, Homo sapiens
ggccccccctcgaaagtcttctagaattaattaacgcggggccattgatctgttcatctatcttgatgccagtaccctgttgttttgattattatagctttataataattcttgaaatcagatactgttagtcttcaaactttgttggtggtattgtttttcacaggtgttttgattattccacgtccttatcagttccatatgcattttaggatcaggttaacaatttccacaccaaaaaaccctcctgggattttgattgggattgctgtttgattggaattagcttatagtttaatttgtagaaaactaactgaactgattacagtacatatgtcctaaaaccaagaacatttctcttccacagccacagtacaattacccaaaaaaaaaaaa

SEQ ID NO: 51788 - DNA, 651 bp, Homo sapiens
  misc_feature 25, 604: n = A,T,C or G
ctggggtaccggggccccccctcgngaatactttttaaaattaattaacgcgggtcacatcaaaactgaatttttagttgtgcatggtggctcacacctatactcctagttctttggtaggctaaagtgggatgatcacgtgaggccaagagtttgagatcagcctgggcaacataccaggaccctgtctttacaaaaaaacaaaacaaacaaacaaacaaacaaaaacacacagtggtccgtgcctgtagtcctagctacttgggaagctgatgtgggagaatcccttgagcccaggacttgtaaggtgcagtgagctatgattgtgctattgcactccagcctgggatacagagtttggtcccacctctaatatatgtgtgtgtgtgtatatatatatatatatttatatacacatatcatgtatatgttataccctgaatattctatatccaacaataactttttattgttagtagtgccctactcttctatactttagatatgaaagaaatactcttttcacttctgctttttcaatttaaatgtgtataggaaagaatatcctcttataaatgcctctccaacagaattttctacttgncaatggaatttttaaaatttgctaatgtgatatatggatagagcact

SEQ ID NO: 51789 - DNA, 452 bp, Homo sapiens
  misc_feature 16, 436: n = A,T,C or G
ccgggccccccctcgngggtacttctagaattaattaacgcgggtacctaaccaatagcataaaataaggttatcaaaaataaacaaatagaacaaatgaccctagggaagtggagctagtgttaagaacagaagaaaacataaaaatttgattggtatcctagtatatattcaagaagatattatatccctaaaacacaattagaccactccaaaaagaagtaatcaggaagtaagacagacttttaagaaattaaataagatttctaaaaggtaaagaaatgaataaaagaactcaataatgaatgaacacggctgaaaaatgaacttgagtgatttggaagatagggttgagaaaaatactccagaactaaataacaaaggaatggaaactatgggacaatgcttcatcaaatgccaattcagaacagatcanagtatctagaattctt

SEQ ID NO: 51790 - DNA, 562 bp, Homo sapiens
gggccccccctcggaagtcttctagaattaattaacgcggggagtagaggaagaatcaattttctggcatttccgaaagccagttgcactgaacaaatgtctaaaactggcatggtttgttgtataagtgggatgagtagacaaagccaaagttatacctaatctctttcccaactgcagattaagtcatatctgtaaaaggcaacatggtttttcttctgcattttctgccttctagtaagtgaaggaggcaatgggttgtgctcctccatcatctgagtagtttgagtgtattttggggactggaggtggggaagcctgatgacttcgtcgtggcatagagcaaaggtgatcgggggtgtgtgttcagaccatggacttcgcttcccagtgagccccctggactctgtgtattctttgcctttatctgcattgccacctggaagctccgtaatgtcaagtcctggaagatattactaacctgtttccattatgggtgtagtagaaatataagtaggtcactgttcctaattcagaaactgaagagagtcaagctgccatg

SEQ ID NO: 51791 - DNA, 525 bp, Homo sapiens
cccccctcgagagtcttctagaattaattaacgcgggggaagggaatatttgattctagatatcccatgcaggttctttaagagaagtatcccatgagcagagaatgttttcatgatttataaatacatttagaagtacatgacgacttaagccttttgcttaaattctgtgctaaataagcaactttctcatctcttactgggattccagagaggaccttctgaccaaggagaaaataccttgatatgtaggcctagcttctctggatgctaggattatctctctttaaatgattcagattgatccatcagccttttatagaattagttagtatgaaccagtcttttagaacccaataatccttaaatttatggagtcaaatttccaaatctgctaggctgaggactgtagaggacagagtgggcagcatccaggaatatctgctgagcacctacgatgtccaagcaccaccccaagagtggcaggtgaccactggcattgtgaaagaaaaggctacctgtttt

SEQ ID NO: 51792 - DNA, 523 bp, Homo sapiens
  misc_feature 38: n = A,T,C or G
ctgggttaccgggcccccccctcggaaatacttctagnattaattaacgcggggtccccaatcccgaaactttgactttcttctatgcgcatctgtctccctaaattattatcttattcagagttgtaccctgaactctgtaatgttatattcatctgcctactggatgtagctacatgaaggttccacagaggcctcttgaactcaatttctccaactgaatataagattttctttccttcctaagccaatcctcatattatattcatttatgtcagtgaaaagcatgataatgcaccttgaatttcaggcatcatcttggtcctccctatctcttttgccatgtaatcaatcataagtcctgtcaattctaccttctatgtagcttcctagtttgctgctttatttatttattcatattggtcaaagtaactcacaaggcaacactataagcagctgagtcagagatgtggaattgaatccctgttctactgtttactaaatatatgaagcacctaattac

SEQ ID NO: 51793 - DNA, 599 bp, Homo sapiens
cccccctcgagagtcttctagaattaattaacgcgggccaaagaggagctaagacttttatacgggaaacttctagctagcctcccaacaactctactagttagccatatccagatgagtaactgaagagtcaagcagggtaagtagctacagtgaataaaggaaaccaaatttgaattttaagtctattttgactcaaactgtgtttttcccatcatgttctactgtcctgccaaggcacaaacacattttcttacaatgattccctttgagtcaaatttcaaattttctggagagaagagagtggagctgaaagacccatttactccaacggctggtgtcaagatcaaatctttgcttatctaccatcaaacgatctggtctgaatttttagatataattttttaaaaacacagccacagtacatgcaggactagcacgtcagaccagcttggcttatcaactgataggcaatgctttgttgtgggaataaaatggaagtgcttttacacctctaagtctgaagacaactttatttatttatttgtttgttatttatttatttatttcagtgtctcactctgttgcccaggctagag

SEQ ID NO: 51794 - DNA, 570 bp, Homo sapiens
  misc_feature 23: n = A,T,C or G
ccccccctcggggatcttctagnattaattaacgcgggatatagttatatacattatatatctataacttacatatatagttcaatagaaaattattgaacttatagttcaatagttttcttttggaaatgaagtcagtattttcctctttttctgctaaaatcctatgtacttactacaatacaccaagtagtttgtaacaaaccaaacaatagtcccaaaagctgctctgtaacaataatagcacaggtgaaaattataggaatacactacacactctgtctcctctttgtagcgtttaagtgcagcttagcagaacagtctccaaaaagctctacgtaaactaaattggtttaacttcttttcagttttaaccaccttacccatagggacattttatcctcaagtatcttgttcatagctctgtaagtcttaacatacactaaaaaaatacagattattccaaactttgcagtaaattcttattgaaactcagtttttttccacatgaaaattatgtttgttaaaatgcacattatgattctgctactggaaaagggtcacaatcca

SEQ ID NO: 51795 - DNA, 619 bp, Homo sapiens
  misc_feature 27: n = A,T,C or G
gggccccccctcggagatacttctagnattaattaacgcgggagggtaggaagtctctgtaaacaaacctatatctatatcaagagtgattctaagagaatattctctcccttacccaggtactcaagttgtagggtaacataactagtgtaacgtaactagtgatttccagtcaccttttaggtttacttaggaacattaaaagaaatgctgccattgtagacttcatttcaattatttaatctctttccagttcacgacctttactttcttctggtttcagcaagaaaaacaacttcataagtgtcttacattataatcggctgctaatcatcatcaactcaacattagttttaaacagtctgattccataacaaatttgtaatagggatattttctatacattttataatagccatggatagaaaaatagtattatttatatactaaaacattcaagttgttttgtttaaaacatacattgtaaaattttccctcgggaaatttggatttattataggacagttgtagcttttatgaaattgggatcctgaagccatattttcaaatcagaaaaatgaaagcctcattgttgtttttcaaatgttttaagtttcct

SEQ ID NO: 51796 - DNA, 501 bp, Homo sapiens
  misc_feature 27, 443, 456, 488: n = A,T,C or G
cgggccccccctcggggtacttctagnattaattaacgcgggggtctagataagattatatggtcttttcttaaagacctcagatatttctttcatcccattctcagtcacagtgtattttttcttctgctacttgactgataaagtttttttaaatactagtctctctcttcttccttgctgcagctatagaaattgattcagaagtgaaacagtactgtaagggtattcttttgatagttcattattaagaggaatctctatatgtatttttatcatatttcagctccaagcggtaaaagtagcttcattacgagcagctaagttctaaattacatatgtcaaaataacaaaaacacttagtttgcaaggggttgaggtataaggatttggaggaatcagtagtgagttttggagaaattggtacctgccctatgtttcanagcggaagctcanaactcaaatgtctggtggaatctgggcaccanactgtaatgagtg

SEQ ID NO: 51797 - DNA, 591 bp, Homo sapiens
  misc_feature 43: n = A,T,C or G
gggccccccctcgagaatacttctagaattaattaacgcgggngaatctacaatcacccagtcccacctacctgtttatagcttcctacagcctttcccactactcttaaatcacaggttacaaaaggatggagggagtcttctcataagaaagataaaaattttaattttaaaaacaagaacaaaaatgaaaaaaaaaacaatttggaagcaatagaccatacaaagaggaaaaaaaatttaaacaaaattaaaatattatcaatattcccagagatggatatgacaccaaaataacaggaaacaagagcaaaaatggacaaatgggactaaaccaaaacaaaaaatgttgtgtagcaaaagaaacaatcaaagtgaaaaggcaacctagagaaaggggaaaaatatttgcaaactgtatctgataaggggttaatatgtaaaatatataaagaactcctacaaacaaatagcatgaagaacaaatgacacaagttttaaaatgggcaatagactcacagacttgcagagtcatttctccaaagaagacatacaaatggccaacaggtatatgaaaagatgctcaacatc

SEQ ID NO: 51798 - DNA, 593 bp, Homo sapiens
cgggccccccctcgaaagtcttctagaattaattaacgcgggggttggcacacaataaatatttgtttaactaaagcatagcttgtatttaggggaagttaagccagttattggatagatgccatgccactggcaatatttcaatgtaatatctgaaggtaagattgcatctgcaatattatattattctctaaaaatctgaacaaagagatcctttgatgatgattttattcataaatgtttgttttcttctccaccagtactgggacagaaatttgcatataattggcactccattaaaattgcttgcattatttcagcctagggtaaatacatggtagctgtaataaaacctctcaaccacaacataatccgaatagaaccaaccttcagagatagaggaagatgatcccaattgtctagtgattgcaaaattatattaaccttaggtaaagtccattgtgtataaattatggtagaagcttagtgcaggagaatgaacaatagttttagtgtcagaaaatgtgagttaaattcccagcttaccttattactggacctatgacttgaggaagttttgtgggttttttctc

SEQ ID NO: 51799 - DNA, 546 bp, Homo sapiens
  misc_feature 27: n = A,T,C or G
cgggccccccctcgaaagtcttctagnattaattaacgcgggtctctgttaagtatttaaatcagttgttgcagattattgataattgcaaaatcagcacacatgaagggctggaccagcacaatttaagtgatccttggtgataacttgaggatatttgttactaattgatatattattaagagacaattacaccataatgtgatgtcacatcacacttacttggttataattaaaaagatataaaagtagtgttggtgaggatgtgagaggctggaagctttgtactgtgctggtaggaatgtaaaatggtactgctactttgtaaaagtctggcagtttctcaaaaagtgaaacatagaattactatatgatcccacaattccactcccagacaagtacttgagaagtaaaaatatatatacaccaagttcatagcagcactatttataataaacagggaagaaacatataaatgtccatcaactgatgaatgaataaatgtgttatgtgcagtgaaatattatttgtcaaaaaaaaaaaaaa

SEQ ID NO: 51800 - DNA, 593 bp, Homo sapiens
  misc_feature 28: n = A,T,C or G
ccgggccccccctcggaagtcttctagnattaattaacgcggggcccaagcagtctcctatttaagtaatgtatatcagaggaagcgcagcaaagataacccactgtccttacatttttatctacttattctgcacctttccaaatagatatatagcatcatttagcctaaaatcccaggcaactggatggactaattaaggggttagagaaaattacctcacctcactgctaaaacagctaaaacattatgccaccaacaactcgagtctgaattccaatacccaataataattaattccaagtattactggtaaataattatcatcttggcaagtgtgctttccaggtggaagtataggactcaaaatgaatacagtctgggctgggtgcagtggctcaacgcctgtaatcccagcactttgggaggccaaggcaggtggatcacctgaggtcaggaattcgagaccagcctgaccaacgcgatgaaaccccgccactactaaaaatacaaaaattggccaagtgtggtggtgcatgcctgtaatcccagctactcgggaggctgaggcaggagaatcgctcaaacccaga

SEQ ID NO: 51801 - DNA, 607 bp, Homo sapiens
cgggccccccctcggagtacttctagaattaattaacgcgggccttccaaacataaatgcattaacaatggagaaaaaatgaaactaatatatacaaaagggctgtcacataaaaattatctattcatcacttagcacatcataataaagttaaaaagaatacaggtgtttagtttcattctttggtgaacaactaaaaatgactgttcaagagttgccacctttctgaagcacagccctgatcatgcatctcctactcagaaatcttcaatagctacacacgcagtatctcaagattggaaggaatcttaaaaatcacctagcgggctgggcacagtggctcacgcctgtaatcccagcactccgggaggccaagacaggcggatcacctgaggtcaggagtccgcgaccagcctgaccaacatggagaaatcccgtctccactaaaaatacaaaatcagctggccgtggtggtgcacgcctataatcccatccactcgggaggctgaggcaggggaatcgtttgaacccgggaggcggaggttgcaccattgcactccagcctggcgacagagcgaaactccatctcaaaaaaaaaaaaaaaaaa

SEQ ID NO: 51802 - DNA, 559 bp, Homo sapiens
  misc_feature 19, 32: n = A,T,C or G
taccgggcccccccctcgngggtacttctagnattaattaacgcgggccatctcatttgagtcttaaaatccctctgtaggtgggtggctcatcccattttaactgataagaaaactgaggcgcagaggttattagcagcctcatttccttgaacaatttaccaagttactttatttctttgaatagtaagtgggttgcactgttttctgaggtctcttccagtcctaaaatttatttaatccaagcgatttaggcaacatcaactcagtgtgtgagatacaaaaagcacagacgtgcaattggcagatatggatcttacctccaccactggctggccttgaagacctgcagaaatcatttaagctttttgaatctcagtagccttgtctttaaaagaaagttattaagctacacctgatcaaattatttggaaggccaaatgacataaaatacatacatcaggtatttgatctggaaccttgatctaattagttaatctccctgagccccttctccccggcggttatgctgagagtgcggagtgtgtgctccgggctc

SEQ ID NO: 51803 - DNA, 349 bp, Homo sapiens
  misc_feature 22, 337: n = A,T,C or G
cccccctcgaaatacttctagnattaattaagagtgtttctgataggatatgattctagtgggttagggaagaagaaggtgagaggagagtaggccaaggttgacacagaggaagtaaataggtaaatagagagaagtcaggcacagtaacaaggtaagcaggatattggtgtatgcttcccctggtttatctgacattttcccctaggtgttcctactcatcactagcaaacctaaatctatattgacccatctgcacctctggaattctcagcatcaatctcaaattattgaaactagtcttttgaggatagcctgaaatattattttggcgaanaaaaaaaaaaaa

SEQ ID NO: 51804 - DNA, 448 bp, Homo sapiens
  misc_feature 11: n = A,T,C or G
cccccctcganaagtcttctagaattaattaacgcgggtcctttttactgttttggaataacaaagaaagctagtataaatacactgcagacattacaacaaaaaagcactattaaagatagagatcatattgtacttaaaatggctcagtaccaataagatattacaattttaagtttgcatgtacctaataccatagattcaaaatatataaagcaaatctgggcagaacaaggaaaatagaccatctacaatcatagtagaagatttaacatatctttctcagtaatggtcctttttttaataacaacttaattgagttatgattcacatacaaattgcctattcaaagtatacaattcagtggtctttagtatattcaaaaagttatgcaaccatttatcatagacagccttaggacatttttatcaccaaaaaaaaaaaaaaa

SEQ ID NO: 51805 - DNA, 481 bp, Homo sapiens
acttctagaattaattaacgcgggcatggtggtatgcacctgcagtcccagctactcaggagcctgaggtggctcaatatacactttgcaagctcattttataacattgttttataatatttccttttaaagtctgccatactataataataaggttttcattttattggtagcatagtattaccttttatagatgtgctgtaatttatttatctggaattagggattatgtttgagaagatggggagtaagcctttctaaacttaaatcactagccatggaaaccaaagattccaagataatgtgactatgctacatattggggcaattgcttttatttatttattttattcatttatttaaaagatgaggaggccgggcatggtggctcatgcctgttatctcagccctttgggaggcccaggcaggtggatcacctgaagccaggagctcgagaccagcctggccaacatggagaaac

SEQ ID NO: 51806 - DNA, 386 bp, Homo sapiens
cccccctcgggatgcttctgagaattaattaacgcgggccatctcatttgagtcttaaaatccctctgtaggtgggtggctcatcccattttaactgataagaaaactgaggcgcagaggttattagcagcctcatttccttgaacaatttaccaagttactttatttctttgaatagtaagtgggttgcactgttttctgaggtctcttccattcctaaaatttatttaatccaagcgatttaggcaacatcaactcagtgtgtgagatacaaaaagctcatacttgcaattggcagatatggatcttacctccaccactggctggccttgaagacctgcataaattttttaagctttttgaatatcaatagccttgtctataaa

SEQ ID NO: 51807 - DNA, 343 bp, Homo sapiens
aatattggttaataacaaaaatcaatcgatgtaagatgccacagtagcagactcgaaataggaaaatattaacgttatcacaataaatgcaggaaaaaaaatgcacatgtgctaatgctactttataataaatatctttgctaattccgaaatagaagacttcttcaagctgagaaggtcatctataattaaaaaaaaaaaaaaccaaaaccttacaattaatgccaggcttaatggtgtaacattaagcgcttctaatgtaagagaatgaacaaatgacgagtttcttatatcattttctgttcatcatttccttaatggccttagccagtgctataatgca

SEQ ID NO: 51808 - DNA, 574 bp, Homo sapiens
  misc_feature 69: n = A,T,C or G
cccccctcggaagtcttctagaattaattaacgcgggctggggcatttgtgcaaatagtaaatacctgngaaaaccagcgatctccagtacaattaactaccactttccttttgttatgaatcaaactgagtgtatttaaaatttactgcatttcaattgaggaaagtatgtctatgttagaatatttatgaatgtaaagtatgttcattcagaaaatttagtaaatatcaaaaaataaagaaaataaaaattatctcttaatgtccacaatacatgctattattgccaacatatcatatatacttgtatgtataaacatacatatacataaatgatacatgtacatattatacattataaatatatatttatatttttagatattaaagttttatatacttatatatattaaaatcatatttattgtgatttatcttatttttaggatattattagatgtgattttttaaatttctatgtaagaaatcacttttagagatgacttttaataactcctatatacgatctagttatgagccctcatgaagatgtgtttcaaatgggaaaaaataa

SEQ ID NO: 51809 - DNA, 538 bp, Homo sapiens
cgggccccccctcggaagtcttctagaattaattaacgcgggataatatgaaacgctgtatatcctcaaccaaaacgagattgaatagtacagaaaacatgccatacattacatatactgttaatcaccatcagcgaaataaccagtccagaaatctagaccttgtggaccttaaatcctagagaatctttctaaatattaccaagcatactataaatatttagaattaatttttaaatttaggtatatgtgatgcaaatatgtatttaaagaaatatattttaaataatattacaggtatgtatgtatcaaaaaatacttagggaataatcaatagatttgaccattttttcctgcaatagctaatattgtttaaaagtaatgtccaggggtgttggctcacgcctgtaatcccagcactttgggaggcccaggcgggtggatcacctgaggtcacaagtttaagaccagcctgaccaacgtggagaaacctcatctctactaaaatacaaaatagttgggcatggtggcgcatgcc

SEQ ID NO: 51810 - DNA, 571 bp, Homo sapiens
  misc_feature 8: n = A,T,C or G
acttctanaattaattaacgcggggatgtgataaatgataaagatctaaaaatattttagggaataactttatctagaatagtaaatattattgtcatatatctcacacatataacctaaataagtgagttcattttagtactagaagactgcaaataacagttcagaaatctagcaactcagatattagaaatagtttaaaatatatatatatttctaaaaggttgtaatcaaataaggcagctatcatggttaccaatggattcttctagggaggtacgagaattctcagtggtgtctaggttctcataaaagtagggatagaaaagagcaaagatgaactttggaatattttactttgagtgcccagaggtcttaccactgtccaggacccaaagtttcttcttttctatagccaagacacctatttaataatctctctttaaaaacagaaaaatgctggccaggcacggtggctcacacctgtaatcccagcacttctggaggctgaagcaggtggatcacctgaggtcagcagttcgaccagcctggccaacatggtgaaaccttg

SEQ ID NO: 51811 - DNA, 483 bp, Homo sapiens
cgggcccccccctcggaatacttctagaattaattaacgcgggatctcaattaattttaaggtaatatataagctaacaaaaccaataaagacgtaatacatcatgacctgatagttattcaaggatgaaatattggttaataagaaaatcaatcgatgtaagatgccacagtagcagactgaaataggaaaatattaaggttatcacaataaatgcaggaaaaaaatgacatgttttaatgctactttataataaatatttttgctaatttgaaatagaagacttcttcaagctgagaaggtcatctataattaaaaaaaaaaaaaacaaaaaccttacaattaatgccaggcttaatggtgtaacattaagcgcttctcatgtaagagaatgaacaaatcaagagtttcttatatcatttctgttcatcatttccttaatggccttagccagtgctataatgcaagaaaaaaaaaaaaaaa

SEQ ID NO: 51812 - DNA, 546 bp, Homo sapiens
cccccctcgagagtcttctagaattaattaacgcgggtcctgagctctctgctggaaaaagatactaattttagatcagattccagttaaaacatgctaaaaattcaacaagctcaaaaattacttcagagtttctattcagtgtccagatagcatccttctgctttcaggagtcaccttcctttaatatatttgggaaggagtaaagcctgtatctgtcctgtttctcccatctcacgctcttctccccaactgtgacacacacacaccctgagcatttatcatttattggacaaatatgtatccatactatgggtcaggcatggtaacaagcattggaaagccaatagtgagaaaacaatgctctggattaattgaataattacatacatttaattacaaactgtggcaagcactaggaatgaaaagcacaaggtatctggaggagataataattgaagaacttgatcctctgcatgtagaggagcattttctgtgcaaggaagatttaaggtaagatctgaaagattgcttgaaataaccatc

SEQ ID NO: 51813 - DNA, 582 bp, Homo sapiens
ccgggccccccctcggaagtcttctagaattaattaacgcggggagccttgataagaacatacaatgcaggctgtgatgttgcacatgctcttcagagaacagagctaagagaaaaaacatacctcattccagcagaatgtgctcattaaatgtgtagagtacagtgaaatattggctaagtggcacccagtgagacaatgcaaagactcaaggataatccactcatcttgactgatgataaacaccaggtctaaatagctctttccatttttgtaaaagaagaagaaaaaatatttttgcttcaactttttaattttgtttaaatttaattttttaatttaaaagttaaaaatgtttttaaacagaagaaaaacaatattaagtgggttctatggaaacataatgcatcacaaggaaaagataatacaccctgatgactagaagcgacttacttattcttacaaatatttggtggaggccaggcacaatggctcacgtctgtaatcccaacactttgggaggctaaagtggaaggattgcttgaggccaggagtttgagaccagcctgagcaatgtagcaa

SEQ ID NO: 51814 - DNA, 532 bp, Homo sapiens
  misc_feature 28, 204: n = A,T,C or G
ccgggccccccctcggaagtcttctagnattaattaacgcgggcacatccaaaaaaaaaaaaagaaaaagaaagaaaaaagaacaaaagaaagaaaaattatttgaaaggatgaagaaagcctacagaatgtatagaataccccattaggtgaacaaatattcatattataggcactcaagaagaagggtatgaaaatggtgangaaaaatatatttaataaaataatacaagataaaaaccattaaaccaagatctcttcctcccctattctacaaataaaaacaacgtagaagagaaaagaggttcataagcccttcacttttatgtggtagtacataatacggaagatgagtattcaagccactccttattaataagccactcactaagggaaccactttttcccccctaatctcttctagagtattatttgttgcagcagtgtaacacatgaaaatcattattgtagtgtggactagtggctaatctgaatgcaactctcttacatttattatcgttagggaatgtat

SEQ ID NO: 51815 - DNA, 493 bp, Homo sapiens
  misc_feature 460, 484: n = A,T,C or G
gggccccccctcggaagtcttctagaattaattaacgcggggcaggttcccagggtgaagttaatgatactaatctgcgaacacttataaaaaagaagcccatatatgtgctctttttcaagattcttggtaggaaatgtttttaaaaaattaaaagtaaagaaaaaaaagagagagaaatgtgatcttcctctacagatctgtaaaacttatttctgtatcatttctaataatattgagcagatctgaaatggaaagtaacatttgatacacaagtaaactatacaaaccactggtgaatatgagcatgaacacatttaaaaaggaataggcctctaaaaagcagctttgacttttgtaaatttcagtttgaagggcataatatcattaattaggtcagacaaaattagtgaataaaaaaagttgagactgtatgataaattagaaattgcaagaacantgttgtctttagttattcatacangtgactaat

SEQ ID NO: 51816 - DNA, 568 bp, Homo sapiens
  misc_feature 62: n = A,T,C or G
tgggtaccggggccccccctcggaagtcttctagaattaattaacgcgggattgattttttnagtaagcccattgaaatccatcagattatctcctgctagataataatggtctcccccatgtgaagagacaggctttctttcagcagggctgcccaacagccattactttaggaaaatggagttgagagacacaaggatcctggatagggatgaggcgagacacccacgctgtggtgaagaccaggtggccaaagcccaatttgaaaaccctgatgtggatgtgtcctgggcctgttctcttggagcaggacctccctgtagtttgcattcttcttctctcagcttgaacctctttcctcagcacctgtggttcatatctgttgagcaagggggaagacatttgttgtctgggtgatgttcaaaaacacaactgtgttcttgagccagtttctatgttaagtacaaccaaggtctcactggtgaccttgaacaaaacagaagtaacctttgttcttctggccagttccaagtcctcggaacctacagtcacaagccacacatttctg

SEQ ID NO: 51817 - DNA, 464 bp, Homo sapiens
  misc_feature 24, 430: n = A,T,C or G
gccccccctcggggtacttctagnattaattaacgcgggttctttagatttctatcatgctgaattgatctcagaaagtttctcacatagatccagagaactttcagccataattaaaataagttaatattaaataattatactaaaagttattacatatatatgcttacatatttatagtttatatgtataatataaattaactcaggaaaatgcaaagtatgtgatttctatagaactaaaaaaaattatagcacaatttataagcatgaagaaattatccctatattcaagaatgattgttaaggaattgttgattttaaagttagtaatctattgtttgaaaattttagaattaaaaaaatagaaatacatgaaccatatgcattatttactgtattagactttagatttggtagttatttgaatntattttgaaatatttttaaaaaaattctctgtag

SEQ ID NO: 51818 - DNA, 492 bp, Homo sapiens
ccccccttcggggtacttctagaattaattaacgcggggagccttgataagaacatacaatgcaggctgtgatgttgcacatgctcttcagagaacagagctaagagaaaaaacatacctcattccagcagaatgtgctcattaaatgtgtagagtacagtgaaatattggctaagtggcacccagtgagacaatgcaaagactcaaggataatccactcatcttgactgatgataaacaccaggtctaaatagctctttccatttttgtaaaagaagaagaaaaaatatttttgcttcaactttttaattgtggttaaatttaattatttaatttaaaagttaaaaatgtttttaaacagaacaaaaacaatattaagtgggttctatggaaacataatgcatcacaaggaaaagataatacaccctgatgacttagaagcgacttacttattcttacaaatatttggtggaggccaggcacaatggctca

SEQ ID NO: 51819 - DNA, 505 bp, Homo sapiens
gggccccccctcggaagtcttctagaattaattaacgcgggggttgaggcagcaagattgtttgagctcaagaggttgaggctgcagtgagccatgattgcaccactgcaccccagcctgtgcaatgaagtgagacccttcacgcttcacacacacaggaagttacaaacaagcaaacgaaaaaaaaaaacaaaaaatacattacttgactattagaaaacaaattagtatcccacatatttatagataataaatctgtgaatttgatgtttctgagagaaatataatgaaacttcaataataaacaaaactaagggaagtgaagagacaatctgtataggtctatatttattaaagagatttaatcagtaattaatagccttccaaaacaaatccccaggcccagatgtggtgaattctaccaaacactgaaggaagaaattataccaactctctacagtctctttcagaagatagatgcagagggaatactttgtaacttact

SEQ ID NO: 51820 - DNA, 409 bp, Homo sapiens
cgggccccccctcggaagtcttctagaattaattaacgcggggtgtacccatttggtcttttcaagacccaggggtattatttgacttcatattcttaaaaataacttctacggaagtgattttctttcatagaatgggaaatataagacacataaagagctggtgtaatttttgaacccttcaacaaattggctatcagagaaaaatgtatcctcctgtctcagctcaactctttgtgtcttatagttctcactcctaaaaagcacatgttgctgcttggaacaaaacaaataccacatttggaggatttgaagaaactagtctcaaagtaattatttcaagagaatttattttaaaaacatgtaagcactaagtcacctcattctcagaagaaaaaaaaaaaaaaaa

SEQ ID NO: 51821 - DNA, 603 bp, Homo sapiens
gggccccccctcgaaagtcttctagaattaattaacgcggggtgggcacaggagtgaaaactgcacgccagtaggctagttggctatgattttaccatgttaaacgtatcaagcagaatgaaacagcagcagaagctgacaccagtgcagctctataataaaccacaatattcatatcatgactgtgcttgtttgtaaaaaagaaacaaaaatgacttccaaaggccaatttttatagtaagtaatatctccatttgtgtttcatatttcaaagaatgtattcaacaggatggcattattgtaattgaattaacttctctatttaggtaatattaacactgcattccatttttctgtctttttgttgcgaattgcatatttatcaattgtattatgtgcctctgtttttagaaactggatgaaaaccacactgacactaatttatccaaattttaatttcctgaataatgaactttagctcccataagagctaatattttcagcaaaatttatcagactattcaactccaatatttatttactttcctctgttttttttcttcagaaaatttatgaatatgtcaaatatgctagttctaacat

SEQ ID NO: 51822 - DNA, 221 bp, Homo sapiens
  misc_feature 43: n = A,T,C or G
gggccccccctcggaagtcttctagaattaattaacgcggggngaaaaaaaaaaaaaaaaaaaaaaaaaaaaaaaaaaaaaaaaaaaaaaaaaaaaaaaaaataaaaaaaaaaaaaaaaaaaaaaaaattaaaagcggccgcctccgaagagaaaactacggggccccctaggggggggacctcaacccccccttattggaagcctttttacaccccccta

SEQ ID NO: 51823 - DNA, 605 bp, Homo sapiens
cccccctcgagagtcttctagaattaattaacgcgggacataactagacacctatccccaacgcctcctcaccccctacctcccagtcctatctctacaaaaaaaagaaaaaaaaaaaggtgttttaattagccaggcatggtggtgcatgcccctagtcctagctacttgggaggctggggcgggaggattgcttaagcctaggagtttgaggctgcagtgggctatgaacgtatatgagctatgctattgcacttcaacctgggtgacagagccagaccttgtctcttaaaaaaaaaattaataataataacatagagggaaaatgtataaggacaacaatttttacattattgatgttaggattgaagtaccaaatgagtcttctgtaatagaagatcattttctaagtggaaaaagtctttttctgtttaatttgcagaaacgttgctttcaacttgagtgttatttggaaggccaggttcttatgggtaggggcatttgggaagcactcccgggaatagactctagcagtggaattcagaagtctgtcaatcattcaggtagaggagtgtgagagtatgagaataaagattgtaaatgat

SEQ ID NO: 51824 - DNA, 610 bp, Homo sapiens
  misc_feature 12, 580: n = A,T,C or G
cgggcccccccntcgaggtacttctagaattaattaacgcgggtccaataaaaaaattcattaaaggagaaaaattatccagggagtataatttttcacaacaaatgcagttttctaaatgaaaaagagattattaaaggaaaaaaaaatcagacacacaattttaagtgtgtgcttagtgaggtatagcatgatatttctaagcttgataaacatgaagaaaattttttaaagaaatataacaagaaggaaatgtttacgttgcatatctaatttttaattattgttttttatttttagatgataacttagaaaatttagatcatgtaaagaataagcaaagtggtagattcataggactattcatgcactattctaggaaaacactcaaagaaaatccttacacaggccaagcataggtataatgatctttgcagtgattttagtaacagagatttgaaggcagactatattctattagtataggaatggattgacatatagcagtctggcaaattgtggaatcctatatcaacaacaacaacaaaaatgacacttgtctccaacttgaataagactnttaaaatttaaaaagacttatagtacaaac

SEQ ID NO: 51825 - DNA, 599 bp, Homo sapiens
cccccctcgagagtcttctagaattaattaacgcgggcacttttatgtcctataactttggttgcacaacaggtgaagaaaaggcaagatcatgttgcagaaaccatacaaactggaattagaaaagtttctgttatttttttgcctgaaataccctccccctcccttttctgtttggcacaattcaaatgtcatctttctgaattcctgagaaatattctcctctgtattctcatgctgtacctggccagacctccaatatagcattggccactctgtattgtgatgatttctttgtatgttttcccaaaagactgagattgccaaagtggggaacatatctgtatttacctttataacttcaatgcctagtgcagtacttagaattcaatacaggcttgttgaataaatgtataaacatacatctagatcgctagctcccacgcaagccaggagtaagcaactgatcttcacacctgggaaggacaaaaattttgctcggaaaatcttctgtaggctacaagttgtaccttcataacagaaagaatcggggaaataggagtcaaaaatttcttcatacattatgatgtagacaatct

SEQ ID NO: 51826 - DNA, 637 bp, Homo sapiens
  misc_feature 13: n = A,T,C or G
ccgggcccccccntcggggtacttctagaattaattaacgcggggacggttacgaaattgcaaaccgcgctatgtaatttcagcaaaggatattcaggctttgttcagaagaggcattgaaatcaaataatccatttatcaaggtgccttttgtttcaataaaaaggaaacaatgagccatatttagcagagagagagacattctgtgtctggggaatgttaataaatcaccaatggagagaggaaaaaatattcaggcttgcttgtgtttcaagtaagctgcagtgacttggaaggaaaatccagtcagggctctccttgaggcatatggagaaaggcaagtcctgttttgcaggtgtctgatatcatatgagtaaaccagagatgtctgatgcaggagacacctccaaagtcctgaaaagagcccacttcccttaatttcagatttttctttctcacgtagacatcacccaatttttttttcgcatgtggatatcacccttacccccaacatttctgtagttttaaaagcttgttactataactgatgaacacatttgaaataatggtaatgattatgataatagcaacaacaattcccaattgttaagcatgctgagtgcttagtttattgctt

SEQ ID NO: 51827 - DNA, 500 bp, Homo sapiens
cccccctcgagagtcttctagaattaattaacgcgggatacatttactaagataaacaatttaatttaattttatccagtttgctttgtatattgcaaatctttgctcatcaacatggattttggaagtatattttatatgtgccatatgttttctgcatattagccagttgttggtgtattaaaagtaaggttaaaaaactcaacctgtttttaggtttattgtatatattaaattacttttcacacatttgattgttttaataactctatagcatttctaacaggaataagtagctaccgtagggaatttggaaaatatataaaagtgtaaattaaatgaaaatatgaggtattcacatttcctgccaatacacgtaatcgtatcattgcatgtccttttgttccttttctctatacaagaaaaatatattggccatgcacggtggctcacacctgtaatcccagtgctttgggaagccaaggcgggtagatcactta

SEQ ID NO: 51828 - DNA, 569 bp, Homo sapiens
  misc_feature 31, 504: n = A,T,C or G
taccggggccccccctcggggtacttctagnattaattaacgcggggaacattacatcagatatcaaagaaatacagaatattaaaagggaatactttttaaaactctacttcattaagttgcaaaatatgaaaaaaatagatgaatattttgattcatccaaaatattaaaattaaaccaagatgacaccaataaccaaaagagacccacaagaaaggagttaattgaaactgtaataaacttctaagtctaaaaggcccagtccaggtggattcaaagcagacatctatcagactttcaagagagagctataaccaacgtttcctaaattctgcaaaaaaaaaaaaccaaaaaacaaaacaaaacaaaaaacagaaacagaaggaaaactccaaaactttgtctttgaagccagtattattctaatactcaaatcagatgaagatacaacaaacaaacaaacaaaaaaatacagactgttatccctgagaaacagagagttntaccctcaatgagtatcaggaaactggatataaacttatcacgaagattatccaccatgatcaag

SEQ ID NO: 51829 - DNA, 569 bp, Homo sapiens
  misc_feature 518: n = A,T,C or G
cgggccccccctcggaagtcttctagaattaattaacgcggggatccacctatagccataggactacagatttactacattttctcaaggaactaacttcaatttttatcttttccactttactttgatatttatgtatcttaattttgggttttattgatttatttctctagttttttaaaaatgtcaggatacatttaatttaatgtagtcatatttgcatttgaagaaattttgatgaattcagttgtgaataatgttttacttggagcatataaaacaaggcgtcctcagcctaaaagctcctttagctgataaacaacttcagcaacgtttctggatacaaaatcaatgtacaaaaatcaccagaattcctgtacatcaacaacagccaagccaagagccaaatcaggaatgcaatcccattcacaattatcacaaaaagaataaaatacctaggaatacagctaaccagaaaggtgaaagatctctacaatgagaattataaaacactacanagaaatcagagatgacacccaaatagaaaaacatcctatgctcatggattc

SEQ ID NO: 51830 - DNA, 589 bp, Homo sapiens
  misc_feature 32, 552: n = A,T,C or G
taccgggcccccccctcggaaatacttctagnattaattaacgcgggcagtctcaaaataaatatataaataaataaataaataaataaatcagtcaacaaatacatatcaaaaaggaaccagtggccacatggaggcaaaggagcatgaggaatcttctgagcagtgaagaaaatcttggatatgttggtggtttcacagctgtcagaattcactgaattgcacagattaagtggatgcagtttgtgtgcaaaggatcctttgataaagctgaataaaaatcactaatgaagacctaaagtgaaaagaggcagggaggataatctaatgcatagaaaccattatgccagtaaaagaagagtcagaagcaggaaagtcattctcaggagccactgtgttttggcctcatgttcaatgctaagtttcaaaacaaatgtagtattccttgcaaccatgagaagttggtgagtgatttgaaatcattcttatgatgaggtggaagcttttggaatctgtacccctgcactttatccttgtcctcatgatttacanaaacatgaaaataaagctcagttattcatcatcatca

SEQ ID NO: 51831 - DNA, 516 bp, Homo sapiens
  misc_feature 479: n = A,T,C or G
taattaacgcggggggcctactctaaaataaatagcaaagataatttttcaggcagaataaaatgattactctggaagttagaaaatacttgatggaataaagaacacacaaaagagtaaccatgtaagtaaacacaatactgattatacagaataattattctaatgtcttatgagattttaaatacatatggaactaaaacataggcacatgtgtagaaagaagtcagctaagttgattttttgtgtggtttcagaattactaagagaaggtgaaaaagttagatttttttaattgacttaaataattatgtatgtcataattgccaggataaccacaaagaaaatagggaaaaaataataaataacacattaacacagagatatgaatattaatttaaaaattgagtatccaaaataagagaataaggaaatataaaataatgtaacataattgtgttaaattcaaaagagtaaanatagtagatatgaacttaaaattacaaataaatatgc

SEQ ID NO: 51832 - DNA, 300 bp, Homo sapiens
  misc_feature 16: n = A,T,C or G
cgggccccccctcganaatacttctagaattaattaacgcgggccagtttctgcatatctatgcctgaagctttcattccataaccaggaaaggcagttatttctccttattttaacggattgaaagctaaaaggagtagatctaaaactgaaaacacttgggagatggtatagaaatatgtcagctccctgttctccaggtggtataattgcaaggtttacttttttcacaaaatctgtactagtttctgttgctgctggaactaaaaagcatagtaagtagctaaaaaaaaaaaaaaa

SEQ ID NO: 51833 - DNA, 563 bp, Homo sapiens
acttctagaattaattaacgcgggcttttgagggatacacaggagtttttgagtgcgcaacggggaggagagacgcagcatgcatcaaggcacagcaggggcacgccacaagggagtgtccctggaactgcgagagcttggctggcttagtgaaatgaggtggtgggagccagggaggggtgctacagtgggatgcacacgccccagtgtggaggacagcctgtgcctgggcatgggcggcagcagcagtgtgaaatcagtggtggcaactggcactgctcggagtgcctttcagcgctcatggaatcttcacaataatcttgagacagatgccactgtcatccccatgcacaggtgaggaagtcaaggccaatgacaataatgtcatttagtcaaggtcacaaagctagaaggtgtcaggcgcttggcaaacaccccttcctgctccgcagcctctcacctcctctgctcctctggctggggcttttggtgaacagacgctatttctcttcacctgcaagtatctaaaagttttgactagaaggctgaatatttctgacaag

SEQ ID NO: 51834 - DNA, 567 bp, Homo sapiens
  misc_feature 42: n = A,T,C or G
gggccccccctcgaaatacttctagaattaattaacgcgggngtctgacaaggtcagtcactcttaggtcacctaaataatgatgccacacccattctggcagccctggaggttcatatgcctaaatcaacaacaacaacaacaacaaaattctaaaataactgtcataattatctgccacaagactgtatttgatttttactgctatcttattcaaacaaaaaattaatatctcatgagccattaacctactaaagacccaaaggagaagagagcaggggcgtggccagaactggagcttggaaagagcacagctggacgggaagcagaattcaccaggcacacaaatgatacaggaagcagggaaggctgagtggcaagagacagaaagtaactcctcagtttctgcttactatatttcctttccagatccatgcttagttagcaattcaactagatacagagctgaaggacaagggaatgaagtccacacatagccatggtggtgaatagggggaatacttttttccctaatctaagaacaaactacagttgcttgtctgtggc

SEQ ID NO: 51835 - DNA, 618 bp, Homo sapiens
  misc_feature 567, 609: n = A,T,C or G
gccccccctcgaaatacttctagaattaattaacgcggggagccacaaaatctttagtgtgtaaaaaaatcttgaaatgaagtgagaaatggctgatttctttttttaaagcaacttaatgtcctgtttgctactaaacatttctgggtgtaataattcttatttagcagtcaatatttccccatgataacaaccaagaatttttagaatgttttggggcacaaaacacattctattttagacactgaaagatcattttaatgtttgcctcagaatataagctgcaaaagtttatgaggtaatttcaacagttctcacaaacgtttccttaatgttccccatgtctattcctgcagtaccttttctgtctctatcttggcaaatctcatgctatcgtagtacttggtttgtctctttcccacttaaactagagctctggggctgtcttacttgttgcatctcaagtattttgtgtggtgcccagtatttatttgaagaatcaaagaaatgcttaagaatattttctgaagctgggtctggtggctcacgcctataatcctagcactntgggaagccaaggcttgatccaggagttcgagaccaacctgngcaacatgg

SEQ ID NO: 51836 - DNA, 569 bp, Homo sapiens
ccgggccccccctcggaagtcttctagaattaattaacgcggggatcctaataaaatcgttcaattctgattaatatcataagctataaaatggtgttcccaattataaatacagcagaatagttctgcaccaccttttattgaagtagtgctcctgctgtctgaaaacaagtttaaggcactcgccgtcagtatttcttttagcctattcctcattttatgttacagtcaggcagtgaaactagaacacaaggtttttactgtcttgttacatacctaaaaggatgtttagaaactcctaatagagaaaaaaatctaaatgatacaggaatggtgccttgtcttgtcagcattaaaagctgcatattattttccagaatcacaaaataacattttactatatcttactaattagagcaaaaaataaaaatcatatatatgtatacatgtgcacatttaaatacacatatactatataattatgtatatatacacatctaaaaatttaaaaaggtcttgctaaaagttcactcaaaatattttacaacactcataagtgttctctcaag

SEQ ID NO: 51837 - DNA, 582 bp, Homo sapiens
  misc_feature 13, 15, 26, 479, 535: n = A,T,C or G
ggccccccctcgngngtacttctagnattaattaacgcggggtaaagtcctaaatttgaaatgaaaacctcattggtgactttatgggaagcacttcattaggtcactggtggtagtagagctatatgttcctctaccctcaagaaaaagagtttggcttctaactgcatcctgaggtacctcctcaatctgacagtgagggttaagtacaaaccaaatctgtaaccacccatgggaaccccaatccagaatatatttctgtcattctccccaagcaatatcagagtaggtggcaatcaaaacagtgaggatttctcttatcctgaggtctacaatattcattgcctgggtgtgaagacagaggggcattttaagcagcaaaaagaaacaagagaaggggaaatcagtcttcaagaaaatgtgcatctgatttactcttccattatgttgatgattttctctttttgacaggaagcggngtttaccaaaagactattgtactctggttacagccactgacttctgaagaatgttnaatacagaagtctatattaatttaatcctcttttaaaacccctgctc

SEQ ID NO: 51838 - DNA, 403 bp, Homo sapiens
cccccctcgagatacttctagaattaattaacgcgggctcacatgacaaattgctatagctaagaagagtctgcccccctgcttgtactccccatcatttcctaccattttaccccaaggctcacacagttctccatcccaactacctatttaacctttgtgtaatagatattacttgacttgtgatgcctgtactcacaaattcagtaggaaaatgaagaactggtttgatcaaatgaacccgttatttagttaagcaatgtctaaatttggctggctgcggtggctcacacctgtaatcccagcacttctgggggccaaggcaggcggatcacaaggtcaggagatcgagaccatcctggctaacacggtgaaaccccgtctctactaaaaaaaaaaaaaa

SEQ ID NO: 51839 - DNA, 584 bp, Homo sapiens
  misc_feature 525, 540: n = A,T,C or G
ccccccctcggaagtcttctagaattaattaacgcgggatactcaaaggaataagtacaagcattttacatcaacattctttattaattattttttctaccgcagggtaaatatggagagataaatgagtaaaagaaggttcatctacagtgtccagccatttgaaaagaagcagacattgactaaaaatatgtgattaccagcatatatatttaactagacatttttctaggctggtaatttactacttacctttccttgtctcatttacttatttattttgctacagaattaacttttggattaagaataaagaacattattgttatgataactaaaaatcacaaggtatgtaattttttaataatattaaatacttgaaattctacttttaacacattcaaatagacaaatcttttcaaacaatgaattaggttaagatgtcaaataagtgttcgagtatgttagctcatgacacataaaaaatgacatattaattttttaatatcaatttgaaattaactntttattaatacatancatattttgctctccgactaaaccaaatgctttgaggagattta

SEQ ID NO: 51840 - DNA, 544 bp, Homo sapiens
  misc_feature 482: n = A,T,C or G
cgggccccccctcggggtacttctagaattaattaacgcgggtaagaaattctatatacatgattttaccccagtgaggctctattttgcagagtgagaaactgagtaaagattaggaacctgccaagagcaaatatttcattaagtagcagagccaggattgaaacttgagcctaagtctctggctgaactgcgtgtcctgagctccaggttccaggggtatatctttgtgttcctgtggggtatcttcacatatggacccaatagtcccgggcagccataaccagtcagtatgcaaaacacacctgattcttttccctctctatgctatgttgtttatgtttaggtaccatatccctcactttaccctgccagcacaagtatacactcatgcattttttttcatatttttattaaaaacttctaaaatgaactgcatttttgcttcctcactttactgctttaatttgtaaggaaattancagtgcacacagctttggttagtgctgttaaaaagcagcaagagttgaaagctgatggcctc

SEQ ID NO: 51841 - DNA, 571 bp, Homo sapiens
cccccctcgaaagtcttctagaattaattaacgcgggtatgccctaatatttcataaacagaatcatttaatttgttgtctgttctgcattggaacttctgaaggttattttcctagaaggttaaatggaaaagccaatatacatgttttaaaattaaactccactcctcctcattaaaaataatttgacatatacattgtggttgcaatagtgatgagaagtaactacatcccattttgaaaataattcacttatcaggaatattttgggatttgcataatcaataccatcaggatttgagtggctactgcttggctttacaatatgcattttatatatgtgtacatgaaagaaaatacaatgtgcttttaataagttaataagtgatataagacaaacctacccaatacaggtatgtaaaacaaatagtagttgcaggagttaggaactgtgaaaacaggcaaagtaccaaatttctaagctgtgacttcttgtttattgtcaggaagaagtggagagtaagatacaagagagcactaagagcaccacagcctttaagttggcttttag

SEQ ID NO: 51842 - DNA, 609 bp, Homo sapiens
  misc_feature 546: n = A,T,C or G
gggtaccggggccccccctcaaaatacttctataattaattaacgcgggatggctcactcctgtaaccaagacatcagggtggcaggatctctcgagcccaggacatctagaccagcctgggcaatgtagtgagatcccatatctacaaaaataaataaatactgtaaaaataccaatgttatcaaagatggtttaagtataaacataaataatgcttagaagacaaggatgctgtgctttggagtctcaacatgctttattctgctgtacagttagtttttaggattgttacttttaactgtgccatattgctgatgtatatttttaacttttgttgcttctatcaatctttgtcaattctgaagaaattcttcatttctagagactttactatggtaaaaaatcaactgacaagcacctagtacattgcaccctgtgggccctcaataaacacttgttttcgaactgcctggctgaaagtgtcttcaggaacacaggcaataaacccaactgccttaaaaataacagatggtggtatctagtangcgttccccctgatgccttgttaaatatacaactgatgtcaggagacatttgcattttgttgc

SEQ ID NO: 51843 - DNA, 526 bp, Homo sapiens
ccgggccccccctcgaaagtcttctagaattaattaacgcgggtctccactcaatcaatgacacgctttgaaatttctagactgagttccccacctcctgttgaactcacttttggtatttgtctttcaacttgtccttcactggaatgaaccaacctgggccatttctaacagcttcagaggtaggaaagtgaaattggacaaatctaactaaaaagacttgtgttattgctgaaacatggttggaaagacatggattttccagtttcacctcttttccttcagagatgtatattacaaaagcaattcctaggtgagcatttaaagccaatgatagtaggatccatctgagcatgtacccatgttactggaaagttcattctccttttttaacagtatcagccctctgaatttcttaagttaattttcaactaagattaattctagaacaattccagaatgtcagatttgacaaaggagctgtgtcaattctcttaatgttttatgagcaatgggcttgctatat

SEQ ID NO: 51844 - DNA, 507 bp, Homo sapiens
  misc_feature 477: n = A,T,C or G
cgggccccccctcgaaagtcttctagaattaattaacgcgggcctgtggccactccatctcaaggaatttaatgtggccaagatactctacttacaaccttattcccccttttatgttgcccaccctctcaatctcataccaaaccctcttctccccaactctacacatatttttttctgtgctctcccatttcccatctaaatgtaagtttcttatgaagagcagtttagctaactcctttggttcatttttttttctttcagtcaacgttttcagagccttactttccactcccatgtatcttatcaacatattgtcctaaacagaagcagttctttttctaaaggagctctattttcacctattaaaataatgcatttttcaattgcctgaaacaccaaatgtcacaattgttattacctagttttgtcttgttcatgtgagagttggtaagtgaaaactttcagaccacacanaattgaagtgtacaaactctgggcatgcct

SEQ ID NO: 51845 - DNA, 596 bp, Homo sapiens
  misc_feature 16: n = A,T,C or G
cgggcccccccctcgngggtacttctagaattaattaacgcgggtatgtatattttttaagaaaaatgagatcaatttttagcctcaaggtaaatgcaagttgacttcgctatttcttaggctattaatccacattttatcaaaactattttataactagagctttagtttattctcactgtgctttatggcattataatgaagtgtttttgagaactggtaaagcagtctttcaaaaggcaatccaaaaaccagctagacatataatggaaaaatagcccattcacaatggcaacaaaagcatattatatctagatatagacatacaggaaatattcaagccatatgtaaagaaaacgataactttctctataacacacaagttttgaaaatatagacatatgtcttaggaagacacaataatatgccaaatttctctcaatatttctctacacccaatgcaacaatgcaattccaaatacaactctaataggattatttgaaacttgattaagtggttcaaaaaatcagaatgtataatcaaagaatatataatcaagaggttgtaagcaacatcttaagaaagttgggctgga

SEQ ID NO: 51846 - DNA, 598 bp, Homo sapiens
  misc_feature 11, 565, 566: n = A,T,C or G
cccccctcggnagtcttctagaattaattaacgcgggagggtctatgtcactcctcacatgcttcaaaacagtgccctgcccaccgcatactgtcactgtatttgattttttccccaagacccagttctcttaatttgtttccttcattctttattatattaattattttgccaataaaaattggctccatagaattagatataaaaattttgcaggaaaacaaaattttatgctggaaggagactgacagaactttggcaaaatagaaagcatttactctgaaagttgactttatatttgcctataataatgtacttttctttgggccaaactgttaaaaaagtaagttttaaaatacagtccagactgaagtaattaagtcttttttctttctctctctctcaatttctctttcctctgcagagttgagcttctgtgtggaggctgggctcagtggctcatgcctgtaatcctggtactttgggaggctgaagcgggaggattgcttgagcccaaaagttcgagaccagcctgtgcaatataacaagacccccatctctcctnnaaaaaaaaaaaaagaaaaaaaaaaaaaaaaaa

SEQ ID NO: 51847 - DNA, 565 bp, Homo sapiens
  misc_feature 545: n = A,T,C or G
gggccccccctcgggagtcttctagaattaattaacgcgggatctgatatcattaaaagtctcatatttgtctttcgtaacttctctagggctgtcgatgacaggagacccttaactcctatgccttgattatgtgaataagcacatgaaaatattttagttatcttagttcacttttaaactaagtttcaattatcactagattctaaatatcatcattgagccgttcttaaggaactgattttctacatattcattcacttcacctatatctagtgtgtctactatttgccaagaaaaatttactctcttaattcagcattccatatacttaacatcataaaaagtaggccatttttagttttctaaattatttatttaaacatttctttaaaattacattctatcattacactatatttcaacactacagtaagcagcctattttgtgatttttccttatataaaatacataattgaaattaaaaattaagttaccaagagccattttcactctggggaatgcacatttataaagtatgggnggtattttttcttcatcagc

SEQ ID NO: 51848 - DNA, 563 bp, Homo sapiens
  misc_feature 37, 467: n = A,T,C or G
actgggtaccgggcccccccctcggggtacttctagnaattaattaacgcgggggcattttagccgtctgtggaaggtaaccagttgaaacctataaaatattaagttctctaacttctctgttccatataggagccctagaatcctaaaagaaactactggccctaaaaaaattaaggaacatttttgctgccctgtgttttaatttggtttttgagattgagccaatatagaggttttcaaagtctacactgatatttatgatttgtatgttcttctacctctaactacatgtagcagcagtctcttcttaattttacaggaaaaaagaatagaatatctgaatttaaagcctttttcctatacctgttgaaaagttttacttctgttactctctaataaaccaaaagataataaagaaaaaagccaatgcatattaagaaaaaatttcaactcaagacagattnttattaggcatacattctaaaagttctttgtgtgtgattttataatacattgcataggtcaccttttttcttctttcatgtaatgggagtcaatgc

SEQ ID NO: 51849 - DNA, 272 bp, Homo sapiens
  misc_feature 244: n = A,T,C or G
cgggccccccctcgaaagtcttctagaattaattaacgcgggacacacaaccaagacagaataatgaaaaaatagaaaatctgagtagaccaataatgagtgaggaaattgaatcagtaataaaaaaaaatcttgcatccaaaaacaaacaaacaaaaaagcccaagactaatggtttcatgggtgaaatgtctttttttcacagaaatagaaaaaatatcctaaaatgtatatggaaccacanaagacaaaacccaaggcaatcttgagca

SEQ ID NO: 51850 - DNA, 528 bp, Homo sapiens
cgggccccccctcggaagtcttctagaattaattaacgcgggatacatgtaactcctcacccctttccatatctgggattaaaagatttgaacagagacctgtataatctcaggcaaaattcatatggattctcattactcagtcacacagtaacctccttcctgctgcagaagctttacagacaatcacagggcatatgaaatgttttagtaatgaagatgaagggttggagcaaatgtctccatacaaaacaaattgactctaggaaaaaggggaaaaatcaaatcaatgtctctgaaacttgagatttccctttatgctccctgccccttcatatgcccagtctctctcacagtcaaattctctcaccagagtggtacatttgttagaatcagtgaacctgcattgacacatcataatcacctaaagtccacagtttacattagggttcattcttggtgttggacaaatgtgtaaggacatgtattcgtcattatagtatcatacagagtatttttgctgccctg

SEQ ID NO: 51851 - DNA, 562 bp, Homo sapiens
cccccctcggagatacttctatattaattaacgcgggccctttgtatacattaacttcccctttaatacagttggactgtagactgttccaaatacaaaaacagaattataaaatttctggtttattgtataatttgtggttgtaccttttgtgaatggactgtaatataatttaaaaaaataacagctgaacaatctgctagcattctgttaaaaagcacattctgaaaggaaaactgttaaaatatgctaactttatcagtgcatctattactcatgcaacatgaattagaaaatcaaatagaactgaacaaatacatttgttgaaattgcatcataattagtttttcacaaattatagaccatagaagagagtagcgagaactttatctaaaggtacaaacagctgaaaagaatggtgggcttaggccgggcgtggtggattgtgcctgtaatcccaacactttgggaggctgaggccagtggatcacttgaagtcatgagatcaagactggcctgaccaacatggtgaaactccatcattactaaaatacaaaaaatt

SEQ ID NO: 51852 - DNA, 584 bp, Homo sapiens
  misc_feature 15, 525, 574: n = A,T,C or G
cgggccccccctcgngggtacttctagaattaattaacgcgggtcctgtcattaataaaggcaggtagaaaacatcaaagtaaaatgtacaagcaagtcaacattgcttcaagtgccataaaagtagaaaggcaaacaaattttcaaatatatgtttttttctttacatatttcttcttggttctgattactctcttacttatccaacactacaatgtttcacatctattttctcatttcatcttaggaaagtgctgctatttctctatcttacagatgagggaaacaggtctcagagaggccttgtggtttgtttcaggaaacctgatggtaagtagcagagctaggagttaaaatgagactttctgattttaggtttcttgttgaattccaagatttcttttagaaatcagccatcgcataaattactcatgaatgacagtctcccaatctattccactttctagtatacctggcttctattacagtgagtttccttacaagatcctcaattaggcatcattnttcacctgagaaaaataaatcttaagttgtgacagtcaatattcaatanatagctgcta

SEQ ID NO: 51853 - DNA, 312 bp, Homo sapiens
ccgggccccccctcggaagtcttctagaattaattaacgcgggatgaaaccaaagtttgttctttgcttttaaaaaactgaattaagccgagattgcgccattgcactccagcctgggcgagactccatcttaaaaaaaaaaacaaaaaaaaaacccaaaactgaattagctctttatctccaagaatagttgtaattttagttgctgcatttttttcagtagaatgccaactgaagcaaaaaatcctgatataaaagaaatcaatgatgatattatttccatcactcataatactaaaaaaaaaaaaaaaa

SEQ ID NO: 51854 - DNA, 590 bp, Homo sapiens
ccgggccccccctcgaaagtcttctagaattaattaacgcggggagccactgtgcccagcccacaaaacatctttaacagttgctttggggtggctgtggaacaggaggggcacacggtggtctccagagagctgttgacacagtacaacaaaaagtttgaataaaaaagtttgaataaaaaagactgctaattttcttgggggattttctccatcactttgtttggaatttgtctggtgcaattcatagaggggcccaccgtgcacacagggggagtttcccacgttcttcctgcttttctaacactgatgttccaagatatttcaatggtcatgataagcgaaaagttcaagggaatgtgtactaagataagtaaacacatactgagataacatcctcaaacattttttctcaaataagaaagtagaggttctaaacaggaaaacagaactggaattatcaagttactggacagttataattatcagactttaagaatgaataatcaagtttcaaccaatttcaaggtattagttgtcttttctgtgtccacccatctgaaaaaccgagaacacacgaaacgtctccg

SEQ ID NO: 51855 - DNA, 427 bp, Homo sapiens
  misc_feature 69, 77: n = A,T,C or G
cgggccccccctcggaagtcttctagaattaattaacacatagcaattgtatgtcatctagtggcatanaaacatgnatggttttaggaacatgtacacattgtggaacggctaaatcaagctaattaacataggcaccacctcatacacttatcagttatttgcataatagcattatttctaatttcaaaatttggaaacagttgtccaaaacaaaaaggattagctgagtaaattgtagcatatccatatggtggaatactttttacaaactgaaaataatgttatagaaatgtatttatatttaaatggaaaggcatttacactccactgttgagtgaaagaaaaatcaagttacaaaatactatgcattgtatgagttcattactgcttaaaaggaaaggatgtcatacaaaaaaaaaaaaaa

SEQ ID NO: 51856 - DNA, 535 bp, Homo sapiens
  misc_feature 17: n = A,T,C or G
cggggccccccctcggnagtcttctagaattaattaacgcgggggacaatgaaaggcagctgtgtctgccataggggtgaaatttggttggttcagggaagatttcccagagctgaggatgaatggattggaatttgaataatgggaattcaccagacagaaggaggaaggggagaggatcaggcttctagattaacagaatgataagatactggcattatttatctcctgatcctgttacgtcttagggagacagggtttctctagtaggctggagtccttccagaggcttagcattctaaaactgatagctcttctagtgctcggctacagaactgtcagtcctcttctgttatccttctcaccttatatctttgtagcactagcacaaaggagtggagtgagataacctggggtattaaggagactctgagttcctaaggtgtaatatgggcaatgtaattgaagctggaggaagcaggcaagggctttgtatgtatattaaaggtcttgaactttatttctgaatcttttg

SEQ ID NO: 51857 - DNA, 335 bp, Homo sapiens
taattaacgcgggacttcttttcctcaatcacaccagttgcccaggggagagagacacttacaggacactcccttctgcctattcaagtagtgccccttctactatttaaaaatttgtgtggctaacatggtgaaaccccgtctctactaaaaaatacaaaaaaaaaaaaaaattttctaggcatggtggcgggcgcctgtaatcccagctactcgggaggctgagggaggagaatggcatgaacctggacggcaggggttgcagtgagccaagatcgcgccactgcactccagcctgggagacagagcaagactctgtcaaaaaaaaaaaaaaa

SEQ ID NO: 51858 - DNA, 610 bp, Homo sapiens
  misc_feature 28, 592: n = A,T,C or G
cgggcccccccctcgaggtacttctagnattaattaacgcgggtcattcctagtaactggtaactatttgtgctctcctccttttcttacatttgatgttattgtttagtgtttgtcccactttatgaatgaccattttttaagctttcttaagtcatctttgcagaggtcatatttaataaaaaaaaaagtctgcctttgtctcatcatagagctgaacagtgttccttatgtggagtaggagcttaacacatatttgccacattgttaattcattgtgaaggatttcataaataaacctagagaaaaagatatccactaacgtattaaatattttttaaaagcaagttcatctgaaaggagcaactatgtcttattatcttaaaacttcaaaggaagtttttctttaaatgtaaaacatacctcttaattccagaaagactgatccttcatttggcttttgtgcattttagccagtcttggctttctaaatcatgttgaaaacaaacagaccatttgtgccatgtttgctgttaactaagtaataaaccaagaggatttagctaattttttgaggtcattaacatgatgnaagtattcacctgagtta

SEQ ID NO: 51859 - DNA, 436 bp, Homo sapiens
ccgggccccccctcgagagtcttctagaattaattaaatgcctgtaataaccggttactttggacaaattcaacatttctcctttcttaaggatgatctcaaaagggttcataaccaagaagtttgaatgcaaaacgaacaaaataaacaaatcctgaacaggcaggaatagaagaggaaggaaggctggtgatagtctaagagaagacttgtagcaggagctcctgtagagcagatgaagaccaaggaaaaagccatgtgtttgggaagataagtgcatgctttcaagccctggctgctcaaaagaaatgtcagacactagcttatgttctggtgggtggagaaaaaaacagacagttttcaagccatgagtgcctttgtcaggacatacaatgtaataatgctgctcacccatcctgcaaaaaaaaaaaaaaaa

SEQ ID NO: 51860 - DNA, 597 bp, Homo sapiens
ccgggccccccctcggaagtcttctagaattaattaacgcgggtaattaataataatgtattggatatttgaaaattgctaagaaagaatattttaaatgttctcacaagacaaagtcataagtatatggatgatagatatgttaattcacttgatttaatcatttcacaatgtacacacgtattggaacatcgcattgtacattataagtatatataatttttatttgtcaattgtacttcaatacagctgaaaaaaactgatgaatttgagttagcacatgttttagtacagcaagctcaatggtgaagtcatcaactggatatttatttttgaaagcatatttacataagggcttagctatggcaaagtaaaatataaaaggttgcctaagaaaattctaataagaggcattttacagaaagcctttagagcagagtgcgcccatgcacacacacacactctctctctctctcgatatctatccatccatctctcatcatctgtctgtctctataccagatcactattcatctgtcatacagacatgtacacatgtcttaagaaaagttacccattttgtaaaccctctcagcc

SEQ ID NO: 51861 - DNA, 546 bp, Homo sapiens
ccgggccccccctcggaagtcttctagaattaattaacgcggggcataacaaatacatttgacagaacttctaaatcatatgcagatatcttgaaaacttgcagagtatcaacaaaagaaataccattcttatatgaagcacatcacagtgtcattttcagttaaaatattctctgtgactttgtacttgtgttgaacatcttgccacattactttttatatttctatagtacttgtctaaaatagtaaaacaagtcctccaaacaataaagaaatttgtataaaaattattgagaaaagctgtatcaatggaagaaaacttactgaatgcaaaagaactgcttgttaacaaccgtattgtttggtagttaagaaccaaagatgtaagcaatttatatacttaggcaatagttcataatgtgtattctttaatgcattttaaaaagtaatatattggttgtaaatatttgactgatgtgtaactcattaggaatatttttcatttaaattattaagaaataggctacttgttagtattttcacaca

SEQ ID NO: 51862 - DNA, 445 bp, Homo sapiens
  misc_feature 409: n = A,T,C or G
ccgggccccccctcggaagtcttctagaattaattaacgcggggagaagacatggtcctgcctctaagaccaaccactacccctctgtctaaacccaatccctactttgctcctgtaattatcccctttccttcccatctaactttgttcctctatgctctatgattcctcttagcatacaatgatgcctcaacactactcttccataaaatctctctcttgaccctacatttttatccaagtaatgatgcattctctgttctcctcattagcaaatcttgcaaaagtattggctacatttgctgtttccacttagtaacctcccaggcttttctcaatctcctctaactgggatttgccctccagtagcccaagcgattgtttataatttaccaataaaaaagaaatntctcatctttcaggaattaaataggaaaaaaaaaaa

SEQ ID NO: 51863 - DNA, 593 bp, Homo sapiens
  misc_feature 28, 551: n = A,T,C or G
ccgggccccccctcggaagtcttctagnattaattaacgcgggatagttaccttcttcatccctattcatactgcttccttaaatcctatggttacttgaattttatcttgttcattgaataagataaaaaaatttaattggcttttatcttattgattgaatagtcagtgaatattcacctgttatgtgccagtcactatgctatgcctcagagctcccataataaacagaagtggacatgttcccagtttacatagatttcattatccagaaggagagacagctattaatattataaaacagatacaaatttactgttgtgaaaatgctatgaagaatgacaaaactgaatgatgaatgccttcaattgatatctagttaaagagctctggtaagttatctttgaagtaacaattcaattggaatttgaagagttagtaggaggtagctagatgaagacgggaaaactccattcagagatggagttttgctcttgtcacccaggctggagttgcagtgagctgagattgcaccacacactccatcctgngccacagagcgagactccatctcaaaaaaaataaaataaaat

SEQ ID NO: 51864 - DNA, 602 bp, Homo sapiens
  misc_feature 56, 555: n = A,T,C or G
cgggccccccctcggaagtcttctagaattaattaacgcgggtccacccacactgngaaactgtatttactctatgagaccactaggaggagatgcaatttagaatattaaattattgctgggaaaccacagatgacatcttttctccaccctgagtcttatttaggtattgaaatttaaaccaatgttgtagttggcattcgagaagatgaaaacaggccatcactaaagaaaaaaagatcttttactaggttaggtaaaacgataatgtattctttattttgaataaaaatatgtcagtgctgaggcaccagtgtaggtttattggggaagggatagtctggggaaggccttgagaatgtccctgcagtgcaagaaagataattgtccttttttaaacaatgttcttcagaaatgagaaaacctatcttggtctgaattccctataaacaaagaaacaaacaaaaccccgcctggttattaatcttaaaatgctatatacaacacagatggtggtaatgaaagatgcagttcaatccttctctattaatgaanaagtttaaactgtgtaattgctgtactatttcatttcatccttttct

SEQ ID NO: 51865 - DNA, 538 bp, Homo sapiens
cccctcgaaagtcttctagaattaattaacgcgggagattacttctggaatgattgtctgagatatcagatttcagcctgattacatgatagagtaattaaaaactgaattaattatattttacattattagatttaatagaactttcagatttctggaaactaacactgtataaatatgtaaatatgtaatcccagtaacctttcttagagtaactgaatgtcatttgggtagtagacaaattctgtttatttcattgcccttttactttcagaaactaagttattaaagcacaaactgtatgcacaaatgaggggaaattgaaatgcaaacctcaatgaagagacatttttgtgctaaaattcctaattacataagttatttacaaaaacattcttgatttatggtgttccaaaatttcccttaaagcactgagttattaaaacttcccacagtatggccaggcatggtggctcatgcctataatcccagcactttgggaggccaaagcagaaggatcatttgagcttaagaggtc

SEQ ID NO: 51866 - DNA, 493 bp, Homo sapiens
  misc_feature 419, 461: n = A,T,C or G
cccccctcggaagtcttctagaattaattaacgcgggtctgcgtttatgtagatagcgcctgcctttcgtgtagatagcgcccgacatctccatattcatcggttaggaatatagactaatttcaagcaaagatgtggagggcttatgttacagtgacaccacacattcagaggagcaccctgtttattttccatgtatgcttagcagctaaattggcatagattcattcagattggaaattttcggagcaaggtggcggaagaagaagatgacagtgggaggggaggatattggcaaaagagtaggtgaaatgataaattatttgttctagtatggacaacgaatggagtgaagccagcatagctctgtaattaagaattcaaggtttagaatcagatagatgcgtgtttgaatctangttccgagggcagtccttcttaacatgtggtctgcagatctncttcaggggtccatgaagtcgatgcgattttt

SEQ ID NO: 51867 - DNA, 539 bp, Homo sapiens
cccccctcgaaatacttctagaattaattaacgcgggacattagataccagtattgaaggatgaatgcatctttgtcaggatttaagggaaggagaaattcgtggttaaaaaaataatgtttcaggccaaagatgtacaaaaaagttcaatagcacaaataattttctaccgacctggcactttggtctactaacaactccatgacaggtctttgcaaaagactattctcccagcttttgttctcatcttctacagcttattccagacatagttgacaaatagatttttttttttgagacagagtctcactctgttgcccaggctagagtgtagtggtgtgatctcagctcactgcaacctctgcctcccaggttcatgccattctcctgcctcagcctgctgagtagctgggaccacaggcgcctgccaccacgcccggctaatgacaaatagatttttataaaatcgaaataagatcatttcactaagtactcgaactgttccaatgactcccaaaaaaaaaaaaaaaagcggccgc

SEQ ID NO: 51868 - DNA, 552 bp, Homo sapiens
  misc_feature 15: n = A,T,C or G
cgggcccccccctcnaaagtcttctagaattaattaacgcggggaagttagttaagtcagttcccatttcctaggagacaaagaggaacatagcagaaccaaggctttggagccagacacacctggttttcagatcttgtgtgaaaggcaagcgatatgacctccccaggcctctaacatcatgcacaaaaaggctgtgcttgcaggtcaaatcagcagtctccaaagggaagggctttattccagaatgtatatggaatgatctacacaagatttggaggggaaaatgactataactgctgtcttgtatctatctgtcttttgaaatttctattttatgaaggcatatcatctgttagtatcaaactgcatgtgcatgaatttaaaaatacagccgggcgtggtggctcacgcctgtaatcccaggcctgtaatcccagcactttgggaggccgaggcgggcagatcatctgaggtcgggagttcgagaccagcctgaccaacatggagaaaccccgtctctactaaaactacaaaaaaaaaaaaaaaaaa

SEQ ID NO: 51869 - DNA, 403 bp, Homo sapiens
acgcggggaatgcagggactggaaagaattgacttctatttaatgaggtttgatttattcaaccttgtgttattagtgaaaatagaataacttgttagctggaaaatacatgtaaaataatgcacttctctgaataaattatcagattgatgagtatataacaataatattgagatcactttacatttgcacataatgtggcagtttagaaagcacattcataagcatcactttgctcaatcttcataatcctctgggtattattgttcatattttatcgatgggatcccacaactcagagaggttaagtgacagctaataagggaatagcaaggtttagtctctggtattctgtctccccacacccttttcagcagtcacttttaccaaaaaaaaaaaaaaa

SEQ ID NO: 51870 - DNA, 373 bp, Homo sapiens
attaattaacgcgggtctctaaaaaataaatactagagtaataagatttatagaagacatcaccccatgagtaacaaaataaaacacgcttcaaatataactaattgtctttttttgtcttctagtgttaataaagaaaaggctatgaagtccgtgcccaattagggcatttcaatccactctgttattatactttattattttagttccctgtgtctgtagaaataagcttaagtagcctgatagcatacttttcaatgtaagaaataatttaatcgaattatacaatctgcatctcttttagaatcatttcatttcctaagtaaaaaatctacactaagcaaagtctcattcagctaaaaaaaaaaaaaaa

SEQ ID NO: 51871 - DNA, 415 bp, Homo sapiens
gggccccccctcgaaatacttctagaattaattaacgcgggtacctgtcacatggtatacactcagtaaatgttatctatcattaccattcctttaaaaaatagatttaaatacaactcagaacataattttaatttgcaattaaacaatgacaggcactggaattttttgttcccaactgccaacataattatggtatcataaaatttaaaatgttcagcaaaatttttggtcaaataaggagatgataaagctaataactaaactcttgtttctttggtgatctattcttctctatgttccctcacggggatttctaattttagcttttatgctaatgactacagaagaccaatttctaatctagccctgtaagaaactgagttacagtagaaaaggtaaaaaaaaaaaaaaa

SEQ ID NO: 51872 - DNA, 385 bp, Homo sapiens
  misc_feature 38: n = A,T,C or G
ctggggtaccgggcccccccctcggagatacttctagnattaattaacgcgggacttagctgctctcactcagtaccttccctttttccttgagctcatccatcagcatctttgttaacactaccatgatgatcccagtagcagtctgctgccctgtctccttagcagtgctgacacaagccaaaacttgttaaaaaaaaaaaaaaactcataaatgagaatagagtggaaacacaggaagaataccaagaaaaccaattcgacttatgaaacataaatgtctaatccttttctagcttgcttaccctgttcctcatgatctcctcagaacactttactcattccaagggctgatatccctgaatacttcttgcctgataccctc

SEQ ID NO: 51873 - DNA, 181 bp, Homo sapiens
acttctagagttaattaacgcgggacataattctactgaaagtaataataatggactatgtaagtttgcttaagacagaaaaaaatttttaagtaacataacctttttttaagagttacaataaccaaaaccaaaaacaaaaacccgtgaaataaccaagtaggttgtttgttgaactgac

SEQ ID NO: 51874 - DNA, 583 bp, Homo sapiens
  misc_feature 28, 513: n = A,T,C or G
cggggccccccctcggaagtcttctagnattaattaacgcggggattgagttcataaaagctatatttctcatgtgtttgggcagaaattttcaagaatatcatatttcagatttagggaaaactcaaaagttttatcataaaatgaacatattaagactcaaaagacacttaaatatggcattacaaatatgaagcaaacgtttttggactaacaaaggtcaaaaaatttcaaatatctatgaaaacatggcaaaacaagtagaacatgttgtaatggcaggcaaaagtgttcactttagaatccacgtttattcgttatcgtaagtttaggtttcacatagcattgttaatacaggccaaatatgcatttaaatacacttacagtattcagtgtatactatgtgaatatctacataagtgattttgaaataacgttttcttatttaataggtttattgtggcaacaaaaaaatgtgtggatgctagtgaaaatcatgtttgcagtagattntaaaagcctgaaagatacatttgttgaaatttgcattcggtttggaaaatgtgtgtttaacaattgaaca

SEQ ID NO: 51875 - DNA, 610 bp, Homo sapiens
  misc_feature 28, 517, 556, 580, 581: n = A,T,C or G
cgggcccccccctcgaaagtcttctagnattaattaacgcgggaccctaaaacttaaagtataataattataaaaaaaataaataaataaataaataaataaaaagaaatagaaatgctgagaacaaacacccttctcttgctcatgatttcaggaggaaagcattatgtctctctggaagataaatttggtgcctgattctccaccttagccagaagccaaaaactaggtagacttccttatacatgactattcatcagcatccagcacagtactctatctcttaacaagcacacaaagtatgcttcatatctttaaaattaatacataaaaatcactctatgagttgtaaaatggatgaacttgacatgttagcaataggttggagatttttaaaaaaatcatagcatatcaaacaagcaagacttattcttatggagcaacactagaactggagaaaatggagcaaatgtaaaagatgttgcatgaaaaaacatcttcataatgtactgcctgngttgaccttctgaagagtaacaggagaggagaccacggngccaagttttgtaccatgccctannagaagtgacccaagaagtcaaaccttgct

SEQ ID NO: 51876 - DNA, 592 bp, Homo sapiens
cgggccccccctcggaagtcttctagaattaattaacgcgggtgattagaaaactagacttaactagttacgtgtgccagtaattctaaaaattgatcaaaatcattacttatgtttaaaaataaacattgtggaagacagtctctgggaaaattgaaactttttaaaactaaaattgtgtgttggttgctttcctaatagaagcatttatatctatgttggtagaggccataaacttagatgcttaaaggggaagctaatataaatgagcaaagctgagaagtaaaaagaaccacaaatcctagaaacaatggactgaaaacaatgttcttggtatgcccctccatcttaaaaaaaaatgcttttttcatttctactttttttttgatacgtgagaaaaatgggcctgagtttgccagattgtgtggtggtgttttgttttgtttaaagaaaagccagatatctagtttttggtgtaaaatattccaatttttaaacatagaaaacaaattaaaattatttaaaattaacagaaaggaagattttgtgggctcagaataacacttttgtagagaatatttgccttcacaag

SEQ ID NO: 51877 - DNA, 252 bp, Homo sapiens
  misc_feature 28, 81: n = A,T,C or G
ccgggcctcccctcggaagtcttctagnattaattaacgcgggacccagaactttgtaaaatttaaaaatatatatttaantctgaagaaaggtcattagcccagagtgaccctctgaaatacagccttttaaatatgcactatggaacaaacaccgctatcaaggtttttgctgtaacaataaagatggttattttagtcatctgtcaattattcatagcactggaaaacaaagtaaaaaaaaaaaaaaaa

SEQ ID NO: 51878 - DNA, 626 bp, Homo sapiens
  misc_feature 39: n = A,T,C or G
gactggggtaccgggcccccccctcgaggtacttctagnattaattaacgcgggctacaaaggaggcatcagtcaactttacagagtggagaatgttgtatcaggaaagaactgtggctgatgattgagctgcgttcgctgacaaggagtaagagtggggatgaggacagttacaatacaggagctgtcccaagcaataagaacaccatggccaacacagcgaggaatgcactgtgcagtgagatggcagtggaaggcacagaacgggcagacatgagactgtgagtcagtcttaaagctgactacataggataaataaaaagcaaacacaggctgggcgcggtggctcacacctgtaatcccagcacttggggaggccgaggtgggtgtatcacctgaggtcaggagttcaagaccagactggtaaaactttctaaattaactgagacctgtctcagatttttgaatccacatgttgatatcaaaaccaaaggcacatcacaaaaagaaaactacaggccaatattcattctctgatgaatactgatgcataaatccttgacaaaatactagcaaactgaattcaacaatatgttaaaaagatcattcatcataaacaagtggga

SEQ ID NO: 51879 - DNA, 575 bp, Homo sapiens
  misc_feature 24: n = A,T,C or G
gccccccctcgaggtacttctagnattaattaagcggggatggttaacgggtacaaaatacagttagaaagaatgaataagacccacatttgatagcacaacagagtgatatagtcaatatcttattgtatattttaagtaattaaagtataattggacttttcataacagaaaggatacatgcttgaggtgatggctatcccatttactctgatgtgactattacacatggtatgcttgtataaaaatattacatataccccataaatatatatacctactatgtacccacaaaaattaaaataaaaaaattaataaaagaatagctccatgaaaaaaacaaaaaagagagtaaaagttccatgtttgctaacattactactgaattaatacagttgctgttaatttatatggagacaattgtggtaggaacatattagatgggtgaattacgagtttagtttgggatatatttcatttaatgtgtcgaatcagtttgggattggccatgaacataaaatactttatgtagttttgaaataaagccatatggctgcacaaaaaaaaaaaaaaaa

SEQ ID NO: 51880 - DNA, 594 bp, Homo sapiens
  misc_feature 28: n = A,T,C or G
cggggccccccctcggaagtcttctagnattaattaacgcgggtccatgatgatatatatcatatagataacagagagataatataaactctattatctaaaaaagctattatacctagaggtttcatgaaacaaaaagaaattttaaaaagatatttaattagcaaagctaggcaaagatgagctaatcaggttaagcagattgatgccaggttttgaattaaataatgaaactatttagtccacatatccacaagtctgtattgagcacttttgcagaggattcatgtgtgcatgtatctaaataaactatcacgtggataggaaagcacagctggaaaataaatcagaaaaaattctggtatttgggtattgtgtttgattcattcctttccacaattgtaaaacgcacatgagagtaaaatttatgatctccatgcaatagaaaagcataatcttaagttagggaaatgatgggaccaactgctggtttctaaaatgtggtgagaatgtgtatttaaagaggaccctatcaggcctttattctataaaatagctagacaaataaatctgaggcatctgagggtaatggca

SEQ ID NO: 51881 - DNA, 589 bp, Homo sapiens
  misc_feature 565: n = A,T,C or G
acttctagaattaattaacgcgggtctctctctctccttatttcctcagccaatagcaaagaagaggggaacattttattattttattttcctatacctttataaatatgagacctttcaaaggaaacaagttaaggtaaagcaacatgatatccttataagaaaggtctgaagctcatcccacatcatgctaagaaggatttctactgcaaaatcatttatctggacatctctgggttttaaagaatgctagaatacacaggagaaaaaaacaaagcaacgaattgaataacaccattaccaaaggtaacacacttcttcaagtttatttcataaatatttcctaatatagatcatttattttcccatttttaacccaatcttgcaaatcttgagctttctccaccccttatgcaggagtatgtagttctgtagattttcagggaaaagaattttttttgtaaatatgcccagggctgaatcagtaggtaaatgtaatggaaatgctacaacatttaaatggctataacccagtgaatcaacctgtcaagttaacaagcagctngttggctaaacacactgactctgc

SEQ ID NO: 51882 - DNA, 596 bp, Homo sapiens
  misc_feature 37: n = A,T,C or G
ctggggtaccgggcccccccctcggggtacttctagnattaattaacgcggggctgtatgcaaactttaatagatttatagctactaccttcaatttcacaccttgatgcatggaaatcttttttatctagatttaatacaactgtgagttttgatcttttatagagatttatgacaagagaattttgaaataagttcatatagtagtggcctctcatagcaatggaagacacctgagaaatcacagagctcaatcactggggcccagagagcagatcttaatgctagattgtaattagaatttcaatagatgaaggccactttgtgttgagaactgtagggaaacttgattttcttacccaaagggtattttatcactgggaaataaacaagtatcagatgcttatacagtataggctttcaattccgctggaactagtgttaagcatatacaagaagttataaaggcatggatgattgaaataattaaggaaagtgtatttccactgtatatactacctagccatgcttacaaagttcattcatgccctttgcctagttagcctcacaattaagccccagcatagtttattttg

SEQ ID NO: 51883 - DNA, 536 bp, Homo sapiens
cccccctacgaagtacttctagaattaattaacgcgggaatgtgccaaaccaatctgtggaagaaggtattttactctaaaaaacttctgtgcacatgctgatgatgggcaaaatcagaaaaaaaaggttccatagtctctcctaaacatgtgatgagaacatttgcatgttttggctttaatttggttttgaacctgaatatctaaaatgtaaatgttacagctagtagaagagaatttccatataaagaagcaacaaattctcaactttatactgtaactgctttgccactaacataagacttcgatcaagccatgagttaatgacaatgacagctagaatcaagtttcatgtggccccttatatagcaaagcagtctgcagccatgatgcatttggctaaatgaatggattttagattcagtctcctacttaattcttgcttactctgtgatgtaaggcaggttactggcctttcaaaccagagaacctgacacagcaagcaccaccacccaccctccaaaaaaaaagaataa

SEQ ID NO: 51884 - DNA, 508 bp, Homo sapiens
cccccctcggaagtcttctagaattaattaacgcgggtctcccccatcttgatgtccttcactcatctactctctaacattttacaaaatagcaggatatactaatggttaagtcccaaacttaatacaatcagcatattaatagggaaatcattacagatgtaaatctttggccttaaattatattcaaatgaaggaaaacaactcaaacaattcaacagcaaaacacacacacacacaataatcccattaaaaagtgggcaaaggacttgaatagacacaaatgaaaacataaaaatggaaaacaggtatatgaaaaaatgatcaacctcatgaatagggaaatataagtcaaagccaggagataccatctcacaccagacaaaagaaaagaagtgttggcaaggatatgaaagaaaagggaacccttgtacactgttggtgggattgtaaattagtacagtcattatgaaaaagggtacggaggctcctcaaaaaaaaaaaaaaa

SEQ ID NO: 51885 - DNA, 512 bp, Homo sapiens
ccgggccccccctcgaaagtcttctagaattaattaacgcggggggttgaggcagcaggattgtttgggctcaggaggttgaggctgcagtgagccatgattgcaccactgcaccccagcctgtgcaatgaagtgagacccttcacgcttcacacacacaggaagttacaaacaagcaaacgaaaaaaaaaacaaaaaatacattacttgactattagaaaacaaattagtatcccacatatttatagataataaatctgtgaatttgatgtttctgagagaaatataatgaaacttcaataataaacaaaactaagggaagtgaagagacaatctgtataggtctatatttattaaagagatttaatcagtaattaatagccttccaaaacaaatccccaggcccagatgtggtgaattctaccaaacactgaaggaagaaattataccaactctctacagtctctttcagaagatagatgcagagggaatactttgtaacttactgtatg

SEQ ID NO: 51886 - DNA, 360 bp, Homo sapiens
  misc_feature 325: n = A,T,C or G
cgggccccccctcggaagtcttctagaattaattaacgcgggcatgcctgaatggatttttttttaacaatcacttttaaaatacttcacacattggaaatgtcatttttggatttgagaacaaagacagttcatttattaaaaaaataacaaccagcctataaatcacataagctataattttaaaagccacccactctccccacaatgattttgttctttgtttttaattctatggttttcctacaggtcaaccaattactgagcagttcagctagagaatcagtaaaatggcttctgagcatcatttaatgaaaaatgcctntgatctaaaaaagaattcaaatgcaatcacacaga

SEQ ID NO: 51887 - DNA, 621 bp, Homo sapiens
cgggccccccctcggaagtcttctagaattaattaacgcgggaactcttcctctctcaccagtaatcgccattacagtcaagtgagaattaacatgaaagtggtgcaggaaaataaggataattagttcaatcaaatgaatttcacgacagcattttttagaaaagcatctcccaccaattagttatgctattacccatgattgatactataaaattgttttaaagttaataacaacaatgatcatgaatgaaaattattaatagctcagtgtattttaaaggtcaaggtcaaataaatatgcttggctttaaaaatgagataaaaagtatatagctttagtatagatagtagtattttatcttataacaaaatgaagattaaacattttgcagtccttgtctggttaggtaattgtattacattttaaatacaaatgttaatatgtatgtccatgataaaaaggaaggaggccaggcatagtggctcatgcctgtaatcccagcacattgggaggccatgggggggcgaatcacgaggtcaggagttctagaccagcctggccaatatggtgaaaccctatctctactaaaaatgcaaaaattagccgggcatgggggcg

SEQ ID NO: 51888 - DNA, 595 bp, Homo sapiens
  misc_feature 36: n = A,T,C or G
tgggtaccgggcccccccctcggagatacttctagnattaattaacgcggggtagattgtcatcaaccttttttgtatcagaagaggtgatggtcattctcttgttataccagaaaagcttgaaagtgtgtgtcagacatctagctcattttcccttgcacttatataacacattgattgtacctgtaaattacatcattttcaggatatcccttggaatacttgaattctagaactttgtaatagaaattctggaattcaaattgttacagtgatagaacttttaagaccaaagagaaatcttaaagataattttatcagaccttaaagtccagtgttagtaggcttactagatttaggaaccaccaaatttaaaaagacttgtgactcggcatggtggttcacatctgtaattgtggcactttgggagaccgaggtgggaggattgctggaagccaggagttggagaccacctgggcaacaaagcgatacttggtttctattataacaaacaaaacaaaacgagatttggtgtctgccaacttattcagccaagtaagaacattatgaaaataattatcctccactatcatta

SEQ ID NO: 51889 - DNA, 574 bp, Homo sapiens
  misc_feature 16, 29: n = A,T,C or G
cgggcccccccctcgnaaatacttctagnaattaattaacgcgggggagatgtgttaatataaagcgtccatttctctaaaaaactcaagaaaaaagggacacaaactgctggaaagtctgtattttgatgacttgctttgagtacctaaaataccaaattcgctataacctgactctattttaacccttacatactttctctgaagaaacttagcaaccatgtgccttcttaagagtctgtttgtcttgggttaaatgggaatgcatagtctgtgcaaaaatctatcagtcagatgaacatgaattatatgggatagatgtaggagaacgaacgtaaacacgttttgaaagctgtctagagaagaagctcactactaaggtagtgaagacccacagctacatccctacaaaattaaatctgtaatgcttagatcatgatatccagtgcaaggcagacaatgagaaaatgcgaggagtgtaggcatctctctatctctctcacacacacacacacgacacaagatctgatgagtttattcatgcgttcaacaaacattcgctgaattacgtacc

SEQ ID NO: 51890 - DNA, 297 bp, Homo sapiens
  misc_feature 11: n = A,T,C or G
ccccccctcgnaggtacttctagaattaattaacgcggggagccttatggacattacatttgcaggtgggcagcagatataggcaattgtgtctgtattataacgtttgatgtacttgttttcacaattcttccctatggtcagagaagtttatttaggactcaaaatactcaaggctgtgctataagtggtaacaaatacatggaaacaaattatttttccactgcccacactcatatttcttcaagggagattctgaacacaaaattacaaagtagaaaatagtttcatcatttt

SEQ ID NO: 51891 - DNA, 366 bp, Homo sapiens
cccccctcgagagtcttctagaattaattaacgcggggtcctactttagggtgaaagatggttaccgtgccaagggctggctcaccatccctctcctccaataaaattaagttacttaactttgttattactctcaggaattctggggtataaaaaggttaagaatgtactgaaattaaaattagcaatttactacagtattaataattcagaagtaaaatgatatcatagaaaataaggactgggaacagtggcacacgcctataatcccagcacaagacaggaggatcacttaaggccagaagctcgagaccagtctgatcaacatatcgagaccctgtctccacaaaaaaaaaaaaaaaaaaa

SEQ ID NO: 51892 - DNA, 472 bp, Homo sapiens
gggtaccgggcccccccctcggagtacttctataattaattaacgcgggtaagaaaggtgttagcataccataaccagcatagacatatcaaagaaaagagaattataagggaactttcttcatatttcccatcaaaatatccctatattccttacaattcaaaagtagtttctcataaatataagaatttcctggtatctccaaaaagccaaaatttgataatccatttactattttactctataaactgtactgttgagaaataaaatgtctttcaatttacaacaaatgtccattatcagcaggagttgcagcctcaggccctagccttctgctttgaaaaactggggcactgtgctaaacaatctacaaagcttcttccagctcactgcagcacatcacttagcacatccttaccacaccacttaggagtgggtaagggtctcagcactgtttaaaaaaaaaaaaaaa

SEQ ID NO: 51893 - DNA, 357 bp, Homo sapiens
  misc_feature 37: n = A,T,C or G
ctggggtacccgggccccccctcggggtacttctagnattaattaacgcgggacctgataaaaacttccaaatatgaaatctaagttttaaatgaaatttgtgtctaaaaccaacatatcaccatagtacatcttattatcatctagcctttaaagaaagactttcagaaaaaaataaaatggactttttgaacagttaccagttaacgataatgttgttttcagggaggaggtatttcttttagctttctgtattggaaagagtgaaatacaaatgataatgttaaatagaaagtaatgaaaagttttcacgtttcaaaaatcactaaaatctctggcttttgttcaataatgacc

SEQ ID NO: 51894 - DNA, 592 bp, Homo sapiens
  misc_feature 27: n = A,T,C or G
cgggccccccctcggggtacttctagnattaattaacgcgggatagaatagttgcactgtgctaaaaattctgctttgcttatttatcccttcttcctaccttaacccctgccaaccactgttctttttaatgtctccatagttttaccttttctagaatgtcagagttggaataatatagtatgtagccttttctgatgggcttttttcacttagtaatatgcacttaaacatctcccatgtctttatttagttagttagtttgagacgaagtcttgctctgtcacacaggctgggttgcagtgagccgagatcgtgccactgtactgcagcctgggcagcatagcgagactccgtctcaaggggaaaaaaaaagagttgacagatctctgattggctacagagctgtgttgtcctgtgaagtagccactaggctacatgaaattaaaaatactgttcttcggtcgtactatccagtgcttaaaagccacacattgctagatgctactgtgttaggtggtatatagaatgtttgcatcatcacacagaacgttctcttggatagtgctgctacagaaagttgaggaaagac

SEQ ID NO: 51895 - DNA, 549 bp, Homo sapiens
cccctcgaaagtcttctagaattaattaacgcgggtgataataaaagattttttgtgtatttgctacagttaagtttttttagatattcctgctttaagaactctaaattatttggaatttgcttttataaataatgtgaagttgagatatggcatattttttcttctaagttcataacttagagttctaacttctttttctggctgatttgaaaatggtgcatttttaatatggtaaaaacctccatatgcctgtgtatttcttccatattttatattattatatttatctgttcattctcccttatgagaaaaaatgtcacctttaactactatgggtttttagcacatataggatacaatataattaagcacatttaaaaatattttttaaattctcacttattttttctcatgaaatttaaaattgatttgccaattttctttcaatttccttaagtgtatacataattttggcctgtctcctatggtttgtatcactacttatcctattttaaaattgtaaaacttttgtggttttcttaatat

SEQ ID NO: 51896 - DNA, 571 bp, Homo sapiens
  misc_feature 25: n = A,T,C or G
ggccccccctcgaaagtcttctagnattaattaacgcgggtactaacagacatatataaaatgtcaatagcagcaaaacatagattcttctcaagtgcacatagaacatactgtaggatagatcatatgttaggttataaaacaagtcttaacaaatttaaaaagactgaaattatatcaagtatctcttctgaccccaaactagaaattaataataggatgaagttcagaaaatttacaaatacatggaaatgaaataacatgctcttgatcaaccaatggaccaataaagaaattaaaagaaatgtaaaaatatcttgagacagatgaaaatagaaacataacatatcaaaactatggaatgcagcaaaagcagttctaacaagaaagtttatagttataaacgtcttacatcaaaaaataagcaagatctcaaacatcttaatgttgcacctcaagaaattacgaaaacaagaacaaactaagcctgaagttagtagagggaaggaaataataaaactagaatagtagtaaataaaacagactacaaaaacacttttaaagatccatg

SEQ ID NO: 51897 - DNA, 451 bp, Homo sapiens
  misc_feature 416, 448: n = A,T,C or G
ccgggccccccctcggaagtcttctagaattaattaacgcgggctaccaagaaaacttcagactcaggtttcatcagtgaagaaataggtataatgctatataaactcttagaatatataaaaatatttcatttttatgagattaataatcttgatgcaaaaacctgtcaaaactattataagaaaggagaatcatgggccaatcttacaaataaacataggattccagtaatacacatagatagcaagactcaatattacaaagatacagttttccctcaggttttctacagattatcatcaaaaccccaacattggcagggcatggtggttcacacctgtaatcccaccactttgggaggctgaggtaagaggattgcttgaggccaggagtttaagacctgcctgggcaacanagagagactccatctctaccaaaaaaaaaaanaaa

SEQ ID NO: 51898 - DNA, 406 bp, Homo sapiens
cgggccccccctcgaggtacttctagaattaattaacgcgggtgtgctaaaatcacttaagctaaggtattatcagagtgtttattaggttccctcttctatgaaaatgatttgccttaagagaaaatgtgtttgcaatgtcttctcattccattaaaatatagtgttagacaatataaaatatagtgttagacacttttcttcttagatatttttctaagaacaaacaacaacagacattgctgagaaaaaaattccactccaaaagtgaaatgaagcttatatctccagcactatgaatgtaggtactttttgaaatttcacctttccctttagaaactatctaattcaggtttatttaaatgtcctaaatgtatggatgatcgttcccttcctatttatgctt

SEQ ID NO: 51899 - DNA, 401 bp, Homo sapiens
  misc_feature 78: n = A,T,C or G
ggtaccgggcccccccctcggggtacttctagaattaattaacgcggggggtgggggcagtgctgtaaaaagaggggngaaagatacccctgtgattcggttttgaaatttagcattcatctgattacaaggctgcggatattcaaaaatattcagacccagatccctgcaattgttaacatctcagaaaccttatcggagagataaggcagcatgcatcctagttcagtgcctaccttgaagagctgaagaaacagggtttctaattagatgaagttcgttacacacttaaagacttacagcaccaaagacagtagaagtagcttagatgctgtaaagagctgtataattttttaagaaagagatttaatatacaattgagggcgaaaaaaaaaaaaaaa

SEQ ID NO: 51900 - DNA, 608 bp, Homo sapiens
  misc_feature 551, 565: n = A,T,C or G
cgggcccccccctcggaatacttctagaattaattaacgcgggctccaaattctcagcttttaaattccaaatttggcaaggttgaagctaaattcctaatctcactaacagaatatcacctcaaagtacaaaaactgtcttttcaatatgatttcacacagatgttaactcatgattgtctaactccaagtgtctgcagttacgaggctgaattcatttgaattccatggaatgacgctctgatagcagtgctgcaaagtgcttcagattagtcttggaagatgtaacaagttacatagaaacaatttatatctgcataaacatttatacacacctatatgagtataactcagaactacctcaacttatgtcttagaggatatctaatacagtactgatataaatattgaacacatctaagctaaatccagattaaaactgaccccttattcataatgttccctagtattctagaaacagctaggaaagcaaaacaaccagattttcttagatcttggtaaagggtaagtgggtgagtgagtttcctcanacaaagcaactcanatcagagataccatgtcactttaacaaattagtgttactgcat

SEQ ID NO: 51901 - DNA, 585 bp, Homo sapiens
cgggccccccctcgagaagtcttctagaattaattaacgcggggtgggagaaaatatttgtaaaccatgtatatgataaagcgttaatatccaaaatatatgagaaattcctccaagtcaatagcaaacaaaccaatagaaaaccagaagcaaaagaaaaaagaaaataagttaaccaatttgaaaatagacaaagaaactgaatagacatctctcgaaagaagacatacaaatggtcaacagatatctgaaaaagtgtggatatcactaatcaggaaaatgcaagttaatatcacaacaagataccacctcacagctgttaggataactattagcaaaaaaaacaaaagcggccccttgctttgtgtccgccagagtccattatggctgccactatagttctccaggagtctggatagcagtcccggctgggaatgtctggagtctgcaggccccagtcactatggacagtttttccttcagtattggggttctaagaggcagaaattagaaataggaatgcagatggttgcagagtgtggttgggggttagagcggcgccctggaaaaaaaaaaaaaagcggc

SEQ ID NO: 51902 - DNA, 356 bp, Homo sapiens
cggggccccccctcggggtacttctagaattaattaacgcgggtaccctcgaagaataatttctactcagaatgtgattttgaacatttcataaatggattattatcaaggaagtaggagaatattttactttcatagcaagaaagtagcaagaataaactgaaatgtagaactcggagagactattaaaattagataggaccccagcaaccaggcaatcattttatagatgaagaaactatttgtacaatactgctgttatgataccatagcttccaattaactttttaaatgtagaaatatgtcctgcattgagggagtactgacccccacctccccccaaaaaaaaaaaaaaa

SEQ ID NO: 51903 - DNA, 393 bp, Homo sapiens
  misc_feature 9, 26, 167, 168, 169, 170, 171, 172, 173, 174, 175, 176,177, 178, 179, 180, 181, 182, 183, 184, 185, 186, 187, 188,189, 190, 191, 192, 193, 194, 195, 196, 197, 198, 199, 200,201, 202, 203, 204, 205, 206, 207, 208, 209, 210, 211: n = A,T,C or G
  misc_feature 212, 213, 214, 215, 216, 217, 218, 219, 220, 221, 222, 223,224, 225, 226, 227, 228, 229, 230, 231, 232, 233, 234, 235,236, 237, 238, 239, 240, 241, 242, 243, 244, 245, 246, 247,248, 249, 250, 251, 252, 253, 254, 255, 256, 257, 258: n = A,T,C or G
  misc_feature 259, 260, 261, 262, 263, 264, 265, 266, 267, 268, 269, 270,271, 272, 273, 274, 275, 276, 277, 278, 279, 280, 281, 282,283, 284, 285, 286, 287, 288, 289, 290, 291, 292, 293, 294,295, 296, 297: n = A,T,C or G
acttctagnattaattaacgcggggnaaaattaaaaaaaaaaaagaaaaaaaaaaaagaaaaaaaaaaaaaaaaaaaaaaaaaagaggaaaaaaacagcgcacgcggtggccccccggggggaacctcaagtctgccaaaaccgaggcgttttacacccccctcctnnnnnnnnnnnnnnnnnnnnnnnnnnnnnnnnnnnnnnnnnnnnnnnnnnnnnnnnnnnnnnnnnnnnnnnnnnnnnnnnnnnnnnnnnnnnnnnnnnnnnnnnnnnnnnnnnnnnnnnnnnnnnnnnnnnagtgaaacatctttaaaggcaaattattttttaaacccttaacttttttttaaaaaatcccttataatttttaaaaataaacccatttttgaacca

SEQ ID NO: 51904 - DNA, 525 bp, Homo sapiens
  misc_feature 28, 44, 466, 476, 486: n = A,T,C or G
cgggcccccccctcgaaatacttctagnattaattaacgcgggnaagccaaaccatatcagacggcattttaaaacctcccccaaatataaaacattatctaatgaattcactatatttatctcatgcaggttatattatttgagctattaaaataacatatttaagtgtataaaaagtgatatccatcttttcctttctttgattgtctttacttctggccatgttgccgtcagaataattaggataagatcaattagatctaggccaatagtaactcagaaatgaaagacaaattggtgttggacacattagaaaacacttttaaaggacctttaacatattgttatagtaagaattttcacattcttatctaacttaaatgtactttccaattaatactgtaatgtttaggtgactaatgagaaaaatataattaaaatttttgcttttaagatttcctgcanagtgacttgngttgaatggngatatgcactacattatgtttaccatgaggagcttgctg

SEQ ID NO: 51905 - DNA, 623 bp, Homo sapiens
  misc_feature 610: n = A,T,C or G
ccgggccccccctcgaggtacttctagaattaattaataaaattattttctgtaattgaataaatccttattttcaaatgagaatagagataagactattccctcaggaatgatttgccacaaagtagtggaaatccatgcacacattattaactttgatggtctttttaaattctcatttgttaggtattgtcattcctgggaaattggtgcttactgagcaagcagtttgtgctactcagcaagacttattttcctacagtctataaatctttaaaggaactagacagattcccaaaatttagaagtggatgtatttgatatctgagtggcataagtggctttaaatctctttataagatgatacatctaccatgtaaaaagatcagccctagtgtttgaccctgtagtagtattcttttggttgagtgttttattcatgtgtgttgggcatatgctataagtagcatatgattttgtgggatgataaaagtatagtttgtatacatattaacacatttttatagtaaaatttccttgtgtctgaagtattttttctaggcagatatttgaataaacatctaaacaatctttttttgcagtacacttntgggttaatatgg

SEQ ID NO: 51906 - DNA, 579 bp, Homo sapiens
gggccccccctcggaagtcttctagaattaattaacgcgggaggcctctgaaacgaggtgggaggtggataggccagtggaaccacttctcagtacttggcaaaagtagactctcatgaggcagctttaagtcaagaccgttgccttcagtgatatagaaacatttctttttggctagaggttagaagaaaactatagaaagatcatatttcaaaaagatacaaagaaagctgcacgaggttatttgtaacaggatcctcagaacttcgacaaatgcccagaccaaaaacaaagcaaaacaaaacaacacagaaacaaaacctatttagactggtagccaatgtgtctctgtttagactggtggccaacgtgtctctgagaaactgaagaagacttttttttccatgttgtctcacagtcaacaataatgatcttaattgtgcttacagaaaagcagaggaagtatattaagagaattctggtaagtatgaaactatgatcttagtgactgtaaaataataaaagaacaatacagttgtagagttgatcatttgtgggcaatccaaaaaaaaaaaaaaa

SEQ ID NO: 51907 - DNA, 373 bp, Homo sapiens
  misc_feature 26, 28, 39: n = A,T,C or G
aactgggtaccgggcccccccctcgnangatacttctanaattaattaacgcggggagtgtgccaaactaatttgtggaagcacaggtatcttactgctaaaaagacttctgtagcacatgtctagattgatggtgcctatctcagtaaaaaaaaggttaacatagtctctcctaaacatgtgatgataacatttgcgtgtctaggcttacattaggttgtgaacctggatatctaaaatgtaaatgttacaccttgataggagtagcatattccatataaagaagccactaattctcaactctatactgtaactgctttgccactaacataagactgggatcaagccatgagtcaatgacaatgacagctat

SEQ ID NO: 51908 - DNA, 486 bp, Homo sapiens
  misc_feature 33, 446, 447: n = A,T,C or G
gtaccgggcccccccctcggaaatacttctagnattaattaacgcggggtgggcaggcaggcaggctgctgaggacagcacctgacactcttatacaaagcctctcccttctctttggtgagcagacctcatgtgtggaaacaaaggggaaaacaatatttgatctgtaattccaggtccaagtccatagctggaaaaataaatacagtactaaacagaaaggtactctggaagactcactcctttgccacaagactgatggtgaatgcttcctgccaactcaacagcacaaacaggaagatgccacattacttatatctgcttaagaccctaactactagctagtaatcaatcccaccctctatagacgtcatccaagaactttcccagcaaactcccagcaccatttttcattcacttttattatgtctgctgaatttatgtgnnttatctgcttctacacaaggctttttttttttttttttt

SEQ ID NO: 51909 - DNA, 570 bp, Homo sapiens
gggccccccctcgaaagtcttctagaattaattaacgcgggacttttttcgccactgacatcacagagattataccattattctctccaatttttgagttttaaaagtctattaacaaggccaatattcatttgtttgctattaattccaaagttgatattttaagttgccaaggctaattatatatcctgccttaaaacaacaacatcaccagcaacatcagaagtaaattaaagagtctatgttttttatagaagtgtgtcttcattcaaatgtgactagagctagcagttctttgttccacagaaatcatccttagccttgccatattctgattacagaggaagaaaagtgaagcccagggagaaagccaagatgcagggagttttatcataacccgtgactggaggccatgtacctggtttttacccctagttatctgctctgttgttattgctcctgtcagaagaggctgatcagctgttcccacccattcccagaaccaacgggatttaccgggatgcaagactgaggataatctgtgacttctgcagagcctgataaaccaat

SEQ ID NO: 51910 - DNA, 613 bp, Homo sapiens
  misc_feature 22: n = A,T,C or G
cccccctcggaatacttctagnattaattaacgcgggactatataccagaggaaactgtgacacagtcagaatttcactcagaaactaacattgctaggcaaacaaaattttttatatgaaaaagaggtcttcaaaacacattcataaatataagaaactttaattgaattctgtcataagacataactgaaaacagaaaattgcatcttattaaatcaaaaagattatcacacgtataaaatataaagactaaggtaacatattttcattttatctttgtttcacgagcttgaaaatttttcagagtagacagacttttctgggacattacctgaacatcacaacactattgatttcctctaggtctataaaacaagtactaaccaagtttcaaataagactttaatgctgcatgaatcactttcagcttttcaagtcattgaattctcaatatgatacttcatcacactgttacacaaaagctctcaaacagtgttatgtattgtttttatttatgttgtgttttataatagcactctgggctttcccaactcaggtgaggtgtctgtaacagaattaaaagctgaggcaggttggaagcaatgttgactt

SEQ ID NO: 51911 - DNA, 552 bp, Homo sapiens
  misc_feature 28: n = A,T,C or G
cgggcccccccctcgaaatacttctagnattaattaacgcgggtcttctgacaagataattattttgggctattttataaaggtattttgagtttacagggcagaggaaaaaaggaagttgttaacaaacacaaatgtgtagctccagtgtgcccaacgaatccctttatgctttttttctgctgtcatttcttttcttcccttctgagacagattaataacagacgtaattcaggctgccagctactccttctttatttgcgattattcctttttatcatctcatgttccttactactgacaattatggaaagcttatgttaatatcagattgtctgtaaaatataattctttatagaaatgaagataataggagtatttgctcttataaaatgagactggcataaaggattacatagttagagcaaaattgttgctttaatagtctacccttaaaacagccatggaaacatacattgacttttctgtgtgggcatgacacttttaggaggataggagttgtaggtaaaagctttctactttgggaggccg

SEQ ID NO: 51912 - DNA, 567 bp, Homo sapiens
  misc_feature 40: n = A,T,C or G
agactggggtaccgggcccccccctcggggatcttctagnattaattaacgcggggtgaaagtgaaacagaactgttctttacagctcatctacagccatgtggcctaaactaccaaggtccagctatgctgtgggaccgcccattccacactcatttcagcagcacagtcaacaaaatattagaaatcaatttcagtgagctcctctgtacatctcatcagagctagtgcagcacttgatagtcattaaaacaattttaagtctccaaatctaaacatctaagtcttccattttcttaatgtctattcctaagaattaatcacaaaaaacgactccaaaaaactcttcacacatttccacattaatgcagaatgcacacaagtacagaattttctgttgaaaaacacaaataacaataagctggccatgtgtggtggctcacgcctgtaatcccagcattttgggaggccaagatgggaggatcacttgagctcaggagttcaagaccagcctacacaacatggcaaactccatctctaccaaaaaaaaaaaaaaaaaaaaaaaaa

SEQ ID NO: 51913 - DNA, 533 bp, Homo sapiens
  misc_feature 32: n = A,T,C or G
taccgggcccccccctcggaggtacttctagnattaattaacgcgggtgggtatataccgaataatgggattgctgggttgaatggtaattctattttgagttctgtgagaaattaccaaacttctttctacaatggctgaactaatttacatacctatcagcagtgtataagcattcccttttccctacaatctcaccagtatcttattttttgactttttaataatagccattctgactgatgtgagattaaaactcattgtggttttaatctgcatttctctaatgattagtccactacactatggtcctccatgatttctcttttgattcccatttaaagcaattactttttatttatccacaaccattttctgcatctcaacctcaaccctgattcatcatttgtttgctttcgacttttggattatttctcctttttggtttctgaaattaggcatctttaattactgctgcagtctcatagcttccatctaattaatgttgcaaaattccgctctgtattctgagc

SEQ ID NO: 51914 - DNA, 555 bp, Homo sapiens
  misc_feature 18, 31: n = A,T,C or G
accgggcccccccctcgngggtacttctagnattaattaacgcggggtcaagggtgaggtcaggtggcagaagtgatggacttgtatcttaaacctatagctccccattataggaacagaactattcctgatgtaaaatctgttgaggtctgctttccaaaaacactttttccatccactcctattattccagactaaaggtctgggaacaaaggaacacatctgcccgtccttgctgctgtgagattgcaggaagcaagtcttcagccttagttacctcacctgggaaatggtggaaaatgcagagctgctaagtgctgtgcctggccacgggcctttgtaatctttctcactgcctcctggatttcctgttaggatgaggtgccatacttctctggaactataaaggatgaaaatcattccatggcttgcttcccaacgcctttagaaaaaaataaaatccagctgggcgcggtggctcacgcctgtaatcccaacgctttgggaggcagacgtgggaggatcacctgaggtcaggagttcgagaccagcctg

SEQ ID NO: 51915 - DNA, 520 bp, Homo sapiens
ccgggccccccctcggaagtcttctagaattaattaacgccgggaatatatagatcagattaggtcatgcccatatcaactcctctccttcagtaccttcctattacactatttgaaaatccaaactccacatagacctggcctccaaagccccataaatctggcctctgaagacatctctgccctcatttcgtattgttcagcccttgctttctcctccccagccatcctggccaacttcttgctttccagattcctaggcatgttgagtcctgctgcacggcctttggacttgctatttccatctaccagaaaatgtattcccatagttctttgcttagcttactctctctttttattcctgttgcctccccaggggcccttccctgaccatctatcaacctctgtccatttttcctgcattatttttcttcatgacacttaccaccacatgaaaccctatcatacgggcacttgtttactcattttcagtgtactccactcaactgtaaccttcatg

SEQ ID NO: 51916 - DNA, 272 bp, Homo sapiens
cgggccccccctcggaagtcttctagaattaattaacgcggggcagacaaccctgctgacactggtcgaacatttccatcatggctaactttctgtcttattagagtaaacttgttgttacacagctataatccttgaaggtagagtcagaaatttggaattcctaatactcatcctttgggccctctcttccttgattggtcttctcttttttccccccttctggttaacactagatggtaaaatcaaatgtctgaaaaaaaaaaaaaaaa

SEQ ID NO: 51917 - DNA, 620 bp, Homo sapiens
cgggcccccccctcgagggtacttctagaattaattaacgcgggggaatgagctaaatcactgactacttcaccccctgaggttatggaatcactcttaaaacaacataaatagggttcaggatgtcccatcagggtcatgaatgaaaatccagtcagcctccacacctaaatctctggctctggcagtaaaaattcagatgctgttttcaaggttctgtttcatgtataatggtacatgattatttgatttttggctgaataattctgactcgtattatttaatttctagtaacattagaacctcacattttcacatattcagttgaactctactgaattctatatttatcttaaaacttcttaacttcttattttctgagctacatgttcttctctttttcataacattgcaatgattccttaaaaactatgtatatcatactatgtactgataaccagtttgcagtttatgacatgatttttctaattagtattattttaatgcagtgatattcatagtctttactcttcctgctggaaatcaagatgatacctagaattccatataattaataaaagcagtacttgtaaatataagttctgaaggttttgccccca

SEQ ID NO: 51918 - DNA, 535 bp, Homo sapiens
aattaacgcgggcacaagcgtgagtggtcttgataaaaaaagatccaatccattcatcccaactactgacattttttgaatctggcacatcaagtgaatactggacaatgctggtggatgaatatacctctcatgcagaaattgtatgccttgatctgagcaatttagaattttttttgaccaggctgagtttaaggatacttgcactgttcaatctgagtatcaggtagtaaaacaggaaaaactgtagaagatgcttatagtcatcccatttaactaaatggattactcactattctgtaaatcccactaactaatgagcataatatcctaaatactcattgcttataggccattctctttctgctcctgctaactgagttgtatgtttacataagccagttgtgttttgttcctgattaattatatagttgttagatgtcacataaatagatgaaatatgagttatatacatgaaaagcatcaataagggatagaataaaaccctgcatataacttatggattctttatgga

SEQ ID NO: 51919 - DNA, 559 bp, Homo sapiens
  misc_feature 19, 32: n = A,T,C or G
taccgggcccccccctcgnaaatacttctagnattaattaacgcgggaatgtactcccaaggtgatatatgcactataatttacttttcagagtttggagcagggagaagacttagagctttctaatttattcaaaggacaaattagaaggaaaaacctaaaagccttattgtatgctccaaaatttagaggcatatttgactccacagcagccaaatccctcagaaaataagctattgctttggaaataaaataatgctgaaaatgtaaagaaatatagcccaaattatttaatttattatttcatttttctccatcaatagaaaacccaattttttttcacaatagagccgaatgtgtacatggttaaaaatgcttgggcatggccaggcaccatggcttttgcctgtaatcccagcactttgggaggctgaggcgggtggatcatctgagttcaggagttcgagaccagcctgaccaacatagtgaaacctctatctctactaaaaatacaaaaaattagctgggcatgatggcgggcatctgtaatcccagctac

SEQ ID NO: 51920 - DNA, 595 bp, Homo sapiens
ccgggccccccctcgagatacttctagaattaattaacgcggggacttcttaaaacaaagacttgatatccaataatttttgaattcgggaaaagaattctagaagccaatctccataatagaatcccttctctctcccaaaatgtaattgtgacagtgcactgacagacccagtgagaaggactgggccttcaagaatcttctatcaaaagagtaatatataaaagagctgacagataagaactacctatcactcttaatattggtaatcctctttaggattagtttgcacccataaagttctcaagacttcaaactgggaaaagcttattgaactttcatttaatatatattttaaataaaaataaatcaggttcaggcgatagctccatgccaccaaagaacgaacttttttttacataaaaaccttgttatatgagattcatgaaccccattctctttgataaccgccagcatatttagataattgatcatgtgtgctgcccttgggttcctagtgactgtcaattaagtttgttcttaatgttgctgcatggaaatggctacaagcaaagacagatgacactgctgcttt

SEQ ID NO: 51921 - DNA, 452 bp, Homo sapiens
  misc_feature 440: n = A,T,C or G
gggccccccctcgaaagtcttctagaattaattaacgcgggagggtgctaaagtattaccaattgtgtgttccctatgggcagtgaggtccagggatgggacataaatttaaggctttagaaaaaataactctttcaaacctgtgagtggatctctgaacataatgatgtgcaaatcttgtttggacatgaggtcagacatctaaattgtatttctttaacataatatgtgtgtctattcacacatctacatcagcatttattatgtgccagaactatgtggcacatgatagaggcatttaaattgtaatgtgttaggcagggtacaatggctcatgcctgtaatcttagcactttgggagggctgagcaggaggaccacttgagcctcagagttcaagaccagcctgcacaatattagagagaccctgtttctacaaanaaaaaaaagcgg

SEQ ID NO: 51922 - DNA, 590 bp, Homo sapiens
  misc_feature 28: n = A,T,C or G
cgggcccccccctcgaaagtcttctagnattaattaacgcggggtcccctgtggcaccatagacttatctcctaaacactcttcttcttcattctgcagaagacttgtatgtccactttttgtcagatagtacccctcttgtgctcatagtctgggccttctctataccagagtttagaataaaattatatgattattgccagataagtttgagtcttacgtaaggggagcttctgcaattcaggaaatccttttagccttcaagacaatcaaaagctacacattcactttctgctattgctttatggcttccttcctggaggcaaagccttcctctagttgaatgtggaggtcacaagcaaataaaaaagggaaaaatgtattaatacattctaaaacatcctctttgtttcaatatctcttggctgtctctaatcccattcattccccactcatcttttctccctactttatctcatcacactagtccccacaccagaattaaaattttcctttaaagagcattcctctgaagctgacttccttcaagcctgcaacatgtgagcaaaaatgacaaaacaaagagggga

SEQ ID NO: 51923 - DNA, 527 bp, Homo sapiens
ccgggccccccctcgaggtacttctagaattaattaacgcggggagtggctatagctgaaagaatcgcatcgtcactttctttctgcaccatatggtctctctctctcatatctgatttatgactcccgatcaccacagatcctttggctaggccactttccacatgtcaacctactgttgaatatttggatgccaacatttcccccagggaaaagaagagacaaagaataatgatgtcctttcttctgtcccccactgcctccctaccatgtagcgtttctagtttctagtttgtatcatctgacacaggaaacccaggctctttctctagcccttcaaacgtggcagcttccagccatcatcttcaatcaaaacatgcccataggttcagggggaaaaaccacagcccatggtaggatgctaaagcccttaactaactcatcaattccaatctactaattggattccaatcttctcttttcacaaggaactttttgtatcaggcagccccaaaaaaaaaaaaaaa

SEQ ID NO: 51924 - DNA, 504 bp, Homo sapiens
ccgggcccccccttcgaaatacttctagaattaattaacgcgggccttctgagggtgagttgtccagccattcttttgcctatgattcttttaaagtagtccctatacattttagccaatgcttgatgctttatggtagaaactaaaccaagaatgaggtggtacataaacaaagtcaattttaaaaatctggaaaaaaaatatctgtaatgaagatggcattcaatgggtagcatctataatatacaaagagctcttataaaattgacaacaaataacagttacaataaagtcatatatatatgcataaataaaagatataaaaatggctgataaatataaaataatatgctcaaattcaaccagtagccaggtaaattaaaaaaacaaaagtaacacagagatattccttcatacccattaaagtgagaaaattactaaaagagtgataacagtacttcatagtgggaacatggataaatttttccacccaagttttcatga

SEQ ID NO: 51925 - DNA, 541 bp, Homo sapiens
  misc_feature 102: n = A,T,C or G
ccgggccccccctcggaagtcttctagaattaattaaccgggggctttcgagaggacttcacgagggggaaatcatctgaattggggttcctgaactacaangaaaaaaaatgagtggtcaagaggaggcagcgggaggcaagggtgaaggaacctccccattcattacaaggggctttagctggctgatatgaaggttgaagccaatgctagcagcccactgaggacaacttgcattgcaggctaaaatgactctgatgtcggccaggcgtggtggcttacgcctataatcccagcactttgggaggccaaagcgagcggatggcctgaggtcaggagttccagacaagcctggccaacatggcgaaaccccgtctctactaaaaatacaaaaatctgctgggtgtggtggtgcactcctgtaatcccagctacctgagaggctgaggcaggagaattgcttgaactctggagacggaggttgcagtgagctgagatggtgccactgcactccagccagggtgatagagcgagactgtct

SEQ ID NO: 51926 - DNA, 478 bp, Homo sapiens
cgggcccccccctcggaagtcttctagaattaattaacacggtccctttatgtcaaggtataaaatgacatgataattatttagttaaattgtctcaaagtgttgccgctggagacaatttaacaaattattagatttgtcaagagcttcctaaatccattaacaataaacatttgccattaataatacctgtcatctcccaaagtgctaggactacaggcgtgagccactgaggcgggcagatcacttgaagtcaggagttcaagacccgcctcaccaacatggcgaaaccccatctctaccaaaaacacaaacattagctggctgaggtggtatgtgcttgtagtcccagctacttgggaggctgaggcgggagaatcactttaacccagaagggagaggttgcagtgagctgagattgtgccactgcattccagcctgggtgacagagtgagactctgtctcaaaaaaaaaaaaa

SEQ ID NO: 51927 - DNA, 215 bp, Homo sapiens
  misc_feature 38, 43, 154, 205: n = A,T,C or G
aagactgggttaccgggcccccccctcggaaatacttnctagnattaattaacgcggggtgggggagaaagggctagatcttgtctttttgtcctaggaacctcttgcatatagctggtgccagcgaagggtggaaaaacccagagaggcctgngggctccagtacatagtgaggctgttttggggtcttctccttcttgtcccnctcctgtcca

SEQ ID NO: 51928 - DNA, 539 bp, Homo sapiens
  misc_feature 32: n = A,T,C or G
gtacccgggccccccctcggaatacttctagnattaattaagtataaagagttatttgtcaaaatactaagtaaaatctgactaaatccattatgtcatttgcttaaaacaataatttaaaatagtatcttttctgaatccttttctttttgttcaaattttatttaaaaaggaaagcaaccactaactctgaaatcagcaacttgtatgtgtagtaataatccttggctatttctgtgtgctataaagatgtgggcctgggaattttcactggattgagggtagatttttattttcatttacacataaaaaatcattgagtttgatttaaggaaacctgtaactgttagtatttctattgacatgacatatatacttcaaggtttcattctgtcccttgacaaacaataaataaaaataagattatcattctataagtggctttacacattgtcatgaccaaaattaaagaactaaagatgaatgagaaggaagaagagaaaattatagatttggaaagagagaaggaagaagaaaaa

SEQ ID NO: 51929 - DNA, 580 bp, Homo sapiens
  misc_feature 38: n = A,T,C or G
ctgggttacccgggccccccctcggaaatacttctagnattaattaacgcgggggttagactagaatcatatctaaggtttattccaactctgttattttgtatttattcattaaaaagtaatttataaatatatgttttacttttggggaaaatgacgtttgctatgtggaaggaaaaacaatttccaagggatcgaaagttatcttaacaatacagagttcactttccattgcaaccctctggcaaaatatgaattctgagctttacccacttacatgtggtattagttttctacagatgccataagaaattaccacaaacaggctgggcaaagtggctcatgcctgtaatcccatcactttgggaggccgacgcaggtggatcacttgaggtcaggagttcgagatttgagaccagcctggccaacacagtgaaaacccatctctactaacaatacacaatttagcaaggcatggtggcacgtgcctgtaatcccagccactcacgatgctgatgcaggagaattgcttgaacccgggaggtggaggttgcagtgagatgatatcgtgccactgcac

SEQ ID NO: 51930 - DNA, 591 bp, Homo sapiens
  misc_feature 43, 50: n = A,T,C or G
gggccccccctcggaagtacttctagaattaattaacgcgggnacatggnaagagagtgactatatctttttcatctctcctgaactcccccaaacactgtcctttatgaaaggatttctctcttcaagatatgataatttttctatgttttggaactcaaaagagacagtcttcctatgcaattttcacagtaaattaactccatcattccagacaggtaagcataccaattggtagcagttctcatgctcatgaatcttttggtaaaaaatatctcaaatggctttcaatgtgagcattagtgttgagggtccacatcacacaactgggaaaataaatcaaaaagagaatcaaatgtagttcttactgacaagacaagtgactgggctggatggtatcacattcccttctctacataataggaattccctatgataaatcacaaagtacttgaaaattatcgtataataaggatgatacatccattaaccataaagcataaaacaaactgccaggctgggtgtggtggctcatgtctgtaattctggcactttgaaaggctgagacaggtggattgcttgaacccagga

SEQ ID NO: 51931 - DNA, 458 bp, Homo sapiens
  misc_feature 28: n = A,T,C or G
cgggcccccccctcgaggtacttctagnattaattaacgcggggaaggggttagaatattgcagcattttttctgagaatgaagtggtaccatatccgacaatgagtgtgttaatctgaattatgtgaaaggaagcaacacagtcctaagattaatgttcaaattctttttagctctgctaatgtacaatcctaaactctaaaagggtataaaaaattggatatttggggtgagagaagcttacctaagctaattgggaaactcctgatcattatataaaggaaaatgtagacatatttgacattataagaatttcatggcagacccccttaatgtagtcaaaagacaatatatagactcagaaaaatattatcaaaatgcattttagggttaatatctctaagacagaaaatgtttctacaaattggtaagcaaatacactagcaaaaaaaaaaaaa

SEQ ID NO: 51932 - DNA, 555 bp, Homo sapiens
  misc_feature 493: n = A,T,C or G
gggccccccctcgaaagtcttctagaattaattaacgcggggtggctgtggcagagaattgcttgaacccgcgagggggagggtgcagtgagaggaaatcgcaccaccgcactccagcctgggcgacagaccaaggctccgtctcaaaaaaaaaaaaggtaatgaattttttaaactgtatggaaatacttttaaacacggatgttctagcaataaccccatcaaattgtgtcctacttaaaattaaaatcccagagtttaagcattttaatcgttttagggagtttttggaaattaacaaaaaaagttcttgttcagtagcatatccgtaaattaacatactcaaggtactggaccacctggagactaagaataaggctttagaaagtctcgatctggtctcctacatgattagactattaatggtatcatttgatcttcacatctcagagcaaactgcgctcctcctgcactgaattttaagcgtgtttancaaagagaaaataaaactatcacggagtgtccaagtccgagttaggcacctgagtgctctgc

SEQ ID NO: 51933 - DNA, 477 bp, Homo sapiens
cgggccccccctcgaaagtcttctagaattaattaacgcgggactgaacaacatctgaaaataaatgttttctatcaatagactaaaattaatcattaacttcctctgtgatgacatatatgtccactggaatgctacaattagttaattagcaaacttggtcatataaatcaaatggatggatggatagatatacagacaaataattatcacagtctattttaagttccttgagccaaggtttgaatgaatattgatttgatgtatgacagtatattttaaaaccttaccttcaattcctaccttactttgtttattttcttcattaatggatggaaaagcacataaaagtgatccaagtcctattaaaaaggaggaagctacaaaccatattactttttttctgtctccatagaatgctataaatattgctaccaggccagatgaaatatcgtaactcttttccatgccaacttc

SEQ ID NO: 51934 - DNA, 374 bp, Homo sapiens
cccccctcggaagtcttctagaattaattaacgcggggaaggacgccaacctgacagtagagaacaatggcaagagccgctaaggtcaaagacagaaatgttaaagctggcagaggagttaaaaggattacagtcgggagctacctaatgagtgagggaagtagcattgtacactctagtagcctctgaggcatcccagcattgagtgagaaacaggtaataaatgtttgtgatgatttctccagttaactagaaaaggtggaattttatccagtatacagtttggagcactgagatgtaaatagtagcttatcttgacaaattttactgcaactaattcacattaattataaatatttagaaaaaaaaaaaaa

SEQ ID NO: 51935 - DNA, 579 bp, Homo sapiens
acttctacaattaattaacgcggggggaaatgttttctcaaaaatgcagcatggttaaacagcagtgtctgaggattcaagaagtctcccagagaataaaatctcatcagtgctgagttacctaaattactaaaaccagcctgaaacacttttggttattccaataatattttcctttggaaaatgaaagacactgatcacatgaaataacattcatacccgctcccaattgtgatctctctgtggatagatttcattttcattcattaataaatttatttcctggatttatacttatcaagtcttccagcaaatgtgaatattaaaatatatatttctaaatgcttaatacttaatattcttggagcttaccatgtcaaagtaaaatgctagctttttttttttaacaatgagagactgcaaaacaattcattataggtaaaccattccaaccagcttactcccaaacactaagatgaaatcttaacaagctacaatttgaatctcaattcaaatatgaacctgatgtagaaccctaggcaaagtaagcaaccttatctgctgctgagtttcctcttt

SEQ ID NO: 51936 - DNA, 163 bp, Homo sapiens
agtgattctactaataaaatattagaggaacaagcattaaagtctaattattaaagttaaaaattattaaactagcacattcattcattcctctactttgatccacaggcattttgagtagttaacaatcagaatatattttatctttttctacggaagttat

SEQ ID NO: 51937 - DNA, 627 bp, Homo sapiens
  misc_feature 49: n = A,T,C or G
cgggccccccctcgaaagtcttctagaattaattaacgcgggcagtggnctgaataaatacattaatagatagaaagccaaacagacaaattctggttttctatttcgtacttgaatgtgtactgaaagcaagaaaattctcataaactttaaaacttgcttccggttatcaatgtaaaaataattaatgtggtacttccctctgtataactccacagcttatatgctttttgttatactacactgtctctcatgttattgtggcaagttgggacaaaaaatagaccctggggttggctgagcaagtggaaatatggccctgggacttcatgttcccaccagcatgcaattcataaacagtatggtaaaaaggtaactgaaatacagacaagattcccagagttagccagttcattcacatttctcagaacaaaactaactgaatttccctttctggacctctaaatatattttctgacaatccctggataaggtaaagtctatagcataattcaaaaatgtcacagaaataaaaaaaagaacaaaaagccttaattcaagctctatttgtcttagttgggggcagaggatctcctaatttatcattatcaatctctcccagtgctc

SEQ ID NO: 51938 - DNA, 483 bp, Homo sapiens
  misc_feature 40, 51: n = A,T,C or G
agactggggtaccgggcccccccctcgaggatcttctagnaattaattaancctgctccaaatacatcataattaaaacaatcttccatagtactaataatttaaattagccttccaaagactgcaaatttttatcaatgctttctcatacgtaaacttgggtcatacacttataataccaaaagaaatgcctgaggccaggcgcagtagctcacacctgtaatccttgcactttggcaggacaaggcagttaggtcaaggcttaagcccaggagttcaagactaggctgggcaacatggtgaaaccacatctctataaaaaattatctgggagtggtgacatgcacctgtaatcccaactacttgggaggctgaggtgggaggatcacttgagggggaggtggaggctgcagtgagccatgatcgcaccactgcactccctggctgacagagcgagactctgtctcgaaaaaaaaaaaaaaa

SEQ ID NO: 51939 - DNA, 584 bp, Homo sapiens
gggccccccctcggaagtcttctagaattaattaacgcgggtctcccgacaccttcaagactctcaatggagtaagaaagacccagttcctgccttccttacattaacagtgtgtgggtccaattacacagtgagtacagctggggccacaaatcaaaggatgtaaagagacatgctaggaagtagatacccagtacaccaggaagttgatactcattccactctgaaattaacttttcatttcttgtgatctctcgcaaatgaaccaaactgatcagtccttctcttatttaattcttaggagaatttgacataattgacaggtacccctaacttaaaactatttcttcctaagaagagactcacctatacaatataagcaaacttataaaaaggcaaacttggctttttaaatagcaagtgctattctctatgttgggaaaatgggaacccattggatgtgggatattagaattacaaaggacttgagtgcaggtcatcttgcccagtccccttcctttacagatgaagaaaccaaagtcaagaaaagttaaaggaattactcaaatcacacaaatatttag

SEQ ID NO: 51940 - DNA, 534 bp, Homo sapiens
ccgggccccccctcgaaagtcttctagaattaattaacgcgggcaccgtcaattaacatttatcaaatataccctgtggttttatttttggcataatttttgtcaaagctataaaatacaggcaaagcagtgtatgtgtctatatgcataggaaataattgtgcatttaaatatatatttatgccaaatcaacaatgttgctacacacatgctgtatatctttgaagcaaaaatgtattattaataacatttgagattaatagcctgtttctagtatcttctaatacattatttttttctgtttcaatgtgtcctatgaaaagatatgctgataaacttgatatagcttataaaacacatgatgaaatatttgttatacgtaagcaaaactaaacagaaaacgttaacagaaagaatctgaagtaattacaattggaaaatggaactagaaagcttaaaaatattatattgataaagtaattatcctaacacaatataacaagtcctggcacttacctcaaaaaaaaaaaaaaa

SEQ ID NO: 51941 - DNA, 578 bp, Homo sapiens
cccccctcggaagtcttctagaattaattaacgcggggtagcactcccaggctggctacttcagcattacccagtatgggtactaaagatttaaataggacctgcttctcgtgattctaaagtaaattggggcccagcaatatatattttatcaagtctacttccagtgattcagatgcataggtatgttaaggtcaaagagcttgcaagtaaataaaaaaagcaacagcaggcacaagtcacctgggaaaacagttccctgaaactgagacaaagcatgccaaaggaaggaaatccttttcaaatttcttgctatagcgaaaattaagactgcacagattccagtcttatattaggttagaatatagcttgctatatcctaatagagcctgctcagattccaagatttttcaaaaactatttaagattattcttcttaagactgctttaatttatttttgtaaccttaagataaagctcacctgaaaagtaggaagtattcaattagtatttgttagttgaatgcttaaattggagaaagagattaatcttgatgctttcgtgtctttgcaaaaaaa

SEQ ID NO: 51942 - DNA, 437 bp, Homo sapiens
cttactgctcaaaaagacttctgtgcacatgctgatgatgggcaaatagaaaaaaaggtaccatagtctctcctaaacatgtgatgagaacatttgcgtgtttaggctttaattaggttgagaacctggatatctaaaatgtaaatgttacacactgataggaatagatattccatataaacaagcaacaatttctcatctctatactgtaactgctttgccactaacataagacttggatcatgccatgacttaatgacaatgacagctagaatcaagtttcagtggccccttatatagcaaaactgtctgcatccatgatgcatttggctaattgaatggttcttagatacagactcctacttaattcttgcttactctgtgatgtaaggcaagatcctggcctttcaaaccaaacaacctgactcatcaagcac

SEQ ID NO: 51943 - DNA, 583 bp, Homo sapiens
cgggccccccctcggaagtcttctagaattaattaacgcgggtacctagtattttcttttgatttactatgtaaaattatttttaaacatttgtctcatcattatttcactttctacagaacttctaaatcaatatgatgacctgatgggatatgaatatttagttttttctttctttaagtatgttcctcttatagttagccaatagctgaagtgacatcaaattagtagtaaatatttaactttatttactaggctaatattctaatgacttccttttatcaaactgctataggtgattggaaatgtgatacttttgtgggctctagaaagatgaggatcaggattgggtcaattctgaacttcctttctgccctttaagtgcataaaatgattctgaaaatagagaacaccctcagtatatgcaaacttaattgaactaaatgtttttgcctctgcccctaatcattaatatattttaatcgatttacaagctcttttgaaatgcagaaaagtgttttaagtattaggactgtactgtgtttactatcttctatccaagcttcaaatcaatgtctaatag

SEQ ID NO: 51944 - DNA, 506 bp, Homo sapiens
  misc_feature 24, 40: n = A,T,C or G
gccccccctcgaaagtcttctagnattaattaacgcgggngaaatttttaagtacagtacgaaatgtggttcttaaaaaccaaatgatttttaagacttaaatcatctgtaagaatgcatgcctgtttactcttggaatataatcacgttatgctgggttgtgattgacagttggaaaacaatcattaaaaatcagcataactgctgagtaccagtaaattaacaaatatttactaagtacctactaccatatacctagaaccccctcaaaacatttatataaattcaattataagtttaaaaagtcaatgttaatatgtttactgatatgttaagcacctactatgtgccaggagcttatcctaaacagtagtgatgcaagagcaaacaattacctcctaaacattttggaaaaagttgcatttcaaaatttaataagacagttttgattatatgctatttgtaaccactgttctaggtgttgggggaaagtaaaaaaaaaaaaa

SEQ ID NO: 51945 - DNA, 544 bp, Homo sapiens
  misc_feature 539: n = A,T,C or G
cgggccccccctcgaggtacttctagaattaattaacgcgggcagtccccagtacttggtcgttctggtgtcttcccatgtcagtcttcatgctttgttttcaacttcctttgttttgaaaaagcaaatctcagtattctggaacatttgttacactcttgtttcctcccttaggccgggcaaccttgaaggcaggagccattccagtatcagaagggagatactaacgaggagggtgcaatgttgcagatctgctgagtatgcatcttattgtctgaaatcactatatttttcagctagtttttcctcctgataaaggaagacgaactctctctgtgaatcctttatttttgtttctagagatagaaagattaacaggtatagcctgtgtttataatccttttttatagacaaaactcataatcaaaataaactgaccttctccttcccttccctatcaccattttatttttcctcacaatagtttaaaacatgatcagaaagatttttttgtgtactattttcagggcccaaaaaanaaaaa

SEQ ID NO: 51946 - DNA, 447 bp, Homo sapiens
ggccccccctcgaaagtcttctagaattaattaaggataacactaatttaactattttttaaaggaagaaaattattaggacaaaatggaagtaaaggggtaaagggaagcacacaggtaaatgtaagttattgttgatattttaggccaggtgcagtggctcatgcctgtaatcccagcatttgggaggccaaggctggtagatcacttgagcccaggagtttgagaccagcctgggcaacacagggagacctcgtctctacaaaaataataaaaatttaaaaaattagttgagcttggtgcacctgttacaggtgcacctatagtcccagctatagctacttgaggtgggaggatcacctgaacctgaagaggtcaaggttgcagtgagccgtgattgtgccactccccttggtaccagtgaaaccctgtctcaaaaaaaaaaaa

SEQ ID NO: 51947 - DNA, 464 bp, Homo sapiens
  misc_feature 44: n = A,T,C or G
cccccctcgagagtcttctagaattaattaaccgcgggccctgnaaaataaactaatcagaataaagctgacataaacttaagcctaatgttttatcaaatattaacacctctgattacaaaattgttatcatcatctttcacaatttcttagaataactgtctcatctttgatatttttatgtcataacaaattcagaaacaggatttttccctttatttatcttccttttactttttgtgctcatgactataatatctgtactcttcagacaaggcttgttttgtgttttgctgttgttgtttgagcttttagaaaatcctttgacaaaacctttgtttcatcctccactgcatagtgtacgtatcctgaatgtatccagccgagcttgattacatgaaacatagcctctagaacttgggaagtactttcttttctacctgccccactcaaaaaaaaaaaaa

SEQ ID NO: 51948 - DNA, 598 bp, Homo sapiens
ccgggccccccctcggaagtcttctagaattaattaacgcgggtggccaggctaatctcgaactcctgacctcaagtaatctgcccactccggcctcccaacgtgctgggattataggtatgagccaccacgctcagccaagccaccacatccagcctctaaggcatatttccccacacccattaagtctgtgtgacgtcaaaagttaggacctggagtttaacttctctcattggacacctcattaaccaatgtaataatgcctccagagaaatatgaggttacaatgaataacaagaaattttatgagttacctgctacaaaagaaaggtaatactttgaacaatttatagtagaggatcagaataaaagtattagacagaaaaccaatttaatccaaacataatatgtattttcaaagagatatgaaaccacatagctatttgaaataaaggcaaaaagaattttttttaaaaaaagaactatttgaaaatcctggataagaaaaaacagagttgaaataaagagtttaatagctaaattaaatagcatgttagagatgtggctgaagaaaaaaatttgtattctagaaagtaga

SEQ ID NO: 51949 - DNA, 535 bp, Homo sapiens
  misc_feature 26, 462, 463: n = A,T,C or G
gggccccccctcgaaagtcttctagnattaattaacgcggccatatcatagcatgtgtctgtagcccattccatttaattgctggatagtattctattgtatgaatctaccccattttctctgtccatttactggttgattcttgcttgtatagctgatcatttacaggcttaattttttgtgtttttataatcttgactctttttttgccatcaattagtcatgaaaatggtgaatcagatattcagagttctgattctttaatttgcttctgggagacagtcttgtcaaggcttgggactgtttcaaaaaactgtaattaaaagaagcttacatcaagaccaggtactagacaaatggacttgaacatagaaatcgacctttttaaacgtcatttgagaagaggtggggaaggctgatagcaaggtagattaatacctcaaactctccctgaacactctnntcttcttaatgagcagaaggaaaccaaatgtgacatcgggatggttgtttcatcatgttaaaaaaaaaaaaa

SEQ ID NO: 51950 - DNA, 551 bp, Homo sapiens
cccccctcgagagtcttctagaattaattaacgcggggatctcttgagatccagagttcaagaccagcctgggcaacatcgtgagaccccatttctatttttttaaacaaacaaaaattataaaattgggaatgacttgttccttataagctatgaaaaactagtctatgtattttctttaaaatgttaggcagcatagtctagtgatggactgtggattcaaattttagctcctccattgaactctgtgaccttgggaaagttttctctttgtgcctgtattctttagctatataatgaaagtacctatggttatcttaaatgaaacttaagtgaatcaatatgtaaagtgccttgcacttaatatgcatgatgtatgtctgtcaagtaaaataattctctaatcctactacctgtaacataataattatattagtagaaataacattaactagttttgtattaggaacaaaaacacaaactttaaaatggttctcatgagtactcatgaaatggctttgaaacttagtgttttattagtcatgtgtgaa

SEQ ID NO: 51951 - DNA, 525 bp, Homo sapiens
  misc_feature 495, 496: n = A,T,C or G
ccgggccccccctcggaagtcttctagaattaattaacgcgggttcctgaaagtctttcgtagatattaatttccctctcccagtaggattagctattgcgtttacccctagtattaagatgagtgtaaggtacctagcttgctcccaaaggcagggtagagatgagccaatctgagataatgcatctgatattttttcccaggattgatagcaaatctagtaatgtgaagatttcatttcttggaggcctggcctacaaagtcatttatattgaactcttaaaataataattcttaattctataagagctcagatttactcatatcagttgtagtaagaatagtttcactgtgacataaaaatgcctcatacttttatatgcatgttcaacaactctgtagcctgaacagtgggaacactggagaactatgtatactcacaagtaatattttacttaaagaaatactgacttgaggtgcttcagataagatatnntctaatttgcttccctcactccatccctg

SEQ ID NO: 51952 - DNA, 530 bp, Homo sapiens
cccccctcgaaagtcttctagaattaattaacgcgggccctggcagacgtaacccataaagctaactctaaaacatcaacaccttaataaaagtggtttagctgaattatttctgatgtggcagctagctacaatgaggtttctaataaacagataaattatgtttttttaaatactctttcatattcattaactcatttcagctttacataagtagcaaggagagttgggtgttcattccttaattcattcctgaaacaaactttattgactgccaagcactatgtaagagttctaaagatacggacaagataatgatgcccagcctgggcagcatagtgaaacctcatatctacaaatatatatatttttcattagccacccatggtggtttatgcctgtagtcccagctaatcaggaggctgtggcaagagaatcactttagcccgggaggtcaacgctgcagtgagcaatgatcatgccactgcacttcagcctgggcaacatagtgagaaaaaaaaaaaaaaaaa

SEQ ID NO: 51953 - DNA, 535 bp, Homo sapiens
  misc_feature 28, 516: n = A,T,C or G
cgggcccccccctcggaagtcttctagnaattaattaacgcgggatacaaagcaatcccttatctgttagaaagtaaggactaaacaaattaacaaaaggactaggatgattgaaaagaattggtgccttattatgaatgtttgccaagacatttataaaaaagatagagatgttaaaagaaaaaacaatgtaaattctattgcctaatgtgtacttccatttcaaatatctagttcacatattagtaggtatcattcatcttaattgggttcaagaaggctcttcactgctaatggcaaatcaatcaccatctctgaacactgcagtatgtactcatgacctgtagattgtgctgaaattttaatacatggggaagtattttgaaaagttaggaatttgagttggaaaggcatccagaaaattgattttgatttttcttaagggttaaggctgggtgtggtggcacacgcctgtagtccaggtcacttgagaccaggagttcaagaccagcctgngcaacgtagggagacccca

SEQ ID NO: 51954 - DNA, 571 bp, Homo sapiens
  misc_feature 50, 519, 521: n = A,T,C or G
ccgggccccccctcgaaatacttctagaattaattaacgcgggcccctanaggaaacagcaatgaaaggaaacaggacaaaagaccccgtggcaagaaaaaagatggcctaattttttctttctcaccattcctcttgtcctcttaacccatctctttactgtgcaatttgcactttgagtggctctacagatggtggatacagtgaagacctctgttatcaatattaaaactgagcatcagtgagtcaacaaggctccactttgtcctgttcaactttagcagcaccacagagatcagaactaagtaaagccatttacacaattaaggaggaggctgccttttagagtggcacaagcatttcctctggagtagtgtgtctgaaccaggaagtccctctctgccttgtctgtggattttagacagtctgaattcagtttcttcttctgtgaaatagatcagccccacttgtactgtcatagtattgctctgagtatggaaaaggacaatggaaaatgangngctctgtattctgttatttgtcattagttgtgttctactaaccaaacttt

SEQ ID NO: 51955 - DNA, 586 bp, Homo sapiens
  misc_feature 28: n = A,T,C or G
ccgggccccccctcggaagtcttctagnattaattaacgcgggttcccgtctcttgcatattcacacatgtcaccacagcccttggcaagtggacagtagcggtccctctggttactgagaacatttgaatcatatgcctgggtcctgttggtttacggagcccaagccttttgagctctgaccagtgggccatctgttaccaagttaaaaatgttgactctgcaagtctgctgctcagcctccttggcctgtgtctgttacatacaccattctagcaccttggcagcaatactctgagcgcaattccattcaccatttcattccttccaagtccttcagcaatgaatagtacagaatgaaattcttccagctcatacacttttaacctttgcataaaccttaaggataagctaaaggttatcaaaatagcttcaattgcacaggttaaacatctctcctgcgtctggacggtcaaggcatttgataaaaggaaaaaatgagagcaaagagtttgtttatttttcaaatttttaagtggaaacaatctaaatgttcaaaatagggaagtagctaagtcaattatgg

SEQ ID NO: 51956 - DNA, 611 bp, Homo sapiens
  misc_feature 566: n = A,T,C or G
cgggccccccctcggaagtcttctagaattaattaacgcgggatccacaaaagtctttagcaatgtggttttcttttgctaaaattctcttaaatgaaggattgctgtttaaggaaaactacttataattatagcttggtcttctggaatagttctttcctcttttcactaaggtaagtaggaacaggtgattttaagtctatgctgagaggacagggacaatgaggcacctaagatataagtatatttgaagttctagttttatgtttgttttatattttaaacgattattttctttgctttcagagttcaatgctctgatctctgtattagaaaatgatttcagatagaatgtgcttataggtaaggcactttcctactcaaaataatgagattaacaacagacaccatgctcttcgtggaccatctttcctgtccagctgatgcattattcctttgccagtctccaatccagaaggtatacgagtggaaagtgtttctggctatcatctaaagagatcagaatttaatgcttactccagcacagccaacttccattctctagnttgctttctccacttgtgtgccctgtctggtagtggtgagctcaa

SEQ ID NO: 51957 - DNA, 584 bp, Homo sapiens
  misc_feature 27: n = A,T,C or G
cgggccccccctcgaaagtcttctagnaattaattaacgcggggtttctaacacttcatattcacttgagtcaattccttattagatagatagatagatagatacatacatacatacatacagaatctcttgttggtcatgttcctctggagaccctgattaatgcattcacaacagccaaaaggtggacccaaccccacacgcatcagtggtcatacgaataaacacaatgtggtagattcacacagtggaatattacgcagccatgaaaaggaacgaggctctgatacaggctgccgcgtgcatgaacgttgaggacaccatgctcactgagaggtgccagacacaaaagaccacacagtgtttccttctgtgaaatttccagaacagggaaatccacagagagggagaaagtggatttggggttgctaggggctggggaggaagaaaggggagtgactgcttcatattagttacagggtgtactttggaggactatggtggtctggacctagacagaggtgatggtttcataaccatcacccacgtactaaacgcctctgaatatacactgaaaaaaaaaa

SEQ ID NO: 51958 - DNA, 587 bp, Homo sapiens
cgggccccccctcggaagtcttctagaattaattaacgcgggttcctattatgccatctaataacttattactaacataagaaactactactatttacatatttatctcatgttttgctccttaaacttaagcttgtaagcatttttttaattgactttctgtttttagatatattatcccacaaaacataagcaaattaaaattttcttccttattttcagaagcactcatttcatatatatttcatatatatttcattggccagaacttcccaaaatattacatgaaaatgatgctctaaagtgttatttactattcagtatgttgttgtttgttggattaagaatcacataaagaaggctaggcgtggtggctcatgcctgtaatcttagcacttcgggaagccgaggtgggtggatcacctgaggtcgggagttcaagaacagcctgaccaacatggagaaaccccgtctccactaaaaatacaaaaattagccgggcgtggtggcttatgcctgtaatcccagctactcgggaggctgaggcaggagaatcacttgaacccgggtggcagaggttgcagtaa

SEQ ID NO: 51959 - DNA, 529 bp, Homo sapiens
  misc_feature 42: n = A,T,C or G
aagactggggtaccgggcccccccctcggaaatacttctagnattaattaacgcgggctccttgttggcaagtcttcttttgttcactgatgtaatccagttgttcggtaaatgtttgtagatgactgaacaataagtaggatataaacaaaaatcttatgatagtgaggccattttcattaaggcaaaggagcttctcattaaaccaatgatagatattttacaaaattctatgtttatttcataagaaacaattacagtcttttctgtaagacgcaaatagatgagctaacaataactttacgtttaaattttttttatgtgagtttctcaaaaggcatttcgaaaataaaatagattaattgcctactgctaggataaaattatgtcatagattttctcctgagagaattctccattgaattgaattcctccatatagggagataacgaaggcatcatttttgctggttcaaaccttcacattgtggatattctattttgatcctcgccttcaccactatcagtca

SEQ ID NO: 51960 - DNA, 622 bp, Homo sapiens
gggccccccctcgagggtacttctagaattaattaacgcgggcatctgatggcttttttttcctctatgtattaggatgtgaagttgtctatggaaggaggtgggagttatgggggaagggtgagaaaaacgtctttaaatccctctattggtaataggcaatctgagcagctccatgctgcctgttgtagcatctcctaattgtgtgacattaagtccatttaaagtggagaccatattcatgatgagatatatttataattcatgcttaacattttttatattaaatatgtgtatttaatcatttgaatatttaccatttgataacatatttatagctgatcaagaagtcacagctcaatgtcaaaggactttattaataaagcaattgaagtagtcacttattatacagcaaaaagttctagactcatttaacatttatttccatttgctagtcaattaccagctgtcagaacataataaatattataaatttgagtcagaagctgtcacctctaattgtattaactcttcctaatcataggtagtgatttgtcctgtgaaagaatgatattaatcactgatttccatctgtcttcataatggtgtaaaattgctactg

SEQ ID NO: 51961 - DNA, 499 bp, Homo sapiens
  misc_feature 18, 19: n = A,T,C or G
aattaacgcccgggcagnngttagaaaacaaagtcatattgagtagttaagatactttcttaatttcacctatattggactttaattctactttactaagtgatttgttgttgttcttacagaataaatattattctccttgatggaaaatatggaaacaaaataggagctgttagtattaaaaaagcatacattttccatattcctgtttctgaatataattctaaaatctttaaaattatctttaatatattcctcacatctgttaattcttaattttaattattctgccacacttatgtttgtcacttttctatattcatcttttataaatatcctttataaaacctgagttaaggccaggtacggtggttcatgcctgtaatcccagcactttgggaggccgaggtggacagatcacctgaggtcaggtgttcaagaccagcctgatcaacttggtgaaaccccgtctctattaaaaaatacaaaaaaaaaaaaa

SEQ ID NO: 51962 - DNA, 545 bp, Homo sapiens
cggggccccccctcgaaagtcttctagaattaattaacgcgggggggcttaaaacctagatgacaggttgataggtgcagcaaatcaccatggcacgcatatacctatgtaacaaactttcacgttatgcacaagtatcccagaacttaaagtgaaataaaattttttttaagttattataaatgctaaactcaataaatggaaataaaaacaaatcaagttattaagactagctgtgtccttgaaaactaaaacaaatttaaattacaactagaagtaaagtaataattggcatagatgcttataaatagatatagctgcccacagattatacagaactaaagataatttcttgttaaatttttagaaaaaattctaatatgatatcaaagtaataatcctcattattttcaaaacaacaaagcttaaaagactagctgggcttgatggttcatgcctatgctttgggtggctgaggtaggaggattgcttcaaactggactggacaacatagtaagaaccatctctacaaaaaaaaaaaaaaa

SEQ ID NO: 51963 - DNA, 521 bp, Homo sapiens
  misc_feature 448, 463, 498: n = A,T,C or G
cccccctcgaaagtcttctagaattaattaacgcggggccttatcttttcctcagaaaatcacttctccttcagatttccttaagttaataaaaccacttctcttcctttcatggagatttaaaaactcaggcattaatatacacaaatttttgtcagcagtatccacaatgtatcagatactgtactaatcaacacagcactgatgaggcagattctctgacctcaggagtctcacagtctagtgaaggagaaagataacggaaagagaatggcaatacaatgtgataaatagtctagaagatgtatatgcagaggcctaaggcagtacagaaacaggatcaaccaaggcatcacagaattcattaattcatgttaccaatatttgttgaattcctacagtacttaaagttctggggtaaaagccacaataaagtgttggatagttntaaaacgcataaatntctgctctcatacaactaataggagagattggcanaaaaaaaaaaaaagcggccgcca

SEQ ID NO: 51964 - DNA, 602 bp, Homo sapiens
  misc_feature 102: n = A,T,C or G
gggccccccctcggaagtcttctagaattaattaacgcggggacacaaaatagattgtagtattcaattacaaatgtttaaatgtcatttatcacatcactngaaaacaatgtgactactttgattaaacttaaatttttaatcaatgattaagaatgatagccttttatttgcctcagaatccagtctcttccccatattttatttgcaaaatgtagacaatcctgattgagaaataagtaggtgcaaatgatttaagttgctgcattacagatgcaaaaaactgtatctcttgaaaatttgagatattcctgaataaaaattgaaaatataaaagaaatatattaagaaatttatttcaaaaaggttgaatcatcaacaatagctaataagtgctcacattccttcataattaaggcataattgggcagtaattaaatctggagacagtttaacagggtccttaactggcttaaaccttcactctgtgtagaaaatgtttttcgattttatcttgtagcaatgaaatagtaaccattcaaaaacaaacagtcaccaaatgtgcattccggtttgtcagggtttcattctaagtttcaaat

SEQ ID NO: 51965 - DNA, 574 bp, Homo sapiens
cgggcccccccctcgtgggtacttctagaattaattaacgcgggatgtaaagttgatttcatgtcaactatatcccaataaagctcttaaataaaaaattaatgtatgtagaaggaatataatatgtaaaatagaaaattattgcagagtcccatgaatctaatcagggcaggcagtaaagatttcttacataataaagaaattgcaaacagtgagtgaaggacattgtggatggaacttacatgtaaacatctaatccaacctctagtgtagatctgaacagaagtttaaagacaaaatgattgagtgaagccacagccctacctgtttttagaaaccataagctttggagaagtttattacagataaaatttttaaaagaaatgacagtaaagagaaactgaaatggatataaacctgaaatttcagagaattgccctctgcaaaactgatttagtattttaattagaataactttttacaagaagtttttctcttcagcggaatgaaagaagttacaaatgtcatcaaagagaatcagacatcgataatgacaggaaaaaaacgggaaaaa

SEQ ID NO: 51966 - DNA, 447 bp, Homo sapiens
gggccccccctcgaaagtcttctagaattaattaacgcgggatctagtctagcagtcagctatatataaaataattctgtctccaagaatctgaggatatgatcaagctgagtactgactggctccattactttagtatctataataaaggtaaagagggcaaatctaaatgaaaagaattccatggaaaagtgctgtttcctctcataaaattgatactaaaacagaaaaaacacattcctactattaaaatccccaatattaaaatatgaacagaagtatgttctgagctattaccatatgccttccatcagctaagaaacatttatcttggaactctgtgagaattacgaacaaaatgcagatacactatgctgaataagataaaaaaaaatttcatgataaaaactagagattaacattttattaacctaactctcttaaaac

SEQ ID NO: 51967 - DNA, 593 bp, Homo sapiens
  misc_feature 514: n = A,T,C or G
cgggcccccccctcggggtacttctagaattaattaacgcgggccaggctggagacaaaaagggaaaacgctatagtactggtggccagtttgtcctctgacagctaaagccatggatgcagcagtggccagaggtgctgacaatggtaggaatgaagaagaaaaaattgcatgtcttctttccagtcactgcttcctgctgtttgtactcagccagaagcccatggatagaggagcctcaaaccttgattttctcacttatcacatgggcagtaatactaccttgatgaactagtgtgataattagtggtaatgtagataaaatagcttgtagtgcactgggaaatctcattattctttgaatgatagataatatcttgatgaaatttcacatattcaagtctaaatggcaaaagcatttcaaaagttggtatttattggtctgtctcttcctttgtgcttctgatgcctagcagagtactgaataattactcataaaagttattaatgtatntgttcatttattccacaaaacgtacatctttaggtggttactgagttgctaaggatacgcaatgcattcttgcctcatg

SEQ ID NO: 51968 - DNA, 534 bp, Homo sapiens
  misc_feature 27: n = A,T,C or G
cgggccccccctcggaagtcttctagnattaattaacgcggggtggtgttagatgtgagcatctacctttgtataactggatggctgttttcataatgaagaaaaatgacgtgatggcaaatgtacaactacccttttaattaaaacgctagaatgcttgaacctccactttaaaatttgtgctcataattccttttagagctggatgagtgactcctgacctgtcttttgttcccatattgcctgtcaacctcccgcaacacctcgtaaaataggagcggggagaaatactatttttacagaaattgctacagtcttgaatgaatttgttttgctgttgtttaaaacacaaagctccatgaaagctaacacaagtcactcttacactgaggacactgaggactgacagttgcctgtctgaaggtctgtatcctcatcctcgcataaaataactcctttacaagacaggagcttagcttaaaactatacatgtttggtgacaaggatcacgttggcttctcaactatagtaata

SEQ ID NO: 51969 - DNA, 621 bp, Homo sapiens
ccgggccccccctcggaagtcttctagaattaattaacgcggggcacagatgaacacagatgtacacccagatgtgtctctttgtcaaagatatcctgacttctacctactattccctcctccaaatatttatccattagatctttctcttgaacatcacctccccagttgaatctggcagcaaggcatgatttatagcagcacagaaatgataggatgtcattgtgcttgcagaaggatgattctgatgcaaaagcaaatggaaggaagtggtgacaaatacctataattagcaagattatcagagcacattcttcccagctcacgagaagtaaatcaatttttggttttcataaaatagattaaaattctgtcttctctacagaagttcttctgcttacttaagcagaatctggtgagtgatataaaacccagggagttttccctattcaaagctatttcatatcattccttgacaggattctaatttgtttatcaaaatttttgttcagataattaataatctgtcgtgagggatattaacagcattcactaagccctggcttatgggccagacatttctggctgcactcagaaaccaatggtgaaagcagacttaat

SEQ ID NO: 51970 - DNA, 582 bp, Homo sapiens
  misc_feature 27: n = A,T,C or G
cgggccccccctcggaagtcttctagnaattaattaacgcgggcctcaccaagatagggttcttttctgtctaatctgaccaaaagtccccagatggcaaacactaagtctgttataaaatacattttctaactacctataaaagaactatgtgtaaataagacttactctgtgagcctgtagaaatactgctttcatcccaaacccatggaaatgagcactgcaagagcggcttagcaatcttcagttgaaacaattggccccgagtggttcttattggaccactttgggagcatttctccaaaggaaatactcttcagtacactaaacttcttcagctgctaacttgctgattgactcctgggtaccctcaattaatcagcaccacctgtttaacaaaagcaaatcactccctattgtctgttagatcaactctgaaatctctctctggcaggaatttaatctctccgccagctggtcttgactcacctgctcacattcctgtccaaagcctggattccagcgagggttcctcctcattgttccccgctctgccatgggtctccaaaaaaaaaaaaaagc

SEQ ID NO: 51971 - DNA, 595 bp, Homo sapiens
gggccccccctcgaaagtcttctagaattaattaacgcgggatgtacatttgttacattactattaatggcattcaagacaagaatattccctcttgtcaaatccaaaaagaaaagtcaaattgctctgacagcataagagagaccagctgtaaattttatatttgcctaaatggtaacagaaaagcaaataaaaggtccagttcccattcccttgaaacaagcctactgagtttttagtatttacagtgaaactcagagatagatttttctccatttccaggctactgtttctattttttaacagtaaaaaatcattttaaataaaagagttgttttctgtagaaattattctgcacttaaccagatttcattggaggcagctagtatctttttagaattggcatccaatccctacctttattgaagcttccaacctattggaaaaaaaaacatgtttatagacaaacaagtgccacacaggtaagtgtatgaacagtgccaacagaatgatacaagaacgacacgaagccaaatgttacaaggagatcatatttcagtagaaagtaggaaaacaaattttcttaatttcagca

SEQ ID NO: 51972 - DNA, 617 bp, Homo sapiens
cccccctcgagggtacttctagaattaattaacgcgggtgacttttaagacagtttctccctgtccaaccaggatgagaaagcactggaggcaacatggtccagaaataggtcctgagtcaatcttggattcaagcacagccctgccacctacaagccatatgatgctagcatgttaggtaacctctccgaatctcaaaatacttccagagcctgccacagaacagaggatcaataaatattaattcatggcattcctcaccatttccattcattcctggccaacttttaaaaagtgtggtgagaaagttaaaggtgacaggagcctaagtgagggagaaagaggggggagagagtagagagaaaaggcagaatctggaccctgaatgataatgagtaaccagaaattgacagggtttttttccttttcaaactttatttcatctgagtcacctgttccagacatagaatcccagccttgagcaattcaaaaggagtggcagagaatggaaagggaacagattatcttgaatgtgtgcattcatcagcatggttaataaaacactaagcagccctacctccagacctactccaggcctgtctcttttcctgatatta

SEQ ID NO: 51973 - DNA, 496 bp, Homo sapiens
ccccccctcggggtacttctagaattaattaacgcgggtcctgctgtttcctgctatgtttgcctggaagggacagtcccttggcgttgggcaaactttatatgcagttgtatttcagtggagatattctctggaggaacaggaactgattctaggggctggggcctggtggtgagatgactcctggactgagattctaccactcgatgctgacagtgaagtccccagtgttcaggtgtcaaagagtgctggtcctgtgcagcagcaagactcagctgccagctggagggcaggtgctgctgtggatcaggacacagggcagatgccctgtgcacctcataatgctagctggttcatgcggtgcccatgggctctagagaaacaggagaatttggctcctgggctgaagtttgttgtatcccccaacccctgattctgtatcgtctgtttctccatcttccttttttctccgagaggattatttaatctcagtctg

SEQ ID NO: 51974 - DNA, 540 bp, Homo sapiens
cccccctctggagtacttctaggattaattaacgcgggggggcgaataatgaaaattccttaagtttttagtttgaattggttattagagataaaattagtattaccagttgattgtgtccactcaagcttctagatacggttagtgacaggtaacagataatgttatcactggttaactcaatttccactgaattggtctcatataaagaaaccacttatcaacatatacaaacagttactttcaaagaatttagtaaacatgggtataggttcaatttcctttatttaaaccacagaataatggaatctgtcaaaatgtcacatacatgcccaaacttccattcttactctgcttggaataagaaatcataaccttgggatattaaaatgaagtgcaaattgtaaaatatgaaaactggaaaactattcacatagttatgggtgggtatcctataaactccaaattggagagtatatttccagtgagaatgtacaatgttaacatgccagattcggacatgttatgatatagtgtatg

SEQ ID NO: 51975 - DNA, 400 bp, Homo sapiens
taattaagaaaaaaggcttatcctttaatgcactgtttgctaaggggtgccccataattttctagaatccttgttacaaaaattcaaattcctggatgcctccagccctgctgaaccaaaatctcctaggcttagtacccataaattttaacatcctctccagggacttgttataaacactaagtttaaaaaccactggttaatatcaggggaaattccacatctattattcttcctctacatgcatttaatttcattgggcacttaaaagtgtgtacagcaaaacaacattttagggctaaaaacaaattatcatggccctcattgactaccaaaaagtcactttttattataaatatacccaaacctttttttgaatatgttttattgccataaaatg

SEQ ID NO: 51976 - DNA, 456 bp, Homo sapiens
cccccctcgagagtcttctagaattaattaacgcgggtctcagaacacgtattttgaatcaggaaggataggaagtctttctgttactaaatacgatccctccctctttaaaaactttctgggtattcatcttttatttattttacttattgtatgatgccttttattattagcatctatgcaggcaaaatgattttgtaattgacccaaagccaaacagccactaaaacacacaagcaaaatttgaatacaaggttagtgttttattttgttttaactttaaaaccctcactcttttcagtctactattaatctgggctttcacgccagcccctgtggcatactcctgtattctcagctacttgggggctgtgtggcaggaagatcctttgagcccagaagttggaggtcagcctaggcaacatagcaagtctccgtctcaaaaaaaaaaaaaaa

SEQ ID NO: 51977 - DNA, 377 bp, Homo sapiens
cggggccccccctcggaagtcttctagaattaattaacgcgggctcatttcactttgggtagatataatacagcccagtgagagttgtcttatgaatttgttaagtcatggctttagaaataaatcataagttccctgtatttagagtttgtaacaagatctccttaaaaacttaagcgtaatacatagtactagaacttgtgaagacatcttcatttattctcatgggagctttccgttgccacccatgggaggatagggaaactcaacatgtagtataaaaaggtttacctgtattgatgccagagtcctaagaaaacggaaagagaatttggtgcaattttatatggtaaaggtctaaatccaaaaaaaaaaaa

SEQ ID NO: 51978 - DNA, 619 bp, Homo sapiens
cgggccccccctcggaagtcttctagaattaattaacgcggggtcaaatattggtgaggatgcaaatcaacttgaactcactcattgatggttggttctttgacatatagctttggtggacccaaggtatagacttcgaaaacaattttggaagtttcctataaagttagacactttgttatcacatgatgcacattatcctatttatttacccaagtgcaataaaaaaaagattcactcaaaaatctgcatgcaaatattaatagctgttttttttaataaccagcatggaatgaaaacaaacaatgtctttaatctgctcaatagtcaaactcacttttgaatgaacaatggaatcctactcataaatgaaaaagaataaactgttgctactctcaacaacatgaatgaatttcaaatgcattatgctaagttcaagaagtcaaatgcaaaagactacatgctgtacaattccatctatatgacatttcaggaaaggtaaaactatggatacagaaaacatcagtggtttcctgagactggggaaagaggtgacttgaaagaggcatggcagaattttaattgtgatggagctcttcaatgttatgattgaagtggc

SEQ ID NO: 51979 - DNA, 394 bp, Homo sapiens
  misc_feature 332: n = A,T,C or G
cccccctcgtgaagtcttctagaattaattaacgcgggagattctaaaattaaaatagaaatgtttgaaataaccaaaacagcttttaggaagaacgtagttagaggcataacactacctgatttcaacacattataagtctacagtaatcaaaacattgtggcattggcataaagacaaatagatcagtgaaacagaatggagagtctatatataaagccattcatgtatagacaagtaatttttgacagagaggcaaaggcaattcagtagaaaaaggatagtgttttcaacaaatggtgctggaataactgaatatccatatgcaaaanaatttgaagcatactttttttactgtataaaattaactgaaagtggatcatagagataaatg

SEQ ID NO: 51980 - DNA, 492 bp, Homo sapiens
cgggcccccccctcgaaagtcttctagaattaattaacgcgggtggtttgtaatttgaagtcaattttaacaccttgattcttgctggtttaatacctacactataataaaaagtttcttttatttaaatctaggaagactccaaactctgtttctttcattattgttttgatatctctcatccactctgtggatgatcatggagggatttcacagtattaccctcactacatgcacattcctaggactaactaccttgtaaacaattcacatgagtcaccatatggctacggaatagagagaagatgattccgtgaaagaatcagtgttagagagacaaactgattttggaggacgcaatggaaaaaaatatttttatggaaggataaacatgatcaaatcttgtagagatcaggtagctaaagatggtgattagggtgttgggcctggtaacaaaaccaacattaactattaagagaagatttctataaa

SEQ ID NO: 51981 - DNA, 622 bp, Homo sapiens
cccccctcgagagtcttctagaattaattaacgcggggaataaatccttacctatgaaaaataactgaatatttttgattaagttattcaattaaaaaataagatccaactatgtgctgcaaacaagacattcactctatctgtaacgacatacacagactgaaaataaaaagatggaaaatgatgtcccatataaatggaaattaaaaaaagcaggagtagctatacctatgtcagataaatataggcattaagtaaaaaaactgtaaaaagaatcaaagatggtcattatataatgataaaggagtcattttagcaagaggatataataattgtaaatacatatgcactcaaaaccagagcacctaaatatagaaatcaaataatattctatctaaaaggagtgatagactgcaacataagaattgtaggggacttagcattccactttcagcaatggacagatcatccagacagatccatcaaagaaacatgagatttaaaatgcactctagatcaaatgaatctgagatttgcagaacatttccactcaacagctgcagaatacacatccttttcatcagcacatggaactttctccaggacagatcatattttagct

SEQ ID NO: 51982 - DNA, 607 bp, Homo sapiens
cccccctcgagagtcttctagaattaattaacgcgggggaagtggggactgtgaagtaatcaaagaaataaaaagaaaaattctcgtaattggaaaaaagattatattcatattaaagttgctcaccgaagactaagctgtttagaaagaaaaaacacacctagaacacaatggtcatatttcagatatttagatatagatacaaatatatgtatttatttacatatataaataaatataaattcctcaaaaaattccacaaattttttcaaactcacccagagtggaatgaaaatcagactggcattagatttctcattggaagaattttataccaaaaacaaaatagtaataaacaggaataaacaggcaaatcttcaaaattctgaggaaagttattttgaacctaaaattctatatccagccaaactaatattgaagaaggaagtaaaacatagatatatctggacaggcaaggatccataaatgttatctcctcacagaatatctctgaaagaactgagtatatactagaaatatgaagacaaattttaaaaattatgtgaaatataagaaataaatgaaaacgaatcactaaaacttgtag

SEQ ID NO: 51983 - DNA, 421 bp, Homo sapiens
  misc_feature 378: n = A,T,C or G
cccccctcggaagtcttctagaatttaattaacgcggggcagggaaattaagcagattgctgattttgttttcactgaagtaccatatattcataaactttgaaggacaaacagatccaatcccaacctatgttcctcttcctaattgacatttggcacagtggtagatttcaaaacaaatacatttcaattagttatttgcatatttttcaagaacagacattgatgcagcagttgggagttctttattattagaaataaactttgttttaatgtataagacttccgaagtctttgaagttaaatcaacatatggcacatggaaaaatgaagccgtattttttggacagcttctagaagctggcttggtaaatattnaataactggaaattagagcatctctagcagcaatttgattagt

SEQ ID NO: 51984 - DNA, 572 bp, Homo sapiens
gggccccccctcgaaagtcttctagaattaattaacgcgggcagttagataggagaaataagttctggtattctattgcacagcaaggtgagtatagttaataataacgtattgtatatttcaaaataactaaaagagaggattttaaatgttctcaccgcaaagaaaggataaatatttaaggtgatggatatgctaattaccttgatttgattatttcacaatgtttacatgcatcaaaacattacactctaccccataaacatgtgcaattaattgtcaattaaaaagaaaacaaaagttgaaaaatatttaaagggctgttttaacagactcttactttttagtaggaaaaaataaagttgttcattttgaaattttggcttgcattccaaggaattatataatttcctgtctgatagaggaaggttccttgtttcaataataaatgacctctctatgtcctctacagtattagaaaaacatccttctgtaaaattctttttaggttttcagtttcttttcagggttattgatgttccctccaaagtcaggaaaaggagcaatttctg

SEQ ID NO: 51985 - DNA, 595 bp, Homo sapiens
cccccctcgaaagtcttctagaattaattaacgcggggcctcctttctttcggtggtgtttttcttaaataacaaactgttaatttctcttattaaacatttaattgttgaatagtatatgttttcataattgtatttagtttatgtataagctactgtattttttacataatattcttgttagaaactaacactgggatttaaaagtataagacttatttgttagcagtcaatttttaaatactgtgaaatttttataattttctctttatatattttaaacaatgaatacaaattaatgatgtaagcaaatttatttaataagttaaaaatagatatgcttatgaccaaggtagtctttaaaaggtgagtaaaagttttacttttctcattcatatatagtaagggacattacgtgtaacacaattcaactagcaaatgctctttaagtaaattcatattacttaaattttctcactaagtttcattttagaagtaatttattttcttggaatgtttttattcctcacatagaatgaaatcatatttggtaaacaaatagtgtgtattcagtgtgctttgggaatgatgacta

SEQ ID NO: 51986 - DNA, 583 bp, Homo sapiens
  misc_feature 567: n = A,T,C or G
cccccctcgagggtacttctagaattaattaacgcgggatcttaatctcgcctcataatcttacccaaggcaattactgaatctttctataatatccttttattctgctctgctacttgtctttccccttttaagtttttccactaaaatcttcataagtaaactaattttaggagtatcagattctcgaagggcaaattcaaaaaagaatgaaaatgaaagaaaaagccttcattggccttgtagagagccattaaaattctttttaatttacttgttaatcaaagcatattatatctgttattaataactgctacaaaaatattttaacatattcttataaaaatatgtcaagatattactgtatggaaaaatcatcaaagactctgaaacctataattttattcttttcatgtgaattcattctcacaccattgatcatccatgctgtcttttatgtcatgaactctactttcagtgtctttcatctgttttttatttgttttttttttgtttgtttttatttttgaggcacgatcttgctctgttgcccagtctggagtgcantggcatgcctatagct

SEQ ID NO: 51987 - DNA, 616 bp, Homo sapiens; identical to SEQ ID NO: 40875

SEQ ID NO: 51988 - DNA, 358 bp, Homo sapiens
  misc_feature 323, 326: n = A,T,C or G
cgggccccccctcggaaatacttctagaattaattaattaaaaattaaaccaagaaaaacacacaaaaaggtttgcatttactaccattgctaaccaactcctcttctgaaagacataatttccttaaaagctccaataatatcttcaatcagggatagccagttctactgagctgggaaccattttatattttcatatttgcttcccaactccttggtgtgtcaggttctcagagatactctgtttctgttgctttcatagtcagtttacaaattctgctttaggctgggcacggtggctcacgccctgtatcccagcactntgngaggtcgaggcaagtggatcacgagggcagaa

SEQ ID NO: 51989 - DNA, 520 bp, Homo sapiens
ctgggtaccgggcccccccctcgggggtacttctagaattaattaacgcgggctcttaagatgaatttttgctttattccagccccccaaaactttcaagtaaaaaaggctttccacttgggtaatttttaagtcctcggtaaaaccaaaccaaagaattccaaccaaccaagaaattttatttgaaaaaaaaacatgaaccccttttgatctctgggaaaatttagctatttttcaagacattttccaaataactcaaaggcttgtttaaatgttttttagcactgggagagtaaaactaaatttttattccatgtaaaacaaaattaaaatactttgggccccaagggaaaaaagaggaagctacttttgtgggctgaaatcccactgttacaaagaccagcagagccttttgaagggaaaacgttttaaccatgtttacaggggtcatttaaatgttttggaaactctgctgctaaataatgcatgttatccaggtgtaaaaataaagcagcaaagt

SEQ ID NO: 51990 - DNA, 594 bp, Homo sapiens
  misc_feature 28, 50, 51: n = A,T,C or G
cgggcccccccctcggggtacttctagnaattaattaacgcgggggtatnntctggaaaataaaagtatttgattggatagatagttcacattttctgtttgttagggtgtaaatattaaagcatggtttatatagttccctagagaatttccaataaaatgaatcctaatttctcatatcagtagcgtgcttgttaatgcaccccttattatattttcctctttccttgccttaattgcccactgttttagttatattacctatttttacttaactctgtgtcttagggtctactttggtcagaatccaaactaaaacatactttgtgaaaagtgcatacgctagggcctggccctggcattcttcaccacggtcagtttcccaacttacttagctctcctttgacattatcagtgtttatctgctctgtgttctatttctggacctctagaagtgactgtctactaatcctccttcccaaaaaaattacgctaaattgctgttttcttaatatttttacatcttttctctgggatatttttgcttaaatagataatcatgaaatgaaaagccataggccaaaaaaaaaaaaa

SEQ ID NO: 51991 - DNA, 544 bp, Homo sapiens
  misc_feature 9: n = A,T,C or G
acttctagnattaattaacgcggggggtctggaaatatagtgggaaaaagagtggctcctgcccccacgattcacaattattcaggtaacaaagtacatctaaagatttataagattatttaaaggaacacaaaccatacttagcttttttataattattataagctataacttataagtattctgtcttaccagaagctacaaatataatgtaacgctatacaaattgtcagtaatttacagtctacaactcttaaaaagcaaataacatatattaggcaatttatcgcataaagaattaagcaccaagatgcaaataccttcttttttccaagtagactccaatgatctatgccactcatttttttcatttagcttaaccaaaatgttagcaaattaacatttatttagggtaatctgggggtgtagttaacaaagcatttcaagagagggatatctttgaaatgtactgataagtagtaaaatcataatgccaaagtgggaaattctcaattacagcctgttaatgacattttaatacatc

SEQ ID NO: 51992 - DNA, 377 bp, Homo sapiens
ccccctcgaaagtcttctagaattaattaacgcgggccccaaatgaactctcttttctgattatagatatgagtcattctttattacctacattaatggtaccactatacattttgagggttgattccaccatcccgtggcaattctaccatgatcatgtgcccttgaaactttaaattttgctcaagataaaaagcaaaagaaaatgggaacttttctcttaaactttgcttctctccagaagtttgcagtggcttagctaccttatcagtgccaaagcctccattctacttcccagaatacagaaatcattccccataaggctttaaagagtacagtcacatgggtaagcataggtccagaaaaaaaaaaaaaaa

SEQ ID NO: 51993 - DNA, 607 bp, Homo sapiens
cgggccccccctcgaaagtcttctagaattaattaacgcggggaataaatccttacctatgaaaaataactgaatatttttgattaagttattcaattaaaaaataagatccaactatgtgctgcaaacaagacattcactctatctgtaacgacatacacagactgaaaataaaaagatggaaaatgatgtcccatataaatggaaattaaaaaaagcaggagtagctatacctatgtcagataaatataggcattaagtaaaaaaactgtaaaaagaatcaaagatggtcattatataatgataaaggagtcattttagcaagaggatataataattgtaaatacatatgcactcaaaaccagagcacctaaatatagaaatcaaataatattctatctaaaaggagtgatagactgcaacataagaattgtaggggacttagcattccactttcagcaatggacagatcatccagacagatccatcaaagaaacatgagatttaaaatgcactctagatcaaatgaatctgagatttgcagaacatttccactcaacagctgcagaatacacatccttttcatcagcacatggaactttctcca

SEQ ID NO: 51994 - DNA, 392 bp, Homo sapiens
cccccctcggaagtcttctagaattaattaacgcgggagtctataaaagactggggataacatcaacatgaatattctggttatagtataggaaagtgacataaaatcagaagtttcaagttaaattaagggagagatgagggagattaaatgcagagtaataaatccatgaaatttatatttaacacaatgtgaaggaatagactttaaaagctgctttttaaaaaacctaattttcagatacataaaattttagcaatatggctgtagtgctttgaacttttatcatttgactatactttgctttaaagtttacatcaagagcaaatatgtatatttgaaaagtttacaatagctagaaaatgtattataattcccaaaaaaaaaaaaaa

SEQ ID NO: 51995 - DNA, 562 bp, Homo sapiens
ccgggccccccctcggaagtcttctagaattaattaacgcgggttgcatgataatattaaacttaaagccaagattttctaacttaaaagcccacgcagaggtttctctaagtaggctcttctcctcacaatgtatgaccagtaatttataagatggactatttttcattttacttgcaatcctactactcttttcactaattacttgaactccatagaattctgatggttctttctaaagagaataatgagttttctctataatttcactacttggtttctttgtttctttgctttgttttgttttcatgttaccagggaatattttagctttgtgcactctaatatttggggtccttaaatcagccatatcagagtcacttgttagacttggaaaaaaatatttctaggctctatatgagagctggacccaatgataaacatttatataaatcccttgtgagagtcttaacatatacatcaaagctgaaaaaccatcatgctcaactcagaaaatatgccattcctggtaaataaaattctcccaaaaaaaaaaaaaaaa

SEQ ID NO: 51996 - DNA, 216 bp, Homo sapiens
cgggtccatagtactgcatataaagcattcagggtggtttttatcctgtattattttaccaaaattactatttttggtggcacagcagtcacattaaataaatcagggattaaaattctaaaataatatgtgactttcacaagtccaaacagaaacccataacaaaattttgattcaggttttgggctgggtgcgggggctcacccctgtaatcct

SEQ ID NO: 51997 - DNA, 576 bp, Homo sapiens
cccccctcggaagtcttctagaattaattaaccgggtactacatgggacacatcaacagcatagcatctaatacaaccaaatggtactggtacatgaagttgtttagaagagcagtttcaaatgaaaaaatgcgagacacattggagtctcacaggtatagccatgtcagcagggacaaatcataatcaattttgagtaaaaataaagttaatggcatattgcctttctttccacttcacaaatgtcaggaaatataaaataaatgcctgagaaaaagacactataaaaaacacaagctatcattatgttttaaaatgattaaaatcatattttcaaaaatatagtaaattctatatataactataaagtgtgttcaaatttccaacatctgtgatctacctacataatcaaggaaagtaatcaggaaaatgaatattcctagagtctcaagcaaatcactccaaaatatgctacagataacagtataaaatgaaatacaggtcaagattcaggaaccatggggaggcttacatttctttctggttatcatgagcattacagaaagataatatcat

SEQ ID NO: 51998 - DNA, 594 bp, Homo sapiens
  misc_feature 27: n = A,T,C or G
cgggccccccctcggaagtcttctagnaattaattaacgcgggtcttctcacaggtctgacagagacagaaaaacatgccaaggtgaagacactaagaaagagggtcattaaacactgccaaattgctttcttctcaaaatggaacacttagcacaagcaataaaaaaattagcaaacatgcatgtcaccagtttgctcttattattgaaaatgaggaaatgtataagaaggctgtccacaaaaatcaaatgtctatttcattgcttgcctagatattagcagaggtgaaaatggatacacaggttccagatagaggtcaggtcagtcctgaacaacattgaaagatgaactaaggtggtttgatttccctgtaagtgacctcattgataattagggatgcctatgccatgctcactcagaggctacacctttccagtaatattgtatatgtacctatcatcagtcattcacttattatccaagaattcactatctatcttttccaggtatagaggatttagtattatatatgttgtcagtgtcagaaagtgaatgcaaactcttttctcatagataattatgacttttggaac

SEQ ID NO: 51999 - DNA, 458 bp, Homo sapiens
cgggcccccccctcggggtacttctagaattaattaacgcggggcatgtgttttttacattatcacaagttagatacatcagtaatttaatcaagaagaaaacagcaaaagatcaatgagtcttctccccttttttagttttagttctcagaattacctcacaattactatatacattttattgacagaactgtgtcatgtgaccatccaatgtgcaagggaaatgcagattttatagctgaacctatttatactaccgaaacaaacagaattgtattcataaggtagaagggaagaatgatattaggtaggcaaactagccatctctgccacatcccccaatttatgtttccagctcagatctcccctttgatctcttgacttatatatcaaacttaccttttaaactctgcatgcttgtggattataaacacctcaaactgaaaaaaaaaaaaaaa

SEQ ID NO: 52000 - DNA, 515 bp, Homo sapiens
  misc_feature 468: n = A,T,C or G
ccgggccccccctcggaagtcttctagaattaattaacgcgggtcatctacacaccaggacagtgtgcaaagaggctaacttctaaacatgaaagaagagctattactagatacactgggcagccacctgccatcctttctgagaataagaaagttattcatttgtaagcttaagaaatattctaccactaatgaggctcactgtcaaaacaatcagtgaagcacatctctattagagaatctagtttacgtacactcagttcccaattgaaagagtaatttttcaggccggacactatggctcctgtctataatcccagcattttgggaggtggaggcagaggcagatcgcttgagcccaggagtttgagaccagccgggacaacatggcgaaacctatctctacaaaaaatacaaaaatgagctgggcctagtggcgcatgcctgtagtcccagttacttggcggngctgaggtgggaggatcacttgagccctggagatcgaggctggactg

SEQ ID NO: 52001 - DNA, 628 bp, Homo sapiens
  misc_feature 28: n = A,T,C or G
cgggcccccccctcgaggtacttctagnattaattaacgcgggatttgctttttttttttggtcaattttaaatagtcgtttctatatttctgtaatattcactaggaaatttgtttccctgaggccagaagtctgggctagaggcaaaacctttgaagtttgtctcctttcttcctttgtacattaaaataaatcaaaacaaaactctaatccttttattatatttgacaaccatgggcaattgttctgccctgtcagtgaaatcactctttctcacttaaactgggaactttttcagggttgcttttttgcctccagcaagttttaggagagacatggacataacacaggagcagtaatagtttgtacgaggaggataagtaactgccagatgcagaggacaaaccctgatatttgggtttcacggattacgccatatactttcacttttattgaatgggccactttatttgtctgcagctcagttttcgctttgctatccctaaactccaattctgaatttgataatgtaggctcataactgttcttcgtcacagatgcacacacaaattatttgggtgattttgagtagtaaaggtgaagaatctagatggcaaacctgtgtat

SEQ ID NO: 52002 - DNA, 622 bp, Homo sapiens
cgggccccccctcgaaagtcttctagaattaattaattgaattgtaagctcttaagctgccttttctcttctaaactgctcactttcattggtacttcatttgaaaattggtgcacattctagttcatatgaatttgctcattttcattgggacttcatttgaaaattgactatattcaaggtccaaactctagttcatatgcatttggttaaatccatcagcaaattctattttcttggtcacagtgaaatgtgactgtagccagttcaatcagactgaacatcagaactttgtgtaggagttctaagatctacacgcaaattcttttttttttttttttttgagatgaagtcctgctcttgtcccccaggctggagtgcaatgacacgatcttggctcactgcaacctccgcctcccgggttcaactgattctcctgcctcagtctcccgagtagctgggattacaggcgcctgccaccatgcctggctaatttttgtatttttagtagagacgaggtttcaccatgttggccaggctggtctcgaactcctgacctcaggtgatctgcctgcctccacctctcaaagtgctgggattacaggcatgagccaccaagcct

SEQ ID NO: 52003 - DNA, 597 bp, Homo sapiens
  misc_feature 27: n = A,T,C or G
cgggccccccctcggaagtcttctagnaattaattaacgcgggtccctatacacataactgcccacaaattattgatttctgaaagatttaggttagtacctaaatatataccatctttagtaacatagtctattggcttaaaacatgataatgtaataaaatgcaaatacctggcagagagttaacatagatgttacctatgccatagatcgtttccctgaacattataagaataaatgtaagaaggtcagtaatgagaccattaagttactaagcatctggagatggaaggtgtgtcaccaagataagaaaataattttttaaaatgcagaaactggtgacatcaaagggaaacttaacttatttctcacttttggtctgcattattaatgttctcatttaaagactagatagtgactacaatcaatgatttcaaacttcaatgttcatcctgagaaaattaatatctgcattatgctattgtagggaggtgtatagaggggttaatattaaccgacacagtagaaagatagctatgaaagcagtgattgtagccatgaaaaatatagggattgctaaaaagtactcttttcttt

SEQ ID NO: 52004 - DNA, 556 bp, Homo sapiens
gggccccccctcgaaagtcttctagaattaattaacgcgggggagagggtgggaggagggaaaggatcagaaaaaataggaaaggaaaggaatagaaaaaacaactattgggtacaaggcttagtacctggatgataaaataatctgtacaacaaacccctattacctaagttttcctatataacctgcacatgtaccctcaaaagtaaaataaaagtttaaacatagttccctattttgaaagattagagcaatatttcattgttgatagaccttcaataatagtcaaatgtacctaatatatattaaacatctacatggttctatgatactaacataaacccatagccaatgaactcttattgtcaagaagcttatagagtagaagtagaattaatttaataattaatatagagtagaagtgaattagtagagtagaagtgaattaatttaataatataaaaatgactctgtattataaatgttaaagtcaagagtaatttttttttttttttttttttgacacagagtctcactctgggtcaaaaaaaaaaaa

SEQ ID NO: 52005 - DNA, 576 bp, Homo sapiens
ccgggccccccctcgaaatacttctagaattaattaacgcggggaatacgatgtttaggacagacatggttgatatttgtattccttaagtttagaccagtgattggcacaagtagtgtaaataaggctctactgataatacaggaacaaaattttcatccaataacctgattaaactgtaccactaagcctccattccaatatccttatatttgagtgcctgttccaggtggctttaaatatttctgtgaagaagattttggcataaataaataacatctatcttctgaaacataccattaacctttttcataatgccattttcccttattttgtatgttattttctacactgaccttattcttcttaataactcctttcattttccttctgcaagccttctgtggatgtggaaaatacaaccactgccaagtgggaattgaggtatagaatatttatgtgattctcaaagataagcaccttgtatagacaggactataatgactgcacaactaattctttgtgggtatcctcatcacggaaccaaataatctctctctttttctcttattgctg

SEQ ID NO: 52006 - DNA, 605 bp, Homo sapiens
  misc_feature 537: n = A,T,C or G
ccgggccccccctcggaagtcttctagaattaattaacgcgggctggttcatactaagctaggtaatcaaatctgtttcctactgatggaagtagctaatttttgttgtctccatgggaaaatattaaagtagtttcttaaataaagtggtactattattcatgcatttgtaagattgccctatatttcagaaatttagaattattttctcctgcctgcctgcctgcctgcctccctcccccgaccccctctctttttctctcctcctttctttcttagagtcacggtcttgctctaacacccaggatggagtgtaatgacacaatcatagctcactgcaccctcaagctcctgggctcaagtgatcctcccatctcagtcttctgagtaggtaggactacaggcatgcaccaccatgcccagctaatttttaaaaatcgtgggggctgggcacagtggctcatccctgtaattccagcactctggtaggccaaggtgggcagatcagttgagcccaggagttcgagaccagcctgngcaacatggtgaaaccacatctctacaaaaaaatttaaaaagtagccaggcatggtggtatgcatctg

SEQ ID NO: 52007 - DNA, 588 bp, Homo sapiens
  misc_feature 24, 36: n = A,T,C or G
tgggtaccgggcccccccctcganaatacttctagnattaattaacgccgggaatacgatagttgtacatatttacacattacatgtactatttttatacaagtatacaatgtataataattgaatcagggtaacaaggatacccatcacatcaaaaattggtcatttatttgttttgggaacgttccaagtcagatcattaatgctcatgtttcttttccatgcataatttcacaatcttttatgaccctctctataccttccctggtagtacctattataataaaataaatcacttaatttaaattattatttttgttgaaatatataagttcatgaacgaaatgtgttaagcatgttataatggttttggctagcacaaattagagtgtgcattacatatagatgcatcatgttaaagcatctaattacatacagatgtgtagatattctaatgcgataggtataaaattataaaattatttgcttatgccatttggaattacgtttacacagtgagccaagatcatgccactgcactccagtctgggcaacagagcgagactccgtctcaaaaaaaaaaaaaaa

SEQ ID NO: 52008 - DNA, 487 bp, Homo sapiens
  misc_feature 425: n = A,T,C or G
cgggcccccccctcggggtacttctagaattaattaacgcgggagcataactatcggctgcttttgaagagcttacctctgaggtcagtggagtggatgattaaagatacctctatttggcattaaagtttattgaaagaaaactaagacatcagtttaaacatcagtgtctaaacttttcacagttatccttggccatccaaggaggccaagaagagggataattccccctcaaattcttataaattctaagaatgtcagcaaaatcatcactactgttagaacaggtaatatttcttttagataaaactttggacaactcagaggaccagctctgcagtatagacttggtgataaactgaggctcttgaaaatcagtgtgcttatatagcacacctatgtctgtattttagtacttggaacanaatgttactattatattgttttatagctatttttgtttttaagggtgttggtcatagttatg

SEQ ID NO: 52009 - DNA, 420 bp, Homo sapiens
ccccccttcgaggtacttctagaattaattaacgcgggtcctgcacactttggtattgcattaaagttcttattaatttctgttttcattactgacttttaaatgataacattccagatgacattttacaataagaaagttttttgccatctgaaagtataactaattaaccagcatatttcatgttatctacatagtgccttcctagttatatacattttctcaatatttaataaagccgtttgaataaaagagctttatttctaataagacttttaattgagctgtgatagatgtgtcctttcaggtttttcttttatttacacacattgctttgcaacctccaccttaatagtcaccaggagcccaaaagacttgactccttcactacaagtattaggttgtaaaaaaaaaaaaaaa

SEQ ID NO: 52010 - DNA, 615 bp, Homo sapiens
  misc_feature 16: n = A,T,C or G
cgggccccccctcggnagtcttctagaattaattaacgcgggacatcatagagtgtctactgaatagagttaagttttaataattgcaattcatcttttttaaaaataatttactctccatttggcttctaaaattttattgcagtatttagaagatttagttagtttctaatagctgaaaaccttcagacttcaatgtcacagtttgacccaaatgcacatggttcctgccctcttcagtttgtgtcctgctgcttccaaatgacaaatgtgggcactttgtgtaaaggcattgattacactgttagatagattctagacatgcttattaaaaaggcatcttttataggtgaatatgccttgcaggatcttgtatcctaggtgaggttattttcatagttacatatttaatgataataataacttgcatctatgccactttcatattctcttggcaccaagtttgccttccaaagcaaactttgactaaagatcttcagggctcatccttagttgcataggcaaagaagttctcatacatacaaccatcacacatttgcaaaaccaccatttattagggtctcttagaatgaattctgtacacatctatgctaa

SEQ ID NO: 52011 - DNA, 498 bp, Homo sapiens
  misc_feature 418, 476: n = A,T,C or G
cgggcccccccctcggggtacttctagaattaattaacgcggggggggtgccgtggtggaggggatatagttctttctagctcttctctctgcctttcactgcattggcctaatcttaagatgattgcctttgtagtcatgagatgacggctcacagtaatggaggcagcatacttaaatcaacaggagattggcttttctttcccagaagcatctccttatctctctttagtccaaattgtcttttccctgtgtgtccctgagtcagtcactggtagaggggatgaacgtgccgtgattttcatagattgatcttgtgtgagtagaatggatgctgggaagccacccagtatccaccacgatttctcttttaccagtggggaagaattacagtaatacttggcaggacatttccctntaaggcaaaagttccaattagacttctttttaaaattattccaatcccctagatgagnatatcacaaaaaaaaaaaaaaa

SEQ ID NO: 52012 - DNA, 583 bp, Homo sapiens
  misc_feature 28: n = A,T,C or G
cgggcccccccctcggggtacttctagnaattaattaacgcgggttgttactgaacaatatgatcaataaacacaaggatcacttcttagctgtgtagttatgctccagcaccacccatcacaaagcgttggggaaagctgcctgctctgaccttttccccttcccatccaagtttcaacagctgtttttctagagaccataacacaggtgcctatccttgcttagtaagtgtaaatgtggcaggctaaggacctgatgtggcaagctaagaatggaagtttctgaggcttgttgctgtaatgcaaattgctgccatgttagtagaggtgatgccccagttgacagtctacacatctcaggcatttaagaacatagaactggctgggtgcagtggcttatgcctgtaatcccagcactttgggaggccgaggcaggtggatctcgggtcaggagatcaagaccatcttggctaacacggtgaaacccgtctctactaaaaaatacaaaaaattagccgggcgtggtggcatgcacctgtaatcccagctactcgggaggccgaggcatgagaatcacttgaac

SEQ ID NO: 52013 - DNA, 568 bp, Homo sapiens
ccgggccccccctcgaaagtcttctagaattaattaacgcgggggggttgggacatggggggccggcaggggaggaggctggcccagtctgagctgcacagagcaggtgtgcagggacttgccgccaagggcatgtccaggggtctggggaagagaaaggggaggcccaatgctcaggcccccccacccgccatccctgggccttcgccctctcacttgcccttctctgcctacctcgtcctctccagtgggaagggcatggacaagtaacctgggtgaggaccatggtgtcccccggcagtcccagctggtagaccagagatttggagtctctcctgttctctccttgccttctctccagactgtttcttcctcttgtgatattcgacatcaccattctatttttccttttctctcctttcttttcatgcctctctcagctttctgcaagtgaggacatctgcaaactctcgccttcagagagcagcttccctgccactgatgaatggtcagtaatgcctccaggcactcgggagaactgggctgggtcaaaaaaaaaaaaaagcgg

SEQ ID NO: 52014 - DNA, 525 bp, Homo sapiens
attaattaccgcggggtgtgtgtgtgtttgttgtgtgtgtcccccccatactgctttggggtgtcacccaaaacttaaatccttggacaggtgattttcttttccttagaaagaagcttaaaatttaaagcattgactcgggtgcctttgggtaagattttaaataaaaataaattaaattcatttttgtgcttttccccacttttctgtgaggaaaaaaaaatggggggaatctgccctgataattgaatggacccttgttctactcccccccattaaataaaatgattgtttggctgcagggcaaagtaaaactaaaaatggaattttttacccccgggaggcaccccaggaagtgtcatattggctcacctgatgaactctaaatctaaattttacgaggaaaaatactgctttaagaaatgcaggggttctgttttttatatcatggcttgagatattaaggatatcttgtattgttggggccatctttaagatcaagaaccccaaaaaaaaaaaaaaaaa

SEQ ID NO: 52015 - DNA, 595 bp, Homo sapiens
  misc_feature 547: n = A,T,C or G
cgggccccccctcgaaagtcttctagaattaattaacgcgggatgcctaacctgacatcaacctagagagaagtgccaatttttgaatgtcattgaatgtctcaaaaggcctatcttatttatttaaagtaattatcatttaattttccaaaagaatagatttgtaatgtgaggactgtactgcctccattcaacctatctgacaaaatcccagatggcagtccccctaggcagttttcatggatgattagccattgtcttctcctccaattgaagaaataaattgacgctactttcgttaagtacttctcagagttaggtaacaacttaaaaataatttagtccaactgtatattttatgaatatgtaatctgaggttcagtgaagatatctgaattgtttacaaatctataacaatttattttcaattataggctggcctaaaagtcagatagacttgtaatccagtactctttctttgccatatatctagttccattaactttaatataaattattactactgggtaagacattacagaaacanaaacaaaataagaatagtgaaagtaggtgtagaagttatagactggtt

SEQ ID NO: 52016 - DNA, 480 bp, Homo sapiens
  misc_feature 28: n = A,T,C or G
cgggcccccccctcgaaatacttctagnaattaattaaagcgggtcattaagcaacaactctccattccctctcctcccattccataataatgttctgcttagactcaaagtctatagtgttatttacactacaatatttttccctttaaatttgacatcttttgcagtatggtcttaaaagagggctactggtctcttgatatttaagtcattctcattctttaaatttctatcttatcatcctgtggatttgtattcattaggtctaaatttgccaaatcttcatgtattacttactgtctccacacaatttacccaacactatatttatcaactacatgaaattttgtatctttaaaaaatgaatcatttcatcttgcaaatgatttgtattgtatgctatttattactctcagtaatcaggaatgacgctgcataacaaggactagtccagatacatatacgaaaaaaaaaaaaaa

SEQ ID NO: 52017 - DNA, 593 bp, Homo sapiens
cgggcccccccctcgaaagtcttctagaattaattaacgcgggactaaaatgattaatcaatttgtcctgtcagaaataaattggaaacagccaaaacatatatttgacaaaattgacaggttattacaggaatttaacctgatgactgtgtcagctagcaacttttgattcttcaggttgtagaatggataatagaattttatttgtaaaatacgtaaagacatatagctgtgaattatctagagttcaaactttacaggaaaattattaaatattaagtgattagtatttacagaatcacagattttctacttacagaagataaaagtgatgactcctcccaaaaggctggatcctgtctgagcagcatcgagaaaagctcttccagcctggctgtgttggcttcacttgtatcagtgtctacagtctactgtttaggggtgtgacctaaatcaactctgattaataaaccagagaggcatgagcttgccactttggctgccaaagatgtttaattttcagggacattttataaatacccataattttaatatacttccaaaatgcttttggaaagctgcgatttattgaa

SEQ ID NO: 52018 - DNA, 458 bp, Homo sapiens
  misc_feature 32: n = A,T,C or G
taccgggcccccccctcggaaatacttctagnattaattaacgcgggctcttaattttcatatatatcacttcaagatttgctgggaatatcagccaagtaaagcatcttcatattgaaagctcatacctatattttaatttaaaaaaatcatcggccaggcgcggtggctcacgcccgtaatcccagcactttgggaggccgaggcaggcggatcacgaggtcaggagatcgagaccatcctggctaacacagtgaaaccctgtctctactgaaaatacacaaaaattagccgggtgtggtggcaggcgcctgtagtcccagccactcgggagactgaggcaggagaatggcgtgaacccgggagacggagcttgcagtgagccgagatcgcatcactgcactccagcctgggcgacagagtgagactccgtttcaaaaaaaaaaaaaaaaaaaaaa

SEQ ID NO: 52019 - DNA, 618 bp, Homo sapiens
  misc_feature 581: n = A,T,C or G
cgggcccccccctcgaggtacttctagaattaattaacgcgggtgggagaagtgaatattctgtaaccttttcctggattcatctccagcatataagaatcatttctatgataaaaatattataatgttgccatcttccatgtgatttgctttttatacagattaatatttcacatattacaaatttcactagctatacacgtttcccactattttctaatacattgatgaaaataataaccctgtacttccagcatcacaggctttttaccaaacaagaatttcctccaagaaaagttatggttattaccttaaaagagatgtgttattttatttttctgacaatggaaggcttctacaagtccaaagtgagaagcaattatatactatagagcagaataatagaacactgcactaggataaattttgtgcccacttaattgaaatacttgccaaggaactaggtgagagcagtgtatttcaatccctctaaacaatgggtaaattagacacattccttctaaatgacacattttagctgtctggaagcctattcagagttgtgcgtggtagcataagtntgtcactctgttccctacaattggtccatttcaagct

SEQ ID NO: 52020 - DNA, 593 bp, Homo sapiens
cttctagaattaattaacgcgggtactcaacaataaaaaaactgaaaactcttcctttaagatcaagaacaagataaggattctactctcaccacttctattcaatatagtccttgaaattctaacaagagcaattagggaagaaaaagagataaaaaggtaagaaaaggagataaaatatgaagtgttttatggaggattaaacacgtaaaaaatgaaatagcatcctatacctattaggattatcattatcaaaaataaataaataaatcaatcaatcaataaataaataaacaagaaataataagtgttcaaaggatatggagaaattggaacccttgtatattgttggtggccatataaaatgctacactcaccatgaagacactatggaggttagaactaccatatgattctgtattttcagttatgggatctcagttcttcagaaaagaattgaaatcagtatttggaagagatatttgcactcccatatgttcattgcagcattattcacaattgccaagatatggaagcaacttaactattcatttacatatgaatgaataagcaaaatatgttatatacctata

SEQ ID NO: 52021 - DNA, 479 bp, Homo sapiens
ccgggccccccctcgaaagtcttctagaattaattaacgcgggaccctagattttcttcttcttctttttcaccctagatccttatctatcaatcaccctctcaacagcttctctttacagccaaggtccttgaaagaaccgcttgcatttactgtctcaacccaccttcaactttcaatacaatgtgaccaactttccacctgcgttcctccatggaaactcgtgtggcaaagctcacaaccagtgagcttctaagtgtcaaaaacactggatacttttcaggtctcttcttctggagttttctgtggcttttgagactttggatcaaaccctcagttctgaaactgtttcctcctttaacttctgaaactgctagcagaaccatttctctaacaagccaatctgatcatgtcactttcttgcttaaaacaggagaatgaggaaagaaaatggatgactgaccaaaaaaaaaaaaaaa

SEQ ID NO: 52022 - DNA, 364 bp, Homo sapiens
cccccctcgggatacttgctagtaattaattaacgcggggggcagtaatataccatgactaagagtttcttatattctttaatccagatttcctattttgacttatgaccaatgttttcctgcaccagaaataatattctaaaaaagatcttaacatcagttacagaatgtttacaaaataaaataaacccaccaacctctttattggatgcaaaaaacaacctaagcataaagtggcagtcatgccattatatcccatgacatctctttataaaagttgccaatctcagaaagctaagatttactaatcatccaaaaaaacttcacttaacactaaatacaggagctaaaaaaaaaaaaaaaa

SEQ ID NO: 52023 - DNA, 368 bp, Homo sapiens
attaattaccgcgggctaggttctgggattatggggaaaaacagaagtcaggatcctcgccttcatggtatttccattcagaggggcccattattgaacaaaccccaagaactttcaacaaatcaacttgggtttagactagtaaacaaaaacccactcattttatggcctccaagtaaattcagggagtaatgggggcttattatgtttcacagcactttactaagcaccctaacaaaaattttagggttataacagacgggatcaatccctgccctaagcaggtaaacatttccctggcttgacaccacacaggggtaaaacctgggcagaaaaattgccaaagaggggtatgggtatccatccaa

SEQ ID NO: 52024 - DNA, 534 bp, Homo sapiens
  misc_feature 519: n = A,T,C or G
ccgggccccccctcgaaaatacttctagaattaattaacgcggggctgtctattggtcactgttaaagctgggctatgtgtacagggtttcattatagtcttctgtagactattgtcaatgtttgaaaaattacattataaaaacagtttaaagacacaaaacctaacaacttagaaaagttataataatattatatgtggttaaaataagtctactcttttgactagagatataatctattagattatcagtaattgaatctactctacacagccaaccataataaatttatgagataacccatatctgtagctgaggtaggtagtttaatatctgatacaggtataaactttttatactgataaatatacttcttgccttcttatgccaaccataacaaagatactataagaaaacctgaaataaacaattattctaataggcttattttgttagcatgtttaacttacaatcacaaatgatgctaaccctagcaaattaatctttttaaggctaanaaaattataagatta

SEQ ID NO: 52025 - DNA, 642 bp, Homo sapiens
  misc_feature 42: n = A,T,C or G
aagactggggtacccgggccccccctcggaggtacttctagnaattaattaacgcgggatcccctggttttgggaggagatatattaatctgcctgataccatgactttacatattttttttgaaggacactttccacattttatttaagtcttaagaataactttaaagccaggcatggtggctcatgcctgtaatcctaacactttgtgaaaattacttgagcccaggagttccagactagcctgggcaacaaggtgagaccgcatctccacgaaaaatttaagacttagccagatgtggtggtgtacacctgtagtcctagttactccggaggctgagacagaagaactgcttgagcccaggagttcgaggttacagtgaggtatgatcatgccacactgcgctccagcctggaagacagaataacaccctgtctcttaaaaaaattttttttaaattaaaattaaaatgtttaactttaatcacagaattccatatctataatcctatttgttttttgatgtttcacttcaatgcatgatgtattgaacaaagtctgtaaaagaaatgttcaccaacagcagtaacttttagtaggaagccatctcctccaccactccatcaccatttaaaaataaac

SEQ ID NO: 52026 - DNA, 342 bp, Homo sapiens
  misc_feature 24, 305: n = A,T,C or G
gccccccctcgaaatacttctagnaattaattaacgcgggtttcctggtatcaaataaaagtcttctgataaatgggaatttgtcaagtgaatttcctgatattatttcattaacaaattcataattttgttaaaactacaatgcagaatgaatcctattacaaaaaccttgcaaaatactgtcaaattttatattataataatctttcatttgtatatttcacttgtgataattaagttaatacatgtaaaacagtttagaacagaatttgttaaatgctaaatgcttagaatatgttagctgntatttttactattatatgtagattcattccagtacac

SEQ ID NO: 52027 - DNA, 570 bp, Homo sapiens
  misc_feature 17, 512: n = A,T,C or G
ccgggccccccctcggnagtcttctagaattaattaacgcgggagactaaacttgttctgtcctgttcttggatttaaactttatcattgaatatggcatagtagccttaagacataatactgccaccgatttcacttctctctagagatttttgctctccagaattcagtaaaccaagactcatgctggattaatggagctggaccctagatattttaatttgccttaatatagacaaaggatgaatcagattatgctcatctccaggcttgctgacaagccacctgggtgttttttccctcttgaccaaggcagaaattacttgaaataaaatatacacattatgtttcagaaaggtaattgtgggtataatacttaatgtataataagcactactataaaggaaagttgtgctatcatatcaccttttacatttccactgtatatgaattcgtctcatataatcagtcccctcctatcctgatatgtgcctagttcactagatttacanaggtttataggaagtgtctctctcagtagtcaaaaagttgccttagtctgatacagta

SEQ ID NO: 52028 - DNA, 596 bp, Homo sapiens
cgggccccccctcgaaatacttctagaattaattaacgcggggtggggatgggtgagagggagggagtaggggaagagaaggtaaaaaatgatttatcaaattttaatatttaaaaattttgaataattatgaaaacataatattaaacccttaattactctcggtagtttattacacagtatgtaagtggttggtgaagagaagcatctaacagaattatatttattcatttaaacaaaatatattatgcaaatatatttgtataacttaagcctattttattttcaattcattgctgttctcacttgtaaggatggaataataaatgggaagataaaatatccttattcccatttattaactggtaggtaatctttactcagttggagaagcaaacccttgctgggtactctccagaagcctgtgacatacccccacctcctacactatcataggccagtacaacacattaccattaaaggtaaaataaatgcttataatacaacattaaattgggggtgagagaaaaaataaaaaatacgaaaccataccatctacatttccaaaagagaactagaaacaactaaaatgttaa

SEQ ID NO: 52029 - DNA, 517 bp, Homo sapiens
ccgggccccccctcggaagtcttctagaattaattaacgcggggaagccaagaatgttgttttatagaaagcaatatgtattcagaatctctttatgtggcaataattataacatatttcttcatatatagactgagattaattttaaaaagtggaggccctaattatactattaagatattaaagcttttccattctcaccagtaccttttccaaccttcactgctctccttaaactcacattatcagctccctattcctctcaacagagcatctcaccttttgtcagttcattaagtttatctgcttcttacgacgcccccactcaaccacttatcaatatgcacatgaatctttccctctcagttcagtgaaaaagaatcccttcctcttgtccaagactagcgccaccactatttgctctgtggatcccataacattccctttgacacctttactttgtcaccctccccggccccatctatcttggaacagcagcagataaacagggccaaac

SEQ ID NO: 52030 - DNA, 411 bp, Homo sapiens
cgggcccccccctcggggtacttctagaattaattaacgcggggtgtgtacaggttacaggcaagaaaagtctccttaatctttagtattcataatttctaaaacatttccttatgtcattttccttaatagacatgattcctttacataatatgaagggcaacaatgaaaacatttcaaaaagtttcagtctagtgagatcatgttgaaatgagattttttctacagatttggttttattaaaggccaaatcaagctctcaaaatttatgtaatcttgcccaggcatggtggctcaaacttgcaatctcagcactttgggaggccgagcgaggaggattgcttgaggccaggagttcaagaccagcttgagcaacaaagtgacatcttgtctctacaaaaaaaaaaaaaa

SEQ ID NO: 52031 - DNA, 608 bp, Homo sapiens
cgggccccccctcgagaatacttctagaattaattaacgcggggttctatttctgggctctttattcttcccagaggttggtctatcctgtgccaataccacattgccttaaatattaataatatggctttataaataatgctatgtgaaagactaagtgctccttcctaatttttcttgacagtttactctcctacatacattttagagcttgtcaagttatatgaaataccctgtcattatattaaacagaagtgtattgaacttataaattaatttggaaagaactgacatgtttatgtcactgggtcttcctatcagttaatatggtatcccaattacatctctcctcatgtcttttaatggaaattgtatacttttcaacataaaaagtcatgtgcatcttttgctgattttgttcactggtacctttcaattgttgtcattgtagctgttgctgctataatgagtatctttttaaaaatatattttgtaggccaggaactgtggctcatgcatgtaatcccagcactttgggaggctgaggtaggctaggagttcaagaccagcctagtcaacacggcaaaacactgtctctactaaaaata

SEQ ID NO: 52032 - DNA, 591 bp, Homo sapiens
cggggccccccctcggaagtcttctagaattaattaacgcgggattacgttaaaatatatgttagatgagacgtatctattttctatcactcatttgagtactaaggctgcagtacaggcagtccttatttttttcttttaagcattataaaaccataagatgttagagtcgacagggtttttagaaatcatcttgtctaaatcccttattctatagatgaccaaactgactgcaaaaaaatagtgaagagacctgcctgagattacctgccagtcaggtgcaaggctgagataagagctcagctctcctaactgatttctcttttctctttacctctttaccattttttctctttgccattccacttccgtctgtacacaaaatattcattcttcagagaactctgtggacagtttaggcccttatattgagtgtagccagtttgagtgaatgattgatccattatgtatggttactactaaatgatgatagcagagagaatcctgaaaatctttatgtattaataacatgattttgtagatgtggggaaagtctaaagattatcttacgaagtcctttcatcaagtgtg

SEQ ID NO: 52033 - DNA, 511 bp, Homo sapiens
  misc_feature 16, 17: n = A,T,C or G
cgcgggtgggtggtanntttattttattagaaaattatattaagtatttaaaggatatctgagtcttgtaatttcttccaattctcctatacatattaaattataaagtagacccatttttaatggcctactaacaattcatttcaaacacgcattgatttaataaccaaagcattctaacttaaggaaatgattattgtaagaaatgataaggctgggcacagtggctcacacctgtaatcctagcactatgggaggctgagggaggcatactgcttgagcccaggagtttgagaacagcctgggcaacatagcaaaaccctgtctctacaaaaaatatgaaaaattagctgagtgtggtggtgtgcacctgtagtcccaggtagctgggaggctgaggtgggaggatcacctgagccaggggaggttgaggctgcagtgagccgtgattgcgccactgcactccagtctgggtgacagagtaagactccatctcaaaaaaaaaaaaaaa

SEQ ID NO: 52034 - DNA, 530 bp, Homo sapiens
  misc_feature 481: n = A,T,C or G
ttaattaacgcgggcttttcaattttaatggaaaattcatataacatacaatgaaccacttcaagtacacttcaggggcatttagtgcatttacaatgttgtgcaatcagccctctgtcgagtttcaaacctttttcatgatcctagaagaactccccatccctgtaagtaactactcccccttcctccctccccgcagcccctggcaacctctaatctgctttctgtctctatggatttgcctattctggacattttacatgaaaagaataaaaaaatgggctttgaggttacataaatcatttgcaatattatgtggtaactacaaatgtaaacaaggtaaaaatctgggatttgtggtctaaactgaaattgtagagttagaatttcacagactaggaacatttcataaagaatcctgaggactgacactgggctatcatcctaacatacaaataagatcagtaaaaaaagatcctancaaaaagacatttttatacccaaaaagacagtatctcacttccaatatg

SEQ ID NO: 52035 - DNA, 485 bp, Homo sapiens
  misc_feature 32: n = A,T,C or G
taccgggcccccccctcggaaatacttctagnattaattaacgcgggtctttcctaaaaacccacaagtcacgtttaagccagcagttaatttttattcatgaattataaatcctttacaggagggagtgaagataaaatggaaataaaatatatgtaaaaatgtaatgttccactaattctatcacagaaaactaaatgcatattaaatttttattattattcataattgttccataaatagcacaggcataatacatttttaaaagcaaaatacctttttctcttatcagatcattgttatgagaggaaccatatttttatgcacctgtattgtcttaactgaagatataccacattgttataatctgaacaaaatctgatttttaagaagtttgttgcacatcatcttgacagatattaattactgcataataccaaaaatgtgtagttctacctcagtaatgccaatatgttatattctct

SEQ ID NO: 52036 - DNA, 640 bp, Homo sapiens
  misc_feature 27, 40, 605: n = A,T,C or G
gactggggtaccgggcccccccctcgngggtacttctagnaattaattaacgcgggaatgggacataatctacttgggattttagaaaacactctgatagatgaattcagcttttcaccctgtgggatctgaattgcctttaagttgttcaagtagagatgccaggaagcagctggatttgtttgtcctgtgttcgtgtgcatgggagtggtgatgcaggttaacaaatagtatctgggaatcaccagctcctgaggagatgtggaaaggtgtggacatcatcacctaaagatagtgaaagggaggggggcaaacaactattaataagtaacttgtatcaacctatacaacaaaccttatatccaagaatcataaggcccactttagatcccagattcagcgaggattttcctgaggaagccccagagaatgactatctctaacttctaaaaagcacttgtggtctctattatgtacttgctcataccatggcgttcacatcactgggtacttcactggctttcttcttatggtcttatctgtcaacaagtctgctaagttccttgaaagcaggaattttcccatttattcaaccaatgtctcanaagagaaatgactgataaacaatactattgatgag

SEQ ID NO: 52037 - DNA, 602 bp, Homo sapiens
cgggcccccccctcgaaagtcttctagaattaattaacgcggggggaactttggaggaaaaatataggcagttatccaaagtatcactcatgcagctgttgcaggacaactggatgttaacatgtagactctcttctgcctcccatctttgcgtttgaacatgtattgctaagtgcccctctctcagccaatctgtctctgtctctgctctcagtctgcccaagtcctgcttattctcttggactcagctgttggcccacctcagaatgggttagaggcctttcatccatgctgctgtgtctagcagggtacttatcagagggcattcttgttatcaaagggtttcctgtttccttgtctgtcttccccagttaactgtgagctcatttagaacagagaccaagtcgtgctccttttacattttcagtgtctgacatggctctgcttattaaatgtttgatgaataatgaaggaatatactttaaaagtagcagatgtttgtgggtgtgctgttactgaaacccccacctacctcgaatttaaagcttaggtttcctttcttgagtaggaccttaaaagccatgtattttagtttaggtgca

SEQ ID NO: 52038 - DNA, 611 bp, Homo sapiens
  misc_feature 24, 534: n = A,T,C or G
gccccccctcggaagtcttctagnaattaattaacgcggggtagatataaaggaatctttcataaatacttaagtttatatctatttatatcccaaatgggaagataaatacttaagttcttatctattttgtttatatcttaaatggagagataaatgcttaagttcatatctattttatgtatatccatataaaatagataaatgtggtttcatcttgatatgcaatgataacctaggtacgaatttaatacacatatacctatatttatcacactacatttcaccttagatatttgaattttcactttataaattatgagaatatctttagagaaggcgatatttgggatgatacagaaatacaactggtgttttccaaaaattagctgaatacgctatatattttcagaccaacatattcatatgttttagtctttatttgatattttacggacattgtaattgttttgttaactgtgtactggatcatcttgatttgattattatctgaggtatggacaaacaaaaatntaaaacaaaaagtagaataccgaagttatacctagaagccctcaatagtaatgaaaaatatatatgaagtttgctgg

SEQ ID NO: 52039 - DNA, 535 bp, Homo sapiens
  misc_feature 39: n = A,T,C or G
ccccccctcggaagtcttctagaattaattaacgcgggnaacctagaagttgacacttgtaaatactacttccctttattaccataattattctataaggttggaaggtcaaatattactatatgggatgaatcacttaagaccttactactagataccagaagtacagtttaattatattaaatatgtaaggtaagtttatgcctgccagaggttcatttctatattacacacacatatatatatatattcatttccatattatcacatcaagaagaattaactgcaattctgaggaaatatagaaaaataagtagggcattactgcatggccagtgttctgggctgtgtcctttttctcttctgggtacacttaaagccagcccactgttaggtcgccagaagatattactgcagtatttcttttctatcaaagaagaatgagtctaaggaagtttctgattttagagtcagatggaatttccagtgagaaaccaggcccagtgaaataaatatgtgtgtatgtgatcagtga

SEQ ID NO: 52040 - DNA, 538 bp, Homo sapiens
cgggccccccctcggggtacttctagaattaattaacgcgggtaccattctctcttctcctgcacttctctgcattctttatattttggagattgtttttccaatctccaaaattcagatgaaagaaaccatattctaataaacctgctaattaacaagaacaaatctttctacatgagatgcctttatatcattcattcattcttttagcaaaccaaagacagtgtatatatgttttaattcatgtgccaaaaaaatgaccaattaattctgctttagatggggaaatagtaaatttaatataaattaatttaaaatcactaacaaatgcacattttaatcattggctataggaaaaatattacaactgcaattgagactgacactacagtttcatcaggtttttaattttaaacatcatgtcccatattttagtaaatcacttatgtttgggcagtattttgtcaattgtagtgtaattaatcagccaaagattctgtcagtgtttccagtttctgactagataaaattaataaca

SEQ ID NO: 52041 - DNA, 619 bp, Homo sapiens
  misc_feature 32: n = A,T,C or G
taccgggcccccccctcggaaatacttctagnattaattaacgcgggggggcgggcacaggaaatggctaaaaatatgagtaccgttctagttctggcattatagcagattggggacactgaacaatccatctgattaaaattatgaaaatattgggttaaatatattaaaaaatatttttaaaaaactattaggcacttctctgagctcacaggaacaggaaaaacatgacaattacactacgtgtgtagattgaaaaaaaaacgtaattggtgaatttaacttaagagccctgttattagcaatgatagaaggaaactgggaaatactattcccccctggaggatgccaacttcaatcctatcctcaaattatttccacagattccatgtgttgtaaaaataaggtcctagtttgtggttgtatttttatcttttagttgttcttgataaaccagaaggtttaattttaatgttttaaatgatacatattttcttttatgatttgtaaatttttggcctgaccagttcacaaaaaattcttcctgacttaagtcagaatttcctaatgataaatttgcagtttcgtagtatgggtttttacatttaacccacctgga

SEQ ID NO: 52042 - DNA, 569 bp, Homo sapiens
  misc_feature 23: n = A,T,C or G
ccccccctcgaaatacttctagnattaattaacgcgggaatataacaaaacattatttctaatccaaaacagaagcaactcaattatgcttcaatagttgaatgtctaaatagtggtatacagtgatgtttacatttgacagtgtgtacatgcatggtatatagattttaatatattaagtggaaatataaaatacatcaaatctacacttagtatgggtgcattcattttatcgtatgccgattaacttcaaaaaataactttttaaaattccaattgtgttaaagggataaatctaaaaaaaagaagacattaaaattccaaagaaaatttagaagaatatttttataaccttatggtaaaaaaataatttagtcaacatgaaagagcaaagcaaaagctataaattaaatgattactatacaaataactgggtatgttggtgggaggctgaggcaggacaatcacttgaacccaggagacagaggttgcatcagtgagctaatattgcaccactgcactccagcctgggtgacaaagtgagactccatctccaaaaaaaaaaaaaa

SEQ ID NO: 52043 - DNA, 589 bp, Homo sapiens
  misc_feature 40, 567: n = A,T,C or G
agactggggtaccgggcccccccctcggggtacttctagnattaattaacgcgggtctgctatgtttgagtcattgtaaatttgaggatttaattgttccagcagataacattaaccctcgttaacagtgtttagagaaataggatcttccattaaaatagaactatatctttgggagataacttttgttgtacatgcacattttgtttcttcctgcatgcagggtagaaaatgaatttataagtaggaagaataaaggtgctctactaaacaagttagcagataaagttttgtaacctcaattcaggtgttcagaaattatcatactcctttattttctacaactcaaattaattctaaccctcttcccaggaaatttattctctatgtcagagttgtgaaaagatctaagagtcttaggtagccccaaagcatcagcaaatattttgtggttattcattcaactcaacaactaattgtagtacacctctgcctatgggctagagtattagacttcatggaatgtatgattttctgaaagccaacaaaattaatcaaaacatcccncaattaatctgacaagtgccgt

SEQ ID NO: 52044 - DNA, 553 bp, Homo sapiens
  misc_feature 36: n = A,T,C or G
tgggtaccgggcccccccctcggagatacttctagnattaattaacgcgggaatctgtcttttattgatataagtacttaatattctctttttcactacacatagtactcagtcatcattattcacagtgttcaccgtgtgccctcatatacttcatagaaatatagtttattttgggggcagggagtatattgtataatagatattttatatgagtgtagaaaacaaaatattctgcatgaaattcccctttttggccacgcgtagtggctcatgcctgtaatcccagtgctttgggaggccgaggcgggcagaccacctgaggttgggagtttgagaccagcctgaccgacaaggagaaacaccgtctctactaaaaatacaaaattagccaggcttggtggtgcatgcttgtaatccagctatttgggaggctgaggcaggagaatcgcttgaacccaggaggcggaggttgcagtgagctgagattgcaccattgcactccagcctgggcaacaagagtgaaactccgtctctcacaaaaaaaaaaaaa

SEQ ID NO: 52045 - DNA, 503 bp, Homo sapiens
  misc_feature 28: n = A,T,C or G
cgggcccccccctcgaaatacttctagnattaattaacgcggggtatatttgaggcatatattattaactctattacactccattttaaaataaaaggcagtccttaacatataaaggtttgtaatattctagctgactaagtatttctgggacataaggttaacaacagaaaaagaatatcattttactatgaaacagtttttcttgcttagatgacacctggtatttggtcactaaatttagttatttgacaaaggttcttggtaacagttttgcctccaatgtgtatactaattcctgttcaatcataaaaagaggctatatctctcggcagtaatcttttattttccttcgttgcccataaaacatgctacgtgtcacttagcattccaggtggtttaatgatcatattgctaacagtagagttctagctgttctttcagtcttttgaattcagaaaggagaaagaatctcagaaatacatccgaaaagaatcagttca

SEQ ID NO: 52046 - DNA, 439 bp, Homo sapiens
  misc_feature 24, 62, 70, 78: n = A,T,C or G
gccccccctcggagtacttctagnattaattaaaatttatctactccacccccaaaatacangccactgnaacactgnaaaactaaaatcgacaagaatgatgtttgggaaagcaagagaaaaaatgtttgacacacagtcttattccaaaataataaataataataaacgtaaggtagcaaaaaagtatggttaaaggaaaatgaagtatttcaacaaaaggttaaatgacgtaattccaaatcaaacatttctttcttttaatcaaaaaaatctaccacgaaagctacattactttgtcttaaaattaaaatctaaaaaatttacaatcatgaaaaaaattaagatataaaaagagggtcaaaatatatcttatttttagtatcatccctaagtccatatatagttatcatcaatttcactgtattttgctctcttg

SEQ ID NO: 52047 - DNA, 486 bp, Homo sapiens
  misc_feature 446: n = A,T,C or G
cgggcccccccctcggggtacttctagaattaattaacgcgggtgtggattaaatagaacctccaaataatggtgaaaaaaaaagagcaaaactgatttaaggccttgagttcaaaagtcaaggattagatttttccattgtccactgctacttctgcttgtgttgtgtttttagtaacccctaagagctcagaaccaaaaaataccagtgtctggtccctgtggtcagtgagattctaacatggatcaagctactctgtcctagacgaaaccattttcctcatctgaatatagagaaaggtaaacagaacttacataaaagaccaactaaagagtattgggtcattgggactaaattaaaattgtgcacaaacaaaaaaatcttttctcttttcccacctaactcttcaagaatgaaggtacactgcatggggataatagaacancctgcatatctgaaggtgaactgcataaaaaaaaaaaaaa

SEQ ID NO: 52048 - DNA, 640 bp, Homo sapiens
  misc_feature 23, 36: n = A,T,C or G
tgggtaccgggcccccccctcgngggtacttctagnattaattaacgcgggcattatatattccaagcatgatacatccattaaaatcccttggaagcaagattatttcatccaaacttagccccaggggaacaaaagtatttaaatgtgcaatttattcaacataaacagcagttctgacttgaggatgttcagcttaataagctatggaattcagttttcgtgccacagcagatgactcctgagtcatgattgaaaatatcactcattttaataaagattgtaataactggccccccaaaataaggaaaacatcaaaaacaatctagaacatgtattttctgtgttcgtgaaaatatgacgcaaaatctgaggtctgtagtccaggagaagtaaatagtgaaagtactgctcgggcgttaaagtgacatgagatggctctgaatgttatagtttaaaaatactctccaagaatacaagccaaatgactgcaggattataagtcctctctcccagttgttcaggtattaaaaacaggcacaagtaagaataaccttcaacagaactaataaacagcacgtgagtaataatgcaatacaccccagtgaggatactacaccatgacaccccagtgaggata

SEQ ID NO: 52049 - DNA, 525 bp, Homo sapiens
cggggccccccctcggggtacttctagaattaattaacgcggggtcatgcctctgtgtgtctgtgtaatcttcttattaaataggcgaggagcacgtcctaagttcttgggcagagttaagagttcacacgtcaagatcacaagaagaaaaacactttatcagtaacactattcaattgtgagatctgtacatttatacagtagttcattttacataaatgggaggatacgtttaggctttagaatgtttctcaatgttaaataattaactgaaaaaatacactcataaaacaagatgtatgctgattgtggcttgagatttacaagatcttttaggatgcaagtcttcacagcaatactaaaagactggtaatatttttttactctaggtgaagcactgaatgctagtgtatatgctactaatgagaatttttactcatatctgtaatcattataaaagtacattgtactatatagattagtttattctgtgtcaatattttaataaattttagtattttaaaa

SEQ ID NO: 52050 - DNA, 579 bp, Homo sapiens
cgggcccccccctcgaggtacttctagaattaattaacgcgggcacatacaccaactcacatatttctataatttctcccatcagaaaggttctgcataatgggcaatttaaaactttgaaggaaggaatgttttcatctttttggccagttcatcttcactgaattttaatagtctcagctgtttggacttatgtgtccctgataaatgccaaaaggtctaaattcacattcatgctaagcaaaactcttcctttggaccacacatccaagcacaatcacggaagtcctcagctctttcctgtgcaaggctagaacaactaaaatcaagttctttagtatataaatctgtattcaagtcctgagtggcaataccataccttcaagatatcaacagatagcctttgtgtttatctcattccttaattcactcctgtacaatctcattaatggctaaaagttcaccaagcttttcatcttggtgttaactgctcaaagatgtcaacccacagatcctcactcgattcttgtctataaaaggcattgttctatgtaccactgaagcaaaaaaaaaaaaaaa

SEQ ID NO: 52051 - DNA, 609 bp, Homo sapiens
  misc_feature 39: n = A,T,C or G
gactgggtaccgggcccccccctcggaaatacttctagnattaattaacgcggggaactcttcctccctcttgtagagttctagaaccccttctcatcctggaattttcactttggcaggaaatactttcaggtcacctcaatataaacagcacagatacagaagtcaggggctcggaattcttgtgtaactgctctatgattgtagggacttgctctaggaaggaaatgtcttccagacaagggtcctgggcagtgaaggcgctcttcacgtccctttggtggcactccctgcaaccactgggccacacctgccggaccgagtataatctctacagagttaaagtaggaaactgtcagctccctgggagtcgtgggacacatgagaagagagttataacagaatagcagaaaagctaaaggaaaaaaaaaagaaagaaaggaaaaaggaaacacagaaagtactaactaactggggaatacaaaagacttaatggagcaatgatttaaaactatgtgcccttttaaggaaggcagattgaaatccacagagcttcaattttcctctaatgcttgtgatttcagagactcctggggtacatgctccctc

SEQ ID NO: 52052 - DNA, 517 bp, Homo sapiens
ccgggccccccctcggaagtcttctagaattaattaacgcggggaatgagtgtgggaggtgagcaggaaaggagtatgcatgtctgctaaggtttccttaatttgaaattcctctgtcacattcttttaaatcttgtattgcaccaatagcactggtaataagcagtcagcaaaaccaataacaaagaatctgtcataagtatctttttaaaagctccttaaaatgagtaagattaatactcagtagaaaaatggataaagaacctgaactgataatacaaagaacaaatgaccagtgaatgtgttttcaaaaatctaacttcactaataaacggcaattaaattacatatcatttgttgttcaacaagttggcaatttttaaaatatgatcatatttaaggataataagagtatgacataggcactccccttaatgttcatgtgagtataacctggttaaatctttctggaaacaatctggcaatacagatcacaggtcttaaaaaaaaaaaaaaa

SEQ ID NO: 52053 - DNA, 320 bp, Homo sapiens
cccccctcgagggtacttctagaattaattaacgcgggactttcccagaggcaaatagcatcaagtcaatttgtttcaagtttctaagtcattctaaaaagacttgctatatctgaaatagcacaataatgttgaaataagaacaatcacagtagtaagctgtaggactataaacatgttttaccttgtgaaatacagacatactgtatttcattatagttctagctctcccctctctctctctctcctccctatctccttctgcaagaattctttagaagtgcttctcttataaactcaatggcaaaaaaaaaaaaaaa

SEQ ID NO: 52054 - DNA, 574 bp, Homo sapiens
  misc_feature 554: n = A,T,C or G
cgggcccccccctcggggtacttctagaattaattaacgcgggaggaggggaggaggatcacctgagcccaggaggtcgaggctgcagtgagctgtgatcaccctactgcactccagcctgggcgacagaatgagaccctgtcaaaaaaaattttgtacatggattccttaaaatgctacaaatagttgattctatgttgtcttctgcataaaacaatatgcagtagttaaggacttgcaagaaaagttccttctgctgctctctctgtcattagttcttgagtcctcactcaagcttgtgctctaactctacaggcagggctaacataaattatgcgtagtccaggagaccacacacaaaataacatacataatcattactttcttgtctagaggcttagtctggctacttttctcccattggcttgaggtgtaaattcaccaaaaccagcccagaaatgattttacatggaaaaaagtttatgttctcccgaaaatgaagaagagctctcagattttcctcgaaagtctcaaacacctctaaggagcagtangaaacgtgctctacctatgc

SEQ ID NO: 52055 - DNA, 516 bp, Homo sapiens
cgggccccccctcggaagtcttctagattaattaagcaacattaaatttagttttctgacttagatagctacagttacagaataaaatacagttgggatatacttttcacttatttaagctaacctaacttctgatcaagtacatattacagagagcatatggaagattccactggaaagcagtccaacttctgtataaatcctcaaaataaattttctagaatttattttatatcattgaaaatttttatttatatggaaatattttcattaaatctaaaccctgaaagcaaatgtttttatacatttacaaaagatttggtttttagaatatctttcaagtgaaagatattcatctgaaagaattgccattgtagacaacctatccactcttctctttcctgttctttgctctggaaggccaacatttgtgagcaatactgagctcccttgcactgtggcttccagttgggtttgattaataaagatcgctaacatgagaaaaaaaaaaaaaaa

SEQ ID NO: 52056 - DNA, 406 bp, Homo sapiens
ccgggcccctcctcggggtacttctagaattaattaacgcggggaccaagttctgaggtcagtcggtaaagtagtcagcgattcattaaaatgatgcttattattaggacagccaagcatggagaaggcaaaagagacaagaatgaacgtcagtggcttgctgccacatggcaggctccagttcaattgtttatacttttttttaaactaaaaaaaaacaatgtaatggtaacagaaaattttaatggatttaacttgaaacccctgacaaaccttaagagttaatccacgctgagttgatggcttttttttaagtaacattcatatcaagctgatgatcattttggtttagcttgcagatacagtaccaagcccttattttactcctcagcaaaaaaaaaaaaaa

SEQ ID NO: 52057 - DNA, 411 bp, Homo sapiens
  misc_feature 32: n = A,T,C or G
gtaccgggcccccccctcggaatacttctagnattaattaacgcgggggagcagcatccttcacttgacccacgcatccaggagactttgctcctgtcacccagagtccagggaggacgctgccccaggtgtgagctcactgggctattgcacactctcctgacctaagaagccaccatttccccctgctgcaagccactggagaacatttgcatcccgttatattttccccttcctggaaatgcatccttattcaaaggggacgctgtcacacacatttctaccttcccaagtgaagctgtcaccatggcaagtgctatgccctgtaacacatggagaagaatcctgcaccttcagcacacagaacagggcaacagctagaactgggtaacccgaaaaaaaaaaaaaaaa

SEQ ID NO: 52058 - DNA, 462 bp, Homo sapiens
  misc_feature 35: n = A,T,C or G
tgggtaccggcgccccccctcggaatacttctagnattaattaacgcggggaggatataaaatagtggttatctcttccttttcaaaatcagatataatatgcataacttatttttaacattttaattattattcgataattttaaaagaggatactactaacctgctccccattctgttccgcattcactgacactctcagatttgcccatgtcacagggcagtttcagaacaacccaaaaccttaaggaaaatacaagtctcttacttttgttccttgactttacttctttttttgaagaacctgggtcttgctatgtagaccagactggtcaagctaactcctggactcaagagatcctcccacctgggcctctgaaagtgtttatattacaggcgtgagccaccatgctcagcctacataaactttttaggtcactccaaaaaaagggaactttaact

SEQ ID NO: 52059 - DNA, 587 bp, Homo sapiens
cgggcccccccctcgaaagtcttctagaattaattaacgcgggattatttgtgttattccctcacaatagcctggtacagggttatctccttttaatagatgacaaaactgaagccaggaggtgtgcattgctgtttttttttattcttgcctagtgtttccattgatttctccctgagagttttgtaagcctccttctacatctttaactacttttatttcctgtgggattgtctctgctgtccctgacaaaggctctagacaatgggcatgtcaggactggctggattccaccaattcccagacacaagtattttttctcctccatagtttggttcacttaatggccattgcttcctcattttcttgccaagtgacccctccaaccaatggcctcctctctaggctggttggtgatcaacacaccctagagaataaccagcacattcagtctctgggcagatgtgcctctgagtgtgtttcccactggggtagagtggaaggttgtattcctagagacaaactcatgtcccaaagaccttgagtttgctttttctcaaggtgccatgagttatttatttattata

SEQ ID NO: 52060 - DNA, 590 bp, Homo sapiens
  misc_feature 30, 580: n = A,T,C or G
accgggcccccccctcgaaatacttctagnattaattaacgcggggctgcagtgagccatgatcacaccactgcactacagcctggataacagaacaagacccggtctcaaaattaaaattaaaattaaattaaattaaaaaatgacctcacaaaaaaagaatttaaaaaaagggacatcatttgtgaacacaggtatccttaataacaaacctagaatcaaccttataacattctttttttaacctgcaagcaaacatctccaattcacagatacataagcatacaatttttatgtgtaatataattttttagtaatgtgtacatttatattagcatatatcagaaatctctaatataaagatagtggtatgcatgtggttaaaattctacctacagctccctcctctgttcactttctttaaatgcagtttttaaaaactgcattttggaataattcatcttgacagtattgttttatccaaaaattttcagtgattttttttttggacagtgccacctttattaacctttctcttttgctgactcaagaagctacgatgtcagagcagggagcacanaatctactac

SEQ ID NO: 52061 - DNA, 623 bp, Homo sapiens
  misc_feature 35: n = A,T,C or G
tgggtacccgggccccccctcggggtacttctagnattaattaacgcgggaggctatattaagagggaatttcatgctcatgtcaaaaagtcagagagatctcaaattaacaaccaaatttcacaactagaagtactagagatacaagagcaatccaacctgaaagctagtgaaggacaagaaatgaccaaaattgaacctgaactaaacgaaattgagaagtgaaaaaaatcatacaaaaaaatcagcgaatccaggagttgcttttgtgaacaaattaataagatagactcctagctagacaaaaagagaagatccaaataaatacaatcagaaatggcagagtacaagaccatgactccatagaaatgcaaatctactatgcagtttttgcagagattagtatgaatacctctatttacacaagctagaaaatctggaggaaatagataaattcctagacacatacaacctttcgggattgaaccagaaagaaattgaattcctgaacagaccaataatgagttctgaaattgaatcagtaataaaaatcctaccaaccaaacaatttcaggaccagaggggttcacgtcaaattctgtcagatgtaaaagaagagctgg

SEQ ID NO: 52062 - DNA, 591 bp, Homo sapiens
  misc_feature 569: n = A,T,C or G
cgggccccccctcggaagtcttctagaattaattaacgcgggggtgtgtggaggaggtcaggaaaggtttcataggaccaagctgaggctgcttgcccagaatctatgaataagattcaagaaaaggtgatgccttgatatgatgtgtcatgtgtcaggcatagaggaaaagcaccaatttcatgggtatacagacctggttttgagtctcagttctgtgaacactagctttatgacctggtagactaatgcaaagtctctgagcctccgtttcctcgtctgtgaaatggaacagctcctatatcttgagtgggtgttgaaaagactgtatgagatgtctggagaaagcatccagcagagtcttcagcagatgtggtattctcagtaccttctctgctcctttcccaagatgaatccacacagtggataaggtcagcaaactatagttagtaccctgccctatgaaacaactcacagccttgtgttgaagcaaccaagatgctttccacagctccatcaaggcatgtcaagaagccatggcaggagtaatacttaagtaagctactcanacattttataacttccttgcat

SEQ ID NO: 52063 - DNA, 605 bp, Homo sapiens
  misc_feature 22, 593: n = A,T,C or G
cccccctcgaggtacttctagnattaattaacgcgggtgctacctcttagtaatcgcttatctttttatccctaggtttactcttagcttgccaaatcatgttaaatatgtctgtctgtccctttatttacacacattagaagaagatttaagatctatcacttattgtctgtctggcatactataaggattacttcatggcagagtgaattattctcagcaagttcagtgctggaagttccacttttatttaagaaatttactatcatccctgctttatctgacaaacacaagccatctcataatcttaaaaggtatcatgaactgtaccaaaataatttcaaaacagaattaacttgtttgtgctttatgtaatatactgcagactagaatacaatgaaaggactattttaacagtagggaagaaaacagcagatattctatttcaatatgtccacggatgactgctttaagtttcatgttatgtagctgacacacatatactcctcataagaatgaatggacatattgacaaatgtgaatgatggaatctcaaaaaacatacatttatttattgctccatactgtgattnttgatgggaaaa

SEQ ID NO: 52064 - DNA, 611 bp, Homo sapiens
ccgggccccccctcggaagtcttctagaattaattaagcggccgctttttttttttttttcctttacagtggaaacccttaccttcattagagcacagacataatctttatttgtaaaacttaaaactttaagctaaatgaaaaacagctaatgtttttgctgtaaggtagtttgccaactttagaaaaatatcttcaattcttcaaacagatggcaaggccacctttaaaaaatattaagcatgctaaaatagatacaaactgatagttctacttctgataaacgctgctgtggacaaccgaatgcctcccattctgtttcagtaataaatcactttcctgacttgagttagtaatgagacttttaatcatgtggattgaacatatcctccagttaataaaaaacgtatcacctcttttttatctttaataaaagatttgtacactgctcaaatgattggtattacatttttaaagaacccaagattgatgtttttcaattctcctctccatttttctgggcttttataattcaaaggtaatatgccctgtaattaataattcataaggtaattttaaggcttttattcagaaacctctttcctattgac

SEQ ID NO: 52065 - DNA, 604 bp, Homo sapiens
  misc_feature 25: n = A,T,C or G
gccccccctcggaggtacttctagnattaattaacaaacttttttaaaacacccagatatatatgaatttattaccaaatctactgacaatctaaataaccaaatgcagccttttctcttggagaatttgcattataaacatgaattatatatttccgttttaaagaaatgcatctgtgtgctattgccatctggtataagtttctgttttctgtagcctaagacttcccatttcatttaaagcttaaagatcaaaatgtaaaggacaaatttatgtagcttatcctctgtccatctatatttcaaaataacccttaaacaatagacattcaggatatttaatcaatgtatttttggtaagccctatatctaactggtaagccctaattttaacagagtttttctaagttaataatagtaccttatttataaaaaacaaacaaatactggccaggcatggtagaacatgtctgcagtcccaaagctttgggaggcagaggtctgaggatggcttgagcccaggtatttgagaccagcctgggcaaaatagaaagaccctgtctctacaaaaaaaaaaaaaaaagcggccgccaccgcggtggag

SEQ ID NO: 52066 - DNA, 532 bp, Homo sapiens
cgggccccccctcggtagtcttctagaattaattaacgcgggccttcatttatgaccaacaattagatgttgcttgaagactgaacaacataatgttcaaacatatgaatagtttttacccttctctttcttccttctgtttaagtagcatttatttcaaaattattcagcattacttagagacaaagacacccccatatctttcttttccatggcttttatggcctttaataaaaattgatgattcttttccctcccctcatttgatgtaaaaagtcaggcaacttggacatttcaaaaaccaaggcagccagcttggtgccataaagtctgagatggtcaaaaacatctcaagacgggatagagctgtgtctaatggatagcaaaatatggagccatgaaaaatgaacattataacaggggtgtattgcatcatttctcccagttatccactcctgtggcatgtctttgcattgcttgtgctgctaaaccaggtgtacttgctcatcccatcatggctgacctgggacag

SEQ ID NO: 52067 - DNA, 394 bp, Homo sapiens
cgggccccccctcgaaagtcttctagaattaattaacgcgggaatgctggtaaacttgtccttgaaaacttgatttgtaatcatttttaaatcactaaactttatttagttccaaagacctgctcaaccatgaattagcccctactatgtgttttgttttttagaataaagaaaatgaaaaaggcaattcattttgttgttgtttgaggcaatcattgctttaaattttttctggtagtttctcagtttgttagatgtaaacaatgacataatctgacaaggaagacaataccatttggtacctccttgaaaataaggagtcagtattgatcaggtcacatattattgatgacttcaacatacaccagagaaacagtcacaaaaaaaaaaaaaa

SEQ ID NO: 52068 - DNA, 407 bp, Homo sapiens
cgggccccccctcggaagtcttctagaattaattaacgcgggcccaaccagattgtcaatagctccaaagctaaattaacagattattctccttggctttctgactcattcctctgccttttattagaaaccagaattttgaactgggaaggttgtctggtcaaacaagaagcctgggtgagaaatactattttggctacgctactgcctgtctatatggttttgaacacctctcttcctttctctggcctcagttttatcatgtctaaagtgaggtgcgtggaccagattattacttctcaacgtttttactacccctctcttgaacagcatgtttttatctattaaacaaaatgcgtttactaagaaattatttattctccttcctggtatgtattactcacata

SEQ ID NO: 52069 - DNA, 622 bp, Homo sapiens
  misc_feature 28: n = A,T,C or G
cggggccccccctcggaagtcttctagnattaattaacgcggggaatgtagtcctgttttgttgattttaagttctgatgctttgggcaagtcgttttctttctctaaactgtagtttcctttttttgtcttgtaaatttttttcaaatttaattttgttttagattcagttggtacatttgtacatttgttacatggttatatgacatactggtggggattgagcttctagtgtattcactacaaaaagagtgaacattgtacccattaagtaatttttcaacactcaccccacctcccaccctctccccttttggggtctcgtctaatattttcatctttatgtccatgtgtggccattgcttagctcccacttgtggtatttgactttctgtttctgaattagttcacttgggataatggcctcaaaatccatccatgttgctacaaggagctttctaataggaaaaatgaaaagaatgaactaagtggtttctaatgatctattcagctcttaaattctatctgaatttaattcaatcatagggaatattgtattattttttacaaaactgatttatatattttacagtaataaaactcaattacttatggcattgct

SEQ ID NO: 52070 - DNA, 398 bp, Homo sapiens
  misc_feature 7, 8, 385: n = A,T,C or G
aacgcgnnggtacttctaggggaatttatcctaagggaaatatatatttagaagggtgtttaatacaaggttatctgtaaatagcaaaataaaacagaagcaacctaaacactaagaaattgactaaataaatttgtaaacatcaatccaatgcaatgctatacagccatccaatacaaattattgtaatttgtatgccataaaaataaactactcatagttattgctagagaactgtgattacagaaaattttccctttcttacattatatatttctataatgttaaaccttttacatttgtgtgcctccctattaaaaaaaacactccttaagtatttttcaccaaatcatggaaaagtgtcaaactggtatgagaaaaaatnttaaaaaaaaaag

SEQ ID NO: 52071 - DNA, 421 bp, Homo sapiens
  misc_feature 28, 191: n = A,T,C or G
ccgggccccccctcggaagtcttctagnattaattaacgcgggccctgaattataatgggctaaaaaaaagtcccgtaccatctgtgtgaacagccacaacaaaaatgtgatcttgaaaagaataacaataaagaattaatctaacttgagcatggtgacaatttaaaaaaaacaagaccctgaacattcntgaaaaaatttgttgaaaataagtatcattatttaacagtcaaagtatgatttatttcaggccaagtcattaagattagttctgcttgagaaatctctgtgtaatttaccataattattaaagttgacaaatcgttaaaaagaaacaagagtaggaaaaaagacccaactttataatgatgctaaaaattttgttctctgaatttagaatctcccaaaaaaaaaaaaaaa

SEQ ID NO: 52072 - DNA, 593 bp, Homo sapiens
attaattaacgcgggcagtgttttgaattgtttctttattatgcaagatcaccccttatgcttcatcaattaaatttatcttgtatcatgaattctttttttaacccactcaactgaaaaataaaacaattactaatgcttaaagttaataaaaaacaaaataatctatggttttcatttacacggatatctttaccattttccaggtaagagaaaatggtcctaatatcctctcatttttccccctagaacattatttttagaggattccagtgaccagcagtggagaatataaccctcattttcttccccaaggagaaaagtcccataaaatattttttaattctctaaaactattagcttagaattcaaaaactcaaaagacatatttaccaactactaactggaaaatatcttctgagtcataagctcggcagtgtcttttgtgaaatttttatatttaacaaattcttcatgttccttatgattatagaattacaaagtgcaaataaaatttctaaactccagaaaaaatagttccagcctataccagttacatctgaatgtgcacctgtgcccctctgagtgagcaa

SEQ ID NO: 52073 - DNA, 300 bp, Homo sapiens
ccgggccccccctcgaaagtcttctagaattaattaacgcgggcccaagtactttagaatatatagagattttatttttataattttgggggtaagaaagtcatgataaacattatacaaaggaagaaacaaacaaaatactgattgatttggctgtttaatgtgactgcttcatgttcacaggtaataaataaaatcaaaactcaaaaaacaaaaaatgtaaccaatcaaatttttttatgtgaataacagatgaaaaagttctaaaaattatataaaacttttaaaatttcatacctg

SEQ ID NO: 52074 - DNA, 321 bp, Homo sapiens
cccccccctcggacatacttctagaattaattaaaattgccttttattacaggtgtttaaaatctgaaattcacgccttttttctaaacaactgattcttattcaacaattttttttcatttgaagggatgctttaaaactttccctgccctgagggaatatactttaaatttccctttcataatttttcattctaaaaaattcacctttttttgataaggatatcaaatttgacaaaactttgtcaaatgtcaaaatttttgggttcagtttttaaaatctattaaatacaagggttctccctcccaaaaaaaaaaaaaa

SEQ ID NO: 52075 - DNA, 618 bp, Homo sapiens
  misc_feature 33: n = A,T,C or G
ggtaccgggcccccccctcggggtacttctagnattaattaacgcgggcccagcactacattacaaataatataacaaaattaagagaaattatttcatgtgtatagttatggcaatagttcaataacagaaaattttcttatatgcttgattatattagtaagtcaaaggaggaaaacattatgaggatctcagttgatgctgaaaaggattttgtaaagtccagcatcattcccaatgaaaattagaatttgtaataatttaaatatatatatatgttatactaaagccagccacttcctttataacataacatcgtaattattcctattgaagtcaagtacaaggcaagaatgttcaccatcacattgtaacaatagaaacgatagccaatgcaattagatataaaatagaaataagaaattaagtactgtaaataagtcagggttgtcatttgtttgcaaataatatgaaaactccaaagcatcaactgaaaagcttttagaggcaataaaagataaattaagataactagttataaaattaacatacggggggtggggcacagtggcttatgcctgtaatgccaacactctgggaggctgaagtggacagatc

SEQ ID NO: 52076 - DNA, 301 bp, Homo sapiens
cccccctcgaaagtcttctagaattaattaacgcggggtctctgtgattccaactgggtccatctcttctcttgccacttttcctttccacttgcatcttcaccttctaactcattctctcctaaccttttgtgtatacacttttacgtttctgtatcttaacaccggccatgcccttcttcaggaaaggctatacccaggccctgactccatcaatatccagtggttactgaactagtaatttttgggaaagccttatctgctgtctcttgtccatgcttctctttgaatacttttggtt

SEQ ID NO: 52077 - DNA, 582 bp, Homo sapiens
  misc_feature 480, 528: n = A,T,C or G
cgggcccccccctcggaagtcttctagaattaattaacgcgggggtctgatatattctattcatttctgtggagacagtaattctaggattgttcagtctcccttttcatttgcaccatcttctctacaatcattataacagtttgcttttttgtacttgctatgtgaagagtaatgcgcaaaagacaaaatcagaatggaaatgggggaagaatgcaagtgcagagaaggccgatccaggaagaaagcggatcaaatagcagaaataaaattcttattaaacccctgctggaggttactacctaagctgttatggttaagaactgccacctatcacaggttggtttcttgtgtagtgcatattgacacattaagaacaattaatgaaatgaaatgaaacgaagaggaatttttagaactagcatgctggaaaagctatgttaatctcttgtttccctataagtttagaaaaattaactntaagtattgtgagtaccaaaaaaatgaaattgtagctgaactatatancatgagaaacaggagcacaatatttgtataaaagcgctcaatacagacatgtgc

SEQ ID NO: 52078 - DNA, 391 bp, Homo sapiens
cgggccccccctcgggagtcttctagaattaattaacgcgggtcccaccagggtgcctagccattacatggtataagggacattttaaaaaaataaatgaactaaatgtaggttgggaacagataatacagatgaacacattttgaagatctttgatatccaacttagatcctatttccatatcttacaaaactaaacaaataattttaacacctacagaggttaggtatctgcttcacctaggggagagagggcagatagccctgagtaaccatggtttgaattctctgacatggctaggtagtctaagtgtggaatccaatgaaagctgttttataggttgaccagtggcctgcagctgtatagtggcctgattaaaaaaaaaaaaaaa

SEQ ID NO: 52079 - DNA, 407 bp, Homo sapiens
cgggccccccctcggaagtcttctagaattaattaacgcgggtatttctaagagtttgcatcagtgctactttgacccactggaatactgctttaagacccagatcaatttgagagaaggtctgagaaacatttttaatataatacaaggcattcatgcaaacttgaaaacagatacttactggaatgagaaaatgcaaaactaatgaaaatattgaaaatgtcagtacattgtgtagcacttaaactgagcattagctaattttaatgattgctttttcctgtgctactgccaatattgtcagcaacagatgttgttactgaaaatgctaattattataggtcatagacaccctctagctcgctctctttcttgctctctctttgggttgtattggaattacatct

SEQ ID NO: 52080 - DNA, 609 bp, Homo sapiens
  misc_feature 10: n = A,T,C or G
cccccctcgngaagtcttctagaattaattaacgcgggatggcacgtgtatacctgtgtaacaaatctgcacgttctgcacctgtatcccagaacttaaagtataatttaaaaaaagaaagaaattaaacaacaacaacaaaaatcatcccatgcttaaaggctctattcaaatctgagaagattatgtaggatatacttttgttaagccaatgctctctataacagaccagaaagaaattctttcctccagttctacatgagccattattgttcatacacaggaaaagtgtcaaaatattttttatatctcatggtataataaatttttattttcagaaaaaattacttgctataaattagatgattttggaaaaatcttgatgatcacaattgctgggcttttaattatccatcagtaggtccctaatctttaattgtcctttattttcatcatttaatttctaaacttattgtaaaaaggattgtattgttatctgttattgctttcaaagttcttttgtagcctgtcagcggcattgtttttatgtaaagttacaaaatgggaatttaagcattaaattttcttctcccaatgccacattgaaaa

SEQ ID NO: 52081 - DNA, 573 bp, Homo sapiens
gggtagccggggccccccctcggagatgcttgctggattaattacgcggggacttacattcttctttgattttgtaaatatatatttttaggaattttttagaataattatatatttttaggaatattttatttttttgatcctgatgaaatgctgaagatgctcattctgtcttgggccagtcacttacctatttctcatttcttctataaaatgaggattaaattgcctgatagggttttgtgaggaaaaagtgaggttgtgactatgaactcattctgaaagattaaaacaacaacaacaacaagaaactgtgagctactattgttatttaattacaattactcatatcatggccattctcatccggaaattagagccagcacagctgtggaggtagctgagcaaacaagggcatgttagaatattttgatgttagagtatcccctcggggaaagtcaacagtcccaaaatgaccaagcgtgtatgattgtatgcttaaactaaccctgaaactaaaaatttcatcaagtgagatcagcatggtttggattaatcagggggggtagcaaa

SEQ ID NO: 52082 - DNA, 601 bp, Homo sapiens
cgggccccccctcgaaagtcttctagaattaattaacgcgggtctgcacctggacgtaagaggttctaattcctatgattatatgtgtagacagccaaatttaggcaataagaaccataatacactacacaattagtactcctctcactttaccctgatgtataacaatatgtcgttccctacaatacccccaaaataaacctcttcatgcaaagagacagatcgattcaatcaaaaatcagttacaattgttatttggtgttaggatgaaagaaaatagcgatttcactgtgttctacgtgaaagatccaataacaggcagtagaagcatattttaaacataagatgtaatctctaacatttagaattgtccagcaatgtaaaaaattgctttccatctctggagttaagacatttggaaatggaatttgtacacaaaatagataatgcataaaatgtctccaagatccttcacagtttaagaatatttaggcaggcatgtttttcttttcagaaagagggcaacaagtaggcacaaacattgtgtaatttggtatccagtttcagggacaactgaaatcacccatctttgatatactca

SEQ ID NO: 52083 - DNA, 588 bp, Homo sapiens
  misc_feature 11, 22, 38: n = A,T,C or G
ccccctcggangatacttctanattaattaacgcgggnattcttaaagctttgttcacagcaggatctgagatctaaacttctaaactattatttcatgatttgtatttttttaaagggtagggaaaaaaaaactcccacctcatgtcagagtactttaatgttcctgtgatgaacattgttaaaaaatctgtagaccaagtgaaaaaagtacaagactgaaataatcaaagaactgtgaagtttgaaaattgaagcttccagcagtttcagatcagctgcatccaattaatcagatgcgtggcccaacaacacatgctttgagctgtttatttcatgcactgtttatcgctaaaatagatattaaagctaaagagatttagaggaaaatagatggtctgttaggagaaaagaattactttaaaatgttcctttataaaaaaagattaaaccagattacgtttagttgcctgttgaagaataaattttatagtagtgatataactaaaaaaaaatgttgtttttaagggaaacaattcactgcatatgtcaattgtaacactttgtgattttgtttgcctattttttt

SEQ ID NO: 52084 - DNA, 537 bp, Homo sapiens
  misc_feature 479, 500, 516, 518: n = A,T,C or G
cgggccccccctcgagagtcttctagaattaattaacgcggggtaatccgcacaacactgaaactcgaaggcaacaagaggccttgttccactgatctatgtcttagcttgagaaagaatatgagaaccagggcttggagaacttccttatggtattgaaaaaaaatgtaaatcctgacctgggcaagggatgctaagtgacaaataacttaaggacttaaaaaaagtatcccatttgcaaacaagcataacatgaaattagcttagcttatataaggcttaaatggtaattgaccttaagtttctattgtctcagctgattattttgaaaatattgtcgtagttgaactggtactttaaaaagtcaacttttacacttgcatttgaaaattaaattaaagtagttgtctcagcagtaagtcaggagactcagcatatcaagtgaaatgtccaatatctgcccattaagtatgcctttntgaataagaaccatgaatcanatgaatcatccttacncnaaccctgacaagtcttgat

SEQ ID NO: 52085 - DNA, 396 bp, Homo sapiens
attaattaacgccggggcatgcctaacactccactttttaacttatgatattgggatgcagtttttccaaaattgacactttgtaccccaataccatttatttccaaaatttttcaaacaatttcggggggttcataaacttactgaacccagtaaaaagctcttgccctactggttttttaaatcagcaaaagacattgataaatctttaagtccaaatgtaaaatcaaggagaggctgaataaaaaaattctcatgaggaaaagtgcttttcaaatgttaatgtcaaaatacctaacccagggtgaacccagccatttatttttttgtatcagaaaaaactatttttgttaagatatgtctgcctatgggtttttctaaaaaaaaaaaaaaaaa

SEQ ID NO: 52086 - DNA, 652 bp, Homo sapiens
  misc_feature 621, 622: n = A,T,C or G
cccccctcgagagtacttctagaattaattaacgcggggtcctcctgcaaattaactcctagtatcctgcactgatgtaccagataccagaggtgggtatacatatacatttttggctttgcaaatcaagacatgggtctattccttaacaaaaagtagcttattattcatagcccattttaatatgttaattgaaagaacacttctatgggtggaatataaatgccatttaacatttctgagagcatttataggctttggatatccatgattctttacagagttatttttttctgtttacctcatttaccccaccattcctgaaatgtttctccatggatccttttctcctgcttctacctcatagagatgtatcaaaatacactaatgggctggttaaaaattcagattcctgggttatacctcaaaataactttggattatcctagaaacctatgtttttatattatttcccagatacatcttatgacagtaatgtttgaaaaacactggcttagatcctatgtctagagcttgtccatgaatttttataaaatctgtggccagacttttgggttgttagagataccttgttttccttttttttttctttctataatnnttttttgcacaagtttgaggcttaacctgt

SEQ ID NO: 52087 - DNA, 584 bp, Homo sapiens
  misc_feature 38: n = A,T,C or G
ctgggataccgcggccccccctcggaggtacttctagnattaattaacgcggggcagtatacagtatttgtctttctgtgtctgttttgtttcatctaatataacatgttatgtcctccaggctcattcatcttgtcacaagtgacagagttccctttagtttttaagacaaagtagtatttctttgtgtaagaataagcaatcctttattcatttgtctgttaacagacgcttaacattgttttcatatcttgggtgttgaaaataatgccagattgaacatcggagttcagatatatcttgagatcatgatttctttctttgtctatataccaagtaatgggattcctggatcgcacaatagttctatttttagttgtataaagaaacctgccaactattttctgtaaaggttgtaacaatttacattcccaccaaaagcatactggatatctcttttctccataccctcaccgatatttggtatctcttctctttttgataacagccataataacaggtgtgagtgatatctatgcatgttgggggtctgattctcattttcctgatgccaggtgatgttg

SEQ ID NO: 52088 - DNA, 582 bp, Homo sapiens
  misc_feature 528: n = A,T,C or G
cccccctcgagagtcttctagaattaattaacgcgggtgagcccagagagtccttgaagtaataaaacaactttctgtgaactcgggaatataataggctctgtggaaaatattcagaggtaaggtcttcttcagaaccttggttatattaaaatgtatttgttgagtatttcctaacatgaaatactagaaaactgtctacagcaatggctaatcacatatatgggagcctgataaatttaacccttataaaagctgctctgtccacgagagagcttatacaagacacactgaaaattaacactgagatatcagttttcaataatcttcataaggcaatcattgaaaacatatgattccagatatctggagttgtaaagacaaatctactctattatctgtctaaaacatcaattattctatcaattattcttacccctaaattctatcaattattcttacacctaaagcctgaatattagaagaatttgaaactctgcccaaatctttataaggcacttactgaanaagatgacttaaaataatcaacattttaagaataaatctatatgatttgtgtac

SEQ ID NO: 52089 - DNA, 400 bp, Homo sapiens
ccgggccccccctcggaagtcttctagaattaattaacgcggggcccgcctcccctctcaaatgctgagattacaggcgtgagccaccgcacccggtctttttccctgttttctttgcaccaaactgtatctgagttttagactgtgcaaagcagccaactgtttttatcaaagactaggtaagatgtgcttttctgggatgtgtggcggttattctttgctttggaaaaagaaattagaggagatattagaaaatatttattgagttcctactctgtgtaagacatgagtgagaacaatatgatgtggttggttatgagcatggacactggtacctaattgtatgggctgtacctcttactaactacaggacctatagggatgtcagtttcctcatcct

SEQ ID NO: 52090 - DNA, 605 bp, Homo sapiens
cgggccccccctcggaagtcttctagaattaattaacgcgggctcatttttctctttaaaaccaattcctaaatactgattgggctctcaggctagtcctgaaaacactaataatgtaaacatttcccctatacgagaataatggtggaagctgggaaccctttggttactttcaaatgctgtttcaatccacttagaagctaacctataaaacacagcacactggcaagttagaaatttcccatagccacaacgctaactgctttctgtatcacttttttcataaatgaccattccaaagctcatgacaatatatagctaagcaagcttcctctaacatgtatattccaacttgaaatgaatattcttcttttaagatgaaaagcacaaatggggccaggcgtggtagctcacacctgtaaacccagcactttgggaagtgaggcagacggatcacttgaggtcaggagttcgagaccaggctggtcaacatggtgaaaccccgtctctactaaaaatacaaaaattagctgggcatggtagtgtgcacctgtaatcccagctactaaggaggctgaagcaggagaatcccttgaacccgggag

SEQ ID NO: 52091 - DNA, 617 bp, Homo sapiens
cccccctcgaaagtcttctagaattaattaacgaggggtaccctgtataattcagtaatgtaatagtaataatttatttgctaatgtaatagtaatagtaaatgtaatagtaataatttatttgctgaagacctcatcttaaatcttgtatcttctttgcttttgaatacatttgtaatttttgtgatatttacctccaacatgtcttccagaaagaccttctgagtgtgaaatttttgcatcctcacatgcccaaaaatgtgcgtgcacacgtgtgtgtgtgagttcatttacattttaatgccagctcagtggtagaatattagggaagtatgtaaaataatcagctaaaatactgtctattttctaaccaaaacaaaacaggacagccctcttgaaagaaagcattcagaatagtatgatctgactttgtttcacccctttgcactgaaaacacaggtgtcttatttgattccctcatttgttaacttttattaaatatacatcaagctgcctcaattatatatcccaaggcatccaaaatccattgacttttcttaagtacattgacgagattttttttcaagccattattaatcattatggtgatgttctac

SEQ ID NO: 52092 - DNA, 556 bp, Homo sapiens
attaacgcgggtccattaggaagtaagagctgattactttctcaatttcttgccttgttgaattggcagaggctcaaaagaggatgtatccttaatgatatttgcccccaaatagtaaagggcaacaatccatgagagagattctaactaaagccaatacaaacatgtaaagtactttaagtctgccttcatggtcccatcagctttattttttaatcttcttatccctacttattattagttttctatgttgcaaatctcctagatactatctataaccatttatttaaaaaagtaataattgctggctagatactgaaaatatacaaatggaaaaaccattttgcttgctttcgaggacctaaaaatccaaatggacagacaattatgtaaataagtaagtgataatacaataagcatgacaatgggaaaatgaacatattcaatgcaataatgaagatatgaattatggtagattggatggtaagcaatggaatgggagaataaatactctgtgagtacagaggagggaagaagtcaaagaaatcaatggaag

SEQ ID NO: 52093 - DNA, 584 bp, Homo sapiens
  misc_feature 28: n = A,T,C or G
ccgggccccccctcggggtacttctagnattaattaacgcgggctcatcttctaaaatttatatttgaaatgtataaaatattagacaaatagcacatgtacttaatctcataatttcatcaaatataatttattggagcgtttgaacacatcagtttgctgaaggggacgtgccataaaaagcctacctgtccaggcactttgggaggccgagacgggcagatcacgaggtcaggagatcgagaccatcctggctaacacggtgaaaccccttatctactaaaaatacaaaaaattagccaggcgtggtggcgggtgcctatagtcccagctactcgggaggctgaggcaggagaatggcgtgaacccgggaggcggagcttgcagtgagccgagatcacgccatttgcactccagcctgggcgacagagcgagactctgtctaaaacaaaacaaaacaaaaaagagcctacccgtccaaacaagagctgataagagtctgaactatgtcaatagtactgggaatgagaagaggggatggagagaagagatgacaagaagaaagaatctgcaggacctgataa

SEQ ID NO: 52094 - DNA, 584 bp, Homo sapiens
  misc_feature 483, 512: n = A,T,C or G
cgggccccccctcgaaatacttctagaattaattaacgcgggcccctcggcctccaaaatagcccacaccccaaagcttgactaattttttaattttttactagagacaaggactccctgtgttgccctggctagtctgaagctcctgggcccaagtgatcctcctgccttagcctcccaaattgctgcaattacaggtgtgtgccaccatgcccagactgttcagtttttaatgacatatattttaatatctgtagtccataatatatcattagctgtggatacttaagggaatatgttcttattagcaatttatatgtaaaaaagtgtatatttgtgttctgtcattcaaatctatcacagttgtaagcctattaatattatgtcttattatgtaagtataaaatactactctatctatattttgatgatttttgaactccagcaaaccatccaataataatggcttccagtgacaaactntttattatttgcctaatctctttgctgcngaaatgtagttatcatcaataattataatccaaaggttaaaaaaaagctgaagaaggatcaaattgttatct

SEQ ID NO: 52095 - DNA, 456 bp, Homo sapiens
cgggccccccctcggaagtcttctagaattaattaacgcgggctctcactcatatgcactgtgaaataacaaatacccttgaagtaattccatctcttggtgtttcatcacttactcactcctgcaatgccacgccctttgcctaggtagtccagaagatctgcattcaattatctaactcacttattaatctttgttttgaaaatttattaatttccttcatctttaccttgatgtaagctccttggagacctgttttccacactcctctcagttctctttaaatgccgtgttcaggattgctttgtagactcagtttaatgcctcttgatcttctctcctttgttttgggcaaagtgcctatcagcatgtgaggatcacacttatgacaccctctctcatgctcagcgataagtagatatttttggctttctcaattacaaaaaaaaaaaaaaa

SEQ ID NO: 52096 - DNA, 629 bp, Homo sapiens
  misc_feature 547, 600: n = A,T,C or G
cccccctcgagagtcttctagaattaattaatctctggcaataacccagccattggcatttttaacttcctaggcgttctgatgtgctactctgcataccttattcctattgctaaaatctaaattctggcagccacatcacacagtgaatgacattattttttaatccacaagtctgttgcacaatgaggttaaactacatgtcctctgtcaattactgttgcagttttcttaattattatttacccatatgaaacttttaaggattgtattcagcttatctttttgtctactaaggtccctctgaattctgattcttactccatcttgggtcatccacaaatttaatcagtatatccttactgaagtcagagacagaagcactggctagctaaatgtgaagaaccactccacaacattctactagaaaccttccaggctatgttcatgctagcttttaatatcaccatatttgatatgagcaccctattatgcccaatttgaggatgaagaaacagtgattcagaaaagtgaaatggctgcctgngattacacaggttaagtgaaagccaagaattgaaggtaggtccctatctaatntcaagtctcatgctctcttcgtcagctac

SEQ ID NO: 52097 - DNA, 558 bp, Homo sapiens
  misc_feature 28: n = A,T,C or G
ccgggccccccctcggggtacttctagnattaattaacgcggggcactggtatcaatgagtaacatattgaaacaagtagattctaacagaaagggctatttcaacatcaataccccttaatattttttcatttttaatttggtaccatcccaatatttatgtattattcacatctaaatttcaaagcagatcaattctccatatcattaaaaaacacaattttataaaacactaagtaaaattattgtttattcagagcattaactcttaactctcattgtatacttggggtgcttttaaaaagactaacctctaaaattctagttcaagtatgggaaagagtctgggcaacaatatagctttattttattatctctccaggtgagtttaatgcagcctgctttgaaaaggacaaatctagacaggcttagtgacatgtgcctacagtcctagctactatggagaatgagacaggagaatcacttgagccaaggggtagaagtccagcctgggtaacatagcaatattttatctcttaccaaaaaaaaaaaaaaaaa

SEQ ID NO: 52098 - DNA, 483 bp, Homo sapiens
  misc_feature 419, 444: n = A,T,C or G
ccgggccccccctcggaagtcttctagaattaattaattctagctagaatatattaacagtttataacagtttaatattcaggtgaatcctccttctcacactgtagaactcatgaataagaaatatgtgtcagttcatgtcacctaactacagatatatgcagtgaaggaagctgcagttacttctgatcctacattatagatttttctgtcatctgaacaaaggctacattttgttcacacgtgtaagaattgtactcactgaagtatacttattcaggaaagatttgccaaaggagcagaaagaagtcatttcaattaatgttaattttataaaataacctgaatattctgcttcacaattccttaccagcatgtaggttcacaagcatctttgtacatagtttctgtgtggattntattttgtcagactaaaatgtgctntcatacgcctcattatgcaataaaaatgaaagcctaagt

SEQ ID NO: 52099 - DNA, 357 bp, Homo sapiens
aacgcgggtatactttattttttactagataaataaataacttttggctaagaaacttttgacactcccaaagccacacatcaagaatgtctgtcttgtttttcaccactcccactcccactactggtcccatccatagttagataacataaattccttgagaaagtctcaaaggtttgacaatttttattatattttcacttacctttttatactttttatttaaaatagttttaaaataggccaaggtgggaggattgcatgaaaccaggagtttgaggttacagtgagctgtgatgacactgttgtgctccagcctgagcaacagagcaagaccgtgtctcaaaaaaaaaaaaa

SEQ ID NO: 52100 - DNA, 572 bp, Homo sapiens
  misc_feature 531: n = A,T,C or G
cggggccccccctcgaggtacttctagaattaattaacgcgggtcaccatggctggaacctaaagtcatcaagacatttctgatgataccatttttctctcatccttgagtcgacctccataaatggtagttgtataagaacaaacattaatatacccagggtattaagataatgttcagtgaattactcattcagctttttttttaggaagtcagatactttgggatacacatcaataatatatagtgccccaatagcccaagaaaatgtgaaatgtttcccgatagatagaattaaagtttaaaagaggtataagtactggagcaaatgcagctcacaccatttttaaattattttttttccttttgtcctatcaaagacaccccaaaagaacatcagacctagttcatgtaagttaaaaatatcttcaaaatgttaaatcatgaggtaattcacctattagaataagtataggatctcagccgggcatggtggctcacacctgtaatcccagcaccttgggaggccgnagcaggtggatcagttcaggagtttgagaatagcctggcca

SEQ ID NO: 52101 - DNA, 442 bp, Homo sapiens
cgggccccccctcgaaagtcttctagaattaattaacgcgggtaatcgataatcaaaatgaatgacctgagttgggaacatagaacctttgtagctctgcatagccagtcaaattaaattccatcagtactaaaacaaacaaaaataagactattggaactaaattctttcttattattcactaattcatttgttcaaaccatgcttgcctttcttctgcatgttccttgtaatacttctttcttgcatattctaccatattagacttttgcaactttgaacttcttgtctccccactcacccttgcaccacaccaagaatataaaatctgaatacgttttaaaaaattattcctattttattgctcaactagaacatattatctcattttagtcacaaaagacttgcacatatgttgtatatactccaaaaaaaaaaaaaa

SEQ ID NO: 52102 - DNA, 632 bp, Homo sapiens
cgggccccccctcgaaagtcttctagaattaattaacgcgggtatgccctagagtggaaagcatggtttttttcataagtaaaaactaccttgtaataaaaaatttaatgtatgaaaattataaacatttattctgttagctatgaggtataatatacttgattgcattgaggttcacatctgtccctttcatttatcattgtggtttaggcaaaaagtaatgttatagaagtaatgttaaatttcaaaaaataaattctatgagcagttttcattgacaggctgggatttcttttaaataatttgtcacaattatgctgaacatattttcagaaaatttaccacatggcttgtataaaaagaggtctttcatatctccatttgtgtaaccccaagcgggaaaatcctaattggtttaaaaattactctggcaggccaggtgcagtggctcacacctgtaatcccagaactttgggaggctgaggtgggcagatcatgaggtcaggagtttgagaccagcctgaccaacatggtgaaacctcatctctactaaaaatacaaaaattagccgggcatggtggcatgtgcctgtaatcccagccactcaggaagctgagacagaattgcttgaa

SEQ ID NO: 52103 - DNA, 588 bp, Homo sapiens
  misc_feature 28: n = A,T,C or G
cgggcccccccctcggaagtcttctagnattaattaacgcgggactggttagtttctcaggtttgtagagaaaagtggtgctttagattaaagcagtctagctagctttttgttaatgagtttagatgtcttctcattttaaacccacgaaaaactgtacagaagtgtggaggggaaattattatcattattattattgggactcttttgcctcagaccgtaatttcagctactccacccagcaacttgaataaaagagggaaagaaactgttttaaagagaaagactgaataattgttaatttagtttctactgcctctcaacctcaccttcttgctttcaggaggtttgaattggctacagctgtgctgtccaatgcactggccacatgtggctattttcgtatacatttcaattaaagttaaatgtaagatttcatttctaagcctcaccaaccataggcgaagtgtgcaatagccacaaatggcacctactgttggacagaggagagagcacttccattgttgcaaaaaagtcagttggacaatgctggagagggtagatgtttgtcgcaaaaaaaaaaaaaaa

SEQ ID NO: 52104 - DNA, 408 bp, Homo sapiens
  misc_feature 34: n = A,T,C or G
gggtaccggggccccccctcggggtacttctagnattaattaacgcgggttcagttaaactttcttgtcttgtatttaaatatgaatcagcaaccatggattacctgccacctaaaggaaagcttgcaacataaaataaacaaatcaatagatactagcagccatagagcaagtaaataatttggagcaaatagtatgctaactagtatcttcagcaaaatttgagataattttatatgcacaaagcaagaccaagatgctatgaaaagggaatgtagaacgagaaagttcttggatattgaaactgtgactttacaaaactgcacctgaatgattacaaaacaaaactgaagaattttcccaaaattgtagactccagtaacaatgaggcccaaaaaaaaaaaaaaa

SEQ ID NO: 52105 - DNA, 606 bp, Homo sapiens
  misc_feature 34: n = A,T,C or G
gggtaccgggcccccccctcgaaagtcttctagnattaattaagctgccaagcaaacttgttgatttagataacaactccacacgtagagtttgaagagcctgttttctggtatctagacctcacttttaagagtatttccctgaacctgtccatgcatttctgagacgtttgtgtgctgactgtttgttttatgtttgtgcaaagcctagtgtcctactgacttgtagggactcattgaaatggcagaaactgtgtgcattttaagtgctggaggaatgctaaatattaatatttgggatcaaccacaaaatatagtttctatttataagacacccaagactaaataaactgtaggacaaatgaagggtgcacattctttttggtaacattcagcatcctgaaaaccaccaagggttaggaaaaagagaaaaatgtatttttcatcttctgtaattcatctagccttgggattttctcctaacctcttgaggcacgcttatatacgtgaccctatgtaagacttttgggtgataaagtcgaggagattcactaaggaggaacagagcaggtgtagtgcccagggtggtaaaaccacagatggagc

SEQ ID NO: 52106 - DNA, 531 bp, Homo sapiens
  misc_feature 476, 501: n = A,T,C or G
cgggcccccccctcgaggtacttctagaattaattaattatctatattgagaatgaaatgttaccagagtggtgttcatggttctgggcagtcaaggaggtgtggtcagtggtacctggagtcagtaggggaggcttcaggatggccttcaacagaggagatggaattgggtttcttcccccacacccccttgccattttaaagggatggaatttcaaaggccgagcgcagaggctctcgcctgtaatcccagcactttgggcgggaggtgggaggatcacttgaggccaggagttcaagaccagcctggccaatatagcaaaacctcatctctaccaaaagcataaaaattagccaggtgtggtggtgcacacctgtagtcctagctactcaggaagctgaggcacaagaatcacttgaacccaagaggcagcggttgtagtgagccgagattgtgccactgcactctagcctgngtgatagagcaagactctgtctcanaaaaaacaaacaaacaaaaaaaaaaaaaaa

SEQ ID NO: 52107 - DNA, 603 bp, Homo sapiens
cccccctcgagagtacttctagaattaattaacgcggggatgtacctaatgctaaatgacgagttaatgggtgcagcacaccaacatggcacatgtatacatatgtaacaaacctgcacgttgtgcacatgtaccctaaaacttaaagtataataataataaaattaaaaaaaaactctaagcttataatatgtgataaaattttatcttttattagaaaatctctgggaagtgatcaacaccacaaattaaatcagttaagtccaagatatggtaaggatgcttggtatatattataactgagatacaggaataagcagtacttgaaaaggccaggagaaaaagtccttggcatctccttggcatctaagtccttagcggataattagtaactcttctatctgttgatctcaaatgtgcacttagcaacaaccatgattgaggaagtatttcttctgaggacagttccaactttaattgttctgcagcagtagataagaaggctaaagactcaagaatttcaacataaacattgaaattccatttcaatgttacattcattgtttattgagaatatcttttaaaagttttccaagtcccaaa

SEQ ID NO: 52108 - DNA, 612 bp, Homo sapiens
  misc_feature 74: n = A,T,C or G
cgggccccccctcgaaagtcttctagaattaattaacgcgggtaccctaaaactcaaaaagttttataatatangctccaatatacctttctaatcttagctccagcaattagccattcagaatctccattagagtcaaaacagctctacataaagttcctcaaatatggcttgtgcttctcgtctctcttgccccacctaaaatgcttttccctattcaaaagctttactcctcccacaatctcaattttgtgaaaccttcctgggctcatctatcttctggcccaatgatctctcccttctgtggactgcagtactgatataataaagcaaacatatggcattcattatctattggcttgtgaattctgtatcctaaccattgtttatctaattgacacgtgttttgtttcttcaactaggaaagttgagagtggaatctatgtcttatacattttaaaatttgctaagttttagcagtgctttagaggtggcgtagataactgcagtctcagtttctaagaacaaatacaaccacttcctcaccaaccccagtacattctaaggcctagaacttaaatttacaaaaacactgcttgcttctaaagtcta

SEQ ID NO: 52109 - DNA, 503 bp, Homo sapiens
  misc_feature 17, 29, 454: n = A,T,C or G
cggggccccccctcggnaatacttctagnattaattaacgcgggaccacaaggtaaatttattactgtaatttatttaataaaagaatgaaaactaaactccaaattaaagaagttagaacatagaaataagaaaaagtaaattaataatcaattcaaaattattcaaaaatagtaacagactaatttcttatggatataataaaaggtatagaagtgtacaaaataagtaatgcaaaggagatataattgcagagaatatttttaactgcagtatactatgcaaaactctttactagttgcttgtaaaatcttgaaaaagtaaattattttctagaaaaatagaagtttcatgatcaatccaagttaatgtggaaatctcaggctgaaaagaaaaaaattgttgtggaacggttgatactgtcaatgagtttcatttctggggagggagatanttttgtaagaaaaagctaccctgccgcacccccccaaaaaaaaaaaaag

SEQ ID NO: 52110 - DNA, 336 bp, Homo sapiens
  misc_feature 9, 10, 20, 22, 23: n = A,T,C or G
acttctagnnaattaattananncgcgggtacccactgtagaatctgaaatcacaatgcaaattatcttttctacccaccaaattctaatcatcactttttaacttttcaatttcattaaggacagaccctctaaagacaaaccctcctgttgagtcgttagagtagtttgtgcatatatagtaattaataatatggccctttaaaatacagcacataaaagaaaggctcatgatgttaagttttttatttcaggatgcttttgttaaatccagattctgtacaaaagggaatcattattattatgtcaaagattattctcaaaaaaaaaaaaaaa

SEQ ID NO: 52111 - DNA, 518 bp, Homo sapiens
  misc_feature 28, 43: n = A,T,C or G
aagactgggtaccggcgccccccctcgngagataccttctagnattaattaacgcggggcccataaatacatacacctagtatgtttccacaaaaattaaaaattaatttaaaaaataaaaataagaaaacagaatgagagtatagaagataaggttgtaatttttttcaattttgagaaggcaaactaactagaaaaaaattttaattccttaccttatgccatttgccaaaactccttctaaatatacattaaatgggcaaactgataaaaattaatgattgatataaaggaagaacctgggatccaatctcaaaaatagtcatgtttctgaaaatggatccagaacaactgtacaaaacagacaaatatataacagaaaaaaactttcctgaatttaagagtgacttaaatttgaagattaaaaatgtctcatttttttccaggtaaaaccaatataaagaaaccaaaatatagacatatcatggcaaaatgtttaaaagtaaaaaaaaaaaaaa

SEQ ID NO: 52112 - DNA, 560 bp, Homo sapiens
  misc_feature 82, 114: n = A,T,C or G
agggcggggggccggggccccccctcggagatacttctaaaattaattaacgcggggatccaacacagtaaaacatacaggnaacaattgattaatacatagaatattcagggnaaatattaaaaattgtgacgagaaaagggaatacacacagactgacatcctcaccttaatcccctcacctcaacaaccccatccacagatggtactagacaatttagagaggtggaactctaaatggcaagtaaaggctttctctctttcaatattaatcaaaagaatagtaatgaaacaattaaacatcagattataaatattaaacttcaattattgcaaatatttataagatagtgggaaataggaacttttggttgacttctgatgttagtcccttagtgacgttgcaagtacttagtaacattaagtacttatttgacctgtcacctgagatttcactccacacaaaatcaaacatgttgattttgtcccctttagggacaggcataaagattttcctcattacattatttgtaatatatattaaaaataatatacattgc

SEQ ID NO: 52113 - DNA, 510 bp, Homo sapiens
  misc_feature 421, 447: n = A,T,C or G
gggccccccctcgaaatacttctagaattaattaacgcgggctgccctgcaacgtaagtggtgagagaaactctttatatatgctttgtttttttctgaatgcataggttcagaattattaaacaaatcctcatcttttgacagccagtaatcaatttctcatttgcagggaatctaattgcattagaggggacactggggaagttatggactacctcatctttctactataaaaaatgaaactacttgtctgtattgaatttgattttatatgttcaatgaaatatatcatatccttataataaagttatataagttgcaatgactatctttacaaggttttcttatcagaacattccttaattattttaaaaaagaatttcttgagaaaactgaacactagaactctagaaaaatgcanattattgcctgtagaataatgcaggnagcagtgccatacttggcattcataattggacagaatctactctataagattgcaaccccttt

SEQ ID NO: 52114 - DNA, 300 bp, Homo sapiens
ccgggccccccctcggaagtcttctagaattaattaacgcgggacctgtgagtagagaactgagcaagtaaattatagtagtcatacaaacattgcacccccgtttaaaaatatgttatagaaaagatatttacagtaatttggtgagtgaaaaaacaggccataaaacagactgtagagtattaacccatttttgaaaaaaaatgtatatatgttgcccacccatagaaaaaactggaaatatccatgccaaaatgttagcagtggtattctttggaaaatggaatgacaggtgttttc

SEQ ID NO: 52115 - DNA, 578 bp, Homo sapiens
ccgggccccccctcggaagtcttctagaattaattaacgcgggcctacatcaatattcatttcttccttcttcacaatcctttaaaaatgcaataacattcttagcttgagaatcatagaaaaattggacatgggctggatttggaccccatatcatagtttagtgacccttagaatatatggtttgagtttcctctcattttttaatgtggtatacaatgttggactgtaaaatgtaaattttatagcactcttggccctttgagtctccaatttataacttaaatttttgaaacagtgctattttctggaagattccagttacttaaggtttaaattattgtttatgatcatgttcacgtactggagcactgctttgaaaacattcagtaagtactggatcaaagaatgaattactttaccttttttatcgaagaaagaatcatttcttgttttcccactctttaatataggcaagtacaggtgcctaatatcctaaataaacaaagtaatctgattaagtcatatggccttttctaaattgcaagagctatcatgtatccaaaaaaaaaaaaaaa

SEQ ID NO: 52116 - DNA, 484 bp, Homo sapiens
cgggccccccctcggaagtcttctagaattaattaacgcgggcagtattggaatgcagactacaaattagatcctctaatttgtagagcataaaaccaatggatcctaagaataagccaacaattttgacaagaattgtagttagctctgtcattatgatttacacacttttctcttactgaaattagtggcagtgaaagcaatatataacccccaaaatagcataagatgataaaaattacatccaataattcataatgattttacccagtttgtatgcagcaacatatagtcatatgaatagctgtataacagtgccaccaaccaggaaaaaagaacatatccagctgtgttcaaggaagagtaaatgatgagtttctagttaaaactaaaaaaaattgcagctgtatctgcagctgtgacagctcttaaagctatagtcaagaaaagttgttttaaatgagtgtccccaaaaaaaaaaaaa

SEQ ID NO: 52117 - DNA, 565 bp, Homo sapiens
acttctagaattaattaacgcgggtctcctagaatgtctttcattccatactttgacctcttcacttaaaaacctcttctagattaagtgcaaaaattgttattttggtggaaacttctcgagcacactcaaacagaaaacgttgctgcatcttctgtattgtctgagcactttgtttatatttcaatattatttatttgtttatatttgataaacagactaggagttctttgaggatggtagaatattttatttatctttttatttgaggactagcatcatgcctagtacagagtagatgctcattaaatactgctgaatagatcttttgatatgtgggttttatcttttgccaagatatttaatacacaaatagctgaagtaaatcagctactaaaataattatggaaattgaaaaatataagaagtcatgcttccctaatataaaaataataaatttaatttctgccagaacttaataagttaatacccaagccttttcagtactactgtttttagtgatctttttcatacttaatgtatattctagttttggcttgcctct

SEQ ID NO: 52118 - DNA, 578 bp, Homo sapiens
cttctagaattaattaacgcgggatggatatttgaaactgcgtatcaattaaagcatatttccctgtaaggttaagcattcctctcaaggttacacagaagtgagtcagacctagaatacatacctgcttctacctaacttgaaggtttaaagtttttcttttttttttgtactatataccatgctatagtatagaaatgtattattttcaatccgttattattggccccagtaagcatgagtaaccactgttttagtagtgagaaagtcaagacttgacttagaaacttttctgcaacctaggaaggttcattgtgctccaagttttgctgtttcttgtgacagacacaagcccttttgggagggagcattctatagttgccactctcatatttaaatatagatttccagactttctcgtttaagagaaacctatttagcataatcgtccttcaaattaaataaatatagacaccatatttttacgttgtttaaattactattgatagagcacaaattatattccaggtaggaagcagtgaaaaagtaaagcagattgctctgatggtgcttacatt

SEQ ID NO: 52119 - DNA, 639 bp, Homo sapiens
cccccctcgaaagtcttctagaattaattaacgcgggctctcttctgtgtcattagtctatgtgtttggtttcatgccagtaccatcagcatttgcattattagtctctgatccaaatgtctaataattaccaaattttatgaaaattaaagggtaacttcttaaatttatattcaagaggcagttttctatttcaataatttctaatcatatagaagaaacattttagagtttttttaatattagagaatgggttcctttttaaaaaaatcttaattcatcatttacaaatacttagagatataaatatctagagtcattattaactcaagaaaaagactttcagagcctaagaagattaacatctagttcggacacaattaataaaataaagcctaggtatattcatttctaggtgcatattagggtgccaggttctgcattggctacacattcccaaactgtttcatttatttcttgagaggtgaatgcaaataagtcaatggtttttataacatcttattttgctcagctgtcaacaaagatacaaggtctcactatttacttgaatttgagtgatatcagaataacatgtaaacaaaatagaatggcatgctattgtcattgactctgtattct

SEQ ID NO: 52120 - DNA, 616 bp, Homo sapiens
gggccccccctcgaaagtcttctagaattaattaacgcgggtatggccacattctcaaagaacaaataaatactaaaacataatttagtggaatcagcaatcagaaataatattccaaatcagtaagagtataatgaggaaaatggaatgaaatgcttcatcagaaaacattttcctttctgcaaagttgttttcataaagtgaacatccttaggtaatgactaaaagctttagactcagagagacctggagttcaagtctaggctttgaaacttctcagaaaattctggaccaatttctttatccctgtgaatttcagtctcccttttataaaatgtagctaagatcacttaccttagaggaatatcataaggaccaacggagataagccacatatatgcttaaccttcaataagtgtttgctcttattattattattgtaaaaccacaaagtagtatctgaagaaagctaggtgctgaagtaaaactatcgttttgtggttttacattttgaaaaattgtttttaagtaaatccgtaaccttacaaatctttcaatccaaataaattttaagaaattaactactagccgggtgtggtggctcatgcctgtaatt

SEQ ID NO: 52121 - DNA, 596 bp, Homo sapiens
  misc_feature 561: n = A,T,C or G
ccgggccccccctcgaaagtcttctagaattaattaacgcgggcccccagcctgcatccttttttaataataaaaagtttttaaaactgtattaggaaacctgttcttaatcccttggactaattgcataggacaacattcttctggaacaaattcaaaaactttctctgcagtgtaggctcaccctcttgacaaagcctcttggtttgcctttgataaatgacacaatttcaaatcatctttaacctttccaaatataagcttataaagcctctctccaggaaggcgctctgccctggaattttaactggactatatactaagtattatgagtaaagacatttgagggtctttagtgggctttttggacctacattcctttacctggatgacttcacgacactttcttgttaggagtatttggttttaaagctttcatttgatttctacatgagaattatccttttcctagttggtcttgctttgttttatttggaaaataatgctttgcacattatttatatgctcagagactaacgttcaagacagtctaactgaatncacatttcctatgttctagtcacttaaattttacc

SEQ ID NO: 52122 - DNA, 272 bp, Homo sapiens
ccccccttcgaggtacttctagaattaattaacgcggggtggggagggaagataatggcatctctgcagtgtcttctgggcactgtgaagtctgtttatcaccaaagtgatggtggggaagggtgtgctcccagcaatttgtaaaaatgtgatgtgcctcaggataattgaggatacaggaaatgagtagggtggaaataaataagattggccattcgtttatattattgaatctggcgatggtacttggggattttttttttttttttttt

SEQ ID NO: 52123 - DNA, 453 bp, Homo sapiens
attaattacacgcggggtaccccagctaaaaagatggggaggtttgtctgaaaacctattctaggaggcgggggcacaccacaataagaatgtgcaaccctgggactaaatgcaaaaaatgttcccatgggaagcacggcaaacctgtcagcatcaaataaagccctgcttaaatgtgcagaggaaatcaaaaggtcgggtggaaagccccaacagctgaacatgttgaaacaaaaaacctttttaagggtagaggggacccgtgagagaatgcacccaaaatctgaaaccccccacagagagtgtcatcaggaatcccaagggatattgatgcaagaagaggactctgacctaacccacccagggccaaaaaactatactaattcctttgagaggaaagatgaaataagaccacacctgggttatatatgctgaaataactgatattaatct

SEQ ID NO: 52124 - DNA, 488 bp, Homo sapiens
  misc_feature 9: n = A,T,C or G
ccccctcgngggtacttctagaattaattaacgcggggaggggaggagccctcagatatttttatatcatatttgaaaaaatggctgattattatttttaatttatggaatgtatggactttaccacagtttcaaaagtccactttagtacctataagatattttgaaatcagttggccaattcttgccatcaaaaaattgtaactttaaacttgcagaaaaactagttggctctagtcctaaaagagagttcttaattgcagtttctgcatttatttgtctaatagcaaataaatttcacattcatttctgactccctttcaaaagggcaggttaatctcaaaaggaaatatatgagtttatcattttcggctaggatatggtttctatttctaaaatagtggcacagtgttggtgaatgctttgtgagagcaaggaattggtagtagatttttgcagaatgctgcatttaccaaaaaaaaaaaaaa

SEQ ID NO: 52125 - DNA, 557 bp, Homo sapiens
  misc_feature 483: n = A,T,C or G
cccccctcggggtacttctagaattaattaacgcggggttcttttctgtcattttgatagcccctctcttttctaaagctgtctataagaatttcatagtcatttgaatttacagttttttaagttaccaagttttgcatatagtgagaatagtgggcctaagaataacataagaacttttgtggagaagcttaaagtcagtagaaagtaaatgtttctgtatttattatatctcatcaagagatggaaatgcaattttcctagtaagttttcaccaggctagttaggatatctgtggcataggggactttgtgtaagacagtcgcttctgattgaaatttgatatcttctgtgatctaacttctaacctatcttttcaaacctacagtaaaaccctgtgtaaaaccctgtgttctatcacatagaaattttttacttgccagtccatgttccttctttctcttcttttatacaaattaattnttttggtcaaaatccttttatattattctttatgcatgcagtgtctcctttgaacatctttagcacctctgatc

SEQ ID NO: 52126 - DNA, 321 bp, Homo sapiens
cgggccccccctcggaagtcttctagaattaattaacgcggggaatccggtaccccaatcctttagctgttatttgaaaactcaattcaaaaaaaaattaaaacaaaaacagtaccataaagatatttctttatacagattcataatgttataacactcaaatgattattctagaatacattaaaaagaaggttattttccctattattaagggctcctttttaatagagttatttattgtattttcctgaagaaattatgtctgtctgtcttctcttctattcccagttgttttgagtaaagggagcaaaaaaaaaaaaa

SEQ ID NO: 52127 - DNA, 571 bp, Homo sapiens
  misc_feature 35, 518, 530: n = A,T,C or G
tgggtaccgggcccccccctcggggtacttctagnattaattaacgcgggatattgctgttgacacttaaaactgcattactttctgttcttggtatcagagcagaatatttaaaatgaaaactacttttcttacccttttactgaagactcaaaaacagaaggctattactttctgcagtaataatgatcttcaaattctctacataagaatgaattaaaacctttacattaaccacaaggtgtctccaatctgtaattctctagattttccctccccttcatcctcattttttggtgcagagtgaatatatacaatcagattgccacatttggaaacttcaagaagattcattcagatgtaaattgaaagtgtatattttagaagggactttatcaaactgaaatatatataatatactatacataagtaacgttatatatgtcatagttatatctattatataatgatatatatatatcacatgcttatagtatagcacatgtttaataagaatntatcagttattntatgagtatatattttggaagttggcctcttaaaatagtga

SEQ ID NO: 52128 - DNA, 519 bp, Homo sapiens
cccccctcggaagtcttctagaattaattaacgcgggtttctaaaaaataatctacaatgatcgtttgcattatgtttcactgtatattgagtgagaaaacaatgcaacttagtcaactgtatgtgtattttaatgagatatacacatacctaagtttttagtaattttttgcgaaacaaatcactttacgttcattgggccatggggcagaaatggcttttggagtccagaaaaatacatcgatttttgataaacggtagaactgccaggcatcaagaaaaaaaattgcctgtatgaaataggtaaaaactcttcctttttcaagacatctctgaatcataattctcttaatagtagtattcttcctctttagagtttcaccactcttcaaaagagcacaaatttattaatttctagattgtctacatcataatgtatgaagaaatttttgactcctatttccccgattctttctgttatgaaggtacaacttgtagcctacagaagattttccgagc

SEQ ID NO: 52129 - DNA, 489 bp, Homo sapiens
  misc_feature 28: n = A,T,C or G
cgggcccccccctcggaagtcttctagnattaattaacgcggggtcttctgcatggaatctattcctaactatttaaaatcctagtaactcctgaactaggattctgtccactcttgtcaaatattaagggtaagaaccacatcttattcctaagcacctagcagaattaatttatcctttcaaatttttataagaaattaggtgaacacaaacaaaaaaattaaggcaattctttataaaaacccattgaactgtaatagaaagaactaggaatcaaataaccaatactgactttctagaattgtcacaatacagttgtgcttaaattacactattcattttcatttttctaaagtccaattatagatatacatagtttaacagtcaaatagtactacaggcttaaatggaaaatggtgtcctctccctctcctctcttctcacctctcaaatcccactcccaaaaaaaaaaaaaaaagcggccgcca

SEQ ID NO: 52130 - DNA, 418 bp, Homo sapiens
ccgggccccccctcgaaagtcttctagaattaattaacgcgggggagtgagtaaggctggtctcctgagggaagtgtgtgattcttgccggggccagaggccaagacgagccaggagggcacttacccctttggggcatcttgcccttgtcctttctgttttctctactcaggcctctcccctgagctgaggaaaccaagagaattcttgtccttttggataaaggccttttcctaagatcgttttctcctagaaataagcatactttattaagatattttggactggccgtgcacagtggctcatgcctgtaatcccagcactttgggaggccaagtcggcggggatcacgaggtcaggaagttgaaagcagcctggccaacatggtgaaaccccgtctctactaaaaatacaaaaa

SEQ ID NO: 52131 - DNA, 433 bp, Homo sapiens
ccccccttcgaaagtcttctagaattaattaacgcgggtggtcatttaaccaatcgttactaccctcctgcccccagtagctttggatcacctacagtaaaatccaaaatttccatcaggactaaaggctgctcttttattctcctaactcctgtagttatctcattttctataaccctcaccctgttcactcttctgtaagctcataattttattgtctatgaacttttaaagcttgttcctgaccgaggggtatatacttgctatttcctcagtaagtaacatataatatttgttaatattcagcacataaaacaatatttgacctgtttcaactaattaatatatcttattaattgaataaatttgtcaattttctatttatattacatagaaattatttctcagtgatttacccaaaaaaaaaaaaaaa

SEQ ID NO: 52132 - DNA, 599 bp, Homo sapiens
  misc_feature 27, 585: n = A,T,C or G
cgggccccccctcggaagtcttctagnattaattaacgcgggtcacagtggttcttaacataaaatgtttgagaaacatttgctttttccctcctagtttataatttatggtcttcactggcaaaaataataattatatgaatttgggagaatgtcagaatacctgagacgtgaccaatatcatcataagcatctttacatttttttcaaaagtctccttagactttccctaaattctccctagctagatacttctcatttcatcttttgagacatttttctttttaaaaactaataccaagagattaattttagatcctggaaaggtatcttcttttttcttatccagaaaactgaccaagtattattaaaagaaaccaaagcacctaccaagccaatgaagcattagaagaaaccagaccctaaataaccaggcaatggctttgcattaacacatcaactttgaaccagaaaattcagaactcttgaaaatatgtttgttaggtcccccagcatgctaggcttctttcaaacattcagttagttctgccacagacacaatgaacatttaaccaaacaacttanatacacactgtagg

SEQ ID NO: 52133 - DNA, 539 bp, Homo sapiens
  misc_feature 58: n = A,T,C or G
cgggccccccctcgaggtacttctagaattaattaacgcggggtgacagcaaaacccnttatttcacaggggataatagatctttattgctgcgttccccaacatgggaaacgcagcaataaaggttcttgaatatttgtctaagaaaaagtaagctaatgttacttatcaaacagaaatatactatggaaaagcagtgtccagagagatgataaaagtatgtataagagaggccaggtgcagcagctcacacctgtaatcccagcactctgtgaggctgagacagaaagattacttgaggtcaggagttaaagaccagcctgggcaatatagcaagactctatctctaccaaaagaaaaacaaattagccaggcatggcggtatgcacctatagacctagctacccgagaggctaaagcaggaggcatgcttgggcccaagagtttaaggctgcagtgaactaagatcacgccactgcactccagcctgggcaacaagggcaagaccctgtcgctaaaaaaaaaaaaaaaaaaaaaaa

SEQ ID NO: 52134 - DNA, 443 bp, Homo sapiens
acttctagaattaattaacgcgggatggttggcttctcctttgataaaatgtcaaaatattttctcacctgtttgatctatagtttatgttctataaattaatattgatttgatagtaaacctggtttttttgagatatttgagaagaatatgcatattttcttcactaccacaaaatagatctcccagcctcaaaaaggaaatatacaggaaactagttcttattattcttggaaataatgggaataaaaagctcttccagagacaagagtgctgacaccttctggagaggcattctgccgctgctagctgaaacggtgagcaaggggaattgcaatgccttggtattacaggtcccaaacagatgttcaagccactcaccaagcagatgcacagcatggagagctgagcatccatctggcctcccccaaaaaaaataaaaa

SEQ ID NO: 52135 - DNA, 562 bp, Homo sapiens
  misc_feature 28: n = A,T,C or G
cgggcccccccctcggggtacttctagnaattaattaacgcggggactagggaagaatcatctcagtaaaaagataagagatggtagatacaatctgttctaaataaatgttgtgggctttctgagaaccatttgaatttttttaaagttcattttaggtccaattgggagaatagcccttaaaatgtactgataaatattttgagttttttgtttctgcaaaaaagtatgatttttattattcagaaaataccattcttttagctaagatatgtgcataattcaatagggatccagtccaactgtttcatattttggagaagcacattttttaacaattcatattgttttggcacagaaataaattacagtgctgaaaggcccagaataaatatagtgacagcatacctcatgctgaatactcctccatcttcccaacattttgctaaaggggaaaaacacctaagaagtacttctgtagttctttcaaacaatgtactcctactcatcaggcaggattcctttgggaaaaagactgctcataatggaaaaaaaaaaaagc

SEQ ID NO: 52136 - DNA, 625 bp, Homo sapiens
cgggccccccctcgaaagtcttctagaattaattaacgcggggtatttatttccatccttaatagtctatgatttaaggagaaagatgaaataaagtcttcaacaagtaataaatagcaagtctttcctcattaattatcaaggaaataaaaatgttttcctcatgcagcatacttgctccacatgtagcatcaatttgcttttttttttttaacttttggtcaaaaatatatgtcaataatgtctttcatactacatatcttctcataagtaatacagttctcaattttcaattgctacaagaattagagtcttctcaaaattcagaatttttctaagcatcactgtaataattagcattactatcactaattagtttttcctaacaacagttcttgaaatgggtaactattttgtatgccccagagagggctggtaacttggccaaattgtattttgcaatttcactagaagttctgaaattttggttgtcatacatatgtgcaatccataatttattttcatcctctccttctcatttaaactgttaagtttggggttaaagcaaattgtgtaatttacttggccctaaaatgagctggaattgcacaggaccagcttttta

SEQ ID NO: 52137 - DNA, 479 bp, Homo sapiens
cgggcccccccctcgaaggtccttctagaaattaattaacgcggggttgacattaagaccaataccaaatggaagtggcagttatcatgttttctgctaacccttttttttttataaccctgtggaaccctcacacctactttgggaagttagacctattttttctacccttggcaattacagttactggggtgaaaaaaagttaaaaggttgctcagggggataataagctagtaaagggcggacccacatgcacaaattttattctgaaaaccaaatttttgacccccacactgtattgcctcccaaaaaaaaaaaaaaaatggaaaattcgttggggcggtttaatgaatgggaaatatctgcaaatcactcagctgaaattttgtaaacagttaaaaaatacctgtgtgttttgtgaagggagagattcaggcttacccttaatatttgaacctgcaaaacccaaaaaaaaaaaa

SEQ ID NO: 52138 - DNA, 612 bp, Homo sapiens
gggccccccctcggaagtcttctagaattaattaacgcgggccatgtcccattggttcaaataatataataagatagttttctagttccctaaatctgttactccatctagagaatgcccagtttttaaattttgcattattggtgataattttaattagcattagttcagtagattcaagagcacttcaacccttgtctttttcattgtcaaggcctacctaggaggctcatggttagtttcctggatgaagcatctcctcagatggatttgaagcaggggagtaatgtggtcttttccattggaaagcagcatggcataagatggttattttcaaaatatttacttggacataatagagctccttagatagattctaggaagtcattgaaaaaaatgatactaatcaaagacttattcattattcctgtcataatatataaaataaattgggatttcaagcatttttaaggtcagcttttttttctatgatctgtttattaggaaaaaacttaatttcaaaaatttagaagaatgttaaatagaaagtttaaacttttttaaagatttaatttaagagaataagtaatactacacagaaataacattttt

SEQ ID NO: 52139 - DNA, 492 bp, Homo sapiens
  misc_feature 24: n = A,T,C or G
gccccccctcgaggtacttctagnaattaattaacgcgggttagacttaacattcattctcatatgctattttactatatggtcagccaccatcaattcaactttctatctaacaggtttattaatctgccagtttgctggtgttgatagacggttgttatcagtcagctcactataaattcaaaatgatacactgattttaaaacaaccctgaattatcatctgaaggatcattattcttaaatgaaggcataaagactagcaaatccttttgtattgtgttattattaggcctcattttttttaatcccacttgaaaagacagtttttcattgtctcataggtttaccatactatactatgtgttttaagagttatgcgaaaaaaaaattaagaaagacttgaccccagccttgaagctttatagtttggggaggttaggtaatatgaaatgttatttaaacaaataagaccatacagttggtttcaatt

SEQ ID NO: 52140 - DNA, 589 bp, Homo sapiens
cccccctcgggggtacttctagaattaattaacgcgggatatatatgagggatggtgcctgaaaccataagccaaagaaactactaaggaaagaggcaatggaaatgtgacagcaattgcagctgaaatagaggatgccatgaaataaattctgtaatagagatacctacaaaatgttaagtaatcatacatgaaagaaaagagaagattcagtaaaagaaatattgttacactggagaagaaggaaatacgccaaaatgtgaatagtgatcatctccagagagcatctaaagtagtcctttaaaacatgtccaattatatcactcctctgctcaaaaaaaaaaactccggtggtgtcacgtcttactcagaacttagtccttttcaagatagttaaaaattagtcaagaataccattcaacatacaataggaccaccaaacgtttcctactctgttgatgcccccctttcgaagtgcaaccacccacccagagaccctgtcatatgcagattttacaccatataattctactgcttgggaactgaactaactgaacaagagcttgactcttgagccaaaaaaaaaaaa

SEQ ID NO: 52141 - DNA, 261 bp, Homo sapiens
  misc_feature 216, 228: n = A,T,C or G
gccccccctcggggtacttctagaattaattaacgcccgggtcactgaaatcattaggtaataaattttctattttgttctctcttcatttgttaggtatttgttttcgtagtagagaacaatatatgttgtacctcctgattattattgacaatgaagcaggtcatgcccaggcaaatgtctattaatatccttctgtatatccaatatcactgntaaacgaaacanaacaatcaaaaatataaggtggattagccccag

SEQ ID NO: 52142 - DNA, 263 bp, Homo sapiens
cccccctcggaagtcttctagaattaattaacgcgggtggcaagcaagacatcacaaaagcaaggactgacagtacttgatatatccgagaaaacaggaaacaccacatctagcctacccttgttttcccttctattatcaacccacagtgatcttacgatttttcagatattttaaataaacactgatcctaccacatgcaggcactgtaaaacagtagtaacagttgcaatcatagaactgatagtctcatagaataaaaa

SEQ ID NO: 52143 - DNA, 592 bp, Homo sapiens
cccccctcggaagtcttctagaattaattaacgcgggggggaggtggcgcgggggcagaaagggccacctggccttcgaagaggggtccagggtctccagcttcagaggcggggagatggtgatgactggaaaacgtcccttccctccaacagggcggacgcccacaccagcagaaatgggcgcctttaagtcagaaggcgcagtgtgcctgcctgcaggcaccggggtcctcacatcccactcagccagcctgaacttccactgaaggctgagagctgtggggcctcgagggaacacactatgggggcagagcaaaaagggcttggtcctgagctggaaaaccaaggggaacgggggtgggcccaggctgactcatgcccaacagctcagtgcggacttccagggcaccgcatggcctgagcctcagtttccctgtcagtaccatggagagagggtgcaaatgattggacaagagggtcagtgaacagtggctcacgcctataatcccagcgctttgggaggccgaggtgggggatcgcttgagcccaggaggttgaggctgccttgagttgtgattgcgcgactgcactg

SEQ ID NO: 52144 - DNA, 426 bp, Homo sapiens
cggggccccccctcggggtacttctagaattaattaacgcgggtactgcctgaaccctgtaaacatttgagtttttctttcatggtttaatacttgatttaactgaaaatccctttataagaatgtaaactttaggcagggtgcggtggctcacgcctgtaatcctagcactttgggaggccaagatgagtgcatcgcttgagatcaggagttccagacaagcttggccaacgtggtgaaaccccatctctactaaaaatacaaaaattagctgggagtagcggtgcatgcctataaccccagttactcgggaggctgaagcagaggaatcgcttgaccccaggaggtggagaggtggaggttgcagtgagccgagatcgtgccattgcactccagccagactccgtctcaaaaaaaaaaaaaaaa

SEQ ID NO: 52145 - DNA, 493 bp, Homo sapiens
cgggccccccctggagtctttgaataataacgcgggtcccattcttcccagcaaggccttgggcacgcatctggcccctctgagactgggcttccctgtcagttaaatgaggctgataacggctaccctgcaggtttggggttaacattacatataaaacgggggaggattaggtggcaaatcaaagcacaggctttgaccgggcacagtggctcacacctgtaatcccagcaatttgggaggctgaggcaggaggatcattttagcctaggagttccagaccagcctgggcaacacagtaagaccctgtctacaaaaaaagtacaaaaattatccaggcataaaagtgtgtgcctgtagtcccagctactcaggaggctgagaaaggaggatcacttgagcccaggagtttgaggttacagtgagttatgaccatgtcactgcactccagactgggtgaaggagtgagaccctgtctcaaaaaaaaaaaaaa

SEQ ID NO: 52146 - DNA, 619 bp, Homo sapiens
  misc_feature 17: n = A,T,C or G
cgggcccccccctcggnagtcttctagaattaattaacgcgggtcctgtatttgaagcacacagtcttcctactccattttgattaaccctgcataaaccacgataccttctaaagtttcacactgtctatcactagcagaaagtctgttctctcagcttgttcctactcagcacttcttcagacgtttttccttcttttgcattattcatttcttgaatgataggagtttcgagtataagttgaatatcaggtttctccattttctataaattggataaatttgcacccacttacaggtttggtgatattgggaacttctcatttttgtttctatagttcatgtatagttactatttcaaggtttcaaatctgttttttttttaacttgtatttaagttcaggggtataagtgcaggtttgttacataggtaaacttgtgctgaggggctctgttgtacagattatttcatcacccaaatattaagccttgtacccattagttatttttcctgatcctgtccctactcctatcctccaccctcataatataatagatttttttcttactttagaagtttttcttgttcattataggaaatttagaggccaggcatggc

SEQ ID NO: 52147 - DNA, 315 bp, Homo sapiens
  misc_feature 16: n = A,T,C or G
cggggccccccctcgnaggtacttctagaattaattaacgccgggaccctgcagtctagcctgggtgacagagcaagatttgctctcaaaaaaaaaacaaaaaaacaagtctttgtagatttaaaattaatcacataattaaatctgattctgaaaagtaaaacagcctagtgtcaaggctgtcctacaaattaccaaaaagaaaagaaaatgctaacccatacacatactttatgtgcttaaataaccatattacacctagcacccaacctaaaaaagaaatatctgactaaatatctgtgaacagaaaaaaaa

SEQ ID NO: 52148 - DNA, 619 bp, Homo sapiens
  misc_feature 540, 584, 592: n = A,T,C or G
cccccctcgagagtcttctagaattaattaacgcgggacatgattcagttattctaactgcccaaagtccactcgagagtgctgaataagcaaaataaatacatgaaaaaggaactagacagtatgaagaaagcttacagcaaaaaaagtttaacctaagtcaatgatgagtacggaaatgttggaaataacctaataacgactgcttgtgtggtaatcaaagggactgttcctcttagaaacaactcatatcagaaaatgcaaaattaacaaaatttatgcaagagcagtagaaaaacgcaaagctgtgggtgctatgtcgagggaaacataagacaaagcttgactacaaatatgtaaaaacaaaaatctatgggaagaaaaaaacaacagaagaaaacttaagaaaacgttctaagcgtttatgagtaagtggtaaaaggcaagatgatttcaaatttcttcctaactactccaaaacagcaactggcctgaaagaaagaactttctttataaaagtaaaattttaaatttagactntaaaaagagtaatttaatgttactaaaaaaaaactagccaattntgataatntactaatagatggagctataacaaact

SEQ ID NO: 52149 - DNA, 588 bp, Homo sapiens
  misc_feature 23, 513: n = A,T,C or G
ccccccctcgaaatacttctagnattaattaacgcgagtcaggcaaattaacatattcatcacctctttacctagaatatttttatggtgagacatttgaaatttattctcttagttattttgaaatatataatacattattattgactgtgtcaccctgctgtgcataatggatgtactaatttacattcccactaacaatgtacaagagctctgttttcttcatatcctctcctatatttgttaacattaatcattttgatagtggcccttctaacaggtgtgaagttatagcaaattgtgggttcgattttcatttccctaatcgttagtgatgctgagcattttttcatgtacatattgaccattgtatgtctttttttgagaaacatctattcaggtcctttgcccatttatacatgtattcattttttaggacagagatgtggggttttgttttgttttgtcttaattggccagacctagggtcctgttcgtgccctcaaagctaanagcacagtgagtacaaaacaaaatatgtgtacagtggaaaaggacaaacaggtcctctaaagaaaaatttaggct

SEQ ID NO: 52150 - DNA, 372 bp, Homo sapiens
  misc_feature 37: n = A,T,C or G
ctgggtaccgggcccccccctcggaaatacttctagnattaattaacgcgggaaggtagagttgggcaagctacccaataaatcttgatcacagaacttctgggccttactgtgccaaagtttcatagagcaaattaaacccactgaatgaggaatgtattttaattttattaattttcaatggtggactcaaattatttcagaattcataataacttcttgtacaacaattaatttttaagaataatttccagctgagtagcttttaaggcagttttacaaagagtgtctcctcttttacatttgcttctcttttcaaatgtcgtccttttgattatttcactgcaatttagcatctccaaaaaaaaaaaa

SEQ ID NO: 52151 - DNA, 608 bp, Homo sapiens
  misc_feature 590: n = A,T,C or G
ccgggccccccctcgaggtacttctagaattaattaacgcgggcatctacttatatacatcttccacttgctctgcccctggtgtattagaagtaaaatatgtgctgaaattcatcaacataaaaaattacataagttcttatctgatatttacattcttcctgttcaaaaaaaacttcatatgtcaaatttcacccagatagtggttcgcgacactatatagtatgaggacatgagaaacaggcatgaattcaggcttaggcaaaagtaggagcttaagtgaatccttttttaggtggtcttatacaataatttttaattgcttcattcatttcattttcctctcatcaagacgtgaaggagtaagttagagaagattttacactttctacacggcaattagatatgcggatgcctagaacgttaagtgatttgtccaagataataaatatttgaattgcaagtggattctgattttgaatgtatccataaaacactcagtattggtcagagaaagtatgaatgaagaatctcaccggagagtctagtctagaatctcacattgttgtgatgtatgtgcagatcctttntccaggctgaaacacaca

SEQ ID NO: 52152 - DNA, 586 bp, Homo sapiens
  misc_feature 25: n = A,T,C or G
gccccccctcggaaatacttctagnattaattaacgcgggtttctatagttaaatattaatattaaaatgtaatgtggaatagaaattatactatttctgtttttgtcaattatctatatctgaaatttcagccacagggtcagttaacacgtagagacacggttattcattcggtggcagctactagaaataattagtatctatgtctccggacacgcatatttaaaagataattgaaaatgaggagagcagtttgccactgaaaattagcaaaacaaagttgtttgttgagtatatattattttaaaaatctaaagaagtattttttaatcaatgccatgatgcattttcaaataactacaggaaatttaaagaggtcgctactagttataataaactcctaaaagccttcagaagaggagacatacaagaaaaatttgaaaatggacaacagtctttacatttacagaggaagattatgaagttaaaggtgaccaattttctatgtttcaagataagtaaaaggaaattatactaaaattacaggtcaataatagtgaagaaaagggagaacattaatattct

SEQ ID NO: 52153 - DNA, 588 bp, Homo sapiens
  misc_feature 28: n = A,T,C or G
cgggcccccccctcggaagtcttctagnattaattaacgcgggcagagttatagttttatcagttgcatttctgaattttttgtcatgatataaagaaaatcaataatgaagggagataagcaacatgaatcaaattcctgtacagttgatatcaagcatttaaatatgtctttgcttttattagaggattttatatagcttatttaactcaaaacagaaataaaataaaaatagagctcttcactcaaatcatgtgtaagaattaaatagcatctttaaacaataaagtcagaataatagataacattaaagtcgactccacttattgaaaaataaataatttacagcaatatcaacttgcttccactctgttacatgttgtatctgtctaaattagagatatactgtacaattgatcgattcattcaattttttaattttagctcatacttttgatatgaattttatctatgctatcgataggatagatagaaatgtagctacatatatatgtgtgtgcatgtatgtgtatatacacacatatacacagatatatatcaatttttcctggagtatttacttacaaa

SEQ ID NO: 52154 - DNA, 535 bp, Homo sapiens
  misc_feature 28, 41, 57: n = A,T,C or G
agactggggtaccgggcccccccctcgngggtacttctagnattaattaacgcgggnaacccagctagccattgtctacgtggtgtgttaggacctctggaaagttatgcatctttcttagtcaatattatcttactctttagatttaaggagtttggcaaaacacaaagcttcagggcattacattcctcatgaggatccaggtggtgagattcacacaaattgtcccaggggactcactttcctaaataaagaaattatattctccattttctttcagcagtgtcttttggaacattgagcaagtactgtttttaaaaccaaagaatatatagagagccttatttctccagaagacttaaaaattgtccagagcctgagaacaaatgaaaatacaaggagaccaggtgcaacgggtcacatctgtaatcctagcactttgggaggctgaggcagttggatcacttaaggccaggagtttgagactcgcctgggcaacatggtgaaaacctgtctctacaaaaaaaaaaaaaaa

SEQ ID NO: 52155 - DNA, 492 bp, Homo sapiens
ccccccctggtacatacttctagaaattaattaacgcgggtgttaaagtctttaatccattggtattgattttttgcctatggggagaagataagggtccaatttcattctttggttaagggatatccagccaacaccttttattgaagagactgccctttctccattgtgtgttctgggccccttggatggaaatcagttgaccacaaatgcttggattaacttctgaaaccctttttttctttgatataaacattaaaaaccatatttttactccaaatgcttaattaaccgaatctcacaaattgggatttgctttggttttatcaggacaaaaaattttaaaacttttcttgtgattagatccatgggttattttgcaatggggttaaatttcaaaatatttggatttgccaaagtttttttatctggatttttatttaaattctgtggaaataaaaaaatattttcttggctgggtgcgggggctca

SEQ ID NO: 52156 - DNA, 612 bp, Homo sapiens
gggccccccctcggaagtcttctagaattaattaacgcggggattatatttgccatttcaagaaactctcccttcataaacaaccagtgacaaatatgaaaattaagtaagtcaatacgcttccttttttacaatacatttctaaaaatgaatgaaagcagaaatagattttaaatagatttaaatcagactccatttcaagagacaccccccccaatttattataaattccctaatgtcattgtttaatgggtacagagtttctttggggctgacaaaaaagtattggacatggatagtagcgacagttgtacaactctgtaaatgtacttcaagtcactgaattttacagctaaaaatagttagtggtaaatgttatatgtattttacacaattaaaaagaaagggcagagcatatgtggactgtaagtaacctgtgaataccttgacttacaacagaatttgggagaagaaatgatgtgtgtaccacttgaaataaaagtactgtaaaagacaactacaatgttttgtggtaaaccagatccaccaaaataggcgagttctaaattaaacagaaatagaaataatgatagacttgcttaaccaaaaaaa

SEQ ID NO: 52157 - DNA, 587 bp, Homo sapiens
  misc_feature 28: n = A,T,C or G
cgggcccccccctcgaggtacttctagnattaattaacgcgggagagtcatttgttttatttggagggtgacatacagaaatcatgtacatccaatgatcctagaaggggaaatactgtcctaatgtttttacataaatatctattagggcaagaggtttttttgaatggtattacatctccttagacattcattacaataagaaagtagatccttgcttctttggttttttgaatgagcctaatttctagccttcacaatattaaattaactcatgttgagttagcccctccagctctttattttcagttcagagatgacccaaatacctaatggccaatggttctagactatactatattttatcagttctaatatgtcatagattgtaagataattgtaacaagagttaagtgggaatgagttatatatcaacttaatgatatattgcaattgcagtaataacataattgagaggattgtctaattcagtataaaggtaaagaaatatgtgatatttcttttcaagttttcaattcctgacactcatgtagggtactcctaaaatcaacaagtaaacaaaaccc

SEQ ID NO: 52158 - DNA, 425 bp, Homo sapiens
cccccctcggaagtcttctagaattaattaacgcgggatatcttaaaagataagattactagcattctcatggtcaggtgacttgagttgacatcacgaaggaaaattgccattgaaaaagggacgtgacctttcaggaagactaggattttgtccctccgctgccacctacccattctgtgactttaagattccatttctttgtctataaaacaggggtgatactttatatgagtttagaaacagaaagccctaactcacattggtgcaaaccatagagaaatacaggatcacaattcccaggagtctggttgggtgggtgggtgatccagtgttggtttagttggtgctccatgatgtcatttggggcccatctttttttctctcctgttcttgatggagagctgtgctctcagctgctcccc

SEQ ID NO: 52159 - DNA, 561 bp, Homo sapiens
  misc_feature 22, 102, 543: n = A,T,C or G
cccccctcggggtacttctagnattaattaacgcgggcatcttagaatgtgcctgatatttaagaaagctcttttccagcatattagagccacacattggtngaaaaactagtatttcaattatgaaacatagaatatttactcatccgtgaatttaattttatatataaatgtcacttttatagtatttgctaaatgtaactgtcaaaaaatatatagttcagttccaagctcttgcccttcaagaatctacaggagttgtcggcaaataaagaaagacagacggccgggtgcggtgactcacacctgtaatcccagcactttgcaggcctaggcaggcaaatcatgaggtcaggagttcaagaccagcctggacaacatggtgaaacctcatctctactaaaaatacaaaaattagtccggggtgatgacagcatgtgcctgtaaccccatctactcgggaggctgaggaaagagaattgcttgaacccgggaggcagaagttgcagtgagccaagatggtgccactgcactctagcctgngtgacagagtgagactcc

SEQ ID NO: 52160 - DNA, 644 bp, Homo sapiens
  misc_feature 37, 613: n = A,T,C or G
ctggggtaccgggcccccccctcggggtacttctagnaattaattaacgcgggggggtgatagaaataaaacaacaaataaaatctttaagtagagaaatcacggcacagctgttgttccactaatcaaagacataactgaagcagtgaacattcagagaaagtcagctaaatgatcaaaacagttcatggtaatttgagataagaatatgtttgtctaaaaagttgaagaaaaaaaaagtctaacatatttgaatatatgcaatagaaaagaaaaggaaaatgatgatattttcctaaattcctgattatgtcacttagcagataccctctgatacttaaaaaatgctgtgtttatgtataacacatacacacactcacacactcaatttaatcacttaaaagcctttcaaacgtgtaaccatacattgatccaaccatcatctcaccctccctcacacaatatcttcactgcttttttacccaatttaggtcaatgatgactcgtcacaatcagtcttttgccttggttttcaaactttctggcctctttgctctttagcatgtccactgaaaaaaaaatcaattctagttatataaaattctgcatattntgccccagcatctgtccagctgaatgaacac

SEQ ID NO: 52161 - DNA, 603 bp, Homo sapiens
  misc_feature 501: n = A,T,C or G
cgggccccccctcggaagtcttctagaattaattaacgcgggtcctcttgcggcatgcgtcttttcacaagttgtacaggataagaggtacagcccatcagaatatttttgttcaaaacctaaatagctaatcagagcctttaggagataaaaatcagagctcagagtatttccaaggtagaggtaccttctaaacatttcaggatttcagttagaacccctaaagcgctactcccaggaataagtatatgggtcagaaatataaatcctaaaattcagttttgaattaactctatcccagattggatttaaataatctgctactctaattgctttccagaagctaaagaaaattctctggagggagagaaaatcatccatatcctgaaatgaaaaattttcattttcaatgtttaacattcaaaatattcaagtacaccatgagagaagataaaaatagaaaatcagctgggtgcagtggctccctcctgtaaccccagncatttgggaggcccaggcaggtggatcacttgaggctaggagttcaagaccagcctggccaacatggtgaaaccctgtctctaccaaaaaaaaaaaaaaaag

SEQ ID NO: 52162 - DNA, 613 bp, Homo sapiens
  misc_feature 39: n = A,T,C or G
gactggggtaccgggcccccccctcggggtacttctagnattaattaacgcggggactagcaaattagataaagcccatcttgggatatgaaacatacatctatcctactatttatagtctttcacctgactttagtagtaacagaagctaacttactgaattatctttcttttatcccctactgatatagataataaggaaaatgaggggccgggggcggtggcttacacctgtattccaagcactttgggaggccaaggcaggtggatcacctgacatcaggagtttgggaccaggctggccaacatggtgaaaccccatctctactaaaaatacaaaaattagctgggcgtggtggcaggcgcctgtagtcccagctactccagaggctgaggtaggagaatcgcttgaacctgggaggtggaggttgcagtgagctgagatcgccccattgtactccagcctgagcaacgagtgaaactgaaaactaaaaactaaataaataaattaatctttaaaaaaaaaaagggggggccaggcgcagtagctcacgtctgtaatcccagcactttgagaggccaagtcgggtggatcacgaggtcaggagattga

SEQ ID NO: 52163 - DNA, 585 bp, Homo sapiens
cccccctcgagagtcttctagaataattaaacatatttactgaatgtatactttgaggcgttgtactaaaggaagaccagtcagtagacttttatggctgtgacttgggtagcatgatgaagtcaagacagaagatcaggagtgccttcacattgctactggattgttttcttcagaggatttttctaggacctgaaatgtgttttcaatttcttcctttctgtatttcataaagatatccttttgctatagtctggtatttctcccttagcatttgagttgaatcttggttagttcccaattgactgtactatatagtattttccagctgtttgcttattttcctagagatattctctgttcctacatcctttctttgaataatggcctgggaagggatcctaatagtcacctctcttacttttaaactcaatagcttttattattggtagctctcttttctacagtaaaaatcatacaatttagtagttccaaacaagggaaatcccatgcatattgtaagctaatttggaaaagacaaaattgttgatgttaagaagtaatggttattttgaaaataaatga

SEQ ID NO: 52164 - DNA, 581 bp, Homo sapiens
  misc_feature 22: n = A,T,C or G
cccccctcggaagtcttctagnaattaattaacgcggggctttcacatatgctagcctcattttcaatataatctttaaactactttgtaaatggttgttgaatgagtcttttacgtaccatatacattgtagacatttagtagttattagttgaatgtatgagtataggatgcaacttttctgccatttaagctctctcttcctttacttatgttctgttcttcagtcaaattggcttatttggctctttctggacacatcagcaattataggtttctatgtctttgcttatattgctccttctacttgaagatttttataatctctggcataacaattcttactaatccctcaaagataatattgctcataatttttcccattagtgttattactagatctcttcttaaacttcgctaagctctggcttatcttctgcatttactatttttatggttttattacaagtatttgtctagttgtcatacttccccctagactatatgctccatgaaatcaagcttatttattcatctttgtatttctaaagtagctcagcacaatgttttatatacaggct

SEQ ID NO: 52165 - DNA, 602 bp, Homo sapiens
ccgggccccccctcggggtacttctagaattaattaacgcgggcagtatttctcaaaggtaggagtttttaattttgatgaagtgcaatttatcaatttttccctttcattcttagaaaactttgcttaactcagcaccacaaagacattctcttacattttctttcagaagctttttatttttggattttacatttaggtctatagtccgtctctcaaatatatttttatgtatgatgtggggtataagtttggggtttttttttatgaatccccaattattccagcacaatttgttgaaaagatcattttgtcccccattaaattaccttgacacctttgttgaatcatttgttgaccatgtatgtgtggttttatttctggatttttgttccatggatctatatatatatatatatattattttgccaatactgtaaagttatagtgaatcttaaaattgggtagtgtgagccctccaacttggttttgatttttcaaaatagctgtagctatttgggctcctttgcttgtgcatacaaattttagaatcaacttgactgccagacaaaacaaacaaatggaaaccaaaaaaaaaaaaa

SEQ ID NO: 52166 - DNA, 589 bp, Homo sapiens
  misc_feature 27, 568: n = A,T,C or G
cgggcccccccctcgaggtacttctanaattaattaacgcgggcagcatctttcctcaatactgtaagcattccttttgactaatataaatgcaagcacacatgaactatcgtcatcaacactgggggaaaaaagaaaaccactttctatgtggcaacataaatgtttagattatatatatgtagagacacctttaatctatgtgacttattggactaagttattgaaaaaagctataagcattcttatataataaacaggttaggtttaatttagactagagattattttagaagaaaccataaaagatagcaaattgacagagaagcagattatttatccattgattaattagttgtttcacataagaagatattaaagtcggccgggcgcggtggttcacgcctgtaatcccagcactttgggaggccgaggcgggcggatcacgaggtcaggagattgagaccatcctggctaacacggtgaaaccttgtctctactaaaaatacaaaaaattagccgggcgtggtggcgggcgcctgtagtcccagctactcgggaggctgangcaggagaatggtgtgaacct

SEQ ID NO: 52167 - DNA, 583 bp, Homo sapiens
  misc_feature 545: n = A,T,C or G
cgggccccccctcgaaagtcttctagaattaattaacgcgggggagggagaacattagaaaaaatagctaatgcatactgggcttaatacctaagtgatgggttgatctgtgcagcaaaccactatggcacacatttacctatgtaacaaacctgcacatcctgcacatgtaccccaagaacttaaataaaaacaaagaaaagaaaacattgagtgaaagaaaccagatacagaagcccatatattgtatgattctatctatatataatctatatgaaatgtccagaataggcatatccacagagacagaaagtaggttagtggttgcctaggactgggagtttgtgggtggggaaaaaggggagttactgctaatgtgtacggggtatttttcttggcagagggggcttgatgaaaatattctaaaactgattttggtgatggttttacaactgaatattctaaaaacgactgaattgtacactttaaataggtgaattgtatggtatataaattatatctcaatctagttattaaaaataatntttaaagaaccacttatacaatcctttactataaacta

SEQ ID NO: 52168 - DNA, 613 bp, Homo sapiens
  misc_feature 25, 41, 51: n = A,T,C or G
gccccccctcggaaatacttctagnattaattaacgcgggnaaccacacanaagctagtcaacagcaaattgtagccaacaatggtaggctataaagcaatacaaataaatgaaagtgaacacataacaatatggatgaatattacaacatgttattaagtaaataaaggaaaaaacaagatgatatattccatttgtttctatttatataaagtgcagaaagaggaaaaattaagctatcccgtttaggaatgcacacatgggtgacagaactaaataaaaagcaaggacatgagttcttcttactttttcttgtatgttatatttaacaataaaattgtctaaaattaaagttaagagatatggaaattatataagggaattctgacacgtactgaagaaacgttctacaaggaaagaataaaacaaatggaggagaaacaatatttaaagaaacagtagataatatggtagtatgacagatggaagaaagcaaactgagtcctcatactgaaactagtcgctgagagctcaacgggataaaaagtctcactgacagaaaaataatagtaaaaactaaaatcaagaaaagtagaaaatcctataatcttcc

SEQ ID NO: 52169 - DNA, 494 bp, Homo sapiens
ccgggccccccctcgaaagtcttctagaattaattaacgcgggggaggcacttttattctgagccaaaattgaaattagaaacagatgtcttgcattccgatgcggcacgaatgttaaataaatttattaatgactgtaataactaagctatttggctttttactgaacttaagtcttgaaactctgtaagaattatggaaaaacgacttcttgtagttgacattttaactatgaaagcagctttctgactgtaaaagcaaggaccctgatgaaataaccctctagttaatctacaggctgttttaaggtctgttaatattctgaaaggtcacttctgaaacataaaatctctgtaatctattaacataatttgtgctgttcaaacaaatttaagccaatcattgagagaggtaaactctattttagcatctgctgcagaatgtcttttctcaaatatttacacttccaatgttatttctgtacattactgctc

SEQ ID NO: 52170 - DNA, 590 bp, Homo sapiens
taattaacgcggggtaggcaagcacgtatagcaagagatgaaaacagcattttttgctagtaacagaaatcaagtaaaaacgaattgctcaaaaagaacagtcatgtttgctgtcttttttgaaagctgaagtcattattcactttacacggagtgacctctgctggtcagaaagacacatattaatggacatcatatctaccagaaagcagctgttatcttaatttccccaagtaattactcagatatattgtgtgtcataagaggaagttggttattcacttacagtgcaacaatacaggagcatatcctatttcaaatactgaaagtcaagaagcaaatatcaaatggatatcttttacaaacattgagttaattgttatttcttcactaatgtccattgttagttgaaataaaagtagactcaaaaggtcttcttattataagacttattttgaaaggaagtatactctataataaaaaaaattaagattttggtatttttaactatatgatgaccgaaagcttagcatttgtacactattaactgaaataaacaaaacatatttatacaataaacatatgacttg

SEQ ID NO: 52171 - DNA, 557 bp, Homo sapiens
  misc_feature 31, 525, 544: n = A,T,C or G
taccgggcccccccctcggaatacttctagnattaattaacgcgggcatacataaatacataaaaaatgacattgtaaaatatactgcttttatggattatctccctgaaaacattaaaataactgctgttgagcctgaaatgctgaagtgtattgcaataacggtgaaaatggcatcatgaaatagttttataaaataaataacctattctttgaaaaaagtgccctttagagattgtaatgatcaccaagtaaaagcaaaataaatgttgaaataaattgattatatttcagaaatccttcccttccttcaaaaaatgtaacctctctcctagatattgataaatgagatttttgatgaaaaaatgaaactctgggccagaaaatagatttgggaagcatcagtcttttgccctttctcaaaatacagacataactgaagtgtcaaaagtggaactgacagtgatggccgagcatctgacagctcaaacacagcttgctcatcagtctgatgctgccaagcangagatggcacgattccacncatataatatgtc

SEQ ID NO: 52172 - DNA, 441 bp, Homo sapiens
cggggccccccctcggaagtcttctagaattaattaacgcggggtggtcctaaaaagaattatcacatgaagtgacaaaatctaaaatggtattcttttactatccagaatattttccatgaaaaaccactgaggaaacacaaaataattgtgattttagaaatgatatctcaataacttttcttttaagacacctttttccttagctaaggtgtgatgaaatcaaacttctgatgataccaacataatcaattactgtgctaacaattttcctaatcactaaatttttctggtgatattatgaccaactgacatcaaattcccttgcaaagaatataagtcaccactggttgttataaaaagaggaatgaaaatggttggaaatagaaggcaattccttttagtattaatagtgtggacttcagagtcaaaaaaaaaaaa

SEQ ID NO: 52173 - DNA, 588 bp, Homo sapiens
  misc_feature 28, 524: n = A,T,C or G
ccgggccccccctcggaagtcttctagnaattaattaacgcgggcaggttcgttttctgttgccatgtttttggtgggagagatgttttcgggatactttcagggactttgacaaatttcttggggaaaaaaatgaaagtttcattcattctgccaagagaaatcaaatgtcaaagcaaggaagacaagagaggttctagattcatatcagcaatgcagcctgactgaaaaagagaaagaccattctgctcccaactttactgctaaggatgaaagacgttatggattttgaattgcagacatgaataagtgctgtcaaaatccggattcactcaccattctgagaactggtgtccaatgtgtctgacaaaaaatggcagctcctcatgtgagagtcagagagaagagccaaaaagatgtttccagcagcttagaataaaatggtttattattatacacacagtgaaaagagaaacaaaattaggggttataagaggaaaaacagacgaagaagaaaaagacanatggctaatttctgagagtgccttctaatactttcataatttggaattaaaaaagtaatctagg

SEQ ID NO: 52174 - DNA, 622 bp, Homo sapiens
  misc_feature 12, 25: n = A,T,C or G
gccccccctcgngggtacttctagnaattaattaacgcggggcagtcttactgacaatgcttaagttcaagtttatattactcacctccactaacacaataccatattaactggtcttcctgatatcaagcctgtcctcctagcacatgaatacatacctaactaacctgcacgttgtgcacatgtaccctaaaacttaaagtataataaaaaaaagttgaaaaaaaacatatataagtggtaatcatcagtactaaatataaataacaaacaaaatgaattgttgtatagcttttgaatacgatatttgaatgcaaagggcaattgtttaagcataaataaacaaatatgtatcccacaaaaaacacttattttataaattagtcattagagttgtcatttagtttgaattaatatgtttgagagcatcaattcactttagaataatgtgcctatgtaaattaaaaatttagactaaagaataaaaataaattctgacattttctattatagtaccaaggtgttttaaccaaaaaagaaaggttagcaggatcgagacacttataaggcttaatgtagaacattcagaaaagtttccttaaagcaataattacatcagaat

SEQ ID NO: 52175 - DNA, 486 bp, Homo sapiens
  misc_feature 23: n = A,T,C or G
ccccccctcggggtacttctagnattaattaacgcgggttcctgctaataaacactgctgtcctaaataaccatggataaagggttaacaaaagactttcccttactgcatgacaatttgatgtccacctagttatgttgttgagttgcgctgtattcaataagaataaaaatgtcagctatgttattaggcaatgtttctcatcataaccccatgagtggtaatctgcacacacctgattaacattccatggcttggattttccctcagtgcagtgcttcttgtaactggacacatctctctgatgacccaggaagctgtgcctatggaattgttgtctgatactggctcccatgaggcataaaatgtttaaaccaaagcccctatacctacttaatgtgcatcttgtcccctggcatttgtatcatcatctggataaggtgggggtgtcaaagagatagctccctgtgcaaaaaaaaaaaaaaa

SEQ ID NO: 52176 - DNA, 522 bp, Homo sapiens
gccccccctcggggtacttctagaattaattaacgcgggtatgtaagctttaaacttaaaagcatttcaacctatatagaatctaattttattttatcgaatgataatgcagtgccataagtgaataatatgatactctttttttttttaatctaaaaagccatccagctttattgagataaaattggtgaaccaaattggatatatttaaaatgtacaaaatgatgtttttatatatgtacacattgtgaaatgattatcataatcaagctaattaacatatccatcacgtttcatagctaacattgttttgtgtgtggtgggataattagaaatctactctctcagcaatttcaagtgtacaatacaaaactatgaactacagtcatggctggatgtggtggttcatgcctataatcccagcaatctgggaggccagggcgggaggattccttgagccaagaagtttcagaccagcctgggcaacattgccctgtctcttcaaaaggaaaaaaaaaaaaa

SEQ ID NO: 52177 - DNA, 312 bp, Homo sapiens
  misc_feature 28: n = A,T,C or G
cgggcccccccctcgaaagtcttctagnaattaattaacgcgggcatgcaggtgtaactgtaatcatgcttgaaaaatatttacaaaagaaggcaaaatgatccactaatcacattgtgcttggtgtctcttttcacttcctttttatgttacataattacaatctcagaacatttaagttacattgtttcttatggtgtctatttcaatttggatatagcttcatattaaaattatcatcaataaacataaaaatgtccactgaatgcttcacagtgtaatagatcctgtttggaactaaaaaaaaaaaaa

SEQ ID NO: 52178 - DNA, 598 bp, Homo sapiens
  misc_feature 39: n = A,T,C or G
gactggggtaccgggcccccccctcggggtacttctagnattaattaacgcgggtacttctttagataagcttcttaaccattttaagtttagtaggtttaacattctattttatgagacatttgcaaaactcaatatgataattatgcaaaattctaatagagatccttgtttacacctatcctcaacaaaagggtatattatgatatactcatccaaaatgccactgatgctaaaaaattattttttataatctgtgcaagcctcagtatttggatcatgtataataattctgatagcacttatgctgtacatgtaatttatattacatggacttcatgaaacttgactgagcttcaccaaatattgcttccaagggaaaaagaagaagtctcagacaaatattttagagttatcaaaccttcaagaatttcagaccattcatctaaccacaggtcacactgccccacatctttacatatcttcacttttatttcacaagaacactgaaatgacagaatcattggaagagaagttttgctcaaaatcagtaatgagacaccaagaaccactcatttcacagtttttaatgttactc

SEQ ID NO: 52179 - DNA, 381 bp, Homo sapiens
ccccccttcggaagtcttctagaattaattaacgcgggtacctaaataacacacctatgcatgtacccctgaacctaaaataaaagtttaaaaaaaaaaacagtagcaagagtcactaaagaaaacttgtatctatagaggcaaaggtggataaagtcagtttagggcaggagaaacaaaggtctttttttgttgttattttactgttgttgttttaagaccatatagcatgaacaaaaagagaacagtgacattgacaactgagtctcaaatcttgtctctgctgctatccagatgttgatatatgtgagtaatttagtcctataagcctctgtttccctatctctaaaatgaagataactcttcattaagttgttgcag

SEQ ID NO: 52180 - DNA, 507 bp, Homo sapiens
  misc_feature 490, 495: n = A,T,C or G
cgggccccccctcggggtacttctagaattaattaacgcgggcccaaaattacttccacagctcttttgtccaaaccaaaaatccacttaccaatcagactttgctgtgactgctatatatgaaaaagaaaagtatcttttaatctaaaatgcaggccccatctcccagatgtatgtgggtgtgacattgactctttgaggaatagtttaattttaaacaatgtgaacaagatctacaatcaatatatctcatggtaatattaatacagtatagaggcaaacagaaaatttttatttatataatgcctaacatatttacttcaatttcccctcgagttttaagtttttcatctttcacctattttttaaacaatgtgtagagttcattaggataatttagaacatataaaactagaggttcacatataacattaaaacatagttaacaataatttgttgtatatttcaatatagctacaagagaagaatntccanaaaaaaaaaaaa

SEQ ID NO: 52181 - DNA, 365 bp, Homo sapiens
cgggccccccctcgagatctttagaataataacgcggagcaaaggaatgcttttactcactgaataagaaaacagttcattctgtggctattaatatttcctagtttattaattaccaacattcttaaaacttttctttttttttcttctcccaaagatgagaactggtaactgagtctgcacgaatacatgtctaactagaattcgcaactcatgaggatgtgcgctaagatctaaccattttttttttaatcacttcttagtgtatcaagcaggaagttgatttctgtgtcattttgtaccacatttttgatgttctgcggcagggatttttcgatagcagaagatatcttaggataatgata

SEQ ID NO: 52182 - DNA, 280 bp, Homo sapiens
  misc_feature 31: n = A,T,C or G
accgggcccccccctcggaggtacttctagnattaattaacgcgggccctggatagcttggttttatattggaatcataaagaacacagggattgccttttcacctttttctgctctcccccatgggctgcaactcgtgaaatattcaacaggctcaaatcccctcaactgccccacagaagctgagagagaggatcagccttcatcagtgattctgggtagactgccatcctgcctcggtggccactgatgcctttcagcctcccggaaaaaaaaaaaa

SEQ ID NO: 52183 - DNA, 552 bp, Homo sapiens
  misc_feature 28: n = A,T,C or G
cgggcccccccctcggggatcttctagnattaattaacgcgggtcccattccaacagggccatgtggctgcagcccatttagcagcagccacaaatagtctgaaatccggtagtaagaccatggaccatcctttccatcttcacaacactgcatttcctaaagcgtccctctgctgaagctcatactcttggagggcacaggtggaagaaagccagatccaaaatgactctctttctatatttcgtgtgagatgaaggagagatattctgaatccaaaaaaaaaaaaaaaaaaggccgggtgcggtggctcacgcctacaatcctagcactttgggaggccgaggcgggcggatcacgaagtcaggagatcgagaccatcctggctaaaacggtgaaaccctgtctcgactaaaaatacaaaaaaaaaaaaaaaattagccaggcgtggtggcaggcgcctgtagtcccagctactcgggaggctgaggcaggagaatggtgtgaacccgggaggcggagcttgcagtgagccgagattgcgccactgcact

SEQ ID NO: 52184 - DNA, 590 bp, Homo sapiens
ccccccctcggggatcttctagaattaattaacgcggggggtggtggcacttgcctgtagtcccagttactccagagactgaagtgagagtttcccttgaggacagagttttatgcttcagggagctatgaatgccactgcacttcagcctgggcaacaaagtgaaaccatgtctctaaaatgaataaatgaataaatgaatgaatgaatgaatacataaataaaacaaaactttttaaaagctagcgtgagttctgacacataaaaatgtatgttcatttattccgcaacaatttattgaatgtctgttttctgtgatagctattaggcataaattagaatcaaaggaaacattctcctagccctaaaaacgataataatcagcaattactaaaagaataatttgatgaattaatgtttatggcaattaatcaacatcttttgtgatttgattgaacggatgcttggcagaaacttagaagacctagtctttcctcaaggtttcggtaatccactgagtgaccacaaagttaaaaacctgcatttttggttagtaacttagaaatatgttgaactgtttgagatgttgc

SEQ ID NO: 52185 - DNA, 504 bp, Homo sapiens
  misc_feature 27, 40: n = A,T,C or G
gactgggttaccgggcccccccctcgngaatacttctagnattaattaacgcgggcatcttaatattttgcttggatcccatagtgagcatagttgtttgtcaatcagcatccattcaccccttttcaattgtacccatgttccccttctagtatctaccctcctcccttatcctacccttatcccagctccagtggtgagacccgatcaatccgaaccaatcagagtactcctatttcctttgccaaaatgcttcggtcagggatggataggtaactaattagggccaatggaaggtaacagatagtttgagaatttctggaaaagggatttccttgcttttctgtatgcactatagaatgcccactctcggccgggcagggtggctgatgcctgtaatcccagcactttgggaggctgagatgggcggatctcttgaggccaggagttcaagaccagcctggccaacatggtgaaaccctgtctctacaaaaaaaaaaaaaa

SEQ ID NO: 52186 - DNA, 268 bp, Homo sapiens
acttctagaattaattaacgcgggtccccagaacacagctcttaaaaattgattcctttattcttagtttttgcctctccaggagattcctagaataacttatcctattaatagttctgaggtgttctgctgaaagaaaacattttacaatttgtttaactagtatttctccagctttatttatttgaccacagaacacattatttgcctatctttccagtgtatttattaacatatcaaggccagtattctgaggtagctctgtatg

SEQ ID NO: 52187 - DNA, 490 bp, Homo sapiens
cccccctcgaaaatacttctagaattaattaacgcgggcatatatacatatgcatataaagtatatgtacttttaaaatgttaatctatgtgtatgcatgtaatatatatacatatgtatataggcacacacagacatatgcatacatacacatatatagcagggtcctaaaatatatatagctatatatacacatatatagcagggtcctaaaatatatgtagctatgtatacacatatatagcagggtcctaaaaatctgtgaccatgcagttatcatctccaggaaattattatgagcctatttcaattacgatacaaatctcttccctagtaaatacagtgcagcctataaacatagacatttgggaatagagatactttctttcaatgaaataacattacattccttgcaaacttagattattttcaaaagactgaccaaaatgtatttttggaaagaaagagaataagacaaaaaaaaaaaaaa

SEQ ID NO: 52188 - DNA, 515 bp, Homo sapiens
  misc_feature 447, 489: n = A,T,C or G
cgggccccccctcgaaagtcttctagaattaattaacgcgggcaacacaaaagtatacattgactaccagtggcaaattagaagaagttaatgagatgtaaaaagcaacataaaaaaacaggtatactaggactctccaacttctgcttaaacagagaaactaaattctttgtggtgaataacacagacaatgtgttaaagcttaatgaacaaatgcactatcaaagggaaagaaatgtaacaacttatttgtatatgattagaatgcaaacagcagggaaaatgtatctaataagtagagcctttttacttcttaaatgctgaatatcgataaatattttggaaatttggcatatagtaaatccatgcatgctgaaaattattcacaaagaaagttcatgtatgaatgcacatagattaaaagataatttgtttcatctcagactntgtgaaatataatgaaatactgaattacgtactttgtttcanaaacattactatgaattgaatatgta

SEQ ID NO: 52189 - DNA, 385 bp, Homo sapiens
  misc_feature 37: n = A,T,C or G
ctggggtaccggggccccccctcggggtacttctagnattaattaacgcgggccactctgcacacaattaaatcagactgcatcatatccctttaaaatatatcttatatctctgttttctttggttaaaatccagctcccagatgaacagatttttcctatagaggttttatttttttcttcaacactgtattatgagttgaatgtcaggtcagggttatggctgtgaagcaagatataagaatcaagataggctgggcacggtggctcacgcctgtaatcccagcactttgggaggcagaggcaggcggatcacgaggtcgggagatccagaccatcctggctaacactgtgaaaccccgtctctactaaaaaaaaaaaaaaa

SEQ ID NO: 52190 - DNA, 621 bp, Homo sapiens
  misc_feature 598: n = A,T,C or G
ccccccctcgaaagtcttctagaattaattaacgcggggtatggtatagttttagcaacccaaatgttccagaagaccctcaaaggctgtgctagttactggttatgtgaccctgtataagatgcttcccttctgagagacacactaacacctacctaacagggtcacgggtcatcctgtacagagccttgaggggctcctggtgtgttcatggggacacagaaactgatttctctacaaatacctacagtgtgtggttaaaaagacgggggcttggccgggtgcggtggctcacacctataatcccagcactttgggaggctgaggtgggaggatcacaaggtcaggagttcgagaccagcctggccaatatggtgaactactaaaaatacaaaaattagcctggtgtggtggtgggaacctgtactctcagctgctcgggaggctgaggcaggagaatcgcttgaacccaggaggcggaggttgcagtgagtcaagatcatgccactgcactccagtctgagagacaaagtgagattctgtctcaaaaaaaaaaaaaggggggggggtgcggctgggtacagtggctcatgcctgntatcccagcactttgagaggctg

SEQ ID NO: 52191 - DNA, 480 bp, Homo sapiens
cccccctcggaagtcttctagaattaattaacgcgggtccccatgtgattttttaaaattgaggcgaagttcacgtaacataaaattatcttaaagtgaacgactcagtggcattttgaacattcacagtgttgcacaatccactacctctattctagaacttttttttttttttttgagacggggtcttgctctgtcacccaggctggagtgcagtgacacgatcctcagctcactgcaacttctgcctcccaggttcaagctgttcttgtgcctcagcctcccaagtagctgggatcacaggcgtgtgccactacacccagctcatttttgtatttttagtagagacggggttgcttcatgttggccaggctggtctcgaactcctgaccttaagtgatccacctgcctcagcctcccaaaaggtgtgcgccactgcgcccggcctctagaacatttttatcacctcaaaaaaaaaaa

SEQ ID NO: 52192 - DNA, 487 bp, Homo sapiens
cgggccccccctcggaagtcttctagaattaattaatttgacctcaacaccaacagaaaggtttgcaagtagagttctcctaggtgtgtagtatttaaggatgttaattttaatgagcacatttattataaaacgatgttttctttcactgtgattttaaaacaggtgtagtttaaaagctctctttttcaaacttattccctttcaacacaaagcaaagaaaaagttatggctctgaataaatgaggttacacttattttatggaaatcacacactcaggagatcaagtgtcttggaagccaattaatttattactaatattaaggggcatgtacttagaaatgtacttacaacatcaattatgttcaactatctatcataacaaattttactggcaaatgtatggtattccaatggatcatattttatacgctatttttaccaagaataagccatttgacatacacttctgaaaaaaaaaaaaaa

SEQ ID NO: 52193 - DNA, 519 bp, Homo sapiens
  misc_feature 10, 23: n = A,T,C or G
ccccccctcnaaagtcttctagnattaattaacgcgggaccactgacctagatgtgctcaactgaagaaatctaggaaatcaacagagatctattacttctctgacaccttttccttctatttaccttttccttgtttattagttgcttttggagtaaaccaaaataaaaacaagaggtttggggcttgctaaaaagttctcagagatttcaatcacgcatctctgagatttttgtggatcacttagttcaaacatagagataatgcatgcagcattttacacaattgttagccattagatttgtttattggccatctatctcaagtaatcagtagagcacgctgtgtgaaataatgccaaaatgtcaaagaatgtctaaaagaggccaggctcggtggctcacgccagtaatcccagcactttgggaggccgaggcgggcggatcatgaggtcaggagatcgagaccatcctggctaacatggtgaaaccgccctctctactaaaaaaaaaaaaaaaa

SEQ ID NO: 52194 - DNA, 606 bp, Homo sapiens
  misc_feature 588: n = A,T,C or G
cgggccccccctcggaagtcttctagaattaattaacgcggggtcccacacatcttttcccttaaagtgcactacaacatcattatcacagtgctcctatcaatgtttaaaagcccacttttgaaagccgtaatacctttgttcaacgctgatttgtattcggctttgtagaaaaattaacttaagagaaactttactgaaacatgaatactaacccagaacgggctttgtatttgagtgaatgtaactttgcaccacttctgagaagtttagattgctcaattccctagccactccttcaggccctgggtgacactctgaaatggattaagtccattgccacctcctttctcttttctttgtaatgggtaatattactgtgtcttttgtaaaacactctgagtttctgagatgaatgacaataacagcaaagaagaaaggtattgctttgggattaaaatgaaactagacaaatttttactggctttatctctggcaagattgcaatagaatgtttattctcaagtgtcatggaatttaacctgatacaataatctcagaatctaaatagggatcaaggactgtctntatttcgaaactgctgaa

SEQ ID NO: 52195 - DNA, 280 bp, Homo sapiens
  misc_feature 22, 82: n = A,T,C or G
cccccctcggggtacttctagnattaattaacgcgggttgacctttaaacattataccaccttatatgtcaaacttaccttngaaaaccaacaagtaaaccaaataaataaaacaataagaacaacctataataaaaagccttctcagctgggtgcagtggcttacacctgtaatcccagaattttgggatgatgagggaggaggatggtgtgaacccaggagattgagaccaacctaggcaacacagtgaaaccctgtctctacaaaaaaaaaaaaaaa

SEQ ID NO: 52196 - DNA, 536 bp, Homo sapiens
  misc_feature 29: n = A,T,C or G
ccgggcccccccctcggggatcttctagnattaattaacgcggggaggtaagtacaaccttcacatgcattaatttagacacaaataaaagaaaaaatatcttaggagtggaattttagaaagaagtttagttgtggcatcatcttcaaattttctctgcttctcacctacttgctgaaatattttgtattattgaaaaggatattttaatattttatttaaaataagaatatttcaattacataaataattttataatcatcagctttgaacattggaacacattcaattctttttaacaaaacatattcaaagcaactgtaggttgttctaccttttgaaacagcaaaatcgttattgcattattatgtgtgtgaattatgtgtatccttcaatgtgaagtttggtcttatcactggccccaaagttattctaaagtgaattatttcagagagaggacttcaagatagtaaggcacaaaaaaatgacttctttttctgatttctttcctaaattactcaattcttcaccttgag

SEQ ID NO: 52197 - DNA, 597 bp, Homo sapiens
  misc_feature 579, 588: n = A,T,C or G
ccgggccccccctcggaagtcttctagaattaattaacgcgggataggaaagtggttaagttctaggtacatatgttctgttgaatttcatatagttgttaatattagaaagtcttcggttgtgtaggaaatgcttacaaagttttaaaacatgcttaattatgtatgattcagttgtctttagacttttttattgttgatttttttttatttgccttttggccagagaatggtttgaatattagttcattggaatacattgagatttcctttatgacctaatatatggccagtagcccatgtgtacttaaaaggatatataatctttacatgcagggagtctctctctctaatgtctctcttccttctccctcactccacacacacatatagacgtacatatattctacatgtatatgtattttgtatatatatatatattttaactctagcttttttccaaatctttctctgcctactgatttttagtatgtgtgatctatcattttctaatatagattattctcatattaacttctcctattatgattggagattgtgaaattctcctaataattntgtcctttnttactcttt

SEQ ID NO: 52198 - DNA, 518 bp, Homo sapiens
  misc_feature 459, 461, 498: n = A,T,C or G
ccgggccccccctcggggtacttctagaattaattaaattagtttaaataaataattaaggtctttagaactaatctcttgattcttccagtaagtacctatttttacattttcccacttttctattgaaatatttttatttttctaaattatttatagatttgctttcgtatacatagtttacatattttctcatagtaaaaaatatgtagtaaaactattttgctagaagtgaagactttaaatttaagttagccaaattaatcaattttttccaagggtattgattttttagtcttgcttaaaaaggcaaaatggaggcatacattaggtaaatatattgagaatgggaatttgaatcagaaagaaaaggcagcgatcagttggaaatatctgaatacatcttgcctaatgggcatgtcctctctctgacaaaagcctgatcttgcgatagaacananaaccaaacaccgcatattctcactcataggtgggaanttgacaatgagatcacatgg

SEQ ID NO: 52199 - DNA, 616 bp, Homo sapiens
cgggccccccctcggaagtcttctagaattaattaacgcgggcctggatgtagacaatggcaaagcccaaagtagagaaaccgtaaggacccttgaggttttgattctagttattctctacctagaatccaactgtgtcaattcttcccctgctaatatactggtagacactaataaagtctctttgttttattataataagcgatttaagtgatcttcccgcttctgtaatttcccttcaaaatattctcaatactgcaggcagactgatggttttaaaatagaagcacacatcacttgtctgctgaaaaccttccaaggatttttaagctgagtaagatgcgaaaacccaggccttgtttgcttatgaaggccaaaatgatttctgcctaacctcatctcttaatattattttgcctcttcctccctctgctccagacaaattgccttttccttgaactttcctattctgcctcaaagcctttgcactcactgttcccactgaatagaagaagttccccacatatcttgcttgctcaactcttcctactaaaatcatctctggaccatcttgcttctcccttccctacacctacttcctgtatccccaatttat

SEQ ID NO: 52200 - DNA, 546 bp, Homo sapiens
  misc_feature 482, 489, 500, 510: n = A,T,C or G
cgggccccccctcgggagtcttctagaattaattaacgcgggcatgacatcaaagtaacaaaaggaaatcattctgataaggacagaaattatctccctcaacaattaattctagataattcttattccaaatgtctttcttacgcattatagtcagctctcacttccccccgatgattttctttttaccataatcataccaatttgaccaatccctgaggaataatttcattttcaaaaatataacctttcctatactgaatatcttggaagtaatatttgagtaattagaatactcttacttttttaggaactcaaaaagtttctgtttacaacttgaatttaagagagaaatggaaataatgattcgaggaggggagcatatggagccaaaagacacatgttccagtgtagttctctgactacgtagtgaattcccctcttcctctctccaccttaagtctcagtggtacaccgtgcanaatcctnaaagtcaatanatgatctcanagatgcctgcgatttggagcttacatgattactgca

SEQ ID NO: 52201 - DNA, 630 bp, Homo sapiens
  misc_feature 66: n = A,T,C or G
cccccctcgagagtcttctagaattaattaacgcggggggacactgagaggcaagtggggctgggnccatgggcgtgagaaagcccttggaaacaccaggggaaaatagcatgcacgtaagcacctccttcgcgctattaatctttcaagcacaccatttacacagtcaaacattagctgagtaatcacaaactccacatgagtggggtcccaatgtttgaggttttactgtatttcaaatggaccagaaagaacagcctgcctaatgacaaacgctactatagtttgattttctgagccattctgagaaattttcacacactaaatagagaaatggctttcagtcaattatagcttttcaggaaaagagacaacatactatactacctataataaataaaaataactaaaagatatgagcctcaataaaaggagtcatacatcaaccatcatggtaatttcaaaaaggaaacaaatgccagtctttaagtcttcaagataagcactgtacctcaggtaaagatgaagaaaatcaagacaaatgtctaccaggtgcaaaaaccatctggtttattgatttatgttttggcagaagttttaggttcctaaagagaatgaatctctaattac

SEQ ID NO: 52202 - DNA, 173 bp, Homo sapiens
  misc_feature 24: n = A,T,C or G
gccccccctcggggtacttctagnattaattaacgcgggagtacatctttttgaataagtcacatctctttctcttttaaattagcttttgagtaatgaatattaaatagaaagcatttcaggggtaattaaatgaaaacagaatgatgtcattttacaattatatttgtatg

SEQ ID NO: 52203 - DNA, 544 bp, Homo sapiens
  misc_feature 26: n = A,T,C or G
gggccccccctcgaaatacttctagnattaattaatctctgtttttgtaagtagacaagctgacaccgacacatgcagaagtgaacaaggaaaactttctagaaattttctagcacaaaaaaaatgttaagtggttggtgggaagtattagaacttcaataattaaaacatggtataatttaccaatatttaagccattatgatattgaaacatgaacagagtacatgtctatttcatataatacaattaatacatatatttttaaatgtatatattcataaatagacaatttatataagacaaagaaagcatttaaaatcagtgagtttataaaatgacttcctagtaaaagatattgagataactggaaggtaatttagattcagaatttttctttctacattataagataaatgtcaaatagttaagaacttacttgtaaaacattaaaccataaagtataaaaagtattgcaacatttttacaataatgaaatatgtaatatctgtttcaatgtagaagctgttaaaaacatcacaagca

SEQ ID NO: 52204 - DNA, 563 bp, Homo sapiens
  misc_feature 11, 23, 36: n = A,T,C or G
tgggtaccggngccccccctcgngggtacttctagnattaattaacgcggggcaggagaaatatttgaagacaataatcactaagaatttccccaaaataaaacaaggaccacaaactacagacattatagtcagagtcaaaatgctgaaaatcaaagataaacagagaaaaaaaatttttgagacagggcctcactctgtcacaaataaataaataaataaacaaacatgtcagcttggtcttactgctcttgtcacctacagatgcaccagcatcaccactctgtccccagcaaacatcacgctcaatccagcacacgccccctcatctttcaggacattcctgcaccttagctcccctgcagagcagtggaaatgatttttctgccttctcagggtagtcttccctcactctactgtctgcttctccaaaacctcaccagttctcagtgtgcactggagaacccagaagagggtacccagcagagagtaggaaggaaatcaagttgcagatgctgggccaggcgcggtggctcacacccgttatcacagcaccttgggag

SEQ ID NO: 52205 - DNA, 607 bp, Homo sapiens
cgggccccccctcggaagtcttctagaattaattaacgcgggtctcaccatgtcttcttcctacaagtctgccattctttagtgggtgaatactgatcagatctgttaatttttccaggtctgcttatgcagagctctgcaaatggttgggaactctttaccaagtctgttaaagatgatgccggcagagtgtttgataacatgcttgccttttgttctctttttattactattctctttgtgcttataaaataaatgtaaattacctactgaaattatagaaatctaaggctttttaaaaaagcaatattcagggcaaaaagaaatatttggagatgctattagaaaaaagagaacaataaggtgtaattaaaaggttagcaaaaaatataactgcataaaattgtcactttttgaaagatagtgtttttaggtgacaatgttgcaaggtaacaaacttttgggatgaatgtgagatgccttaggtataaattgaacaggaaaataaaagagggtatttaataaatataacagcatagtgtttgcttataaataatgtaaataatgtaacataggtaaaaataaacagtagagcgttgacacccca

SEQ ID NO: 52206 - DNA, 640 bp, Homo sapiens
  misc_feature 581, 632: n = A,T,C or G
ccccccctcggggtacttctagaattaattaacgcggggatatattaaaaaataacataacctcacatctttccattcacactccttgaaagtaacttgcaagctttcctacctgttctccctagaacaatgtctccttgtattcaagaagacttgctacacttgacctcctatatagactattacttgagccaatctgagcaaacaaatttggactgcatacctttattttgccatccatagcatcttgtttttatacctctatcaacacatattagttaatatattatcatttgtttacccatttctcccttggaatattattctataccaacccaaacagccacagttgtcacacaccaatgaatacactgatcattttatacttatctttaactaatttatcattagaaacattaagttggcatcttcattttagaacattaagaacaatgtcttctgaacactttcaagcctctctcattttctacaacatactgtggcaatacatattttctttctcctttcagattgaagtgagtcagccttatagtcagaaagtctttgaagctagtcttcanactctgggaatgtgcacacagccttctccttacttgggaaattcagtgcanatgacatg

SEQ ID NO: 52207 - DNA, 597 bp, Homo sapiens
cgggccccccctcgaaagtcttctagaattaattaacgcgggcaatgtggttgtggaacctttccttatctgaagttcacacagtacacagctatgaaacctggaaccactgtctgcattggtgaaatgaggtcagactgacccctgaggttatcaaaacatagatctgaaaagtcactgggaatattcttttgttttacaagtaattctaagtaatttaatcaaacaggcctgaaccatctggctcttttacaacatggtactagttttaatagctatccatgtttcttttcttccccaagtgagaaatgagtcatcaacacagtaaaatctgaaggtgattttataaccgtttgcaagtccacatgacatatatcttttacaaacaagaagtcatagttgtttaaaatgaagacaaccctaaagcaacacttacattattaaactaatcaagtaattttacattttaagaaactgcattacttaactattttagagtttccaaattcatcagcataaggcttttctctgtgttgcttgccaaactacacagaaggaaaaaaaaaaaccaaacttgtgttttcacggaaaacagtc

SEQ ID NO: 52208 - DNA, 431 bp, Homo sapiens
taattaacgcgggtcatcattttatgtagttctacagctttaaataccaactatatgttgactcccaaatgtagacctttaactctaacctcttattttaagccgagacttacctacccacttgtacttgaatttccatttgcatgtctaacaggcatcttggtattaatatgacataaaatggaattttctatttctttcaactactgaatttctcatctcaaccaatggtaccatcctctgtccaagccaaaacttgagtcatctgtgattactctattttccttgcccacttcatccaatctagcaagtcttgttggttccatcttcaaattatatcttaaattctgtcaatttttctttatctccatggctactacacaagttgaaaccactgtcatctctcctagtctactgcaaaaaaaaaaaaa

SEQ ID NO: 52209 - DNA, 426 bp, Homo sapiens
  misc_feature 37, 372: n = A,T,C or G
ctggggtaccgggcccccccctcggggtacttctagnattaattaacgcgggggaaaggagagcctggcaggccaagacgcaaaaagcggtggaaagctgaagtcgttgtagcatgtcgccttttagagtgtgattcttctaacttcagagtctgtttagggactctccacagacatttatctacttctgctgtcttttttatgaacttaggaaatctgatcacttgaggtgagaatgcttggtaaaattctgacccatctctcttccttcctcaaaatctgagagataccactgtaaccctctgctcacatctcctttttactttcctttgcctctgtcccataaacgtttatccttactgactttcattntatgtgttgatagggtttttcagaactctcaaggagaagcacttatcatagtgc

SEQ ID NO: 52210 - DNA, 622 bp, Homo sapiens
  misc_feature 34: n = A,T,C or G
ggtaccgggcccccccctcggaggtacttctagnattaattaacgcgggactcatttgcatttaaatgtatttattatatatttctaggagaataagataggcttaataatattagttaatgtggctgtaatgcaattacattacatataatatttttattaaaaatttttatcttcaaagagtttttcttagaatttctgtacttagaagtattttcttttgtatgctaagaaaatgtcactgattctatttgttcaactttatgatttgctattaaaatataagtgccataattaaaatatactcactatttgaattacaaatattgcatgatgcagtggttataaaacagaatttaaggtcactttctctatattcaaattgtctcctctacttactacttgcctactataagataatctttgtaaacatcatttttctaaaatacaaagtagtaataaaaatacctgttagaatatacttgtatgaataaatgatattataaatataagacatatggaagatgttttattgctctgatgtctacatataaaagttgaagtaagatgaatgtctgtatttcttgtttttcctttttttaaaatttcagaatgaagttac

SEQ ID NO: 52211 - DNA, 610 bp, Homo sapiens
  misc_feature 40: n = A,T,C or G
gactgggttaccgggcccccccctcggaaatacttctagnattaattaacgcgggcagccaattaattttctactcacatgcaaagacagttccatggttttccacaaacatgcaaagataatgcagtgagaaaaggacagcctttgcaacaaatggttctgtaacaatccaatattcatatattcagaatataaactttgaaccatatctcacaccatatgtaaaaattaactcaaagtggatcatatatctgaatataaaacctaaaactatagaagccctagaagaaaacataggagaaactgtgaccttggtttaggcaaagagcaatccacatttttaaaaattataatttagacttcatcaaaattaggaacttctgttcttcaagagatactcttaggagaatgaaaggccaagtgacagtctgggaaatgttattttcaaatcacaaatctgataaagggcctgaatccagaatagtaaaagatctctcaaaactcaataagaagaaagcactcccaaaaatggagaaaagattttgaaaagatactgaaatgaacaacaacaaaaaaactaacatgaacagacacttaaaatatatggatg

SEQ ID NO: 52212 - DNA, 367 bp, Homo sapiens
  misc_feature 24: n = A,T,C or G
gccctccctcggaagtcttctagnattaattaacgcgggagtttaatttatataaaaattagatcataatatattgatctaaacatgatgttttcactgaacaacaaaactatgactgtctatccaaattactagaattaaatagctatgtaatagttcaacagtgtatatttacaataatgtacttaaccagtcagctgaatacacaattaggttgttttcaggttgaggagtatgtgttattgttgaggggtttttgctggtaaaaacaatgcttcaacaaaaattttgcatttatgagcatctaatcaacaaatatttatggaacaccttgtatatatcagatactcaagaaaaatcagtggac

SEQ ID NO: 52213 - DNA, 611 bp, Homo sapiens
  misc_feature 25, 38: n = A,T,C or G
ctggggtaccgggcccccccctcgngggtacttctagnattaattaacgcgggcaccagtgaaaagattgttgtgtgatggcatgaaatttgaaatggtttgcacataacaataataattagaacaatatgtacattcaatgagttttaaaattaaaattaaatgttaactcattcctatattataaaaaagttataagcctactgttataaactccaaatcatgggaagactttttttctgaaagtagaaataaaatgttattgataaatatataattcaaggccaaggcacgctttgaaatgaagaaacttatatggagtagttagtattttatagttagaaggctgtgatctagaaacagaaaagacaagacaatccaacaactccccaaggaaaaaagacatcaaaatattaaaaaatttacataaaatagaaatttataaaatgttttataataaatgaaagatctctttcatctaactatgagcaaagtgcaaaaactaaattgttatgaattccaatattattttcatttctatctttaagcagcaatatttaaataatccttggaggtagagcctaataaagcagatttagcatttgtgtgtg

SEQ ID NO: 52214 - DNA, 641 bp, Homo sapiens
  misc_feature 15: n = A,T,C or G
cgggccccccctcgngaagtcttctagaattaattaacgcgggattgccaaagacataaaggttgtatacctaatgtgttgtgattcattgtatatttaatctatttgtaacagtccttggtgcacagtaaaaactcaaaaaatattattttaatttttattattgatacaatgctgaacaattgaaaatacaagattttaaaaaaggaaaattttattcaagtcatatacttgtaaaaaggtagataactgaggtctaacactaaatctattttagtttcttaattattcaatttagtggggtagatgaccaaaatgaagcaaatagtgaccatgtagtaactattttcaggaatgtttatacacagcttatttctttatagcaacggtgaaccaatttaaattagcatcacctctacctagcactacagaaaattgactgatacaagagtgttggaggtgtcaaagcatagattgcatgataacacacagcaggcaaacctagtctttcgcctgaatatgatatgcttatccaagttgtagtggtgattgcacaaatctattacttacaataatttccttgcatttaatctattcaatatttaacgtataaaaattgtatagatggattatattgagta

SEQ ID NO: 52215 - DNA, 450 bp, Homo sapiens
  misc_feature 27: n = A,T,C or G
cgggccccccctcggaagtcttctagnattaattaacgcggggataactaacagacttgtgaaagagttcagtggaatgtggtctgtaaaagctatatattctgttgaggggaaatatgctctgtcatacatgctttattaaccctcagttgtttaatgtttaaagttctatggctttgaatattctcttagaaatattttcagttacaggtagagtgtttgaatgtagtaatttaattcactttatgtgtttatgtgacatgtctcattttcagaattcataaaattgaatggtattaaacagctactattaaagagacaccaaagccatttgctgttgaattagacagtggctttcctttctttgatttttatgggattgaataattagaaaaattttgacaatatttgcaattactatttattaggaattttcaaaaaaaaaaaaaa

SEQ ID NO: 52216 - DNA, 596 bp, Homo sapiens
  misc_feature 15: n = A,T,C or G
cgggccccccctcgnaaatacttctagaattaattaacgcggggtaatcccataggatgatgttaactctcatggtgttcaacatttaaattagaggattctatccttggcaaacaacacaaatacattctggtaagctatcatttatgacaagtcgaacttgcttatttatgttgtacaggtctctctatataaaatcaataacattttcatcttctattatattctatatcctagttattgagatttgtactagatatgtatagatacctattgcacctcaagtcttgcttttggaaacatgtaccttgcagctcagaagacacttaataaatatttattgaatataaataccaaatgccagaccagtcacttgcaggtctaataatacataagatttagaaatcatcaggtctaacttgctgctgttttaaatgtctgtctctacacaaagtttaaagcactaggaagacagaggaaaaattgatatttatatattttactctattcctactctgaataatttatttgacaagacagttaaatatagtttccaacctaagtaagtgaaataactgcattatgctttgggtatg

SEQ ID NO: 52217 - DNA, 642 bp, Homo sapiens
ccgggccccccctcgaggtacttctagaattaattaacgcggggacagagcgagactccgtctcaaaaaaaaaaaaaaagacactgtctcaaaataaataaataaataaaaaattagaaagtgtgttgataaatttaatgaattgctgaatagttttaaaaataagtttaaagtttttcatcttggaaagactaaactatatttctatgtattagtaacaaaatatacagtatgtaaagtggacttgtatttgtgatagaagaataacttgaaaaatttatagataaccgtatttatttttaaaaacatgtacgaaaatcaccaaaagaacagaaatactacctgtagcttataatgtacagatagggaaaaaggaactatagtaattttttaaatcattttcactgataataggaaagaatgaagcaaacaaaaacaatgataagataaaatgatatgatataaaaaaatccaactacattagtaactcagtatatataaactgatgaaactcagcctatttaaagagagtaattatatttgatttttaaaaattcactttaggcctggcgcaatggctcatgcctgtaattccagcactttgggaggctgaagtgggtggatcacaaggtcaggagtttg

SEQ ID NO: 52218 - DNA, 541 bp, Homo sapiens
cccccctcgaaagtcttctagaattaattaacgcgggtatccatacagtaccttcatctatcaaatatttctgtctttataaacctacaaattacatacatacaggtctgggcttctgggtgaattagaagcaggggcaggtttcctcataaaacctaactttgtcaccaatttcatgtaatttactactaaactgtgcttcttttgctttttatctctcttcttatgtgctcttaaaagctacttgctggccgggagcagttgctcatgcctgtaatcccagcactttgggaggccgaggcgggtggatcacgaggtcattagatggagaccatcctggccaacatggtgaaaccccgtctctacgaaaaacacaaaaattagctgggcatggtggcatgtgcctgtagtcctagctactagggaggccgaggcaggagaattgcttgaaccagggagtcggtggttgcagtgagccgagatcgcgccattgcactccagcctggtgacagggcgagactccctctcaaaaaaaaaaaaa

SEQ ID NO: 52219 - DNA, 598 bp, Homo sapiens
  misc_feature 17, 530, 567: n = A,T,C or G
ccgggccccccctcganggtacttctagaattaattaacgcgggtcatttactaatcatatcaattttcttggagcgatgtaccaatttagcagtcaggcctagttatatctaatcctacaactgaacttaactaactttatctggactttctccctgcataaattttgtttgaagagggaaatattaaagcagatcaatgtcaaatagagcatctgcataggtatattttcttataggccattaggctgtaacatattaaactaatagctattgtttcctaaacagtttataatcttttgtattatttcctatagctttttattggggcataatataattgatttatagcataatcaaaattagatgttttgtaatattttcattaccttctcaataatgttattctgtttaaatctgagttttaattattaagaaataattatcagccaggcacagtggctcttgcctttaatctcagtccttagaaaagctgagatgggaggatcgcttatcgcttaaggacaggantttcacacccgcctgggtaacattatactgtctctancaaaaaaaatacatattgtattatctggatg

SEQ ID NO: 52220 - DNA, 618 bp, Homo sapiens
cccccctcgagagtacttctagaattaattaacgcggggttccttcaacgttaagagaaatacaatgattgggctcaattgctcactggcataaaaagaagggagaaaaaagaatgttcaaataactctgttgttatcaaaggctgcacatgagcctgaacaataacataattgcctttgttcattagggagaaaccaggtggagacggtttaatgtcttaattaggaaaatatttcacacgagcataatttaagttttaaattttacccactcttcccaatttgtcatttaacttgaaaatgggagtgtgttcttgtcatcttacattccaaaggcttcttcgaaacaaacctcttcaaaggaagatctttaagacccttttcaactgctcttctaattctcctttctcagtgcccctaataacttctttgatggcttggatgaaatctctttttacttattgattttagttaccccatcactcactctattgctattgctggattctgtgtgagagaccattgatcatttccttaacttcacaaaagctttgctttgctcaagtgggagtttctgtgcttgttgatgtatgtttatccattaggaatgaaatcatg

SEQ ID NO: 52221 - DNA, 607 bp, Homo sapiens
  misc_feature 16, 29: n = A,T,C or G
ccgggccccccctcgngggtacttctagnattaattaacgcgggaccatttcagaaacaagtgaaatcaaataaactagatccccacgtaatgaggcgaatcccaataatctcattacatccaaatcatgttatgaaaattcagtctaagagacacttgctagagtaaaaatcccttcaagatacgtacggaggtgatttttctacaacccctaaatttgtcaagaagaaacaaagcaaaatatatataccttaggtagtctgtgccttatcttaaaacatgttcactggagctccctgggcaatatttttaaaatctaggtgattcgagtgctgcactatatcggaaagagaagtttaacatttaatgtgagtgctagcaaataaaatattttaaagtttttatcagtattttcaatagtgctatgctagctatttaatttcatcttaacagaatgaaatcatcttctagatatgatctccatttttattggaactgcttactatccatccctaaagttctcttctaagaggaaaaggtcatgttgtttgaaggacaaaaaagttcatattcacaaacagaaaagactattttaatattgaacaat

SEQ ID NO: 52222 - DNA, 633 bp, Homo sapiens
  misc_feature 436: n = A,T,C or G
cgggccccccctcgaaagtcttctagaattaattaacgcgggtcctgccatgtgaagtaggaatagataagaaataatatttatctaacaatactttaaccaataaatttatttaaattaaattgttagaatgtagtatgggggcctgaaaatgatttcttgaatctttgagttgttcacatgaatctatactactcagtggctactactgaatttttttgaaattcagagaagaaaaaattcttgataattcagaaatattaataaagacaatttgtactaaaagtatatatcatgcagtgttctgtttactctgcatatagttattttcttaataaaaatataaatattaatatagacattttagaaaatataggctagccaaaaataaaaatttatgcaatattttgactagagttaaacactgttaactttntataatacgtatttgtggttatatatgtatattgtaatctatacatgcagagttattttattgctaaaatcaattgctttatttaatgtatgatgatataactatttcacattaactccatatgggaaacagtatctgcttcacatgttctattattcagtaggctgattaactttatgtcctgaccaggtaaaaag

SEQ ID NO: 52223 - DNA, 594 bp, Homo sapiens
  misc_feature 567: n = A,T,C or G
cgggcccccccctcgaaagtcttctagaattaattaacgcgggtaagcactttaagtcgttcttcaaagtgattgattaagaactatatgataagaactatataatttaggttcacagaaagagggtaaaaacgttttatacaaattacgtaaattgaaaatgttattaaagttctctctgttgtcttagtttaaaaccttgatttcacaaatcttctcagttgtttctataatgctgggtgaagtgagccagcatgaagcttcatctgactgaaagtactacctgtagtctggcaagccttggggaccagtgcttgtagtgtgtgacctgctgcccaaaagctcaggaggtcatcctgcccctgccacccttcccatcaaatgtcaaagagtagctgtgcaaagatgggttcccagcaccagaattcccattctatggcataagtgagcatatgtgaggtgcagatacatggcatatgtgagttgtgaagtgcagacaggtttccttgtcctccttccatgttctaccctaccctcttccagaaatcacaggctagagaatgagtntcagaaaggagaaattctaaattgtct

SEQ ID NO: 52224 - DNA, 367 bp, Homo sapiens
  misc_feature 28: n = A,T,C or G
cgggcccccccctcgaaagtcttctagnaattaattaacgcgggcaagctaatgagattctgctttaggatttcttcctaagtgtatctgaaaggcctagtaagctgctgctccagctgcagaagataagggcattcgccagtgagatttgtgtgggactccttccttagggagaaggctgtctgggcaggtcaggactgaatacagtggtcagaagacctgtgggggccaggcgcggtggctcacgcctgtaatcccagcactttgggaggccgaggtagtcggatcacctgaagtcacaggtttgagaccagcctggccaacgtagcaaaaccccatttctactaaaaaaaaaaaaaaaaaagcg

SEQ ID NO: 52225 - DNA, 584 bp, Homo sapiens
  misc_feature 26, 42: n = A,T,C or G
gggccccccctcgaaagtcttctagnattaattaacgcgggnaacctcatttcccaaatgagtgaaatacctcaaaaatggccaaggagatatagctaatacaaggttgaagtcagtctagatcacgtttcttatcatttagattttcatgaacgtatgagggatagagtataaaataaattggcggggcgtggtggctcacacctgtaatcccagcactttgggaggccaaggcaggcagatcacctgaggtcaggagttcaagaccagcctgaccaacatggagaaaccctgtctctactaaaaatacaacgttagccaggcatggtggcgcatgcctgtaattccaactactcaggaggctgaggcaggagaatcagttgaatccgggaggcggaggttgccgtgagccaagatcacaccactgcactccagcctggtcaacaagagcaaaactctgtctcaaaaaaaaaaaagtataagataaatagatttttacatgtagcttgaggaatccaccattactttatatcaaaatccattattgtttatgacagctaattgctagataatgctataaaact

SEQ ID NO: 52226 - DNA, 394 bp, Homo sapiens
ggccccccctcgaaatacttctagaattaattaacgcgggaatgtgcacatgtaccctaaaacttaaagtataattaaaaaaataaaaaaaataaaaaataaaaataaaaataaaaagttttattggaaaaaaaaaaaatctgacactaattataagctgagtgatgctgctaaatctttccttccaaaacaatgttccatacacaaacatttgaaaataaaatcaggaagaaataatcatccacaattattttttgcaagcactttttaaatgaataactatcattaactatcataattaatatgtaaaaagttatgctcttcattaataatttcttaaatttggggtaacaatcaaaatatacaatgataaataacccaaaaaaaaaaaaaa

SEQ ID NO: 52227 - DNA, 605 bp, Homo sapiens
  misc_feature 10, 527, 577: n = A,T,C or G
gggccccccnctcggggtacttctagaattaattaacgcgggtgatatataaactttgatgaaatttaattatcatcttttttatagactttggagttgcatcttagaaatcttcacataatccagtgcagcaatagtattcttctcatctgtgttttcttctaaaagtgttaaactactaggttttatgtgatctattttattcagaatttttgcaaatttgttgtattgatacttgattttcctggcaccatgcatttacattattatcctttatttaccatattgccatcttatctttgtcaaaaatcatgtctctggccgggcacagtggctcacacctataatcccagcactttaggaggccgaggcaggtggatcacgaggtcaggaaatcgagaccatcctggctaacacggtgaaaccccgtctctactaaaaatacaaaaacttagcctggcgtggtggttggcgcctgtagtcccagctactcgagaggctgagctaggagaatggcgtgaacctgngaggcggagcttgcagtgagccgagatcgcgccactgcactccagcctgngcgatagagccagactccgtctcaaaaa

SEQ ID NO: 52228 - DNA, 540 bp, Homo sapiens
cgggccccccctcggaagtcttctagaattaattaacgcgggggttgtaaaaatacatatgccaagagtttttcttgtaatactttccctatcatgacagtatttatttttggcccacaaaatttactgtaatttagtagtgttgatattttcagtctgtaattctagtcacaaaggcagtacttagcaaagtaacgtcttgttctctatcaattgtggggcgggggtggaaatgcaacccgatgttgtaagaccccgaagtccagaagatacagtatttcaggtgcattcactctaagtatgcggttatttcttccatttggggcacctttctcctgttcctcccatttctataaacaacgccattttattaacgtcacattttatttggggtcagctgctccttatttagctatagctcattgtcctcaccatcaatttacatttcaaaataccttacgtgtgactctctccgccatctgcatttcaccacctttgtcttctgcttccctgaagatggcggccaaaaaaaaaaaaaaa

SEQ ID NO: 52229 - DNA, 484 bp, Homo sapiens
  misc_feature 28: n = A,T,C or G
cgggcccccccctcgaaagtcttctagnaattaattaacgcgggaacaccaaagctttttgtcattttttactcgctgtttctttatagacactgactaaaccctagcttaacacttggcatgatgtgcactgcccttggatacattcttggtggatgataataaatggatcaggagaaattaaataattttattggcattctctcagaaggaaatagaaactttatggaagaacacagtcaaaaatttatcttggatatgccaggaaaggtttgcagtttgaaattgttgcagagtgcatctggaaaatgcttcaaaatactagcaaccctgagagtttccagaataaaaatgtctaatgtgatgggataggtgaatcctaatatgatttattttacaataataatgtagacaagtggcctttgtattcaacaaatcccattacaaaacacacaaaggaaagtaatcaacattagaatgtgtg

SEQ ID NO: 52230 - DNA, 493 bp, Homo sapiens
  misc_feature 9: n = A,T,C or G
acttctagnattaattaacgcgggtgatggctgaagtacctacactgtagcagcgaactcatctcccaccactgacttctaagctttgctttcagttatgttataaaaatgctagagaatgttatagcttccaatgtgtaataggagacaatgatcccttctcttttctcatatatctcccttctaagattttctgtgagccaggaatagtggctcatacctgtaatcccagcactttgagaggccaaggccagtggatcacgaggtcgggcattcgagaccagcctggccaacatagtgaaaccctgtctatacaaaaaatacaaaaaattagccaagcatggtagtgggcgcctgtaatcccagctacttaggaggctgaggcgggagaatcacttgaacctgggaggcggaggttgtagtgagccgagattgcgccactgcactccagctcaggtgacagttcgggactccgtctcaaaaaaaaaaaaaa

SEQ ID NO: 52231 - DNA, 577 bp, Homo sapiens
  misc_feature 461: n = A,T,C or G
cccccctcggaagtcttctagaattaattaacgcgggtccaccccatatccaatcagttaaggcctgacattgtaggctcagatgaataaaagcatggaaacacatgggatcccaaagatcccagcaagatctttggactggaatgtttttcttaaatgacgattctgagcatggctgttaatagatgacagatgaattgatcattaattgatcaaaacctcaagcctaacatcaaactgggagactcaagaagttagaaaatatcttaaatcctataaaatgtttcagatagattgctttcaagcatctcactgtttaaacaaaggtcagaccatacagaaaatcctaatttgcctaaaaagttatagttaaaaaggcttaggccagccaggagcagtggctcccacctgtaatgccagcactttgggaggccgaggccaggagttcgagaccagcctgnccaacgtggcaaaaccccatctctactgaaaatacaaaaaattagccaggggtggtgggggggtgcctgtagtcccagctgctttggaggctgaggcacaagagtcgcttgaaccc

SEQ ID NO: 52232 - DNA, 571 bp, Homo sapiens
ccgggccccccctcgaaagtcttctagaattaattaacgcgggaatatgctctgtttaattcagtcatgctaagatgttagattccccttcattctctcagctttctctctccttcacctgggggcatctgctgatgagtctcttctagaggttgtttaatgactattttacaggaactgtcagctttctaaagcccagtggcattgggcgtcactgtattatcagcctttttacacaatttgcctgactgtaaatcagaggtttaaaagtacaagaaaatctcctatttgatttaatgactggttgatgggggttgattaatctttctatgctcggatgttttactcataaaggtcatctattgtttgtttatactcacttttctgattttagaaacacaagaaataagaagaccattttgagaagaacagagagtagccttaagaaaatccctgtcgcaagcactctgggatttggactcaaatgctaattatacagtaagtgaaatgaacacagccttcacattaacctaatgtaaagctgcaaaaccatgatacctgctcaatttgg

SEQ ID NO: 52233 - DNA, 601 bp, Homo sapiens
  misc_feature 584: n = A,T,C or G
cccccctcggaagtcttctagaattaattaacgcgggtccccattgctgttgttctccacacctgtacatccagcaataccagcctgagttgaaaagggccttggaagagagcatctcaatccagggtgcccagaggtttgtcatgagaagtgtcctccaggcagaagtgtttctttctgaccaattccagatcatacccattggatgagcagaagcctgagtccagacgtgttctgggtgaggagcaccctgcagacctctcctgtcccctcaccggcctgccccatggttttcttctggctttcatgagaagaaacattggagctattgctctaacgttcaattttgtgtgaaattaaagagtatcacttctgggcaggcgtggtggctcacgcctgtaatcctagcactttgggaggccgagttgggtggatcaccagactggttcaagaccagtctggccaacatggcgaaaccccgtctctactaaaaacacaaaaattagccaggcatggtggtgggcgtctgtagtcccagctactcaagaggctgaggcaggagaatcacttgaacctgggaggcngaggttgcagtgagctg

SEQ ID NO: 52234 - DNA, 506 bp, Homo sapiens
  misc_feature 40: n = A,T,C or G
agactggggtaccgggcccccccctcggggtacttctagnattaattaacgcggggggtggagctagaatggaagccagggagggactaaagggagaacaggcctcagccagctaagcagaggtgagggagcagagaggaagctaaaactccattcacctgcagagaaaactgctactcttatttaaactttgtgccttaaaaatctatataaataaaataatataataacccttatcatataaaataaaatacttatatataatgtgtactataaaatagtatctgcataattcaaaattttgaagcatatatgtgtacgtattaaaatctcataaatgtacaacacaaagagtgaaccgtaacgtaaatcgtgaaggccaggtgtggtggctcatgcctataatcctagcacttcaggaggctgaggctgaggattgcttgaggccaggatttcaagaccagcctggacaacacagtgagatcccaccttaaaaaaaaaaaaaa

SEQ ID NO: 52235 - DNA, 600 bp, Homo sapiens
  misc_feature 592: n = A,T,C or G
gggcccccccttcgaaatacttctagaattaattaacgcggggtacctggggctacaggtgtgtgccaccacacttggctaattttgtattttttttgtagaacagggtctccctatattgcccatactggtcttgacctcctgggctcaagcatcctcctgcctcagcctcccaaaatgctgggattacaagtgtgagccacccaccataccggcctaggccatttagagaagaggcgtagcatcctatttgacttaccattgcctgtactcctttgaagtataataggttccatgtagaaaaatctgctgtataaagacttgataattaaaagggagttattgcgaaatattaataaaaggggagggaagttgttgcaggactctaaggattgagtagtcagtacgtgaaatgtggctgttgagtaatgagattgactgttcaatgttatggcccaatgagaatgtttgcccacgtaaatgatttatttaagaagtcatataaatggaggaaacatggctgggcgtggtggctcacccctgtaatcctagcgctttgggaggctgaggtggacagatcacctgaggtcangagtttga

SEQ ID NO: 52236 - DNA, 430 bp, Homo sapiens
tgggtaccggccccccccctcgtacatacttctaaaaattaattaacgcgggcaatgagttctattgagtcctcctggcaaatcatcccaacctaaaagtcgttttgcccagccacaggggctcaagcctgtacccccaccattttgggaggcccaggcaggcataatcatttgacctaaggattttgaaaccaccctgccaatatggggaaactgtctctaaaaaatataaaaaacctacccaggcgagggggtttgcccccataaatccaccacctaaggtggctgacttagaaggactgcctaaacctgggagggaggaggtcagggcacagtgagctgagatcatgccactgcactctcccctgggtaaaaagggaggccctgtctaaaaaaaaaaaaaaagcggccgccaccgggggggacctcc

SEQ ID NO: 52237 - DNA, 581 bp, Homo sapiens
attaattaacgcgggcagttgtttgaggctataattgctgagctcaactgctgactggagccattcaatactgagaggagcagctgcagagagcttaagcagagaaccctggagagccgcagctggagcttccccagattaagaagctgccaggggaagcagcagttatgagtgtcatcgcatggaaagttcaaagttatccattcagttccaccatctctgcagctggcaataactattgaaacacagtcttagatatatgaagaaatggtgaaatattgataagattgacaaaatatgtttgagatttttaaagacaactttcctcaaactcgaacctaggctttcttggctaatgtggtattatgtttgcttgttgtttgtttattgaggaacaattttaccctaacaatagctgttacattggccaaaacaaggagacttgattttaaattaaaggattcactaaccaaaaaatcaacgagagtatatgcaaaatttggtactttttgatacttctcccctggaaagagtaactgtagtttttatcctgttctcaaagttcctgatgctaaaaaaaa

SEQ ID NO: 52238 - DNA, 368 bp, Homo sapiens
  misc_feature 15: n = A,T,C or G
cgggccccccctcgngggtacttctagaattaattaacgcgggcagggtcattaataaaacctatttttatatttagactttatattacaaaggctgaatttaaataccatatcaagtttttgcaaactgaaaaaaaaattagttcattggaagcaattttttggtgatgtgagtaataagaaaactggcaagtttgataagcatgtttaaaaaacaaacattttctaaaaggaattttagtgtcttaaaaaataacgcaacagttgacaagggaaaacacaaagaataaacatttgcacagaaacccaacaacttttcagtttccccaagaccaacaccacttcctttaagtgcaaaaaaaaaaaaa

SEQ ID NO: 52239 - DNA, 489 bp, Homo sapiens
  misc_feature 37: n = A,T,C or G
ctggggtaccgggcccccccctcggggatcttctagnaattaattaacgcgggaaagcaaacagaccatttagagtaatacaaaagataaaacacctatgaataaacataactagaaatatgcaagacctctatgctgaaagctagaattttattttaaattgaaaaagataaaataacacttggagaaagataagttttatggattggaacagtaggtataaaggtgtcaattcactctaaattaaaaatataaattcaacataatgtcaattatgtctcaaaagttgctttttttttttttaagaatttggcaagctgaatctgtatgtatgtagaattgcaaaacgcaatggatgcattacccacatctatccaagcactcatatgcagattatacgagaactcttacattccaataaacaacaacaacagaaaacactaaaagatgcataggcaaaattgttgaatagaaatttccaaaaaagga

SEQ ID NO: 52240 - DNA, 621 bp, Homo sapiens
  misc_feature 535, 543: n = A,T,C or G
acttctagaattaattaacgcgggacctctttctcctgctcctctttttgtattataaaaaatatactcaaaaacacacataaacttttatgtctggcacaaatacattataaaaattaaagcaataaatatttattgaatcataattgtatttccaaaagtatttataatactgaatatctagtaaataataaataaatatctcataattgtaatatagttaattatgataagcccactctgtggtgttttaagtatttattaaatattacgtttccagaaagttcttaataatttgggagaaactatactgttaagtgaaaagaacattttatagtatttttacaaggtatgattggaactatgaaaaatgttagtattaaatgaaaaacaactagaaagaaataagccaaaatgtgcctctaagtaatgaaattatgattgtcgcttttcttatttttttattttcaattatacaactaatatgtaaaaatatatataattaggaaaaaaagtaagtgaaaatatacctctntaagagtntatagtgccttctctttgattgcactgtgcatttggaccatgctgacttgcatctcaaccctaaaccttctaacctgt

SEQ ID NO: 52241 - DNA, 599 bp, Homo sapiens
  misc_feature 564: n = A,T,C or G
ccgggccccccctcggaagtcttctagaattaattaacgcggggtctcactctgtcacccagcctggaatgcagtagcctgattacagctcactgcagcttcaaactcctgagcttaagcaatcctcctgcctcagcttccaaattagctgagactataggcctgtgccaccatgctcagctttttttttttcttggtacagatggggtctcactgcattgcccaggctggtctcgaactcctgggctcaagtgatcctctcacctcagcctcccaaagtgctgggattacagatgtgagccactgagcccatcctaaagctccattagattttgtgtgagagttcaaaaatcaggaaagcctgtgtttctggtgacacacttcactcatttcataagtttgtggcaggtagtagtaagtcagaaggtcagtgcaggtattatgatggtgtgggaataaagcattaaccagcctgggaccttagcagccctgctagcaggtaaaccctgaactgaatgcaaatcagcaaacaataatgagtcagaccttccagagcaaaccatntgcatttcattctatatctatgtatagagtggcac

SEQ ID NO: 52242 - DNA, 592 bp, Homo sapiens
ccgggccccccctcggaagtcttctagaattaattaacgccgggaaccctcacaacaatcttttcaaatagctgttgttctctctaatccatggatgaaaaaaactaaggtctacaaaggcttagtaccttagtaagaaagagtggagtcaaaaacagacagcaaagcagttacagtcgccacggcagggcctgtagtggttgctcaaggatctactgctagtgagatagagcctgaatttcaatctaaggttatctaaacccaaaggtagggaaaaatattatatttatctttgtgcaaatacagaaactgaatacactatccaaagtaagtgacctaaacttgcaactgtgttggaacagagactggaggctagaaaagtgtgctttcaactacaatatacttaaagtgtgactaaaagccactctaacctgttttattctgttcgggatggcatttcctgatcatttgcttttgcagtatcatatgataaacatggtctgtctgagcacgcagtttagaaagaaaaattttatttcattcaaatgttcctaaagagagtaaattttttaaaaacatcattgtgtttaca

SEQ ID NO: 52243 - DNA, 387 bp, Homo sapiens
ccgggccccccctcgaaagtcttctagaattaattaacgcggggcatgtcataaaatataatagaaatatggtgattctaaaataccgacattaggcatgttttctgaaatttaggtgaacagtgttctattgaatttttcaaaaagttaactatgaaccatatgtgcttaaaatgtgtacacacagtgtaaaaataatgacagctttgcattttcaatttctcaaattgttttatctttaaaactcatgtcagcaattcagccaatatgaagtaagatttctcctagcggaactggcaggatcaaacccaaccagatagctacatcatccttgcgatttcaaagtgccattttcctttgtaaagatcctcaaaaaaaaaaaaaaaa

SEQ ID NO: 52244 - DNA, 556 bp, Homo sapiens
attaattaacgcgggctaataatttagttgcaatggctattttaactaaatcttatgaatattttcagactcaaatttagcccttatcacccatcttcatcaattattaacatgttgccattctccattcttccttcttccttcttctttcatccatcaccccctgccatttcctttttttttttggacagagaagtattttaagcaaattcaatatgacatattactttacctgtgtatatttccatatgtaacttttatagatgtgaactctaaaaagacacaagcacaatattattatcacaaacaacaaaattaccaactttcctgaataattgcttaatagcatctaatactcaactcaggatttcgttcttctgattgtctttctggagtttttaaatatttttcttaacaattaagatctaaaatggaacccagtctgtcttcttcgtgagcacccccatcctcttgctcatcattaggcagggctgtctagcttgggcccacacacagccgccccacctagactgattgttctgaatgatactgcttt

SEQ ID NO: 52245 - DNA, 562 bp, Homo sapiens
ccgggccttccctcgagagtcttctagaattaattaacgcgggctatcatttaataaagcatcattattatttcatgaaacaaagggcatttaaaaaccatcattagtttttaaaacccataatatcaaattggaggacaattatttaaattgtatcctttctatttttatgaaaaatgtggaaagttgttctcattttcttactttgccacggaccagtgagaacatcttggatgtgaaccctgtattcacagggttactgatgaacagtataactgtgagcattctaaccattattatgcatatacataaaataaatgatacatctattcaaaatgtacactgttttgaatcttagagacaagttgtacttggtaaaacatttgaaaaaacaataaaaataaagcaaaactaagtcctcaatgcaataggaatctgatagaaagtaaaatcatctttaaaagaaaaattttattaaaagctgaatattggccaggtgcagtggctcacacctgtaatcccagcactttgggaggctgaggtgggcagatcacctgaggtc

SEQ ID NO: 52246 - DNA, 449 bp, Homo sapiens
cgggccccccctcgaaagtcttctagaattaattaacgcgggggaaggaagctggggaaagacttttatgttttaccctgtatgattctatatggtgtttttataataaaaacatatccttgtattgcttatgtttaaaaatgaaatgtgcaccagatgcggtggctcacggctataatcccagcactttgggaggccaaggctggcagactgcctgagatcaggagcttgagagcagcctggtcaacatgatgaaaccccacctctactaaaatagaaaaaattagctgggcgtggtggcacatgcctgtagtcccaactacctggggaggctgaggcccaagaattgcttgaacctgggaggtggaggttgcagggagctgagacggcgccactgcaccccagcctgggcagcagactaagactctgtctcaaaaaaaaaaaaaaaa

SEQ ID NO: 52247 - DNA, 598 bp, Homo sapiens
  misc_feature 36, 550: n = A,T,C or G
tgggtaccgggcccccccctcggaaatacttctagnattaattaacgcgggccaccaatgatatacaagtgttaccttttttccatatccttgatcaacacttgttatcattcttctctttttataacagccattctaacaggtgtaaggtgtcatctcactgcgattgtaatatgcatttccccaatgattagtgatgttgagcatttttcacaaacccgttagctatttgtacatcttcttttgagaaatgtttaagtgttttgcccattttaatcagattatttgttttcttttatgatacatttaagctaatttttgtgtatggtgtgaggtggggccaaatttcattatttttcatgtgtatatccagttattctagcaccaggttgtgaaagactattctttttccattgaattctcttggtacccttgtcaaaaatcagttgaccataaatgcaaaggtttacttttgaactttcaattctatttcattgatctatatgtctattcacattctagtaccacattgtcttaataattgtagctntgtagtagtttttgaaattggaaagttaactcctccaatgttgttctt

SEQ ID NO: 52248 - DNA, 539 bp, Homo sapiens
cgggccccccctcggaagtcttctagaattaattaaggccaagctacatatggtttttatgatcagaaatctgctttggttgagattcattctaatcctctgcatgccagagagacagctaaacaggacccaatgtggacattttaatcaagtagtaaaggaagtaatgaatacacaaataggtacaaagaacactatgttttgtcatttatctatatgaattttaagcaagttaacttgcttttgtattgtctgtaacaatagatatactcctaattttcaaaagagttttgctaaataaaagggataaatattaggaaactattcagacaaatgcctgaaacagagtaagctacacatcattttcaattttggctttgttttgaaatagacaatctttattgacagacagacatataataaatgcacatttcttaaccgtattttgacaaaaatgtagatcatttactgaaaaaataacaatgtaggattaaacatatacttttcaggatagtgtctttgaataagggagctaaagc

SEQ ID NO: 52249 - DNA, 615 bp, Homo sapiens
  misc_feature 18, 31: n = A,T,C or G
accgggcccccccctcgngggtacttctagnattaattaaccgggtcttgctataaagaggttatgatcatttagataaataaggtggtgactaagaagtacagaagtggatagatttgcagggtgtttaggaggtaaaatctatgggatttgttgattgtgtattctgtaacaaagcaggaagtgttaagaatgcctcctacgtatctggattgctcaaaagaatgagcagtaattgctatctcagagatggggacattttgggaagaaatacaaattttattttggacatatttagtttgaggaatctaagaggaaatggaacaaaaacagttgcatttaaaagttgtaatgaaagccatagtaactgacctaagactatttatttggtcatcattttcaagttattttgggggcatatttgtaaccacaaatgtaaagaggaaaagctgaggcctcagcttgattctccttgccctccacagccttgcagctaaacattatacattgagagcaaaatcttagatgaaactccatcacataaaatagttattaatccctattttgtaagatcaaacaggtttacatattgacaaatacatgggaacaaacaca

SEQ ID NO: 52250 - DNA, 615 bp, Homo sapiens
cgggccccccctcggaagtcttctagaattaattaacgcgggaggaatatcagctttttgccaagtttcccaatgtcctagaggaacatgctcactgttaccaagttatccacagggtaaataaaatgtgtgagggccaaatagaaaagggaaatggaagcaaacctttactgaagaagttagccaagaatttgttttcattaggtaccattatttctgatatttaccaaaactacttggtataaataaatacgctcactctaagcacactctgtgtaaattattgtatggataatttaagtaacaattttttgaaaagagaaagaaaacgtctgcttctcctgtcagtcagagtccactttagattgatataactttccaaataattactgctttggggtaactagagcagcataaaattgtcttagttctttactatcactttttatcttgctcttatttttaaaatagactcagcaattttgtgcttgattttccttggtaggacctattattaattacatttttattatttcactagaagtcacctccactttaatcattaagcctgtgattaacaaaatttaatcaccagagtgtaatgtttggagttaa

SEQ ID NO: 52251 - DNA, 596 bp, Homo sapiens
  misc_feature 473, 511, 519: n = A,T,C or G
ccgggccccccctcggaagtcttctagaattaattaacgcgggccagtaaacccacatgaggctgacaaacagtaagtcatcactctaaatcatcaagaagtgggatggttgttacacaactgaaacaagtcctaagcaaatgcttgttgtttagaaatcaacaggaaaaagataaccatataaattgtgtttttattttcagcttccctttttactttcatggctacccccaggtattatagcatctttttcaatatatttttcctatttacatatattttctccagtgacactttaattttttctaaaagggtctactatactacactttttaaactaatgtcaattaccaaagactttcactgtctctttcttcttttaagattttaaaatttgaaacgttatattctttaaagcagcacaaactaacaagccaacaacttgagaaaatatattatgtatattttaattnttataatataatcattatattacatgatgacaaagtanatcaattnttctcacccttgtcttcatattcctcttctgtctatctaatcacaaagaccatcaaatatcaattcagtgtttaatg

SEQ ID NO: 52252 - DNA, 604 bp, Homo sapiens
  misc_feature 25, 575: n = A,T,C or G
ggccccccctcggggtacttctagnattaattaacgcggggaagccgcgtctctgctaaaaatataaaaaattagcaacctggtggcgcgtgtccgtggtcccagctgctcgggaggctgaggcaggagaatgacgtgaactcgggaggcggagcttgcagtgagccgagatcgtgccactgcactccagcctgggtgacagagcgagactccatctcaaaaacacaaaacaaaacaaaaaaacaaatgcaaaaacagagagcattcatgagatgtaattgcatttagtatgtattatagaactcaacactaaatggcttaccattgtctggatttttttaagcacttaagtttttagaaacctgacagtactgtataatagtttaagagcttaaatattatatttcaatattacaaaaaataaaaagttctagagaactgaaaaagtctatcactgataggtttagttatagatattacttctaatattacaagaataggtttattctcagatctccagcagtcagaataaatgagactaagtgctctgaggatatagacaatgtcagtaagtntataaaatatggccggcacggtggctcac

SEQ ID NO: 52253 - DNA, 520 bp, Homo sapiens
  misc_feature 33: n = A,T,C or G
gtaccgggcccccccctcggaaatacttctagnattaattaacgcgggtctccagatggctctgtccaataagagcagaatgtggctctcatgctcggcgctaggcttggccagaaacacagatgatgaataccttattgatcaataacaacataataagtgacctcctttaaaatcatcctcacatgatttttatgtattcctatcctaatacctgaacatatttctagcattatttcccttgggagcaaatgtaatcattaaaggctcaaacaacttttcccagtaaatattgattcttggagtcacttgacaggtttatctgatatttaatttgccatcaaactactgccattgatcaaatccagggaaatggttgacctttcaccctcatctgttattatcaaaccaaatcatcaaactattattcggtctcaaaaccagctgccttttaaaaacaaaaatctaattagtcttttttggtatttggctattgaaaagaaaaccaaaaaaaaaaaaa

SEQ ID NO: 52254 - DNA, 361 bp, Homo sapiens
  misc_feature 26: n = A,T,C or G
gggccccccctcggggtacttctagnattaattaacgcggggctttaagtttttatatctttatgctgacttactggaacacatagatgatactggaacaatgcatttaaagaaaattttatcgtccaactattaaaaatgatgatgaagctttttatctcttgtggaaaaatgcctacaatataatgttaaatgacaaaaacggattattaaagagtacatagaaatgtaatctcatgcctgaaatcccagcattttgggaggccgaggtgggtagatcacttgagcccaggagttcaagaccagcatgggtaacatgacaaaaccccgtctctacaaaacataccaaaaaaaaaaaaaa

SEQ ID NO: 52255 - DNA, 621 bp, Homo sapiens
  misc_feature 40: n = A,T,C or G
gactggggtaccgggcccccccctcggaggtacttctagnattaattaacgcggggatcttggttttatgagcaggtacatgcattctcaaaactcaactggttgaaatcttaagacttgtgtatcttactatacatataactaaattaagaaaaatagaagtatgaacagtactcaggtatataaaaattgtaggtggtactcaaatgcctttaattgggtggggggatctagaatatataaattatgaagtgcatagaatatcacacaaagaccatctatcacatcctgacccctaccttcctggccagccttatcgcctaaagtctctgtttaaagatatgttaaactattaacaaatcaaattttccctgaaaatgccatgttaattcatgccttagtactctaatgcaatatattagtccattaaatatgacctctctctaacacttagggaattcctactttatctttgaatactcgtgacaaatatctcccagctctatagacttctctgcccttcccaaattcccatataaaggaaaagaaactaacatttattgaggactaaatacgtttagccatttttactcactaccttgttctattaccagaattaga

SEQ ID NO: 52256 - DNA, 485 bp, Homo sapiens
cgggccccccctcggggtacttctagaattaattaacgcggatcaccttaaagcttttgctcagttgttttctgcaagtgtgtatggtttattccataaagaagttaaagccacccctgaaattgttctctagccccaaattactataagtttgaagagtagggaagaagaggtaagagtggtggtagccatatattaattgagcacctatcacatgccaggatccttctgttatttctgttaatctccccacagccctattagctgtgtgttattattattattccatttcatagacagggaaactgaaaacagagagacaaagcagttgttcaaggtcaccaaaatagtatgtggaaaacacactcactagctccaaagggtggtactgttgataacctaatgtaattactatttttacataaaatttaatgggagggaaaaaaaacaggtagaaagtacagataagcaaaaaaaaaaaaaaa

SEQ ID NO: 52257 - DNA, 552 bp, Homo sapiens
  misc_feature 500: n = A,T,C or G
ccccctcggaagtcttctagaattaattaacgcggggtccttccaaatggtcttactatcacctttgtttttctcaaagaagctttaaagtatatttaatctgttatattttgtcactcatccaaatatataatatacctctctttttgttcaagtatttttgtctcttggtaaagttttcaccttttcttcttatactcatttctagatatttatgtattttgttgtgattgtgaatagatacacatttaaaaaataatttctacttcctttctgttgtattgagaaattattaatttctttatatttatcttacatcaacctattttactacagcaaaggtatatagtattatactttatactataagtattatagcatatttttccctggaattttaagaatacattgacattgcctgcaaacctcccatatgtctgctcccaaataaactatattcaaataaacttattagtcaattaattacaagagctaaactntctcagtgatattctctcgtgaatggcaaattcacaccagtgatatcttgct

SEQ ID NO: 52258 - DNA, 522 bp, Homo sapiens
ccccccctcgaaagtcttctagaattaattaacgcgggcttgcccagctaaaaggtaggacatttctgtcataaatcattgagttgatgaggcttattgcccacagcagtgtcatatgattggtcttgcttgcttgtgttcttcataaggttcctcttagccgatggaaaaaaagttaggagggaaaatgagaattgacagaatttaaatacacaccaaaaaccaataattaaaattggattacataattcttttgtcctaggcgagagatgaattagacagggaccacatgtttatgaaaatctgcaggacaggtcttgttacttcctctccccctgagtaagataagatggcttggatttcaatgaacttatctggaactagattacttgctataggttacttacttaatcaatgcaagtgtcagtttccacatcaataaatctgaataatgatgcatagctttaaggatgactatgagaaagaaattagctatgcaaatctaattgccctaatcaatga

SEQ ID NO: 52259 - DNA, 612 bp, Homo sapiens
cccccctcggaagtcttctagaattaattaacgcgggagaacactttctttattgaattataactgatataccaaaaaactacacatttaatgtgtacagttttttaacaactgtgatttaacattgaatcatctgaataggctctttccatgtgttaaatctttcacaccaaaacttactaattccaaaagaagatcagtttgaagaagattgtgtctgaacactcccaaacatcaagattatctaactaagactactaaggtaagttttctaatagtaccgatgcttcttaaagatagttaatttaagtagtcagtaatcattatttttcaacacctcaaacatagtatatagagtctttcatcctcatcccaatgtttcaaaagatagtaaatataattaacctatttgacagttgaaaattttgagtttcttagaaattcagcaatttgtaggacccagctctctgacaccgggtaccatgcttctgccatgataatcagactagccataaagattaaatatataactaacctgcacattgtgcacatgtaccctaaaacttaaagtataataataaaaaataataataataacaataagcacatgac

SEQ ID NO: 52260 - DNA, 593 bp, Homo sapiens
  misc_feature 21, 516, 551: n = A,T,C or G
ccccctcggaagtcttctagnattaattaacgcgggctaccgtacgttcctgcttggcaacttctattccttctttcaaatccagttcaaatgccacctccttggaaaggcctggacatcttacacaggctaagttacttccagaactctttttccctccctcttattaaaataccatataggtttcattgttgactgtgaactccttgaggatagaaattgagtttactcatttatgtatttgccctggtattcaatccagaggagggtctcaataaatatttgtttctactcctgaaagaattccactagatgagctcagaaatccctcccagatctaaatttctatggttcaatccttctcaaacccaatggtataaagtatagctcctaataaaattactataaatacaagttgcatttttaacaggatcaactgcagataagtgttatatactttgttagattctgatttccggagtctgcaagatacaacctgtttatcatctgccgaanagccttcatagtgagaaagggacgaaagcatattntctgtgactgagtgtagtgttggttgctaaacctgacagcat

SEQ ID NO: 52261 - DNA, 594 bp, Homo sapiens
  misc_feature 28: n = A,T,C or G
cgggcccccccctcggggtacttctagnaattaattaacgcgggccttgtcaatgatctttctaaaaaagaattctaatcatttccttgccctccttaaaaacactacagtgacttcttattgctaaggctaagattaaagctcaactttcagctttaaatttgtctgtgtgatttgcaccacccctttcctagctttcttctactagtcttttcctcttgaacagaaatttcactggtaatttcaatactttatctaaaattgagattctagatcttctctctctaacttttaaccatcctacagcaaagaggaactgctgctttctgtattatcctcctgcctcaaattaactgcagccaaagtaaagggtcacactctatttttcaatgtccagatttaataaatgcacataaccaagcatttagctgatcagtgcatactaaacatttataatatgttttgcacttctatgccattttttgaatcattgttattagttcacactgcaaaggatatggaagagggtattatacactgcatgatatatctattcatgtgattaaatatagaaaacccccaaacaaaaaaaaa

SEQ ID NO: 52262 - DNA, 606 bp, Homo sapiens
  misc_feature 38: n = A,T,C or G
ctgggttaccgggcccccccctcggaaatacttctagnattaattaacgcggggtctaggcttttttggtagaaagatttttaattttttaatttagcttattttaatttatagtaaattaattttatagttataggactactcagggtttctatttccaaactgatgtgtaatatttttctaggaatttttgtatttcatccaagttttcaactgtactggcataaaagttgttttaaaattctctttttaatcaaactgttttaatattttcaaaaacactctaaccttgtggcttttcttctcctcaagagattaatttataatctagatatatttttgctttctgttgtccagaaaagcttgtaaaacttcaccacctgtatcatgcacaatatgatatgcttaaacagaacaggagagaaagaagtatatttcatgctgtttcaaaactagcctactatcttttcaaaactgcaagagatctaagaagtttatttcattaatagttgatgaatgattgtttttgaattttttaaaacacaggtgagaaatggtgccatgttacactctaattatatacccatgttccaaacttctattggt

SEQ ID NO: 52263 - DNA, 650 bp, Homo sapiens
  misc_feature 50, 586: n = A,T,C or G
cgggcccccccctcggggtacttctagaattaattaattaggtaccttgngccttcaaaaatggtcaactcaagaataatttaccaaagagaatttgaaacctcatttaacaaaaggatggactcccgattgacacactctttatctccattttgaactcggtgaaataagaagtataacttgaactactactttcattcctgtcaggattaattactatgaagtttttaagcctcaaagaataatataaagaactaatgaccactctagtaaacacataaaggtacaagcattaggtttgtgtttaaagaaagaaattagtactatttaataccacttgggactgtgtcctttaacaatagactctgaagtgattttagcatcatatatcatcctaaacacatgcagtggactctgggtaagaaatccagggctggcttagctaggttcatcctttccctaactcatgctaatgtctttctctctagaagtgggccttcacaaacaagttttagctcttactaaaagtttgggatttttttcttatattattatgttcctccttactccatataatcattaatcnagggataaacaactggcctaagtttccttatttttcccccaggagtccaaaactttgattgaag

SEQ ID NO: 52264 - DNA, 437 bp, Homo sapiens
  misc_feature 24, 26, 37, 54: n = A,T,C or G
ctgggtaccgcggccccccctcgngngtacttctagnattaattaacgcggggnaaaaaaaaaaaaaaaaaaaaaaaaaaaaaaaaaaaaaaaaaaaaaaaaaaaaaaaaaaaaaaaaaaaaaaaaaaaaaaaataaaaaaaaaaaaaattttggaattaaccggggggggccccccgttgcgccctttcccttttcgttttttggcgtctctttgcccgccgtttccctggtttttactttggaaattgcgggggtgtggcacacatctcttctttttccagctgtttttccccttttcccccttcccctttttgccttttgggccatttgccctggccctttccccctttggcccttttcggcatggcgaatgggaattgggcccttgaaatttttggccaattcttctttttttttttcgcctttgggtttttt

SEQ ID NO: 52265 - DNA, 412 bp, Homo sapiens
  misc_feature 24, 105: n = A,T,C or G
gccccccctcggggtacttctagnattaattaacgcgggctatctataaaaataatatacatattcactataaaagaatggatcagaaaagacaagggatcacangaaaaaaattcgcataagcaaaataaaaatttatattccgttttataacacagccaagtaacagagataccaggcaaataaacaacaacaataatgacaacaaaaccttactatacttctagtatgctacttattcatctggacaagcatcaattgcagtgagccagtttctgaccactatactccaacctgggtgatggagcaagaccttgtctccaaaaaaaaaaaggatacaattttgagtttcccaataaaatatattaagtaaataaatgggtcatagtaaggctgatttgttaacactgct

SEQ ID NO: 52266 - DNA, 464 bp, Homo sapiens
gggccccccctcgaaagtcttctagaattaattaacgcgggattgattaaaaaaataccccttgtctcagtaccatatattgaatagttttctcttcacttttttgatctataataccaactttttctatgtatatggatatgtttctgggccttgatattctgatttgttggcctgtttttctaattttagcaaataccacattgccttaatctgtagttttatgtgaactgttgatatctagcaagggaagaccttcagttttttttgtcctcaaaatggagtaggaactctttaacatcttcctctactagctgatttttataatcatcataaagaacttcataaaaaattatagggttttgattgacattgcattgaattgataagttaatttgtagagaattgatgtatttaaaatgtaaggttttatttcttgacatgctaaataaatatgtcattta

SEQ ID NO: 52267 - DNA, 347 bp, Homo sapiens
cccccctcgaaagtcttctagaattaattaacgcgggtcctaagaaaagagttaaggataaagtgagaattgaagctgtaagatgcctgtggctgtgatgaagcttagagaagcagatttggtctaccaggccccctcccaatcttccccaacccccaccccatcctcaccattcttctgtgttcaacatatgattgtctttatcagccacctttaagaagttgctgatccctgcctgtaatctcagcactttgggaggtgaaggcaggaggattgctggagcccaggagtttgagaacagcctaggcaacatagtaagactctgtctctacaaaaaaaaaaaaaaa

SEQ ID NO: 52268 - DNA, 633 bp, Homo sapiens
cgggccccccctcgaaatacttctagaattaattaacgcgggctttttaaaaggtattaatacaagagatcacctggaacagggagaatggatgcggaagaatctccagtcagctgcccataccaaaaaatgctttccttccttgattaaaaaggatgactatttctagtatttatagtctctgctcccaaatttggaggctatcctgatatacatcaagagtaaatgtcatttatcaaaagaacacttgagtgtgccactagtgtgatccctgctgtaacgtacaggaacacaactctagaactggaaaggaagagacatgggtttccaggacacacaaattttaaatgaagattaataggaaaaacaaagatacatcatattcttcacctgaccttcacactcctccctcccccattttcatctattaaaatgggctggatatacaaataccacaggaacacaacatatggcaaccccgacgcctcagaaggaaaccacagttaggctatttctattcctccctgtctctttgtactacagtgtgcgcctgtagtcccagctactcgggaggctgagacaggagaactgcttgaacccagaaggcggaggttgcagtgagccgtgatcaca

SEQ ID NO: 52269 - DNA, 367 bp, Homo sapiens
cgggccccccctcggaagtcttctagaattaattaacgcgggtgggcaacagagacgctgtcacagggaaaaaaaaaaaagccattacttaactattcaccagaaaaatatcaccttataagcatctatcgtagagcctcaaaatatataactcagatattctctttttcccaacagctttcattctgaagtaagcttccaaatgaagctcttgatgtcctcattttcccatgatttacctgctttctgccctaacctgaaccatgacattctggaaaatattccaaattttactttacataactttaagtaaaattatgaaatcatagtcactcctctgggcaaaatatatatgtgtgtgtatatc

SEQ ID NO: 52270 - DNA, 528 bp, Homo sapiens
  misc_feature 28, 87: n = A,T,C or G
ccgggccccccctcgaggtacttctagnattaattaacgcgggtccacactaagcatataattaaaatgctccagtttaaatatttntccccaaggtattaactactaagatattcagacaatgatgagctaaagttagagtgttcatggatgatggctcaagcttttaagtacttcagatagggaaaagggatttattacaatgggtctaattgatataaaagaggaatggtaaaaagttgcctttaattactcaaaggtctcttgatatattagcctttggtcttttaagtaactaacctccgtcagtatttgactaaattttctcctatgtgaatgtgactgggcaaatattaaagaaaatttcccaaatcaaaagaaagctttaagccatttatgtgccagaagttcagaagtcctgggctggctgatgctgactttgatcttctgtgattacttctataactttgagagagtcagtgttagcactcctggcctttgccttcttcgttaagcagctctgtcttt

SEQ ID NO: 52271 - DNA, 615 bp, Homo sapiens
  misc_feature 39, 571, 576: n = A,T,C or G
cccccctcgaaatacttctagaattaattagcgcgggcntgcctcaggaaatgggaaggaacttttcccttttgggcttgtattttttccaattttccttgttcgggaaataattaattctttaagcaatgtaacctcctgctgtgatttctcaattccacaaaagagaataattatagattaataatggaccaaaatagaaaaagctaaatgtgtgtagcagataagtaggaaatgttctgtcttgtaaagggtattgtttcggtgcccggcaacacagaaacaattctcatctatgcagctctaaatggatgttagaattcacccctctttcctactggtataaaattttcagtctcagtaggactaacgctttgacacatcctaaacctcaccaggagtaggaaatatttctcatagcataaatattttttcttccttgaactgaaaggtttgtggccttccccatgcatgataactgggcagttttcagaatatacctcacagtaaaacttagacttcacacctgtaatcccagtactttgggaggccttggtgggcggatcctgangtcangagatcaagactatcctggccaacatggtgaaaccccat

SEQ ID NO: 52272 - DNA, 617 bp, Homo sapiens
  misc_feature 26, 39: n = A,T,C or G
aactgggataccgcggccccccctcnaaatacttctagnattaattaacgcgggagaccctttaataagcattttaatttaaaaaatcaacaacaaaggaattgaattataaatttacttaactattcaaaaggactccaagtatctaaatggcatgtaattctgtaccctgacacatagcccaaagtagacagtggcctatcgcaaaagggttattgttatggcttttgttaaaggacataatgccgaatagtttcatagattaaaaaacgtatagcattttcaggagaattacataaacagaagaactgctagtttagattcaaagggacagtgacactttaaaatataaagatgtcattgggccagtgaaacataggaaataaactgagaaaacttctcagttgaagtgtaagccttttctttgttgaaaaaaaaatagacaataacacatagctaagtccccagccattggagcaaaatacctaaaagaggaattcctgaggatgagaacttggcccaaacgttaccttccctcagagaaaggagaattggcaacatgtgcctgactcagtttcaaaatgctgtgaaacaatgcctgctctatgctttctgat

SEQ ID NO: 52273 - DNA, 580 bp, Homo sapiens
  misc_feature 9: n = A,T,C or G
cccccctcnggaagtcttctagaattaattaacgcgggatctacacttaagttaaaaaaaactattagacttaatacaaaaaaatgaattttagcttcagatgttagcaatttttaaaaattatacataatgaacaccccccaaaggcaatgtagggttcattcaaagaagaacccataatttcaaagaagaacctctatttctctgtgtttgaatgtaaatttaaaagtacttgtttcataatgtgctgttgagacaatatgacattgggaaattccattataaatatacaaaaatcaactcaaaatcaaggagaagatagcgatgaaaggagagggagaggggaagtggctgaaagacacacagtgagtaatcccaagactacattcacaaaatcttgttttctcactttcgcatcctaaatgcctctcagagtatgaacatctcactgctctgagtgtaattctcatgcttaaaattttatttttgaagcacgttagatgataaaatgcaaactatttggtactcatctgttcttttctactagagagaaacctggatatttgtcattattgagagt

SEQ ID NO: 52274 - DNA, 412 bp, Homo sapiens
ccgggccccccctcgaaagtcttctagaattaattaaggtggtcgtacagcaatgaatgcaataacactttcaagatttccagttctacaaatgcaaggaattcattttaaggaacatgaagatatataaatagttaccgtaacatagaaggcattaagtaactatttgcttgctgaataagaatgggctataccccacaccactccccaaattcaaaagaaccagtcataatggatacaaaaagatgttacccagacagtgtttgcaagtgtgagaaaagggagggagtaagtccacttgctcttgaaaactggaaatcacaaccactacaccttgatcaagaagagcatctcatgcctgaggtttaagtttacctaaaatccaaatgtttcactgaaaaaaaaaaaaaaa

SEQ ID NO: 52275 - DNA, 383 bp, Homo sapiens
cccccctcggaagtcttctagaattaattaacgcgggcaagtagctgggattacaggtgcccaccaccacgcccagctaatttttgtatttttagtagagatggggtttcaccatgttggacaggctggtcttgaacacctgacctcaagtgatctgcccacttcggtctcccaaagtactgggatacaggtgtgagccactgtgcctggcccatttttcataagacacactatatcactcgaaataaatgccaaacactagtgtggtgacactttgctcccatatcacaatcactaaattcgacttacccctttaaggccaggtaggaatttagcaacccagctcataaagggtaaaattagcttattatttcctgagtgga

SEQ ID NO: 52276 - DNA, 591 bp, Homo sapiens
cccccctcgaaagtcttctagaattaattaacgcgggattctaacaaagtacttttctaaggaatatattttaagattaaattttagcagattgggtatttagtttttctcctccctctttctctctttttccttaaaataacatttagttttcaaaattgaggactcctacctgttgcttctttcacttgtacaacctgtatatgtagtaccatgtaaaaatagttctgtcagaaagacagatgccattatattcttgtataatactttatattttttctaataatctaattgcttctttctttaacttccctaagatcactagggaatctgtacaatctggagtaaggaaaatgtaaggacttacagtataattttgttatttttggaagcttagttcaaaattctaatttagcacccaatgtcatctttggatactgtgtgccagtccagaaaactagcaccttttgctcagagccaaactgacagagacatgctcaaataaattcacattcccattttaactaataattcagcaggaacctgagtttgcaaactggtagaaataagaaagagggagtgggtgtgggt

SEQ ID NO: 52277 - DNA, 639 bp, Homo sapiens
  misc_feature 15, 526, 621: n = A,T,C or G
cgggccccccctcgngaagtcttctagaattaattaaccgcgggcacacaggaatattactctcataaagcataaatcaccttattctttaattgatgtttttaattgttattttgacaggttcccttttagagattctaaaatctttcctgtatttcctttggtcattttctgcttctcaatttctaacatatttcttcttgtgttcacagagataggtaagaagtattgttctatttccatgccatactacctattccatacatacataagaatgtattcttgggaaaggaattctggcttagataaaaacatcttaaacactttattaagaaacatacaagaatatttttgtccaactcagcaatacccgtttgacactatccattaacctcgattatttaactaaaggtaagaaatagcaccataacgatactgttatagtgtcaaaggcttggtagacacacatataaaaatgagagtaaagccgggcatggtggtacaggtttttaatcccagcaatcangaggcagaggcaggctgatttctgattttgaggccagccttttctaaaagtgatttctaggaccgccagggctatatagagaaaccctgtctcanaaaaccaaaaaaaaaaaa

SEQ ID NO: 52278 - DNA, 615 bp, Homo sapiens
cgggccccccctcggaatacttctagaattaattaacgcgggatgttatagacattatcaaatccattaatgttgatactaattttctaattaggtaaatgtgtccatgtatcttttgctctggacctgaaacttaaggggcgatgtatactttgggctctaacacagatgagatggactgtaagttatccatagtatcctgtgtaccaacttgaactccatcctttcatcttgcttgaacaaggactgacagcaactgataatgatgttaccacagggagcactatgaattgctcaactttatttttaaaaagccaattatttacaaatgtcaaaaatactaaaaactttcagagaagtattgcagtgattacttttaattcagtgtctgaagaaaaattaaagacagctgcatttatataattctatttaaagtatatactgaaatctgtgaatagtaattcataaaatcagaagagaacataaagtaaaaatatgctttgaaaatcttggtctctaccatttgctaagcattagatatatattttagcccaaaatactagctgtaaaagaaatatttttttttgtccttcagataaattgaacttgtttctg

SEQ ID NO: 52279 - DNA, 586 bp, Homo sapiens
cccccctcgagagtcttctagaattaattaacgcgggttacttctaatctttgttaatgtgtgagagaaataaactttttttaaaaaaaacagtagtttattcattgaagggagtagaaggacatagtttttggtagataggttctcctgtgttctagcctgggaagtgtgccaacttatggaaaaagtcattattcttattcatcaggtttttttcacataatgaaaattttacagtgaattctggctggaaaatgcatgggtgtagtttgttttaatgacttctatgaatgataatttatttaactttcttatctcaactgaaaattaagtaagggcctcataacacattgcaggttgcctgagaatgtcaagtaacactaatgctcagctttacgtttagcctatcatttggttttttatctgaaactcttcatagactgtttctttattccttgactttaaaaatgaacaataagtgaccaaattctatcagaattttacatactatctcacaaatgaacatttattgcttttgtacgattaatttcttagagtggtgtgtatccaaaatgccatcatctga

SEQ ID NO: 52280 - DNA, 543 bp, Homo sapiens
taattaacgcgggactatttaaaagatgcccgctattttttggcttttgacaagtattggactcttaagctttttgaatttgcattaaaaaatcacattaaatattataacagtaatgtatatttgtagaaatttatggaactgtgggtaattataaagagagtaagtcacctgtaaaagtgttaactctcagagaaaattagtgctttttttgtgtattttcttttagttgcttacattgttctgtgaaagcagcaactatattcatattattaatcagtgtcaatattttaagtagtttagtgaataaagatagtgttaataaataatttgctttttctaatatagtgctaatgttttagctttacagtacaattttgatgacattggatacactagattcaatgagatatatccagaaaacataactgtcaggaggcagacttctttcaaaagaagggagggacatggttacacaatttcttagctatgttttcttctgtagttttagtaggaagcaagcatgaaaaatattgccattct

SEQ ID NO: 52281 - DNA, 596 bp, Homo sapiens
ccccccctcggggtacttctagaattaattaacgcgggtctatctaatttaatattttcctagttttcaattgtcctgactgacctttattgcatttgtgtttgaaaaagcttttctccattcctacaagtgtgaatattcaaatcctacccattcctcaaatcccacctgaaaacttctctttactaaagctttatttaatctccccagcagagttatttctcccattaattttcacagaaatttacttgtacatttcttataatgtatttcactttatgttgaaaagctattcatataatttaccaaattataaaacatctgtaattgattaatctatttcctgccccctgacacaaagtaaatgtagaagaaagaagtctaacaatggtctcttggaaatggtgctctgtaaaatatgttaatttgacatagactattcaccaagtctttaaccagacttacctgctatggactatttatattcaagtacccaaaaggtgaggtagaatctaagagtgagttcataagattggttatttatacttagctctctgtcagagaatgaatgcataaacaatagctttttttttaaa

SEQ ID NO: 52282 - DNA, 596 bp, Homo sapiens
  misc_feature 38: n = A,T,C or G
ctgggttaccgggcccccccctcggaaatacttctagnattaattaacgcgggctgcactccagcctgggcaacaagagtgaaactccatctcaaaaaaaaaaaaaaaaaggtgaatttgaacctcaaaacctcttctcttttatcctgagccacactgtttttcccctgctagaaacattcataatcaagtctctaggtaggacttcaattaataaatgattattcttcacaatgtcttcataagtggaacctcattgttttcaagattctctctttcatcatttgctcaaggtgtatcagttagcttttgctgcctaataactagccccatttggtagattaaaaactctacctttcatcactagcccaggctggttcaaaaattggtgattgcagggtttgtaagagcaggaagagaggaagctgcaagtgctcttcaggcctaggaatgaaacaaacaggggctgctagggactgtggctcatgcctgtaatcccagcactttgggaggctgagacaggagaattggttaaggccaggaattcaaggcaggcctggcaacatagtgatatagggataccccatctctctcta

SEQ ID NO: 52283 - DNA, 547 bp, Homo sapiens
  misc_feature 437: n = A,T,C or G
gccccccctcgaaatacttctagaattaattaacgcggggctatgcttttgagcttttattcaacatccatttatgttttattctgtcatgttcaaaatacacattttcatgtaattatttaaatgcagtgcatttataatctttcttaaaactgtatttgccatttgtttacacaggatgttttctgaatatcattccaactattttcatttaagtatctagttcagctcgatactgaatttgtctgtgtaattttcttgctagcctaaaatgatttaaaccacggagttggcttcagagggtaaaatgtgtaatcagtgaatgcattggtcaagagagaaagaggatttctggagacatgttaataaagaaaatggttaaaaagaaaagagaagtgacacaacctacatcctgtgcctctgcctcaatatcttanagaaatagaattgggatggaggttaatttatccctttttatgatacatcatcaagaactgagagtattagtgatcctcttctgggtacttactctgccataccaagtaat

SEQ ID NO: 52284 - DNA, 457 bp, Homo sapiens
  misc_feature 55: n = A,T,C or G
ccccctcgaaatacttctagaattaattaacgcgggcacatgtacaaacatttancagctgaaatgacatgatttctgggatttaagtgaaaaatggataaaaaatggataaaaatggataaaattgacagccccaaggcttggaatgggtgcatggagtttcactgcatattctctttatgtctgaaatgtttgtaataaaaagttttaaaactgtgttattttgatagatagaatgaatgttacgtagtctcatatccattacttggaattcttaatgaaattgaatatgtgtattacttattagccattcatattttcatattttttctcctttattttctaaacttattctttgtccattttttaatatctgggatctgtaggatgtttgaagaattaaaaaagcctcttatttatatatttcaatgttctacattgttcttttaaatacaca

SEQ ID NO: 52285 - DNA, 611 bp, Homo sapiens
  misc_feature 27, 59, 563: n = A,T,C or G
gggccccccctcggaaatacttctagnattaattaacgcgggaatccaaatatatatanaaacatatatatttgaatatatattttttatattggaatatataaatatataaaacatatatacttaaaatatatacaaaataaagtaattcaaacccaaatatatataaatatgtatatatctaaatacatacatatttatagatttgaatttgagttactttatacataacacatattttatatatattatgtatatagcataaatatattctgtcacctgttatttagcataattttggaaaattcacaagttattttccaaatatatttttgtaaatttttttataaataaatcagtaaagattacaaagaaatatatattgtggcattattggtatgaagctgtttaagccaaaattattgaactcctggttgtcaaagttttgacaatataaacaagaatacatagtttatcaatgtattatatgaataaacataatgtataaatcaaaataatacacaaatattaatgtatttattaatctcaaatcaactagactntctattttggacaatctaaactactatcatatttaatagcattaaaac

SEQ ID NO: 52286 - DNA, 516 bp, Homo sapiens
  misc_feature 456: n = A,T,C or G
ataaaatctacaaggcttagggtacatcatgccatccatgcatgggccctgcctacttttctgatctcccttgtgttttgcttgccttgggcttgctcaccaccatctagccacactgccatactttcttttctcactctttcttgacttggggtcactgtacatgctgtcctctctcctttggacactccaccaacctgcccatggcttatcctagctcatcattcaggggtcacttaaatattacttcctcagagaaacctatcctaaccattttctaaagtggtccccacatattcccattattcttctctgtctcagtcttttgcttttcctctatatagcatacatcagaatttatcattatttcatctatctggtagtttaagattttccttctccatcaatgtataaacaccataagagaaagatcatgtctgtaaatgtcaatgtatntccagttattaatgttgaataaatgttgaaaaatacaaaccaattagatttataatatgc

SEQ ID NO: 52287 - DNA, 574 bp, Homo sapiens
  misc_feature 35, 497, 528: n = A,T,C or G
tgggtacccgggccccccctcgaaatacttctagnattaattaacgcgggctgcaagaaaagctggaaaatgaaggtttggagctaaacacgttgctaccctccacaaaattatgtttttcttagtaaggaaaaacaaacaaaaatgaatataggctgggcagataacagcctctgcaaccaagggatatttgcttgctaatattccttaagcccagaggaatggagtgctaatgggtttatcataggcatgaaaaatggtgtgtctgggaagatattatgtagttaaaaagcagaatcttggagctggagttcaatccaaatactttctttttacaatgagaaaactgaggctcagagggacaactgagagacctcattaatagagcaataggaaaatctgctctgaaattatacagagctatttagtggcctttataacatcactcatgataaaatgtaaaatctcagaaagaaaatgccctctgcctatggttnttaaaatacaggaaagaaaagctagagattntgatgccacctattggtagacagaagtataaactgccctttcgtag

SEQ ID NO: 52288 - DNA, 411 bp, Homo sapiens
  misc_feature 358: n = A,T,C or G
gggccccccctcggagtacttctagaattaattaacgcggggtcctggaaaatgttgctattaatatttttatacatatattttcattcacatgttacaatgactttctctaggacatatcaaaggagtagaagtgttattttagaaggaaattgcttagctatacaaggtaatgccacggcaagtacagataggagcattagcttacatcctgaccaatacttggaattagccgacttaaaattttgctaagctgataggtttaaaatgataatcttattgattttaattagtagtttcctgtttacaaattaagtggggtgtcttatgtttattagccattcatttcctctttcanatgtgtttcttgccaatttttccaagtgattatttgtcttttgttaatagttt

SEQ ID NO: 52289 - DNA, 554 bp, Homo sapiens
  misc_feature 423, 481: n = A,T,C or G
cccccctcggaagtcttctagaattaattaacgcggtggttaagagcctggtgttctgttagcctctgagttctacttctttgtaccttgggatcttattccctagggttgtctggttccagtgaaaaaatatgtgtagtgcttctgtcaccaccctttgtggaaaatcggcccacactgacgtgcttgtacttctggagtgaagagaagcacgtttggcctatagtatttcaagttccacttggcttagaatatttttgttgcttccccccacccccgcaaagattcatttgcaacttagaaaattgccctctttcccagctactgtactttgctctcgagggatgaaactttggctttaatcacagattctcgaagtatctgagatgcgtaattggaatttagtgaccgcagaagcggctntaaaaatgcccttctcgccttttttcccatttacagtcgaaaagaacgatggactttntggtagtgagggaaaataccagatgcttttgttcagttctggatgagaatggacagatagtccaccttgcagc

SEQ ID NO: 52290 - DNA, 577 bp, Homo sapiens
cgggccccccctcgaaagtcttctagaattaattaacgcgggtatttagataatcacacacgcatcttgtggttctgtgactctaagtcatacgatagactatcttcatcaatgtctggggtgcacagctgagcttaaactccactcctaaaaaaaaattaatacaattatttgtgctggtgatgatagaggggaccagcagcactgcaccctatccagcagttctctgttcctgtggtcagagtcattgacaatgtagaacaggaatgaaaggaaggctggaccctaaagaggatttctgcctattaaaagatgatggttcttgtccagtaggtatattttggttggaacttttcatttatcccactatccattgatcaaaaggattgaaactgttattccaatattccagaatgtgcttatagatacatcatgtaaacctcatccaaaggctaaacagaatatttattattaccactgccaaaaaggactttgtttggattttgctttccaaacacacaaggaaaaaattaagaaaaagcaataaatagcccatacaccaaaaaaaaaaaaaaaa

SEQ ID NO: 52291 - DNA, 539 bp, Homo sapiens
aattaacgcgggctgcgtatctagaaagaaacatgctttctctagaaaatagttgtgtcattaatttattcaaacacatactaagcaactcagccagcatgacatgctaagattgtacagaatgtcatgtaggttcaggcatgacaaattaaacataaaaataaaataaaataaaaataaaaataaaataaaattgggggttggaaaagagtaagagaggttttcactctaaattttacaaggctggccaggagcagtggctcacacctgtaatcccaccactttgggaggcagaggtgggcggatcacgagatcaggagtttgagaccagcctgaccaacatggtgaaaccccgtctctactaaaaacacaaaaattagccgggcatggtggtgcacacctgtattcccagctactcaggatgctggggcaggagaatcacttgaatccgggaggcggagactgcagtgaaacaagatcgtgccactacactccagcctgggagacagagcgagactccgaaaaaaaaaaaaaagcgg

SEQ ID NO: 52292 - DNA, 625 bp, Homo sapiens
  misc_feature 36: n = A,T,C or G
tgggtaccgggcccccccctcggaggtacttctagnattaattaacgcgggtcccccttcttcccattgcattatccacacaacagcaaaatcacacaagtcaagagatcctgtcactgcccattaaacatgcctcaaagacttcatttgccttaaaacaaaatccaaaactcttaatcatgtttcacaaagcctcacatgacctggtccttgactatggctccgatgtgactctcatttggaaggcattatttacctttcttctttaaatcccttcaactcaccagcctcttgtcaaactaagaatctataggacaccaaaggggaaacagaaggaagcgcataacaagcatgagactttaatgtgtctgtcttgctcaggtagatgaagaaggcaataaatcagtaaggctatagaggaactgaaaagtgcatgcaatatggtacttttaactctgagttccaatactaaggaatacagtttattttcaaaaactcatacaacatttataaaagctaaccacacattaaaacaaggacaatcttaactcagaatatataccactaattgtacacacatgttaatttggccacaatgaaattaagtcaaaaattaatagtaatg

SEQ ID NO: 52293 - DNA, 524 bp, Homo sapiens
cgggccccccctcgaaagtcttctagaataataacgcaggtatgaaaatatacttttataaatcagtttgtaaaaatataaacccagattagaaagaaaaacggcctacaaatataaatattcaatccacacaggaaaatataagtatcctataaacacaaggcaaaatttcaaactcactagtaattaaatataacatttttaagatgagatattaattttagtccatcagattgccaatgatgacaaagaagaattatgtctagtgtgggtaaagatctatattttctcatttgtctctaaacatgtgttctttatatatatatacacacacacacacatatacatatatgtgtgtattcatatagctttttaaatatgtgaatattataaaacgtaaacaccagcaaaatctataaatgtttataggaaattagaactaatgaattagcacctttgacattaaaaagtgatttttttgcattcagataacctgtccatccatatgaaaaaaaaaaaaaaaa

SEQ ID NO: 52294 - DNA, 579 bp, Homo sapiens
  misc_feature 422: n = A,T,C or G
taccggggccccccctcggaagtcttctagaattaattaacgcgggcataatagcaaaagaataaaaatagcccaaaagtctatcaactagtgaatgaataaacaagttgtggtatattcatctaatggaatacagtctagcaataaaaaggaataaactactgatacacccaacagaaatgaatctcaagagcattaaataagtaaaataagtccagcatacccccaaaaaaacacatggtttgtgactgcatttatatgaaattctggaaaaggcacaattttagtaataggaagaagatttggcattacctgggtctggggatggaagtatgaacaaatcctctacaaggacattagacagaaatttgagtaagggaaataaatgttgtggttacatgattgtatacatttgtcaaatntatgcaattttacctttaacatgtatgttgtgttacttagacatttcagtaatgctgataggaaacaaaaatagtctagaagtgataaaatattgtggaccaggcagagacaaatgtaaaactctttcactataaagtcttcaccactaggggcaaa

SEQ ID NO: 52295 - DNA, 617 bp, Homo sapiens
cccccctcggaagtcttctagaattaattaacgcggggtacagctagtatacctgttacatttaaaaaatagttattcattctataagtcttcaagtccctcctctgaacctaacaggacttgaggagccccaaagcccgtaagagagtcaaaatatgcatggattagattggaaccattaacatgcaaaaattcgttagttaacctaatgaagaaattgggagtaaattgtaggtagagactttgaggaagacgagacagcccgtcagctgtagaaataaaagaatagttcatgaaaagatttgggactcgatgggtaagaattggacaggcagaggagagggaagagaacattaaaagtgttgggaaccacaggaggaggagaggaataaaggtgacaattaatgtggcacgcatgggggtgttggagtcctggaccgcctcttgcccatgactagacatattaacacagtaaaatatataccatttccatccatttttaccttgtggttctgtgtttcttgaaatatcatctaatgcttagtccattagatttctcttcaggacatttaattcattacagtaaaccgatttttaaacataaaaaaaaaaaaaag

SEQ ID NO: 52296 - DNA, 503 bp, Homo sapiens
gccccccctcggaatacttctagaattaattaacgcgggctgtcaggcataataatgaaggcattgtgaggtacttgttcagttatccaacgtattataggaacaggaaaaagtttgctgttatttctaagttcagaaacaatgcattgtaagatctgctgttgttttcttatgtgttgtccttgtctccagtgcttactacattaggtataaactaacagactctcacccaaatacatgataatttagatgtcctcatgagtcaatttcattttagaaaaattgaatttttaaattacagagtgttggagactttagaatctatgtaattagttttatactgattaaaacacactcaaattggaaaaaaaaccaataatctgaacgaaaatataactctgcttagatgggcctatttttaaaaaatatgcagttttcatacaatataaacttttccaaatccgtttcatgtttaacaagtgattcttgattgtattagaaaa

SEQ ID NO: 52297 - DNA, 466 bp, Homo sapiens
taacgcggggtaatcatcaagacctgcaaaccagaagatgcttatgactttctgtcttttttaaaaaggcaaatcaacgaatgaattttattctaaagtcagcttggcacaaaaaggctttattaattagaaatcctttgttgctcttccattgaaaatacaacagaaagagaattttcaacctagttagatattctctaagatcagatctaagaaactgcattaaatttacattaaatccttttcctcttccatcgacctccttgagctgctcaggaacctggatcagttcaacgttatctccacaccagagaggaggactttcaattcattgatttcatcagaagtgcaggattttgaaaactagctgacagccttgttccagaaattcctgagaggtttcctttaagaattgctgttcttcagagtaatttggtctgtggtttctctgagtaccaagttattt

SEQ ID NO: 52298 - DNA, 478 bp, Homo sapiens
  misc_feature 36, 411: n = A,T,C or G
tggggtaccgggcccccccctcggagtacttctagnattaattaacgcgggtggctcattggacttcgtgccatgctaagaattattctgctgggaccctgtttctaaggctgaagttttcagtgctccaaagcaagccaggtttatagtcttgacctttttcagagagagaatgcaacctttctcagggtccgttactgccaatttcaccttggcaattcctcacaatttgaaaaattatctagagggatgttgaaatgctgcacatcgcactgtgcagacaatttctaaagaatggcgaaagttacccagctaaagaactgtttttcaaaagtgtgggctctgacccactagtgagaaatgaaatttagtctctctctagagacctgtttttaataaaatggaacaganatgggatgggatagaaacatgatagaacatgtcccacttagtaagggtaaagcggcagtcatgtttt

SEQ ID NO: 52299 - DNA, 414 bp, Homo sapiens
ccccccctcgtacgtacttctagaattaattaacgcgggctccacagccgtgctgaataccaattgtaagcatgcttctttctcaaactttggattcattatctggatataaaattcatatcctaataaaatgaagtttgtagtgagaaagtgtgctcaagtcacccaccccatgaagggctgtacaatagagggcaaagtgaaacccgcatgcaggtctgtggaattgtatggggatgtttcatacaacactgaatgccatgtctgctggaaaactttgcttgaaaataaatatgtaggccatcgctacctgtgtgtgcacttgctgaaagggaccaaacttccattgaccaccaagaatgacccacagtgaactaaaagatgtgtcctctgataaacaatgtctgtgatgta

SEQ ID NO: 52300 - DNA, 535 bp, Homo sapiens
ttgtttcacatagattatattatttaaaatcttacaaaatgtattagttatctaaacataaaaaacattaaaaatcaatttaatgccatcttgctaactaataaagaaaaatcaatctgtaagggagtaaatcgctaagaaaatgccctctttgacatgatttgtgattgaggaagtgtatagaggatatgtggtatttctcgtttataatgatttcaattaattcaaataacttttgaaaggaaattattagtgtaattttgggattatacatcaaattccatacttggaagtgttggaagtattatttttattacaaagttagtttttatattttttaaaaaacacctcctttcattatcaaatgtatctgaagaaaaaaataggatgctgaaatcttaaaattagaaaaagcattttatttgagtcagtttacttatttttcttgccgttttctctatgtatgtataatataaccatactcataggtgtgtatagatgaagctaatgctaagacaggagctaaaataacaag

SEQ ID NO: 52301 - DNA, 487 bp, Homo sapiens
  misc_feature 36: n = A,T,C or G
tgggttaccgggcccccccctcggagtacttctagnattaattaacgcgggttagaccaatgcctcacgtcaggccgaggctgctctccgttcatgacactctcaaggggagtgaaggagaaggtggtgtgtagagaagacacctacacacattttatgttccttggcttcataaatagtagcagccttgtgggtctcatcgtgtcccccaaaaatgtctgctcactcctaagctgtgaatacatccttctttctaagtacgaggtcattgccgatgtaatcaagatgaggtcatcaggcagggcttaatccgatattaccaatgtccttacagaagaggaaagtgccctgtgaaagtatggacacgtggtgatcaccaaatggtgacggatgcggatagtggagtgactcaaccacaagccccatacaacaaggtctctggtgggcaccatgagcgcggagacagcctgagcctgcagcaccttga

SEQ ID NO: 52302 - DNA, 613 bp, Homo sapiens
  misc_feature 11: n = A,T,C or G
cgggccccccnctcggggtacttctagaattaattaacgcggggttcttagtatctaacataatgcctttcatattttaactacctattaaatatctggtggatttataaaatattaagttatctcacagttatacaaagggattatcattctcatatatgaaaattcatcaaagaccagaaaatataataaggtactttactctcttgagtcttacagattttaaagccaaaagggatatgaacatacataccccccatcacctactttatatgtgagaaaaacagagttctaagagaatatgcgatcagaacacaagttttcaatgccaaacaccatgtgccatgtgtgaaaacaaactgctaccaattaatcatttgattttgagcccctttaccataatcatttgtaaaatgaagagactagactaaatgaactctggagtctctgtcagcttaaaacttcagactctaaatcttgattataatccaaataaattttgccaaatgctttacataaaagtaaagaatattaaggaatcctcagtggatccactatgagatattttttgatcaaactaataattattgttaatatatttaagaacaatacc

SEQ ID NO: 52303 - DNA, 579 bp, Homo sapiens
cccccccctcgtacgtacttctataattaatgaccgcgggtgtatacaaacataaatcctctttaattttgatgcccctgttgtcttcatgtttaacagtcatacatccatgtttggcttctttgggatcagtaaatcaaaatacccaatatctgtttcccttttaggggaaaggccaacaatctcccatctagttataaatcatgggttaaaaaaaccctcgtcatttttttcaaattttattaactgggactaaaatgaccttaagttttcttgaaatttttctttaacacaatatgggggtaatctttggctaaatcccaataatagttgacctctaaaatggattccattggtcagtttgtatctttagcccatataggacatatatccccaaaaaaataaatcgctttgttaaaacaaagtgaatattttaaaaaatgatttatcccagtgaaattttttcattcctgacatgcaactccctgctaaaaactttaatgtcaattatggaaagatgcatttattgaattaggatttaacagattaaataatttcatattaaataaaaattaaaat

SEQ ID NO: 52304 - DNA, 616 bp, Homo sapiens
  misc_feature 76, 95, 507: n = A,T,C or G
cccccctcggaagtcttctagaattaattaacgcgggggtgagggcaggatcaataaagtacccaaaatgatatanctagaaaatgatatacaangaaaagttaacaaaagtatgtgtgtgtgtatatacatatacatatatgcatataatatatatatacacacacgtatatacatatatacatactgagatatttggatatagtactcttagagaatgatggagagaaaatattttttaagtacaaagatgttaatgatataataaaagtcatcaaatatcatgcaagcaaatcagcttgcaattgctaaggtgtaagcccattactcatatgaattgaaggtgtcaatgaacagaatccaaaacctgaacccctgagttattaagagctttagggaaaaaagaaaaaaaaactaccaaaatttgaaataggaaattttcaacttcaaggtttatcaaaatgtaatgctactttccctagcaaaggggcttggcttgcttctttntctattgtttctaaaataatctctaggtctctagattttcttgttttaaaaaggtacgaagaaatgtattgtaagcctgggaggctaacaattaactctaaattctctt

SEQ ID NO: 52305 - DNA, 509 bp, Homo sapiens
  misc_feature 28: n = A,T,C or G
cgggcccccccctcgaaatacttctagnattaattaacgcgggcacttttattttctaatgtccataagaaaagtaaagcaaccatataactaaagtgatgataattaaaatgaatgaaatgagatccttccctggattgacaggatagagttcaagtttttaaagaaaggcaagtataccagcaagaggcaggctgaggaccagcttaatgaacatcaccattttgttcaggttgggctctttgcctcccttgtttatggacagtcctgagtgatagatggagatatttccatctctttatcactaagttgagtttgtacataccattattattttgggggatctataatggtttaaaaagtgttggaggttttggccaggtacggtggctcatgcctataattccagcactttgggaggctgaggcaggtggataacttgaggtcaggtgttcaagaccagcctggccaacatggcgaaaccccatctctaccaaaaaaaaaaaaaa

SEQ ID NO: 52306 - DNA, 625 bp, Homo sapiens
  misc_feature 39, 40, 41, 548: n = A,T,C or G
ccccctcggagtacttctagaattaattaacgcggggcnnnccatcccttagcaagaaaactcagggaaataatcagattaaagctttatactaatctgtgaaatgaacaaatacatgagccaacccctcttctggttagatgtctaggtttcagcccgttaatgcctcctatgctaactccctcataatgcatgtcacattcagcaataattatttctgaatgttgtggtttgctgtttgcctctattctctcatgtgtaaatttcacatgagcagtgattgtgcttaattcgatctttactttatccaaaatgcctgtaaataggtgctcactgcatgttgttggttggatgaattaaataacatgagcaaacaaggagagaagaagtaaggaagagacaatgagaaggaaagagtaaggaaggaagtgaggaagaaatgaactaattactctgcatacctggtgattgtctctaacgttcagattttataaatctatagatgcagtaacaggtgcaaaaatgttattgagtgcaactagtgactntgacatctaccaccactgctagtactgcctggtaacatttactgagattactctgccctatgccctatgttaaactc

SEQ ID NO: 52307 - DNA, 534 bp, Homo sapiens
ccccccctcggaatacttctagaattaattaacgcggggggcgtggtggtgggcacctgtaatcccagctattcaggaggctgaggcaggagaattgcttgaacccaggaggcggaggttgcagtgagccaagatcgtgccactgcactccagcctgggcaacagagcgatactctgtctcaaaaaaaaaagaaaaagaaaagtttaatttttaaaaatgagtgaagagaattattattaacttttgtagcattagctgtgatttaaatgagaggtatatactcttcagtaaggcatcacattttaccaaaattaataatttgaattgtttgtaaaaatatatataaaatagaaaatattccaaacaaaggtaaattttaaaccaacaaattaaaagtacactaccactcatgttttaaaaatgaactaaggaaaatgaatcagcaacattcactttcacttcatagtatctttcatatagtaatatttttatgagtaatttacttgttaaacaatttttcaggtaaattcttt

SEQ ID NO: 52308 - DNA, 541 bp, Homo sapiens
cgggccccccctcggaagtcttctagaattaattaacgcgggtcccctccgcaactgaaacttaaggatgccctacaagaaagctgcctggatctttaggacaaggtttctccaggcacccccaggatgccaagatgacggtagcttttacagattcccaaattatccacagtgcatatccaacaattctcccacaactaccttcatcccttacttaaataactgaggtctttgtaataaattcaggtactggtccagaaacagccctctcttaaggagcctctccatgagcccttaagaaagggctgtttctggactattaatattttccaattccaatttaggaaccccctacacctatggacattacatatacaaatagatatgtgaggctttttttctttccaatcttaaaaacccaacgaaactattttagggacaagtgagtcttaatattacttatgaacagcttaataataagcatttactagttacagtcagaaatactatagcatatgcttccacttaaataataaaagct

SEQ ID NO: 52309 - DNA, 439 bp, Homo sapiens
  misc_feature 385, 396, 400, 404: n = A,T,C or G
cgggcccccccctcggggtacttctagaattaattaacgcgggggagagagagagagggcgagagacagccttcagcaggattctgatggttcttaccacctttaaaactaccttcttttttggcacatagtttacttctattccaaaaatagtgtgtacaccacttacttctatgttcatgtcaagtgttacttatggagtgaatttaatacgaggccctgtttatatctttcggtatcagttaggaaatactttgatataaaatttggatttatatgtcaatcagcttggcaattgaggttcttttgttgctgatcagaaatcttggctggcagttaaatatgtcctttttataaaaaaaaaaaagaaaaggaaagaaagaanagaaaagaaangaangaanaaaaaaaaaaaaaagcgggccgccaccgcgggtgg

SEQ ID NO: 52310 - DNA, 349 bp, Homo sapiens
tttggatagatgaggcaagaaaatattccaacaaaagaaataacatctctaaagatttctaacattaagcagtaatcagggaaaggaggacaatctgtcaattgcaaatgaattgtgtaaataatataacagaaaattatataagaaatttaacttgtggccactttaatactagattaaaaaatattaaaatacttctgtgccagaggactaacataggagatagatggcctaaagattaacaattgtgaaatgctactgtctctgttagactgaagagactatagaaaggagtgatattactagaacttatagccagatagggaggaggctatctgatgttaactgg

SEQ ID NO: 52311 - DNA, 534 bp, Homo sapiens
  misc_feature 28: n = A,T,C or G
cgggcccccccctcggagtacttctagnattaattaacgcgggtacgtctcctatccttttccccactcagacacagaccaagtaaatatataagacatgtctacagtccagcgacactatgttaaaatgtgactgaaaaatatgactgcttctcttcaaatctgaattaggaagtttatgaaatggtagcccaagaattccgcccttcatttctggaataaaatagaatttattaagagaactgctattagattgacattaaaagtcaaagaaaacagctatcatatttcaatctataatcttaatgagcaagacaaagtgttgggtaacccagtggaaaaaaaattacttaacttactatgtaactaatttgttgcctttaggttgggatgatgtttagttgttttaaaattaaaatatataccctaagagcaaacacttctcgtttaggatttggtgaagattaagagaaaactgtttagaaaattgtgaaagagatgcattcccaaaatattttgagtgatagacacatc

SEQ ID NO: 52312 - DNA, 514 bp, Homo sapiens
gccaaagcaagagtacagcatctgttcattgcatctgcactcactaccacaaaaattagccttaatctaaagaggcacaaatgggtttttataccaacaggaggcccaagtatttaaaaatcaatgactgtccacccagacaaagaacagctgtttcctatattccagctccatatcaagcccatgctcaacccaatggctagcctaaaactgcccatactctcgttttccccagtcaaaactgtcaaaaaagggcagtatctaaaagccatgagctggattaagtggagacaaggcagagaaggcctggcccaaacagatggcattttaagagacaccctctatcaccatcattcaatgacttagtaaaatcataatcaatcttatttcctgtgttcccaaatctacttaatgagacatttcacttttgtttaaaaggccaaggaggggactgtagggattggagagattttggtcaaaggacacaaactttcccttagacagaaggaataag

SEQ ID NO: 52313 - DNA, 419 bp, Homo sapiens
  misc_feature 30: n = A,T,C or G
accgggcccccccctcggggtacttctagnattaattaacgcgggatgacagatggtattttcctttaaggagttttcttttgatataaaaatgtgtgctaaatgtggataacctgcttattctccttgaaataacagttttataagctttctgtcgaaagtttaattagctgttccgcactttgtccctttttcaaaattgcagttatttccatttttatttgggttaagaaaaaggttgagatgtatgtttaaaacattagctagacaccaaagagtagaactgccttctatgttctgccaaggagagtaaattacttggaagtatgtcaacacctggaaaactgtcaataacttttttggctgctgttgttcaaaacattttattagtatttgatcggtgttttaaaacagaccaa

SEQ ID NO: 52314 - DNA, 449 bp, Homo sapiens
  misc_feature 51, 159: n = A,T,C or G
ctatggtttctatatccaacatgcttgcaacatgttgaaatcattcagggnaagaaatagcgtttatttctatctctctcactgagccattgcatccaatctgaaatttgacagttatctgagtgggcagcagaaaaagggaaggctgagtgtataatngcagaaaataatgtcttgtacagtatcatcagaatgagttgctgatgcagtgtagccagttacatgcaaacaggttaaatactgccagtcagcacattcctagcacccctagcagctttgggcagagcagggagcaagatgttgctgagtgtttgaaaatgtttcttcttcttagactatgaaagaagctctgtcccttcactggatgcttgacttcatttaggaagagtgttaagacctttctcataatctatgaatcctatgctaatggatgaatgcaaatattgtta

SEQ ID NO: 52315 - DNA, 368 bp, Homo sapiens
acttctagaattaattaacgcgggaggacaacatttcaaataaagccccaagaaagaatgcatctgtgtccacctcttgaagatatgtatagcactacataccataaaaaaacctctgaaccatttaaatgatctgttcaaagacaagtataccaactaaaatctacaagagaggaatgaaaaacagacattctattctgtttaacaaaaattctctcaaaacaaaagtcaaaataccttgagatatgcttcttaaaactcaatataaaatcacagacaagccattttttatttttatcccaagtgtcataatgtcatcataagaactgagcttgagacacagcttgaacactaaaaaaaaaaaaaaa

SEQ ID NO: 52316 - DNA, 510 bp, Homo sapiens
cgggccccccctcggaagtcttctagaattaattaacgcggggctacagtttattgtccagggaacaatttctaatcatcttgctcccccacaaggaatatatatctgacaagggggtattattttcacaaacaattcttaaaagaccaagttctacaaaaacaccttcatctcaatttattttatggtgcatgttttgtttttcttaaaaagcattacttttatggtggaatattttaatgtctccatacataaaatgaaacaaattacaaaagtaaaggagaaagaacctgtatttaaaggatcatagaaacagagttttattgaggtctgtagttgcttttaagtatcttaagttattatgatcttatgccatctaaatattggaaattatatgtctactaatttggaagtagtagaggcatattttaaaataaattctgtttcacaatgttatctaagtaacaattgagtattcaatgtactaatcttgtcccttgcagtatttta

SEQ ID NO: 52317 - DNA, 546 bp, Homo sapiens
  misc_feature 28, 136: n = A,T,C or G
cgggcccccccctcggaatacttctagnattaattaatgaatcactgcttgatataaagtcattttgaacagtttcaagctgcattgttaaggggatggatttaaaaattattcaatgtcttcttttctggtttcncatgaaaaaccaatttacctttttacagttcttatccttctctactactccagtcagattaaagatgacattcagcctagctgccttcatagtttcaaaagcagttttccttagatgggaccagcagtgtctttaggcctaagtgtgttagaaagctgaactaatcatatctgagaggaggcaagaaagaaagtcaatggggaagaaatgaagcaggctgtccgtggaagagaggagatgaagatccaggaaagatggaaaatggggagtgaaagaggtagactgtggttgacagcttagctaaagtgtctccagcagttatctcaggtgccacttcgtgtcttggactagctagcaagcccactgaggagtgggaatgtaagtaagctttgcaggggtgtccaatcttg

SEQ ID NO: 52318 - DNA, 465 bp, Homo sapiens
cgggccccccctcggaagtcttctagaattaattaacgcgaggacccaaattcattaaatgattttgattttttaaaagatattccatccgtagacatccttataaaactcaaacaatataaaggcatattccatacagcagaaattgaaatgacctcttcacaacaaaacccactcatacccccactccaaccttccttgcacaacttcacagacttccctaaatagatacacacacgagagagagagagagagatttggggttttgattattatatgaatgggcttgtcctactatgccacttatcaatcaaaacatcatgtcttgactgggcgcggtggctcacacctgtaatcccagcactttgagaggctgaggcgggcagatcacctgaagttaggagttcaagaccagcctggccaacatggtgaaaactcatttctactaaaaaaaaaaaaaaaaag

SEQ ID NO: 52319 - DNA, 601 bp, Homo sapiens
ccgggccccccctcgaaagtcttctagaattaattaaatgtaattttaggataaaaacatctatcatatataaacctacaaacatagattttatgggaggcattgagttaaagtcttaccatcctcggattgtgagatgctatatttggggatctataatatgaattcactgggtacctggagcaggggaaatgctacatataaaagcagaggtaaaggaagacacacttggcttactccacagtgatgcaacatgaagatgatagattttattcaatcatgcaacatagtttgagaaaaccttcctttagaatttgttcaatcgtttggaattttcaagcaatgtatgcctaaagttagatctgttaaaaatcctctctcatcattaattttacaaagttcataaacttgatcataaactaagaagttatttttgtgtgtattagtataagatattgtccaagaacaatttctgcagtaaactaaaatttaccatttttccaagaaaatgcatattaatttatcttcatttttttatgttaaacttcaacatgacaggataggtaatattgctacttgaaaagtttgttatcagctaatt

SEQ ID NO: 52320 - DNA, 579 bp, Homo sapiens
cgggccccccctcgaaagtcttctagaattaattaacgcggggggtcctatccttttgccaataaaatccccataaaggtagtgtcactaggttataaaaaatggactccaaggggaaagcatctgcactcttagccttgtgctatattttctgttttactgtaactattgtgtacaggttgtaacttagaaaattttgcttagtagatgaaaggcacttatttttaatacgtccgattgtgggacataatatttgcttttatgatgtgatggttactttctaattaatctaaccaggatggataaaaataaagtttttaatattattattatatatatatttgttaatattcttctggtctctattgcttttcttggaaactatacaggaacttttggacaaatatttttccaaataggtaacacctgtgaatgttacacatattttgcaatcattgtattctgaaagcagaatacattaataatataatattgataacattaatagtcatgtgaatttcaaaattaacttcctcaaatgtgcagattataagtagtaaatgttactacatcagtact

SEQ ID NO: 52321 - DNA, 539 bp, Homo sapiens
  misc_feature 453, 470: n = A,T,C or G
cgggccccccctcggaagtcttctagaattaattaacgcgggatctgaagtatgtggatcatctgataatgacatttcagcattcagccatataatagttgacaaagtaatgtacttcacactgaaagctgtaaaactatagtgaattataaaattagatatcaatttgaatactacacaatttttaaaatgtaaaattttgtaatacggaaatgttatgttcatttacttcatttgaagtatgtcaatattctatttgactcagcaaacataatctagtcaccttgctcatgagtgtccacaggaaaaaaataaatttggctatcaactaatttctctagtttctgaatgttattagttatgagttttttctcctcctcttccaaatttggacctaatattaggacaagggacatatatatctctacataaaaagcagagggctggaaattntctgatcatctggattntaaaaaacattccccatggaatgtacaaccaattgaaagcatatttttaaaagaaatacatttttctta

SEQ ID NO: 52322 - DNA, 538 bp, Homo sapiens
  misc_feature 490: n = A,T,C or G
cgggccccccctcggagtacttctagaattaattaacgcgggatcatatacactttggtattaattgtacaattgtatattttagaagagaactttttcaaaatgtttaaagtggccatttcgagatattccatagcagaagttttgaaactttctcccctccactgttttctgaaatttctaaagtgaatataagtaaaaaattaataatttataatgattaaaaattagtaaaactagctaaacatttgcctgctgtgtgccaggcactaagtggtttaccttatcatcaataaatttatttatgataaatgattacaaccatattctgacacaggtactattatcaatcccatttacttttgataagattgaagcaaaaatagatactaacaatgggcctggcgcggtggctcacgcctgtaatcccagcactttgggaggtcgaggcgggcggatcacgaactcaggagatagagatcatcctggngcacatggtgaaaccccatctctactgaaaatacaaaaattagctggg

SEQ ID NO: 52323 - DNA, 435 bp, Homo sapiens
cgggccccccctcgaaatacttctagaattaattaataaattttatattgaacatatacactgaaataagattttgaatatattacattaaacaatgtaatgaaatcaattgcctactagaaatgtaaaactacatatatggcttacatttacggctctcaaggcatgtcttctgaacagcactgcactttagccaatgcaatgaaaaaacaaacgacagttatgaatactgaaaaagacagaatcattattgtgtgcagataagtgcctgtctgacaagaaaatctgaaggaatcatttgaaaaatatccaaccagagggagaattcacaaaaatacttcgataccaagtaaataataaaaatagacaggtttttttttgtttttttttttttgggagacagagtctcgctctgtcacccaaaaaaaaaaaaaa

SEQ ID NO: 52324 - DNA, 374 bp, Homo sapiens
ggccccccctcggaagtcttctagaattaattaacgcggggcatctgttgatcatccatttattttttttccagtaatttcaaagcactagaatttgcccatatgtaattcatacttctgaatagttgtccagttaaaattaatgaatgagaaaaattagaatttaagtagaaaacagtaatcgagatccataaacagtaaatttggacgtataagcaagtgtgccctcccgtcaccacaagctttaagaattatgcagctctataagaagtgaagagggggtttacatgtgcccaacttggaagctgcaaattcaagtacattttagatatgagtaagtggcagctaggtcagggaacccagtttcttattca

SEQ ID NO: 52325 - DNA, 452 bp, Homo sapiens
  misc_feature 29, 42, 145: n = A,T,C or G
aagactggggtaccgggcccccccctcgngggtacttctagnattaattaacgcgggtacacataataatatagtataacaaagtgtagtttatggcgggaatgcaagactatctcaatatttgatagtgaattattattaacanttgaaaacacatgatcatatcaaactcatacagaaaaagcattctacagaattcaacatccattcatgagaatactatcagcaaaccagaaatggaagaaaatgtcctcaacctgaaaaagagcatacaactgacattatatttactggtgaatgaatgctttcatgctaatatcaggaagaagacaaggatttctgctctcaacacctccattcagcattatactataatgaagaattggaaactatgatttaataaacattagcatttagcaacagcatttaaaaataataggaaataatctgac

SEQ ID NO: 52326 - DNA, 520 bp, Homo sapiens
  misc_feature 47, 58: n = A,T,C or G
taacgcgggtagtttaagataatattagtgtcttggtgtgatttganagtcttctgcntacaaattatctgcggttcttgttaaacatgcagatcctgggatgcaacactcaactgaaatagctctcatccagttccatggtgattcttgtcttgtcaaacgtaattatcatttgactgctcaccagcacttgccacagtgggtcaatttgtcctcttaacactttcttctcaggcatttgtgaaggggactctcttctaccttacagcaatgctcagtctcctaatttagtttttccttttctgagaatcagctgttgttaataagcattccacataatttctccctcattcatgatctggcataatgaaccctgtgattcctttgttatctcaatcacttattatgaagatattttgccctgtagttgagatgatttatcattaatacatttcattcttccattgaaaatctattatgttcaaacatttcaagagcataatgcacagtcactgatctt

SEQ ID NO: 52327 - DNA, 594 bp, Homo sapiens
cccccctcgaaagtcttctagaattaattaagcgggatgaggcagatacgcctagaagataaagataaagtagaggttggctggaaggagcttgaggaagtaggaaagtatcaacaccgtctcagaggaacaaactgttgctttgtagtgtatccaaatgatcctctaaattattttttgagatgcattgttctgtatcaaacagatcactgagtcaacagggaaaagctgatttttcccttcggagttcattcattagctgagtgatcctaagtagtaagttgaaaaatgtacatttattttcagatggcagtattaaatatttagtaactaaaaattggctagtcgatctttcaactgcaagtcaagagatactaatgaatttatttttcttggaagtcattacaaatatgacaaattatttttataccaggataattgaaatataaattgcaataggaaaaaaattacataactttgtattacacaattgttttgacttttatgaattacaatgattatttgtatggcataaccattgaaattgttgatctatgtgtacatttgcatgctgaaatatgtgaagtaatatct

SEQ ID NO: 52328 - DNA, 598 bp, Homo sapiens
  misc_feature 10, 581: n = A,T,C or G
cccccctcgngggtacttctagaattaattaacgcgggcagttatatgttcattgtacagtcattttttttagtaacagctttactgttaattatttcatgtaccaaccttttaaagtgtacaattcaatggttttaatatatttgcagaattgcgcaaccatcaccacgatcaattttagaaaagtctcacggtccccaaaaaagcaatcctgtgcccattagcaatcactcctccttcccctccaactcctggcaaccattttctgtgactatgaatttgtaatctacttgctgtgtctatgactttgcctgttctgggtatttcgcataatggaaattatgtaatttccatgtggtcttttatgactagcttctttcacttagcataatgttctcaaggttcatccatgttgttgcatgtgccagcacttcattcctttttattgctgaataatattccatcatatggatataccacatttatttatccattcatccattggtcaatggacatttgggtcgcttctgccctttggctatcataagtaatgctgctatgaacattcatgtcaatggttntatgtgtggacatatgt

SEQ ID NO: 52329 - DNA, 614 bp, Homo sapiens
cccccctcgaaagtcttctagaattaattaacgcgggagtactattagtcagtggcaaattctgaaatgggtgaattctgaattgacttttaaaagactgtcagatgattggggtgctctgtagaggatttactttctgggtctcagcacatcacctgtttaagaaaagcaatttatttgcgaaggattcagacaatctttcctctggatgtgtgctttgaacaaattataattcagtgtcgaatagaaccagagctgaagcttatctgacatactgttatagcatcactaatctttatagatcgaggagaaaataaagagtagtttgtaatttgcagggatgatctagggagcaatggcatggtatgacctttaacaaattacttatgtgattggttagtatgaagttgagaagggggaccaaaagaccgaaggcattatgtcccaaactagcctcatcccaagaatcacaagggatgagagatgacagctcatattttaaggtcttttcccaggaatgatgacttactgttctggagtagagacttagtttggaaatctctggtcaaacagtaagtaaaacaaataagcatttccaaaattagttctttaat

SEQ ID NO: 52330 - DNA, 421 bp, Homo sapiens
tgggtacccgggccccccctcgaggatcttctagaattaattaacgcgggtaatatatgatttatatgaatacatcattatatacaattataaataatataaatatatactttgagtatattgatatgacatatacatatatatagtatttatccattttccttttggaaaggcaaatgatatgggactagaaaggaaattgccacggtgccagtgtttctgcatggtcctgcttactgcctgctttttctccgcccccagtttctttggttgaggctcattttcaaaaaaatttgtcttcggaaggctgaggcaggagaatcgctggaaccggcgagtcagaggttacagtgagccgagatcacaccactacactccagcctgggtgagaagagcgaaacttcatctcaaaaaaaaaaaa

SEQ ID NO: 52331 - DNA, 340 bp, Homo sapiens
  misc_feature 33: n = A,T,C or G
ggtaccgggcccccccctcggggtacttctagnattaattaacgcgggggtcttaatttgttaaaatgaaacaaaatggtcctttctgaacttttaatttagaataacaacgcatccaggaccctttgggttacttaaaaagttatcattacttttagtttgactgactgagatattaaactcaatattgaattttgaatttgaagttaaaattattatttgtattttagaagaaaatgttaaaatgttgtagcacttttcatgactgaagtactaaagacagctaagtgagagtgggatcttagtatatcgtttagaaataaaatttgttgtcagctca

SEQ ID NO: 52332 - DNA, 595 bp, Homo sapiens
ccccccttcgaaagtcttctagaattaattaacgcgggcaggtaatagaggctatgaagattaataaggcagaatccctgtcctgaagaatttacagcctcatgaacaaagtaggcataagagtctaatttcctattctgctgtgataattgagtagtattggattattgctaagctggcatgctcccatccccaaatcaacattgtttcatggtataagaaaacctctctgttaagttattgtgatttcattttgcacattaatttagataaagaaacagaatttcataaagattatattacataaagaaacagaatttcataaagatgatattacattcctttaaaaccgtacagctagtaagagttagaaccaagactcaatctcaaatatttgtttagttacaacatatatccatgttatttgtctctatattaatataagcatttttatgtacaggaaggcactgtaatgcaggggtttataattcactaactatactttctaaatttttaaatgtcttttcttgagaaaaagaaatgacttcataaagtaattacacaaagttacctagttgttctccagctccactga

SEQ ID NO: 52333 - DNA, 501 bp, Homo sapiens
  misc_feature 428: n = A,T,C or G
ccgggccccccctcggaatacttctagaattaattaacgcggggtagcctctggttgttgaaagagttaattgtatttatcactagacatagaaaagatccttatccttcatacttatggaaaaattccctcatggaaaacaataattagcaaaatagaataatgtttccctgaccttccagttaaattgaaatgttgatatttttaatcaaaaagacattaagttcccacaaaccctaagggcttacactttaaaatgttgttacttacagtgtatatactgtgtatatatttattttcctctacaaatcttctcttaagaaagctggaaagggtcttggagtaatacaaagaacttttggaaggcgtactagctggcatctgtgtctaagccctcgtcaaccaaacacttcagcctagaatgattntaaatttgagtctggagtgggcttttctttttttttaatttaagggcacattaccaacttaatataatggccc

SEQ ID NO: 52334 - DNA, 620 bp, Homo sapiens
cgggccccccctcgaaagtcttctagaattaattaacgcgggctatgtcatgaattagaaagtctaattgtcatgaataattccataaatttctgatagtcttccaatatgacatatgaaagaatactatttctcttaaaaataacactgaggtgaagcccatctttgtgcaatgataaaatttcattgtaagcatgcaaattcaacccatccagaatatctacttagaatttttacatcctctcttcacattctcaaaatattaatagtaagtatctgttatgatttactattagttaattttgcaacactttgaggtcagtttagagatggtaacttagtccaatattttatacaactccatacatacgcatcataacttaaataattgtcaggttatcaagtttatagcataggaatttgattacttttattcaaaaaaacacatcaataaatatgaatagattgtctatgaattatataatcacttacttaatgtgtttagccaatagttggtgaaacctttattatattcaagtgctatgtaatcagatagaaagaaagaacatatatgatcattatgaaatacatattctagagaaagatacattaattataag

SEQ ID NO: 52335 - DNA, 605 bp, Homo sapiens
ccccccttcgaaagtcttctagaattaattaacgcggggagttgggatggttaatgggcataaaaaatggaaaggataagtaagatctagtacgtgatagcacaacaaggtgactgtagtcaatgagaatataattatacattttaaaataactaaaaatgtacaattaggtcgtaacacacaaaaaatgtgtgaggtaatggatacccattttactctgatgtgatgattacatatggtatgcctgtatcaaaatatctcatatgccccataaatatatatacctactagttatccacaaaaattaaaaattaaaaaaatttagaaaaatttttaaaagacatggttaggtatgaatcagagtggaaaatgttaatggtaataacagtagttaacaccattatagtaattatagaactagcagtattctttgtcactgtcatcacagtagtagactgagtgcttgctgtgcactggtctccactctaagtgcattacatcgatgagcttattaattcccacacgacaagcttgccagagtgacacaggtccccaagccagagtctgtggattcaaatcctggtcccagcacttacaacctatat

SEQ ID NO: 52336 - DNA, 622 bp, Homo sapiens
  misc_feature 27: n = A,T,C or G
cgggccccccctcgaaagtcttctagnattaattaacgcgggatccatatgtgattcttaaaaacacaatgattctcagttaactaggaaggaaaaattcctcaagctgatacagtctatctattaaaaaaaaccctgcaagctcacctcacatttaatggggaaaaaagtcaatattttaccccttaaaattagggacaacgcaaggatgttcactcctaccattcttattcaggatcacactggaaattaaagtcagtaaactaatgcaagaaaaagatatagaaggcatacagattggaaaagaagaaataaaactgtccttattcatagacaacatgattacctacatagaaaatctcaagggatccataaaaataactcctaaaactagtaagtaagttcagcaaggttgcaggatacaaaatcaaccacaacatcaattatctttctccatatcagaaatcagcatttggaaaccagaattttaaaactaatagttaaaacgactctaaaaatgtaatgcttaggtataaatctaacaaaacacatacagcacctgctgctgaaaactataaaatactgatgaaagaaatcagtgaagacataaataaatgaaaag

SEQ ID NO: 52337 - DNA, 412 bp, Homo sapiens
cgggccccccctcggaagtcttctagaattaattaacgcgggccttatttttactaaaaaatagatttttcagttttccattattaataaattatttcttttttaattgaaaatattttcttggccaggcgcagttgctcacgcctgtaatcccgcactttgggaggccgaggtgggcggatcacctgaggtcgggagttcgagaccagcctggccaacatggagaaaccctgtctctactaaaaatacaaaattagctgggtgtgttggcacgcgactgtaatcccaggtacttctgaggcaggagaatcacttgaaccagggagtcggaggttgcagtgagccgagatcgcgccattgtactccatcctgggcaacaagagcaaaactccgtctcaaaaaaaaaaaaaaa

SEQ ID NO: 52338 - DNA, 255 bp, Homo sapiens
  misc_feature 33: n = A,T,C or G
tgggtacccgggcccccctcggggtacttctgnattaattaacgcgggggaaaaaaaaaaaaaaaaaaaaaaaaaaaaaaaaaaaaaaaaaaaaaaaaaaaaaaaaaaaaaaaaaaaaaaaaaaaaaaaaaagaaaaaaaaaattaaacctatagatgggtggaatgccgcgccgctcactggctctttcttttttcgcctttttgtctgggttggcccccccggttgcggggttttttacgggggggggggggg

SEQ ID NO: 52339 - DNA, 583 bp, Homo sapiens
cccccttcgaaatacttctagaattaattaacgcgggtaactgagttttggatgatttctgattttgaaaaacataaaataaatttacaattagaattattacatttacttttcagtgctcagtaaagtcttcgatggtattagtgctataaaacattttactttatgctataaattagcataatcttattaattttcatctgtctcctaagaaatgccagatttacaaaaacattcaaaccaaaactctgtagcctgtagacttctagtagtctacctgtcagttctgattaatttgagtaatccagttatttcactgacctactttttcaatgactactaacttttctaagcaaaaatcaaaggtttattttttcttgatggtgtttttttttgcctaggattattaataattcagtcaacagatttgtaaagctaacttttatttctggaatttttttatattcatcataaaatagtgaattgtccatatttttctatcattgagacacattggtcagatctaatatatattccatattatttccatttaatttatacctccaaaaaaaaaaaaaaagcg

SEQ ID NO: 52340 - DNA, 262 bp, Homo sapiens
  misc_feature 23, 47: n = A,T,C or G
ccccccctcgaaagtcttctagnattaattaacgcggggcattgtgngaaataacatacaaaatgcttagactttcataaagaaaaaagaaatagaacttatgcatcaaaagagaagatagtcaaacagttccctctactggaaggtttaataggaagctggacatgccatattctttcatactgtgattcacagagaagtcagagagcattgtggaaataacatacaaaatgcttagactttcataaaaaaaaaaaaaaaa

SEQ ID NO: 52341 - DNA, 500 bp, Homo sapiens
  misc_feature 17, 477, 481, 482: n = A,T,C or G
ccgggccccccctcggnagtcttctagaattaattaacgcggggtcccacttccatttttttgtatattcttcttatttacactaagttgcttgtttcttttgtgtccagatgcctatagttcatcttctccaagaaagattcgaagcaagttttcctttctatttcgtgttacgtcttccttctcttgtccttttgttctgtcatgcttagactaggcagtgagctggagggaaggaactgactagtttgcataactagaagtattctggatattctataaaaaaataagccaatgaaaagttgtaggttttgactaaaggtgtgaattggagaagaagaatgtggacgatataccaaataaggaaattgtaaattcaaggaaaagaagagacagatgtcgaaaatggtagataagttttattaactagagtgaaggtcatagtagcagtataatgaggagttagtgaaagtctanaatnnattgcattcatgatctgg

SEQ ID NO: 52342 - DNA, 551 bp, Homo sapiens
ccccctgcgaaatacttctagaattaattaacgcgggtcctgtattttacttaatataatgccctcaaggttcatcaatattgcctcaaatgataggattttttagattttatttcatattcatgataagctaaatagtattccattgtgtatatataccatatattttttatccatccatttgctgatagacacatatgttgattttatatcttggctattgtgaataatgctgcaatgaacatggaaggagatatatctttattacatattagaaatgctgaccgccatctatttatatatgtgttattcttttggttagtagttccttttttgaaaatttttgtgccaaagataagacatattcctgaaacgatttacactccagtatttgttctattgctcttacagcatgcattttatctgtatgtctaatctataacattaatttcatgtagcatcatattttaaattactgtctttttctaaggaactaaacattagaatcacaactgctcttcttccataatgtagcttgctatgaatgcaac

SEQ ID NO: 52343 - DNA, 625 bp, Homo sapiens
  misc_feature 12: n = A,T,C or G
cgggcccccccntcgaggtacttctagaattaattaacgcgggtccctgtgtggttccaagctgtagttagtcaacagagcaatttgcctgggaactggaaggcagagataaagctgcagccactgctctctgaaatcttcatgtttggatgtgggtctggcttgaccttgctgtcctccagggggagctcttcttgactgttgacctgattgtcaacataatcggcatgtctcctggcagatgcttggcagtggacctgaaaagcagcagccacatagagacacagcttctcttagctttcccacacacttccctgtgcagtcccatttcagggactggaggtgcttgtttctcagattttctggttaataacttctgattcaccatctctcccacatttcagacaattaacttcccagcttctcccatgactgggaaggtctaatttctatgagaaataatttattctgagaccttgactaatacagctatctttaacaatagatgagtgacccctactttaattgtctttgctccacttgcttgtaagtttctggtgggccaggactcccttgtttcttttgaaagctctagaccttcataataatacccacttaataaata

SEQ ID NO: 52344 - DNA, 488 bp, Homo sapiens
  misc_feature 31, 311: n = A,T,C or G
taccggggccccccctcggggtacttctagnattaattaacgcgggacattatatgatataatggattacatgatacaatattatgtggatataaagcaggaacttaataaattttaaaatatatttaatagttcactaaaacctgatatcagcacaagacatttatgaccactgaagtcaattgcagtcttagagttacgtcacccaggaattctgtttttgtatcctttatcaaaggatgatgtggtaagacaataggaagctacgttcacattctgtgcattcttaatccctaatcgtctttactttnttttttttttttttttttttgagacagagtttcgctcttattgcccaggctggagtgcaatggcacaatctcggctcaccacaacctccacctcccaagttcaagcgattctcctgcctcagcctcccagctagctgggattacaggcgggattacaggcaggtgccatcacacccg

SEQ ID NO: 52345 - DNA, 540 bp, Homo sapiens
cgggccccccctcgaaagtcttctagaattaattaacgcgggtaggggaaagtgcacatcatacttctttctttttttctctgaagcacccagcactatgccttgatccgtaaatatttaatatatattttattgaattagcaccagggtaagtgtctttcatggctttctatcctgaattactgaattgttttttgtttacctatatctagattaatggaaatctaaagtataataaatattttcctcatggtttttatcaccactcacctaacttagtttatggatgagtttatggttaaaatgctgtaacttaggcagaagtaacgtcaatgggactcattttaaaacatgttttaaaataactgtcgatctaaaagttttgaaagatgcaggctaggcgaacttggttttcttccctagaaccaggaatcaattttcatcttacttaaatgaaagacaccataggtgaactctctgtcttctaaggcctcttccaaacttcagaggctataattgtctagcaaaaaaaaaaaaaaa

SEQ ID NO: 52346 - DNA, 439 bp, Homo sapiens
attaatgaccgcgggtcctaaccataattatgtttaaacctcacctatctgagaggctgatattatgctttggctacccagtgatccaggacggtcacagtcaaagagaaagggggctaaccctactaaacttctttatggttaagcaaatggtccacctccaggggatgttcacatgcccgaccttaaaaaaagtccacccttagatcaaggtttagtgtccctggattaccaatggtacaggaaagggtttcctttttctgtcccataaggggctggtgttgatcttcttaaacccccaaattttttttccaagactggattacactcaccacctaaggtaatgacctagctgaggtaacaaagcatagtgatctcttttgccctttgaattcttatgaactccactcattcacaatagtctggcttgcaaagcttt

SEQ ID NO: 52347 - DNA, 545 bp, Homo sapiens
  misc_feature 531: n = A,T,C or G
cgggccccccctcggaagtcttctagaattaattaacgcgggggagatcatttcccctgcccttaagaaaggttggaacatgacaaaccttgaatcagtcttggaaagaatcatgtaattacaggaaagtgtgagaattccaggccttacctcagacagataaggactagctatacatgaaacgcagactgtggctaactttaattctttcccaaatcagattttcatgagacattttcagttctttcagtgaggcaaatgaatttctttaatattttacatatccattgttaaaattcaatgcaaaaacaactctaatgtcaaatataaattattttgttgttaagtttaattttgaataatcttcttctcttttctttggcattagaacaaattgcaattactgaagtccaaagaattataaagcactatttaagcatttacattagatatcaaaattgaagaatacaaagactagtttattaatggagtaaagtttctgagataagacggagccagttttaaaggttntaggaaggaagtac

SEQ ID NO: 52348 - DNA, 598 bp, Homo sapiens
  misc_feature 10, 40: n = A,T,C or G
cccccctcgngggtacttctagaattaattaacgcggggngagaaagaaagatcgaggtcacgtaacgacgcggcatttttcttggacggtttcttagatgataatttataatgcacatatcaacgccccccctccaccccccgcaaaaaggcttagattcttggtaacctttgccagagtgcattttccagactcttcttcaaaaataatactagatacgaaaacaaatgctagtgacatgtgactctccacagtattcttggtctcatccaggaagcaaaacttctctcattagtcctaaacagtctgaataagaaaatggaaaaacagaatccaaacagtccaaaccatatggctcaaagataagacccacctcagtattcaaccatcaagttttctgacgtttgtttgttttctacggtacccactcaaagttctcctacattgtaaacgtagactcctgggagctacaaaaaaaaaattagccgggtgtggtggcacacacctgtagtcccagctagaagggaggctaaggtgggagaatcactggagcccaggaggtgaggctacagtgagccgtcatcacaccactgcact

SEQ ID NO: 52349 - DNA, 351 bp, Homo sapiens
  misc_feature 16: n = A,T,C or G
ccgggccccccctcgnaggtacttctagaattaattaacgcgggtcactattttgcccaggttgtcttgaactccttgtctcaagcgattcacctgcttcagcctcccaaagtactggaattacaggtgtgagccaccatgcccagcccaatatggagtttcttacctgatgccccaatcttctttctaacatgaactctgttttacaattaaattaaaatgtgaataaatctgtatttttaccccacctggaaaatataggccttcaatttttcagctccttctactacaacatcacttaaaaaatattcacacaattctttccctagaagccacaaaaaaaaaaaaaaa

SEQ ID NO: 52350 - DNA, 616 bp, Homo sapiens
cccccctcgagagtcttctagaattaattaacgcgggggcgcaaattcaagtttaggtaaggttcccagccttttcaaattaagtcaccttcttaccagataaaaggattcccaaggcccattagtttctggctaggcacataaaagggtttcttcagctttgttggcctcttgcttccattaataaaacccttgccagataagaaaaacatgacctgtgtttccttgcacattcattcttaagagtaagatcaggccgggcatggcagctcacgcctgtaatcccagcacttttggaggccgaggcaggcagatcacaaatcaaggatttgagatcagcctgaccaacatggcgaaaccccgtctctacaaaaaaatacaaaaattagccaggcgtggtggtgcgcgcctgtaatcccagcaactcgggaggccgaggccggagaatcacttgaaccagggagacagaggttgcagtgagccgagatcacgccattgcgctccagcctgggcaacagagtgagactccatcccaaaaaaaaaagagtaagatcaaaggacacacaagtttatcctactttttcttttcttcttataatttctcttatctgtgtat

SEQ ID NO: 52351 - DNA, 328 bp, Homo sapiens
  misc_feature 36, 64: n = A,T,C or G
tgggtacccgggccccccctcggaaatacttctagnattaattaacgcggggtgtgggacgggnggaagaagaccacaaatagattctaatctctgcagggttatcagataccagtactcttccacacttctgttagcacagaatgttgtttgaatcaacatcagctatcttaaggcactagaaacataatataatgataatagctttccctcattcttctaattgaagttataatgtgtaattttcatatgtagtaaattttcttataaataacattcaggatgatatacttagatttcaagttcagttaagtcaatacaactgatg

SEQ ID NO: 52352 - DNA, 559 bp, Homo sapiens
taattaacgcgggcaaaaatatcaaaactatagcaggaggtgttccaaaagaatttgggggactgactctataaagagtataatacaggttcttaatcatcaatgacagtcaataaggagacaggagaaaacaccagtcttagcctttgttcccgacaaacagactggataacttccatcaaggtgaatctgtatattacatgctatctccacatccagaactcttgtatactgtgaataagaaaatcttagtaaaaagaatgactttcagccgggcgcagtggctcacgcctgtaatcccagcactttgggaggccgaggtggacggatcacctgaggtcaggagctcgagaccagcctggtcaacatggcaaaaccccatctctactaaaaatacaaaaaattagctgagcatggtggctcgtgcctgtagtcccagctacttgggaggctgagacataagaatcacttgaacccaggaggcggagttgcaatgagccaacatcacaccactgcactccagcctgggtgacagagtgagactccatctcagaaaaaa

SEQ ID NO: 52353 - DNA, 586 bp, Homo sapiens
ggtaccgggcccccccctcggaagtcttctagaattaaagcagtggtaacaacgcagagtacttattaacgcgggttctcagactgttgatgagaaatttattaaaagcatgtgagatggcccctctccttttctataggttaggagtcagaattgggatcttttgaaaatttatttttgcctattaaaaatgctaaagaagaagttcctgcaagatctatgtagtaaggcatattagtgagcatttgtgatggtacattgtctcagctaaggcaagataaacagacaagctgtgaaaggagaatgcaaattagtaattaccaccatttgtcctgattctgcaggatacaggctagggacagtggaaagatacatgaaaaacataagacaaaatccttgtcattatggtatttataatccagctgagtagactaaatctactgtgtgttcactgtatgtgtcatataccacaagagaaattctgctcttatttgggcatttcatacttgtcatctccttggtgcaattctagttccatgattgtatgaaacatctataattaggaaattttaaataaccaaaaagt

SEQ ID NO: 52354 - DNA, 599 bp, Homo sapiens
cttctagaattaattaacgcggggctgccatcatctggttaactaggaaaattgaattaagtgttttaatttcgcatttactttctcaaaatctgctgaatgacataaaccttatatgtaccaagacatactttgcttttagaaaaaaatattttttaccatctctaatccaaaccaatgatctagagtggttacatagttcagtggcataaaatgagaggtcagtgggccccaaaatactcttttactgagaaaaaaaatgtaggctaaaaagtaaaagtatctccttaaatttgtgtttttaaataaatcattcttcatattggaaagtagtaatgctagcttctactgataaacaataataatcacaaaactttaaaatgaaattaatatctatcatggaaatgatttaaaagataaaggtaggcattcaccaaatatggtatttaatcctggtatggtatttgctgtggtatttaatacttcttttgatcatgaaaccatggctaccatggagatatggtttggatctgtgtccccacccaaatctggacaaggcatggtgggtcacacctgtaatttcagccctttgggaggca

SEQ ID NO: 52355 - DNA, 272 bp, Homo sapiens
ccgggccccccctcggaagtcttctagaattaattaacgcgggtatcctctgattattctaaatgtcaaaaaacatggctgtaaatttgagtacaatctctcttttctgttatacttacatcaatccagtcaattcataagctactttcccctatcacagccaatcctaagctttagggaaacgggcagagttactaaagtcctaactcctctaactgtaaatgccaactcctttttctctgcctgagtggctgttgctctgtcagtgatta

SEQ ID NO: 52356 - DNA, 618 bp, Homo sapiens
cccccctcgagagtcttctagaattaattaacgcgggtcgtatttagaacaaacattcaagtctatttgttataaacttttgagaattctaactctatctgattcttcttcccccattctcctcccactgtctggaggtgactgataatattgtctacaaaccgttttcaagatctttaaataataaaattgtaatatactgcttttctgtttgagcagaaatgcttctgtgattaacgatgttttggtagtagggaaaaataacagccctgtaactagttctgtcttatgtaatctatctgaggttatatagtcagagagttttagataatacacaatatttaaatgatatcttctccctaatttgtactgatcaagaggaaagttgtatccaattccatgtttgcttgaagaatgcacctatgtagaggtacagagcaatttttcatatgtctaacttcctgcttggggtcaatggtagatttatttttagctcaaatgacttggaagttatatgtaaaaaaagtgttatcatttcatatacacatcagctcattgatacctgtgcacatatgagttaggaacaatttgtattttgacttgatttgctttgccttt

SEQ ID NO: 52357 - DNA, 333 bp, Homo sapiens
ccccccctcggaagtcttctagaattaattaacgcgggggcgcaatgagtgaagcactcgtcgatggcgcttagtccaagagggcaccataacactcatgaatcctgacccatattaccgtatgtatccagtaggcaaaaaactgatatgacgaacaagatctcttatctgtacattaagacaaaatccttgttatagagtattaacttttgccttaccttccaacctatttcatcactgccctgttgaaagggaagagtatctattcacggtcttgctcttaaatggactttctatctcaagtcatggcctatacggcagtggctctacatc

SEQ ID NO: 52358 - DNA, 605 bp, Homo sapiens
  misc_feature 23: n = A,T,C or G
cttctagaattaattaatatttntctaaaatattcctagaaaatcaacttttttatagaaaatgtttatagtaaaacattttctgtaaatccttgtggtcaaggagttgcagaaacatgatcgacaagatgaaagatttttcagtgaggctacccacatccctgtagtatgcatgactgatagatcctagatataacactgtttattgcattttacagttgttttctgattaccctactatgctattttgaggatattgagaaattgattttaaatataggggaaggcaaaagacccagaatattcaaaacagtgttgaaaaagaacaaagtcagagcacttggcacaagttgacttcaaaacttactacaaagctacagtaatcaagacagtgtggtaatggtaaaagaattgacacatatatcaagggcacaaaatagagagcccagaaatattcataaaatctctagtcttttttctgtgtcatgaagctccctttagactaaatcactaattggtaagaatttcattgttcttagctacattcatccttgcatctaaaattaaaattatttctataaaattatactagttttgtctctcac

SEQ ID NO: 52359 - DNA, 616 bp, Homo sapiens
cgggcccccccctcggggtacttctagaattaattaacgcgggttgctaaataaaatatattatctatgtgtagagatatatctatatagatataggcgtgtacaaagactgatttaaacatttgtcttttgcagatttcaaacttaagaattccaaacatcattaacccctaatatgcaacatctttaatatttcaacttacaataacttttaaaaagagataaatgagtaattaaaaacaaatttctaaaaatggacagaactataagtttaaaactataacccttttgaaaatgacttctccagacatttggaattcccataaaataacaactctaatacggctagggtgttcaaattattaatcagcaattcaatgtatgctaaactgttaattgaatttttttaaagaaaatagattgtaaagtttttatcagttttatcacacatctgtttaaacaaacagcttttgaaagaatttgtatggtggagattgagataagtttgtgttttttcttttttaattttttcaaggctaacaggagtcccttctgcccctgaggcagaaggaagcaaaatgttctgtgatccctagtggtttcactgctatgacac

SEQ ID NO: 52360 - DNA, 324 bp, Homo sapiens
  misc_feature 12: n = A,T,C or G
gccccccctcgngggtacttctagaattaattaacgggggtaagagtagggagaccaaaaaagtttaggcaatggagtaggatcttaaagagtcagtctgatcagggcactaagatagaaaatccgcctcttagggaaatccaagtatttcagaacgaagacaacatctccacagctactctgcttaggagaaaaaacaccaaccctccagcctccctgatgtggtaaagacagtccatgagaagctttccacggtcactggacatgcaaaagggaaataaaaatgttgcccgaggagcaacagccaccatcctctcgcaatct

SEQ ID NO: 52361 - DNA, 593 bp, Homo sapiens
cccccctcgagaagtcttctagaattaattaacgcggggtggggagggatagcattaggagatatacctaatgtaaatgacgagttaatgggtgcagcacaccaacatggcacatgtatacatatgtaactaacctgcacgttgtgcacatgtaccctgaaacttaaagtataataaaaaaaaaatataaaaaaatctggaatataacaagattgaataaagagagataatacattgctactggataggaaataccatataaatacaccaaattttctttaataaatctaaaaattttatagaattccaataaaaataacaatgggaacttttggaggaaactaatacaatggttgtaaagttgattcaaaagaataaacatggcagaagttccaataaatttttttaaaaagaagcgaggcttttttctatattaaaatatattataaaactagagtgtttacacactttaatagtgatgcaagaatagatactcaaaagagcaaagaaacttcaggaacagaactaaatatgtaatgaaatactatgtaattattggctaattagaatcaatggccaaaaaaaaaaaaaaa

SEQ ID NO: 52362 - DNA, 596 bp, Homo sapiens
ccccccttcgaaagtcttctagaattaattaacgcgggtctgtttctttccttgatgtacctaccacagtatactgtcaacacaggaaccagtgatatttgtaacatgtaaggcatacatggtcaattaatggtcagccaagtcactgagccaacgcagtaaggaaaaagaaagtctttttaacatatggatatatatatgggataaaaatcctcaatcttttcctaacttaatatacaaaattaatttgagacagatcataaacctaaatataaaagctaatactataaagcttctagaagaaaacggagaagaatagctttaaaagcttgtgaaaattgattgaacagggcacaagtactactgaacagaataaaaatataaacttcatcaaaagcagaaatttctgctctttaacagactcctttaagaaaatgtaataggcaaaaactacaaactgggaaaaagtacttgtactacatacacctgaaaacagaacttcttatgagaatatataaagaacttccacaaatcaacaatacaaagactggctactcatttacaaaatggacaaaacatttgaacaggtgcatcac

SEQ ID NO: 52363 - DNA, 565 bp, Homo sapiens
ccccctcggaagtcttctagaattaattaacgcgggtccaaggaaattattccatgctttcatccatattttctgtcttactattccatgttaaaattcttcatattgtaatatttcattaaacacagttaacggagaattttaaaacatgcctatataatcacatcagccttgctattcaataaaattcagctacttgcaatcagaaatgacaaaggtgacattaaaaccaatcccacagaaatacaaaagaacctcagagactattaaaaacatctctttgcacacaaattagaaaattgataaattcttagaaacacacaacctcccaagattgtactaggaagacagtaaaaacatgaacagaccaataacgagttctcaaactgaaccagtaataaaaacctaccaattaaaaaaagtcctggtgtggtggcgcatgcccatagtcctagctacttaagaggctgaggtgggaggttggctcgagcctaaaggcagagattgcagtgggccaagataacgccactgcactccaacctgggttacagaaccagaccccgtc

SEQ ID NO: 52364 - DNA, 621 bp, Homo sapiens
  misc_feature 515, 558: n = A,T,C or G
gccccccctcggggtacttctagaattaattaacgcgggtatgcaaccattaaatcaaccattaaatatgttggtatatgcaaatgtgcatataccaacatattatatagttgagtaagaaaagctagtttcaaatgagtatgttaatatcatctgactcttgcaaaaggaaaaccatacatttgaatgtacatatatgcatatgtttatatgtgcatagaaaaagctatgaggggatatacctcaagttgctaaaagtggctccacctggagagggacatggaaaggagttggctaaaaactgaggtttgttatggtatacacccctgcacagtttgattttttaaaaacaatgattataaattacttttattatttataaaaatattatttaaaattttggtactaaaaacagagctccatcaacaggtcaatggataaagaaaatgtggtacatatatacaaccgagtactattcgtcataaaaaaatgagaccctgtcatttttgcaacanaatggatggaactggaaattattatattaagtgaaataggcangcacagaaaggcaacattgcatgttctcatttaatctgtggaatctaaaaatcaaaacaattg

SEQ ID NO: 52365 - DNA, 539 bp, Homo sapiens
cccccctcgagaagtcttctagaattaattaacgcgggtcatgggaatagccttcagggtccaggatagacaaaaaaaaaaaaaagagaagtcactctaggccctttaaatggaggcaatttaatataaggatttgagaacacaggtgatgagtgaatagagaaggcaaacaggagacagatagaaaaccaggcatatcagcatatgggagagctgctgctaccacccatagccctggagagataaaagggatgaaatggtgttatcagaaactggggctgtccagcaagaagtaaaattatggaaaaggctgagaaatctagacaaccagactattttgaaattattctacaattctgttttctttgcagtgggggggtggggtgtggaaatctggtaccttgaattcattagggcagtcatgagcttacagtgacttccacggggtgagtcagggtggcaacagccagtcaaactctctaaggggtctgatttgggaatagccttcagggtccaggatagacaaaaaaaaaaaaaaa

SEQ ID NO: 52366 - DNA, 276 bp, Homo sapiens
cgggcccccccctcggggtacttctagaattaattaacgcgggaagtcccagaagtattgattgcatctttggtggtgggaaaggggtggcccctcactggcccaggtgaacatatgatgatcagatgatcaagtgtctcttcatcatctctcagcccacaaatgtgtttttgttccagggaagacacaggatctgcttctctttcagcaaccatttctatatccttccctgtcactagttaatgtcttcatattctcacccaaaaaaaaaaaaaa

SEQ ID NO: 52367 - DNA, 464 bp, Homo sapiens
cccccctcgagagtcttctagaattaattaacgcgggactcagaacatctagaaggcagaaaaaatacaatcagattatctctaactaaacaaaaagaataaaaaagataagccaaatattagtgaagctatttctcacactccctggtctcacttctgtgaaaggaatgccttccaggtaaattttgccaaagagaagaaagaacaagcaccaagacttatctgtagtcactgccagcaagaaaaattccactgtgagtatgaaattaaagaaatgcggttgttcagatgactaaacatagaaaggaattaaaagagggcacagttctttgtgctaagctttgagaggcatcattgctggagaagaaaaaggtaaaataaaatgagagacttttttaacattcagtaactacggcaatggaagaaaaagtgggaaattgagggctctccaaaaaaaaaaaaaa

SEQ ID NO: 52368 - DNA, 556 bp, Homo sapiens
attaattaacgcgggtatgttttgtctgtactttgcactcaaattcagtcatatagatttactagtgtatcagcctttaggtctttgaaaaataacattgaatgtacatcctgcatttcctaaagcattttatggtgaacaataacttgagtgcaaaaatgagaagagattttttttaatttcaaagtaaaaccctatgcatcacctaattctattgaaaacgacgctcatggcaaatttcacttatcacttgaaacatatttctgcccttggataccagaagcaaatttaaaaacatgctgttgctctgctatggcggagctgcaatgtgttatgtttaaatagctcagcattcagatttagcttgtttcaagtacaatatagaatcaatacaatcgtagatttcatggcaaaatgcattagtaattgccactggaattgctgtactgaaatagcattaataggatagccaaataactttagaatatattttttcaatgaagacttgttttctgcaatggtcaacttatgaaatttaaaacacatgacctaaata

SEQ ID NO: 52369 - DNA, 434 bp, Homo sapiens
  misc_feature 28: n = A,T,C or G
cgggcccccccctcgaaagtcttctagnattaattaacgcgggtatcatatcaaattcatgattgtcaattatgtctaacagatcatctcacatctcaacactttctcctcctttagcaaccgactgctttttgttttagatgacgactactgcttcattaggaggtgctggaacatcaaaataggtttggttatatctgccaaaaaatagctttgtgacctctgaaagcactgttttatcaattaaatgagggcagcacatcttccagaggaaaacaaattctatgactctacaataaagacagaaattaattttaggtttactccaatgttgattgttatttcttctatacctattgtacattaagaaggcctgctaaggatagccagttgcagaaacaataaggtaaaaaaggcattaccaaaaaaaaaaa

SEQ ID NO: 52370 - DNA, 362 bp, Homo sapiens
cccccccctcgtgcgtacttctagaattaattaccgcgggtctactaaagagccttgtgtcattacagattattgataaaatagatgaattcatttttggggaatagttgaactttaatatcatctgtttcagagataaagcttagccatgccaagaaatatccttcccttttgagaaaattttgaattttgccattatagaaactgatttttctccaaatgtgtttgaactttttgtaactctgacacttttttaggaattcattgtttttttcccaaaagtttgtgatttttaaaattgaactgtctatatatacatgtaagaacaaaaaacattttatctattatcatggtaaaatctt

SEQ ID NO: 52371 - DNA, 357 bp, Homo sapiens
  misc_feature 28: n = A,T,C or G
cgggcccccccctcggaatacttctagnaattaattaacgcgggaacgtacattctttatttgaaaagaaactattaacaagctttgataagggcagaagccactgtagatataatgatgaaacatcagaagatttctattgaagatgggagcaggacagggattccaccatcatcatgttagggatttttgtttcatattgttttcagaagcatattccaaatgaattagaaattcaaatattctgtaatcccagtactttgggaggctgagacgggcagatcacctgaggtcaggggttcaagaccagactggccaatgtggtgaaaccccatctttactaaaaaaaaaaaaaaa

SEQ ID NO: 52372 - DNA, 614 bp, Homo sapiens
  misc_feature 596: n = A,T,C or G
ccccccttcggaagtcttctagaattaattaacgcgggtatctgtgtgaaaattgagagaaaggatcctttcatagctgtgcatctccctcctattaatcttatatccctcttaaaattaaaagtttaatttttatacatagtaaaagtgcaagcaagtcattcactcattttataaatattatttttacaactaataccttgtttaaaaatatagagaagactttgacaacaactcttagttgtccagttatctttggtattacttgagctggcatcacttgcatgttaagcatggataaaattgacgactcaaaataattgcaatagtcttccgtatgttctcctaatgagcttgcttggttttcttctaactttaatatatctccttaggaaatgctacagaacagtttgaaccaaataaaatcagaaatttcttccaaaaaggaaaataaaatatttcttggctttacatttttgataactatgcttttcattatgcagcctaggaaagcctaagaaatagccttttatttgtatactttgtaaaggaatcactgcatttatttggaattgctatctggataatattgattntgtttaatttactccttt

SEQ ID NO: 52373 - DNA, 599 bp, Homo sapiens
  misc_feature 540: n = A,T,C or G
cccccctcggaagtcttctagaattaattaacgcggggatttaccagaaatttatctggacaaccatattatttagaggtctctacaacagtcttctctgacaggtgtatggtgacagtgaaaaattactttatcatttgattccttgaaaaataaaatacaaattaacttctagcttactcagtgtatacaacagaagaaaatgtaaatgctacttgctttattatcctagaacactctaaaatatattgagttttgaggtaaaaattgaaaggtggatagttagaatgtgtatggtgataaggaaactatttgtctgagctatgaatagaatgaccactagttctgatttacccaagaagttgtctgcttatacctaaagtcttggcataattattaatgaagaatatttttatctcccaaatttcccaattttgaccataaattgtatggttgctatgatagtaaattatatgtgttaacttggttaggctattgcatctctatctgcatctctatatctgaatggtatattggttntgtaactctggagaaagttgacacgtttaccacaggtataaatagttagataataataa

SEQ ID NO: 52374 - DNA, 587 bp, Homo sapiens
  misc_feature 23, 34: n = A,T,C or G
tgggtaccgggccctccctcggngtacttctagnattaattaacgcgggatctttaagtttacataatgctgtagtttgctgtgaatttgaatgccttataaactaaagtattattggcttaacaatcaaatctaaagaataaggagaagttgctgagcaaatattaaaatggatattcaacgcaagttgtggcatatgtttctacaaacagctagagtttatattaacattcgccaaaaagattgaaggacataaagtattgggaaagttcactaacttaattcatttcttttactaatgaaaggttattatgtcttcaaatgggatttagagattattaatagatatagcaatgggaatgagcttatgataagtgagatgattcaagaaaaaatctctatatatttcttgccaagaaaaaatacatttgtctttttcttcatgtgctacttttaattactttaagttctttctgaacatacatgtattattaataattcctattgaaatagtatgggaagggtttatttttggtcactgttagtgtgtaagatatttcagcaatggaaagatgtgcattatttaa

SEQ ID NO: 52375 - DNA, 428 bp, Homo sapiens
  misc_feature 395: n = A,T,C or G
gcggggaattgtctccagggcatatagattacaagattagtattcattagttttagtcacaagactctgccagttttatatattatatataaatgatataatgatatagaactgctttaagtcaatgaaatatattcagaattggattttttcaagtatagggaaagaaaattaagacacacaattaaacatgatttacagtcatttaaaagtgtttcctaactacagaaatacaacctgaatccaggttgttaaattaaaagactaggaaaacttacaattgtctttcttaatagaaggcttgaatatataaaagagtataatagataaataataaaaaatggagggtaataaatgtgtgtttgtgttaatcttcttcctgctaaccatgtctntaaatgagtgtaaatgattcctaagtgggttta

SEQ ID NO: 52376 - DNA, 500 bp, Homo sapiens
  misc_feature 34: n = A,T,C or G
gggtaccgcggccccccctcggagtacttctagnattaattaaccgggcagtcttttttaggggtggaggtagctctggttccttttattcagcatcatatttttaagatttttttcatgtattggtgcatattagcagatcatttatttattaccgatgagtcatctttcattgtataaatatagcataatttgtcctttcacctgttaatgaacatttgggttgtttccagtttttggccattataaatatagttgctatgaacatttgtgtacaagcctttgtgtaaaaaaaaggtttcatttcacttgggtcaatgtcaaggaggagaattgctgggtcatatgttgaacacgttttatttttaagacactaccaaactgttttccaaagtggcagtaccatgttacatcctcaactgcagtgtatgagaatttcaattgctctgtcttttagctaatgcttggtattgttagtcttagccactctcatcaatgta

SEQ ID NO: 52377 - DNA, 561 bp, Homo sapiens
  misc_feature 28: n = A,T,C or G
cgggcccccccctcggaagtcttctagnaattaattaacgcgggccattttgatcatcagttcttttgacatttcttcctattatggtttctctgaatttagttttcaggtcaaatacccctgaatgtcttctaattagccattagccatcttacatgcaatgcccaaattaaccgaaatattacttcccactattttattattctaaatttaaaattatgtttagcttatacattatttattcctatcctggatttataatggtgctttagtcaacccaaaagagtatgtctttatccaatataatagaagctacatttccattaacctgcttctgctgaattgaatattttaacttagaaatgccattttacatttattatcgttgaatgttactgtttttacttcagacattgattccagcctattggtaatattttcaattaacaagtattattttatctctcatacttactctgttccatttacatcttcttcaaatttaatatgtgtatttttctttaatcattaatttcaaacaatatgattcctaacagtgaa

SEQ ID NO: 52378 - DNA, 327 bp, Homo sapiens
  misc_feature 37: n = A,T,C or G
ctggggtaccggggccccccctcggggatcttctagnattaattaacgcggggtgtgtattcacatttcacatgaagacaaatatagttgaggttgttcactttcagcttcttgaatatatcgtcttaggataccgattttctccatagaaacttgattctaaaaatccctttaaaatgttttttaaattaacttccaacgttcctgctatgcagactgaattcttcatctgattattttaggaaaagactagcctcattcataagctacgtctaaacctaaaaggggaaatacgtttctaaccagaactttaaaaaaaaaaaaaaa

SEQ ID NO: 52379 - DNA, 620 bp, Homo sapiens
  misc_feature 28, 338: n = A,T,C or G
ccgggccccccctcggggtacttctagnattaattaacgcggggtggttagtgtagctatagctaaaatactaatatagcaatgtgtgtataatattcagtacagtaaagcattttcataagaggctctccacctattatctgaaaatcctttccaatatgtcagtcattctaacaactttatcaagtaggtcataatttatttatctttacacagggagagaaatcaactttggcattagatgaggaagtctatgggagaagagcagaccagtcgttcctaattgggaacatgcaactcgttccacacaccctatctacctggccaagaaggcaatnctttttttttttttttttttttttgagacagggtctcactctgtcacccaggctaaaaaaaaaaattgtgagcaataactgtaagtgacaagagacattaacgtcacagtatccacacttagcttaatgaaacggggtggttagtgtagctatagctaaaatactaatatagcaatgtgtgtataatattcagtacagtaaagcattttcataagaggctctccacctattatctgaaaatcctttccaatatgtcagtcattctaacaactttatcaagta

SEQ ID NO: 52380 - DNA, 415 bp, Homo sapiens
  misc_feature 35: n = A,T,C or G
gggtacccgggccccccctcggagatacttctagnattaattaacgcgggggctatgttgtctttatgacagattttgggtagtgccaggttagcaagtgcaaagttattaaaattgctacagatagggatacatacttccaaccaccaactattacatgattcacttcttaggatacttttaataattctataaacaatattattgtgcccataacaatggggtaagatgggtaataatgttggaagcttttgaatggtttttatagaaatagctgtaatattttgaaacaaaagcagaaccactttgaatttcctatcctttttcactgtctttgctgaaaatagatattagagacagaaagaagtaaaagggtgaagacagaaaaacacttctacagaaaaaaaaaaaaaaa

SEQ ID NO: 52381 - DNA, 560 bp, Homo sapiens
ggtaccgggcccccccctcgaaagtcttctagaattaattaacgcgggaggatctcttgagcacaggagtttgaggctgcagtaagctatgatggaaccactgtactccagcctgggtgacagagtcagactctgtcctctgaaaaactaataacaaaaaaaaaacccctaaaaataacacatgattcaacttcaacaataagcaataaaatgaagtaagtaccttcaaagcttctgccagtatctcaggtttatgcttccatttctgtttgatgcagataagattatactcaatgaaagatgtcaagaagaaatagtcagagaaaggatatttgtacgttaaaatccaatgacttgtccatgaacagatatttacaagtatgcgtttcagaatctggtaagaaaacaaaggtaggcaaggtgggaaaagattggtgtggaagtgtgtggcactggttatcaataccacagcatttccagtgtgctgtgtcagctagaagctggtgttctcactcttcaatgtgcatcagtatcctccgggttaggggtattttgaaaaa

SEQ ID NO: 52382 - DNA, 493 bp, Homo sapiens
  misc_feature 484, 485: n = A,T,C or G
acttctagaattaattaacgcgggcaggccatcattccataactgttagtggattgcggctgctctgaaattttgcataaaaaagtgagacatgttgttaatgtaaattagcattattttagcagatagtacttaatgttttgttacatctatttctattgcctttaatttttcaaattgttgtaacaatattttagtagattttagatttcctgttagaaatgagctttagaaatcccttgttcaactgtagaaataatcctgagggaatgaaaaagctatgttaactgttttgagaaaacaattacaaatcagagctttgtattaaatgactgttttaattctagattttgagtttcaaattttaaatcaacatcatttttctcctcttagtgcttgtctaagtacacaaaataagttaatcaataatttcagatgatattaaagtcttttcaagttttggccaggtgtggtggctcatgcnnctgtatcc

SEQ ID NO: 52383 - DNA, 370 bp, Homo sapiens
  misc_feature 28, 44: n = A,T,C or G
ccgggccccccctcggggtacttctagnattaattaacgcgggnagtatgtacagtaaatgtgctatcatcctgtaaaagttatcctggctgtttttttctaattaacagaaaaatcccatcagtatgcaaacagagtttctgtccatttttaaataacaaaaataaaatatccttagtacaaacagaattaactgaccatattttatcatttcttttaaaaattaggaatctcagttgggcacggtagttcacgcctataattcaagcactttcggaagctgaggttggaggatctcttgaggccaggagttcaagaccagcctgggaaacgcagagaaaccctgtccccacaaaaaaaaaaaaaaaaa

SEQ ID NO: 52384 - DNA, 254 bp, Homo sapiens
acttctagaattaattaacgcgggggggaccagcaaatgagagtatattccaaagatgacaaccaaaatggagaccctgtggtctaaggagtccttcagttgcttcaaaagggatagatgcaggcaaaaatgttgtacagggaatctgtagcaggattcaagagactgaattctagacccagttctaactaattctgtggctagtcagttatcttttggcattacttacctcttctattaaaaaaaaaaaaaaa

SEQ ID NO: 52385 - DNA, 633 bp, Homo sapiens
  misc_feature 35: n = A,T,C or G
gggtaccgggcccccccctcggaggtacttctagnattaattaacgcgggttctatttattagcaccttagggcatggaaagaaaatattaaatactgtgaaatatttctaggtaatatcctaaagcaagacaatatctcaatatagcaaactatttttaatgtttcataaacatttaagtaaacaaacaatttcattcatgtttcattatgaaacattcatgttttgtaaacatttaaataaaaaattccagtgaccgaaagtggtttctacattggtctttacttccaaagatttatatttattatttatcccatccagagctcatcttcaggccataaagtcctacactctatctccctcgcaacctccaccatccctgagctattctgtggttcttttcccttttcccttggtccagaatcttaccatcacagtttcacgtcacagactcttccttcctctttctctctgctgtgatgaaattgctctgctgcctgagctgtgtgaatgagtttgtgagtttgagcttacctactctgcttttaccagcttcttctttttctttttcttttttgctatcttatgagcaatattagtcaggtagtatccccatggtggagcaagaccatg

SEQ ID NO: 52386 - DNA, 490 bp, Homo sapiens
  misc_feature 38: n = A,T,C or G
ctggggtaccggggccccccctcggaaatacttctagnattaattaacgcgggacagagatgtggacaatggaacgaacggacattttatacaaaagaaagactgccaaacacataggcacagtgaagccacaattattacctctttgaaactcctaccatgaccacaatatgtctttttattagctttatacacactgggtgattttcagaatattctataatcaacattttctccttcagcaccctgagaaaatagagatgttcaaatgatggctccataaatatctatggagaaaaatcacaatgcctaggatgtttcttgatgaaaaagcattctcacatttctgtcggaacagaaatactatgatatttctggcaagtaagagttcatatacaaatatggctgctgagatgtcaacaggtcagctcttcacacccaagctgttagggaagaactattcaaatctgtcacccaaaaaaaaaaaaaa

SEQ ID NO: 52387 - DNA, 250 bp, Homo sapiens
  misc_feature 41: n = A,T,C or G
aagactggggtacccgggccccccctcggggtacttctagnattaattaacgcgggtcctaaggccacacagcttgtgatgggcctatactgatccccaggtgaatccaacagcaaagcccagaccctcactccattccactgcttcctgctcattcctcaaaaggcaccccttatcacctgaggtcaggagttcgagaccagcctggccaacatggcaaaaccccatctctactaaaaaaaaaaaaaaa

SEQ ID NO: 52388 - DNA, 472 bp, Homo sapiens
gccccccctcggagtacttctataattaattaacgcgggcctgaacccaggaggtggacgttgcagtgagccaagattgcaccactgcactccaggctaggcgacaaagcaagacttctccaaaaaaaaaaaagagagagaagcttcacttttagtgactgtttagcacatagcaggttctcagccaatgttcaatgcatgaataagaatcaaagattgttttaaataaaagttaaactgaagggtggagggttcaagcaactaaagattaccaaaagcaaatgtacaacaattttaaacaaaaccaaacctttctaactacagtatatacaaactactataatctctccattgaattttttaattacgaaagaaaaaagctagatattatctatattataaagctctcacaaagaactttataagtcttttttatatgtctagtaggaaacttaccaaaaaaaaaaataaa

SEQ ID NO: 52389 - DNA, 430 bp, Homo sapiens
cggggccccccctcgaaagtcttctagaattaattaacgcgggactgtgttttaatctatgcttcttaatacaaaaattcagcagagatatttttcttagcagacattgccaaatacttttcaaattcaatcttgctattcatttaagaaatcaaggcattcctaataacagtaaaccacagcatttctgttttctagtgccggtaatatgtttaatggagggaaagattgaagatatactcttaaggccagttaaggctgggtatggtggcttatgtctgtaatcccagcactttgggaggctgaggcgggtggatcacctgaggtcaggaatttgaggccagcctggccaacatggcgaaaccccgtctctactaaaaatacaaaaattagctgggcatggtggcacacgcttgtaatcccagctact

SEQ ID NO: 52390 - DNA, 476 bp, Homo sapiens
  misc_feature 445, 452: n = A,T,C or G
cccccctcggaagtcttctagaattaattaacgcgggatagcatctcttttagttgatgttttgtagcttgctaactgtgttttttttttttagtggacacctatgtgatttttttttatttctacccatttatagaaaattccagaatgagcagcttctttaagaagaatatataatacaggtgcttgacgaattaagtaccactcttcgataactatatttaactagcccctacccccacccaggtgccttttttatagctgtttggaaattactttggaagcacatttaatccatccaatcagtcatttctccaaagtgggaacactgtctcaatgcttggatgaagcttaaagtttcctgtgtgcctggcagaagctctgatggaagctttgcattttgtcgattgccagttgcaaggaatgtggctaggggaattagcanaattatntgaaaagcattccacaggaatgaa

SEQ ID NO: 52391 - DNA, 469 bp, Homo sapiens
  misc_feature 24: n = A,T,C or G
gccccccctcgaaatacttctagnaattaattaacgcggggggttaacatcacgaaagagttttcctttactcccaatctttactaatctcaatctcaatacctactattgattcccttctttccagtccctagtaatgactggcacagagtagttgctcaataaaatactttcaaattgattaaagtcatataagattacttatggcttcagtgctaattcttgccacataaatttgtgttttatacatttcaaagtgagattagtttcactttcaagattgtgacacaagacaaagggcagctctgtgggatctgacgtgatcatgtcaggggatcagacaaccagctttatgatggatttccaacagatcattgtgaatctctttcagacactctgccacacagctgctgaaaaagaaatatgagctgacaaagcattcttcattttacctaaaaaaaaaaaaaaa

SEQ ID NO: 52392 - DNA, 469 bp, Homo sapiens
  misc_feature 437, 455: n = A,T,C or G
cccccctcgaaagtcttctagaattaattaacgcggggataatgacagtgtcacccacacccgcccccctacctccatcttgttcctcctgtgaggctcaagagacagtgagacagatagaagttaaactctcaggttaaactggattcaaaacatgatgggaccggacacggtggctcacgtctataatcccagcactttgggaggccaagtcaggcggatggatggcttgagccccggagttggagaccagcctgggcaacatagcaaaaccaagtctctacaaaatacaggaaaaaaaaattagcgagggatggtggcttgtgcttatagtcccagcaaccaaggaggctgagacgggaggatcacttgagcctatggaggtagaggtggcagtgagccatgatcatgccactgcacttgggtctgggcaacanagagagactgtgtctcanaaaaaaaaaaaaaa

SEQ ID NO: 52393 - DNA, 239 bp, Homo sapiens
  misc_feature 25, 27, 38, 56: n = A,T,C or G
ctgggttaccgggcccccccctcgngnatacttctagnattaattaacgcgggggnaaaaaaaaaaaaaaaaaaaaaaaaaaaaaaaaaaaaaaaaaaaaaaaaaaaaaaaaaaaaaaaaaaaggggaaaaaaaaaacaaataaaaatccccccccagaaaaaaaagggggccccccccttaaggggttttttttttttcccctttattggacttttttttcccaccctttttaagggg

SEQ ID NO: 52394 - DNA, 603 bp, Homo sapiens
  misc_feature 37, 53, 576: n = A,T,C or G
ctgggtaccgcggcctttcctcggaaatacttctagnattaattaacgcgggnaaaaataaaaataaattcagataaaaatataaaatatatcaatttaaataacagtttattagaaaagactcataatgctgcattactaatttatctacagttataattttattccatattgtgtacaatggtgagacacagtaactatgattcgttcacttacgaaataaataaatactgtttgtgatcaaattaaatatttcatttttgtaagagtcacattacccttttaatggttgcatgagtaatcattgttaaatatttgctttcttcactgctctatcagtccaatgaaggtagaaactatatccatgtttgaatttgaagaatcccagcactctttctcctatgtaatgtacattcaaaaaaactgcaaggagaaaacaatcgacaatcaacaaataaatgcatcagataattcctgatattaaaatctatgaagaaaataagcaggttaacatgataatgattgactggggaggagggtgccattttacatagataaatctccctgaagaggcanaatttgaacaaagacaatgaaagatgt

SEQ ID NO: 52395 - DNA, 485 bp, Homo sapiens
  misc_feature 38, 427: n = A,T,C or G
ctgggttaccgggcccccccctcggaaatacttctagnattaattaacgcggggggccactctgactaaatgtgcaggggaaaaattctttggccaacgacttgtatttcaagttttaacctgaactgaatgtataatgaaaggcgaatggtccattatggaaatgctaacacacttacaccaccagtggaagcaactacaacgatgcatttattgaaaattaatgaagtcctgaatttttacttataaagtggatattattagttttagattattttctgcaagccaatagtcaaaatttaataagatgatgtgtacagattgcaccaattttcactcttatccactgcctgcggcctatgtgcatttaaaccaaaaaacatttgatatacactaactataaattatttccttggagatctctcangcatgaagaaaaagcctcttaaataaatttaaatattatatgcttgatggtgtataac

SEQ ID NO: 52396 - DNA, 546 bp, Homo sapiens
  misc_feature 16, 32: n = A,T,C or G
taccgggccccccccncggaggtacttctagnattaattaaactggatgcttttaaggcaatgaggagggaagggtaaagggaaggatttattttacaaagttcatgctaagttcaagacaattcaacagggtaagaataaccttttcagcaaatggtactaggacaactggctatctacatgtatatgaataaagttgggccctttcctcgaaccacatacaaaaattaacccaacattgaccatattcataaatgtaagtgctaaaactataaaactcttaatagaaaataaagaactaaatcttcttgatttttggttaggcaaagccctcttaggtaggacaccaaaagcataagggacaaaagaaaaaataaagtgaacttcactgaaattaagtccaggcacagtggctcacatttgtaacctcggcactctgagaggctgaggtgggaagactgcttgaggccaggagttcaagaccagcctgggagttcaagcgtgtcatacagtgacacgccgtttctaaaaaaaaaaaaaaaaaaa

SEQ ID NO: 52397 - DNA, 256 bp, Homo sapiens
  misc_feature 21, 24: n = A,T,C or G
aattaacgcgggtatatgctnttntataaaaaaaaaaaaaaaaaaaaaaaaaaaaaaaaaaaaaaaaaaaaaaaaaaaaaaaaaaaaaagaaaaaaaaaaaaaacaaaataaaaaaataaaattaaaaaaaattaaatggcgggccgtccccgggggggagcctgatttcgcctttgaaggggtttattttaacccccttcatgggcatcctttttaaaccctttggcttggaaaaacctgggcttaaacaaatta

SEQ ID NO: 52398 - DNA, 562 bp, Homo sapiens
  misc_feature 24, 37, 62: n = A,T,C or G
ctgggtaccgggcccccccctcgngggtacttctagnattaattaacgccgggtagcatggntcttgaaccccagcattccctcttatgacacttccccaagaaatttcacagtccaaaagctgagttgatagattgttccataatccattgaactagtctctcagtttggggaatagttcagtccacttaaatgactctgtccatttgaatgtggcaggtgggctcccaccaaaattaggcctctatatggtaataataataatttaggccaggcatggtggctcacgcctgtaatcccagcactttgggaggccgaggcgggcatatcatgaggtcaggtgaccaagactatcctggccaacatggtgaaaccccgtatctactaaaaatacaaaaattagctgggcgtggtggcacctgcctgtaatcccatctacttgggagtctgaggcaggagaattgcttgaacccaggaggcagaggttgcagtgagccaaaattgcaccactgcacttcagcctgtgacagagcaagactcccatctcaaaaaaaaaaaaaaa

SEQ ID NO: 52399 - DNA, 613 bp, Homo sapiens
gggccccccctcgaaagtcttctagaattaattaacgcggggggcaattgagtaactgaagttaagatacacatttatttataaattagaaataaaagcacttgtctttttccatgtctcagaaacactacaagattaagaggtataatgcaaataaaattactttggatttttttgtggtttattgaaaaatattttacaataaaagcatggtctaaatagaattgcaaataaacttacatttttcccatgctctataatcacaaattccttttattctagtacaatttttcttctatatagttcttatttctagatagcttgaaatttggaaagcccaattatgctccctcacatgtttatatgtcagacatgagcttcaccattctgtaccataattacgtctttttgtacctgttttcttagattactgtgaataccttggggaaaagtatgtgtttatttattttgtatctcttttgccttgaataaataggatgctcaaccaataagcttaatgagtagttttatgtaatataattcatgctgtggaattttactgctgaagaataaataatgttgaatcgttattgaaaagacaacccattttgat

SEQ ID NO: 52400 - DNA, 612 bp, Homo sapiens
  misc_feature 40, 585: n = A,T,C or G
agactggggtaccgggcccccccctcggggatcttctagnattaattaacgcggggtagtgttggaaagaagagtttcatattttggtccttagtgagtttagtttttgtcccagttgtcctttttttgttgtttaagcaacatcctacctagtttcttcttctctagtctttcacttcttggagtattgtcatgtgtgatagctcttgggctaagagccaggatcatggcatggccacatcctcagtgaaacttcttcacattccttatccacagcccttgctctgccttcatgttttctgtttagactgaaatagactagatatgtaaaaggctatgagggaggcttgtaattttgtggctgaatgtgggtcaaactagggagtcagctaagtgctgacctcaggaatcctctgatgctcctaacacttccattattactctcttcttctttcagtggaatggaattgtatgtttatttccattgctcgggttctcattgaatctctgttactcctacctggtttaaaccagccttcagaaagatttacatgtgcaagagaaatgctcatgagaacctgagtntggatccacagcattcataaaaaaaaa

SEQ ID NO: 52401 - DNA, 456 bp, Homo sapiens
  misc_feature 38: n = A,T,C or G
ctgggataccgggcctttccctcggaaatacttctcanattaattaacgcgggtccctttctcatctttcacacatttccatacccccttctatcctttgctcctagtatttctccttttattctcaataaaaccagtcatttaactttaaaatctgtccaatttcagttgcttaaatgtatgaacttgcttattcctgtaaaataagcagccctcacatactctgaaaacaaaaaaggaaatcaattcagatttatatttttaaagaaaaaagtgttctaaaatttgatgaaaaaatagatacacaatttttttttaccacagtgattaaacaaaatacgactttcaactaaaatataaaagaaactgccatctcaaagtatcatatttatatagaaatatatagtgaagaaaggcaaataaaagtctcataagtacctgaaaaaaaaaaaaaaa

SEQ ID NO: 52402 - DNA, 603 bp, Homo sapiens
  misc_feature 554, 582: n = A,T,C or G
cgggcccccccctcgaaagtcttctagaattaattaacgcgggtacatgattattctttagaaaaatgctaaaagatattgtaaacatttataatctcagtgctatcatttttgacataaaactatgcttctatttgtttccatctaattaatcttgctactatgctgttagtgtaaaaaagagaaatatatcaactttaaaacttgaaattactttccagtttatttaagaaaataacacattcttttatgaacaaaagataaaatttacctattttaaaacataattgtatttcacaaattgtaaaactcataaaggaaacataggattgttatttgcttacacttttgtggggataaacatggagttcaagtaaaaatggaggaaggcaattgaccaagtgtgtaattagtcccataaactgccaaatagagcttcctatgaaattagaaataaatcactttttaaatgagaaagtgcttctcctttaattttgtgaactttattttttgttgtcttcgacactaccaacctgagcaaaactaatggtatntctgtatccttaaaatattgaatggcanagaaaaatctaactatgttaa

SEQ ID NO: 52403 - DNA, 381 bp, Homo sapiens
ccccccctcgtgcgtacttctataattaattaccgcggggggggggaagcttatggggtgtaaattgattaagctttgtaaaaaaaaatttaaaaccctatatcaaaagcattcccacttccaagaattttgccctaaaaaatcttcccggccaggagaaaagacatatgcccatgtttttttatggcagcttggtccataaaagcgggaaagggaaaccaatccaaatgtccaaatggactgagtaaattaaaatccatgcccttttttacaagggaatactatgcaccctttaaaaatactgccccatatactgaaggggaaagaccttaataataaatccattgaatttaagtgaaaaaagcacactacaaacctttt

SEQ ID NO: 52404 - DNA, 560 bp, Homo sapiens
accggggccccccctcgaaatacttctagaattaattaacgcgggagttcttaaagctttgttcacagcaggatctgagatctaaacttctaaactattatttcatgatttgtatttttttaaaggtagggaaaaaaaaactcccacctcatgtcagagtactttaatgttcctgtgatgaacattgttaaaaaatctgtagacaagtgaaaaaagtacaagactgaaataatcaaagaactgtgaagtttgaaaattgaagcttccagcagtttcagatcagctgcatccaattaatcagatgcgtggcccaacaacacatgctttgagctgtttatttcatgcactgtttatcgctaaaatagatattaaagctaaagagatttagaggaaaatagatggtctgttaggagaaaagaattactttaaaatgttcctttataaaaaaagattaaaccagattacgtttagttgcctgttgaagaataaattttatagtagtgatataaactaaaaaaaaatgttgtttttaagggaaacaattcactgcatatgtcaat

SEQ ID NO: 52405 - DNA, 505 bp, Homo sapiens
  misc_feature 160, 182: n = A,T,C or G
ttaattaactctaagttgctctttgtgcggtatacatggttaacagaagccgtacccagcattttagatgatatttggtttttaggagagtgtggtgggtgtgaatcaaatgctgttttttttttaaccaaatacttcattgacagttttaacttctatnatgcttaatatgagcctgatgnatcaacgggctctcccatatattttatacacccgatgttaaactgtgtcttcctaacctagtttttgggtaacggattttttttttagcttaaataaagcttttattttatttttttttaggcgtgctcagattaaatataaggcttttaaatttccttttgttagtttttatttacacatttaatattatgtttctgagttatttggtcatctttgtatttggtaggcatatctactacgtcttcattcaaattggtgataaaaatattaaattgacataataaattactctgaagtgggcatgtcagctagactcactctg

SEQ ID NO: 52406 - DNA, 594 bp, Homo sapiens
cgggccccccctcggaagtcttctagaattaattaacgcgggtcctaggcctgaaacccccgataccccaaatcctaggcctgaaatccccgatgccccaaatcctaggcctgaaatccccgatgccccaaatcctaggcctgaaatccccgatgccccaaatcctaggcctgaaatccccgatgccctaaatcctaggcctgaaacccacgatgccccaaatcctaggcctgactcaccccataccccaaatcctaggcctgaaacccctgatgccgcagtcctaactccgggaagcaaataaagacttcctgccagaggacttagaaagcgggagcgtttactgatgctctttctgctcattggtcattattgtgcttctcaacaggatcaaacagtgaaacttaagagtttgagcggccttgcctcctggatcttgtctttgcctttagaattgtaattataggatgtgtgtgattttttttcccacttaacatgtcgtgaatattttccatgtctatgtaatcctttaaaagctatttacaatgattacataatgtttgggacgtgtcatgatttgctttccattttacc

SEQ ID NO: 52407 - DNA, 446 bp, Homo sapiens
taattaacgcggggtggggctaggtcattgccaagttcagcaggtagctgagttctttactttgcagatgttgctgaatcgttttctttattctaaaatacagataaagttcactttgcacagcagatgagttgaagagatactgtgcctgtggggaatgttttgtaatgaagcatataaaaccgtaatgttttctgggaactctacataaaggaacccatggtgaagttaaatgtgattttgtaatacaaataatttatctgattgctaactacatgtttcaatagttagctcctttctttctgtctctttctcttccaccctttctccatctttttctttcccatcccctttcaaaaaggacttcatgttgccatatcaaagataagattaaaagaacagcaaccccattactgggtctatacccaaaggaaaaaaaaaaaaaa

SEQ ID NO: 52408 - DNA, 424 bp, Homo sapiens
  misc_feature 10: n = A,T,C or G
cccccctcgngaagtcttctagaattaattaacgcgggcatgtaccctaaaacttaaagtataataataattaaaaaagaaaaaggttttaataatcacaagacctatttgtgtacattggaaaggaatcaaaattttaaaaatgggtattaaatatgtcactccatcagttactaacagtgataaaaaaaaaaaaagaactaatgtgcagcctaaattacttctcaaatactggatccctaaaaggctaaaagaaaatagtttatgaagaaaagggcaaagaagaaagaacaacaatggcacttaaataataaaagaaatcccagcgacttgggaggccaaggtgggaggacagcttgaggccaggagtttgagaccagcccttgcaacatagcaagacactgactctccaaaaaaaaaaaaa

SEQ ID NO: 52409 - DNA, 464 bp, Homo sapiens
cgggccccccctcgaagtcttatagattaattaccgcgggctttctataatccaaaaaaaataacttgggggatgcacttgtaaaaactgaatgacagtttaaattttgggtggactccccttctctcgatgtgggtgggactctctgatgactaaataaattttatatgcccagagatagagtcccagggcaaaacagtaaaaatgggatgacttttcagtataccacccctgtcatatagttaatataaaaaaaagtttctgattttatattcaatatactccctggcacatgattgacttgtcttgaatataaaaaataagggttggttggatatatctaaaatagaaaagtggtggggcaaaactggaacattaaacttttacaaaaaagttatattttccacccagctcaattttattttttaaaaagtttataagcatgtttttttattaccctttca

SEQ ID NO: 52410 - DNA, 547 bp, Homo sapiens
cgggcccccccctcgaggtacttctagaattaattaacgcgggtgcctagttcttttatgaggtgccttgcttagtcattggttggtggctgcccttaaaatagtgtgcctctgaagtggaggcagaccatgaggttgctcacagctggaggctgttagacaactacattctttccagctgggcagcgagtgctttcttgaaagatctgactagtgcttctccatgtctgccacatgtaacttatctttctccagttcattttttttcctcaaagctgcactgagaaagcaagctttgcaagatgttctctgttattgatttcatctacagactctccttggttgcaagtgtttgagagcaagttgaacttgcttaggagaaagggcaaatttattgctcatgtcattaaaccatgggaaggccagaaatgatttgaaaccagaaactcagatgcccccaagatggctgctgcctcttgtctctgcttctcttcgtgtgatgggcttctttgagagtgccagaagtaataactgcactacacttact

SEQ ID NO: 52411 - DNA, 600 bp, Homo sapiens
  misc_feature 25, 38, 54: n = A,T,C or G
actgggataccgcggccccccctcnagatacttctagnattaattaacgcgggnagtacatagtagttacctagtaatttagattggtgattgacttatcccaatataatatggatctgtacattgcggctgcaagtttatgggggaaaaatgaatcactgatttttttttttcatttctcccaactctgagcatcaacaatgcttcatagaattttttttaggaacagaaaataagcataaattgattatctttccctcagtctttcctagtttggggtcaaataaaagacttgcttttaattttatctgtaggatgtttttccgtaataatatggatatctcttagaaatgccatagttcatttgcttggtggaagctggttcaataacaccattatatatttatgtggttttgtggggaagtaaagatcaatagaggtctttccagccatgtaactataatgatggttttcttttcctgctctatttattatttattaaatacctcgttgtgaacaacactgtcctaggtcttgaatgtgattgaataagaggactgtagacgggcccaattcggtgtactgatatcattctgaaac

SEQ ID NO: 52412 - DNA, 414 bp, Homo sapiens
taattaccgcgggcaggtggtttcaggtagaaaaaggaagtgtgattgcttttgaagaaaaaagaaaagaaaacgcttatttaattggtctaatataacccttactcaaaaagcaggataattgcaaatgttattttcaggggcagcatctggaatgttataagccctaccggctttgttttgataatgcccttgggattatttatctggaaaaagttttgcatgaaacccaaaccccattttaaagtaaagtctcatcataagtcaggtgctttgttacaaaaacatttcaaataaaaatgcttgaaaaaaatgttataaataatagtagatccttttaaaagttacctaaccacagccccagcacctaaggaaaaaaaaaaaaaaaagcggcccccaccgggggggacctcc

SEQ ID NO: 52413 - DNA, 527 bp, Homo sapiens
  misc_feature 38: n = A,T,C or G
ctgggtaacccgggccccccctcggaaatacttctagnattaattaacgcgggcccttactactaactttgatatttacctcagtgaaaaagcccaaagcaaagatggtttggtgaaacatcataaatctaaagttccctatcccattgtaaagaacctttattcccctctaggtttccaaggagatttctaacataaagattaatacaataccaacaatcttgacagcagtagggttttttttatttgttgcttaaatatgagcattatggtatgttccaggccttcccagtctgctgggaagggccaaagctattgaaaactataaaaatagtgacacgggaatctggaggctaaacttccactggaaaaatgtcctcacctagggatttttaaatgctactttagttttattttcaaataatgctttcctttctctgaggaaaattagaaaccaagactaagtaaataattacagaaatattatctaaatattctttgcgtctctccagaaaaaaaaaaaaaaa

SEQ ID NO: 52414 - DNA, 629 bp, Homo sapiens
  misc_feature 28, 615: n = A,T,C or G
cgggcccccccctcggaatacttctagnattaattaacgcgggggttcagaattttcttatgtttatttttaaaataacttttacaaatcaggtacatgacaaacatcactattaatataattgcattttgaattactcaattaagaaaatggagtatatcaagcaagccaaagtctttatattattttactttttttcatccgtggtttaataatcttgggattattccaaattatgcaaagcttaatgataaccctcataagcatcatatcagcatgaattaactaactagaaaattaaattctcaataaaaaatgatatagactagaaaggatatataattaatagaaaatagcaacagcaaagaatacccatacaaatattttatgtttacctatattcttttcatttatatgtatttattattttatctttaaacactggcaacaaatatttttacaattacagtttttcaaaatattttcagtattacatcattctaaattaataaaaattaaataagacagaaaagcacaatgaaattaatgtcaggaatcatcaatattttaaaaacataataataaatttcaagtgaaatatgttcttggtatatnttcaaaatattttc

SEQ ID NO: 52415 - DNA, 438 bp, Homo sapiens
  misc_feature 13, 24, 366, 412, 424: n = A,T,C or G
gccccccctcggnagtcttctagnattaattaagcgggacagaagtctaagctgttacaggagtcgtggtgttccgggaagcagcagtccagactgcagggtgggacttgggttcagagaattgtcacctgtctttcaaactacagcctgggagaagaaagtgggagaaaggaattgtgaccagcagacagcagatttctaataaattcagatgaacctccccccctgtaccttagctcacagaggagggggaagtagcaagaaaatactgcccatgcctcttgacaaagaaggaagggggtgccagaggcacaccaacagcctgcaccccatccctagacagcacacgctgcacagtcatcctgngaaaagagagtaatgctgcaggaagccagtcctaaatcacattcanaggccaactganaaaaaaaaaaaaaa

SEQ ID NO: 52416 - DNA, 496 bp, Homo sapiens
aacgcggggttaatcatgtcctgtcaggcatccatcccctcacttccacctaccaatcctcacctagggcaccacctggtggtcaacaaaatgaattatccttttccccgcttcatttcttccccactggggagaacagtacacctgcattactagttttgcttacagttcaactaattcaaacttaggaaatctttttatttgaacacatacatctccctcaaacttcttccacttttctctatcttccaggtacagccaggcattacaaaaatttccctttccttctgcctataagtaatccaaaaagcttccctcattgcagcctaatatacactgcttttcctaaatctggctataaataagaagatgatatagtgagctctgaagtgatattaaccttaatagagaacctgaatccataacttccaaactttccctttagaagctccgaagtttacatctatcttttttggtgggggtgggtggtaagggg

SEQ ID NO: 52417 - DNA, 586 bp, Homo sapiens
  misc_feature 25: n = A,T,C or G
gccccccctcggaaatacttctagnattaattaacgcgggataatcaaagggtatgttatattcctggagtttattgttagagtaatatgagtccttaaaaattttaatagtaaatcatggtttttaaaaggatatagatcctataaatcttgaaagaacaaaaaatatagaaataaaggaaatcataagaaagcaccccaaactaactacaacaatgactggagtaaaaaaaaaaaatcagttgtgacaataaatgtatgtaggataaactcacctggtaaaaggaaaaaatgcccaagtcatagaaaaaaaaatctattgtattaggttggtgcaaaagtaattgcggttatatgccaagatgcacgacaaaaaacttcaactcaggttgaaatgacaaccgtaggctcagatgtataatcaaacaaaaagaaagcatgactgcagaattaacatttgatcaagtaaaatttcagaccccaaatggtctgtttcacttataaaccttttagtgaataatatatcctcaacacggagtcagcaaaaacctgactttagtatcagaagaaatggacaggggccggg

SEQ ID NO: 52418 - DNA, 432 bp, Homo sapiens
  misc_feature 28: n = A,T,C or G
cgggcccccccctcggagtacttctagnattaattaacgcgggtaccatcaagggaatatagtgagcgagtcataagtagcagtgggaaaaaaaagaagaagaatagagtaagaaaaagaagattggaatgccagtgttaagaatacacacacacataacacaattttaggtttctatttattttctgaagtcatttttagaccaaagactctttgaaccattttatttttgtgtaatcagaacaaactactagtacaaggcctgtctctcctctgaaagggacataattatagtacttaactcttagactggtgaagattggcttactaagcatatggaaagtgcttagagcaggtcctggaatgaatgtttcataaatgttagttattactaccttttgtaatattttcaaccccaaaaaaaaaaaaaaa

SEQ ID NO: 52419 - DNA, 553 bp, Homo sapiens
  misc_feature 28, 44, 487: n = A,T,C or G
cgggcccccccctcgaaagtcttctagnattaattaacgcgggnaaaaaggagatagaaatagcaattctcatttcatctcactcctattagtcaataaatatgtattgagttttttctatatgccagcaactagtggaaatatagcattcaacaagacaaacattgtccttgcattttatggagcttaccgtctttcaagaagaataaataaatgaacaaaattgatgaggttccaaaagaagccttttaaattacaagtatgttggataattttgatgttgtggttgttataatactatattccagatgttgcccaggcaaaatgaaaccatgaaagtttggttccatctgtccttttttccgtatgtcttctcacctctcaaagttacatcctgtcatttaccctgaaactgattaccctctgtctttcttttcgaccccagtttgataagcaattaaaatgatcagctagggaaacccaatanaccaatgcttaattcatattcaggttaaattatgtcttaaagctgattctgtgtggaaaaaaaaaa

SEQ ID NO: 52420 - DNA, 407 bp, Homo sapiens
  misc_feature 362, 382: n = A,T,C or G
cgggccccccctcggaagtcttctagaattaattaacgcggggtttttgttgttactgctgttccttcatgaagtatctgtaatatgaataaacgaataacccaattgtaaatcaaactttgcactcttcacctatgggtcactgatctttgagaaagattaaacatctacagataactatcaattaagtattttaaccaggtcattaaaagacaatacacagcacacaaatcttttctaaaacaatactttaatacaaatgtgggccaggtgcagtggctcacgcctgtaatcccaaccttgggaagctaaggcaggcgcaccacctgaagccaggaaatcaagaccagcccggcctcccnaaagtgtgagattataggcngggagccaccacgcccagcgctgat

SEQ ID NO: 52421 - DNA, 489 bp, Homo sapiens
  misc_feature 38, 54: n = A,T,C or G
ctgggataccgggcccccccctcgtgggtacttctagnattaattaacgcgggnacttatataataaaaagtttgtgttttaaaaataagtgattgctgcatctatcaaaggggctaacatttgtcagattaaggtagcaaaccaacctagtctacccttaggttggtgtaacaatgatcattttagttctgattatttttccttcagtctagaccagcactgactattagaaatttctatgaagatggaccgggcgcggtggctcacgcctgtaatcccaggactttgggaggctgaggcgggcagatcacaaggtcaggagatcgagaccatcctggctaacacggtgaaaccctgtctctactaaaaatacaaacaaattagctgggtgtggtggcttgaacccaggaggcagaggttgcagtgagccgagattgctccattgcactccagcctgggcgacagagcgagaccccaaaaaaaaaaaa

SEQ ID NO: 52422 - DNA, 288 bp, Homo sapiens
  misc_feature 28: n = A,T,C or G
cgggcccccccctcggagtacttctagnattaattaacgcgggtcctaccttatatcactattataaaaaaaaaacccttgatggaatcctaatacctaaatgttcaagctcaaatgtaaaactgttacaagaaaacgtaggattaaatcttcataatcttggatcagcaatgattggtgaggtctgacacttatagcaaagattactaaagaaaagacatgagtgggacttcatgaaatgtaaaactttacgtattctcaatgacctcactcaacaaaaaaaataat

SEQ ID NO: 52423 - DNA, 435 bp, Homo sapiens
cccccccctcgtacatacttatagaattaatgaccgcggggatgtactacctccttttatcaaataagccgtcttaggaactgaattaaaatatttatccattatcatacaaaatagcatagcgcttatccattaaaatattcacattttaaaaacatgttatatcaaacagtaagctttacccaatgcctttttgggggaccttaaagtccctttctatacacgttagctttacttatataatatggcttttaaatgatatataaggacactttttaaaaaaagtctcccaatgctagaccgggaaaaatactggattgaaataaaatccctagtacactgggtatacattaaagttggcctatattcaaaacttcagttcttttacagcattcacaaaactccaccttttccaaattaaaaaaaaaaaaaaaa

SEQ ID NO: 52424 - DNA, 565 bp, Homo sapiens
  misc_feature 28: n = A,T,C or G
ccgggccccccctcggaagtcttctagnattaattaacgcgggcaccaaatagagactatctctaaaacatttgtcttctctgaggagttgtatctttgcccttttacttctccactgttcattatattgttatttagtattttcttttccccttctctttcattcaagcaggatctgttcatttatgatgtcctactgccttgtttccctgtggcaccatcagaactgctgctatagacgtggtgctatcccatgggaactggagaagcagcatgaaacagatgtgatacttgtcggttttattcctgctgctcctgagaaggaagtcctttgttcaagaacagagcaggcatgaccacccactgagggcattaactggtaggaaagaaaaagggaaactgtgcctttgcctctcttgaaaacttctcttccctagcagagtgactgcattagcttcactgttgcttctgctggcattactgggaaatcactgtttgtaggagaagcagtagagggggcactgagctcgagggaataacgaaagttttgaaatattgaatggct

SEQ ID NO: 52425 - DNA, 446 bp, Homo sapiens
  misc_feature 28, 41: n = A,T,C or G
agactggggtaccgcggccccccctcgngggtacttctagnattaattaacgcgggacatcccctgatttttatggcaatcacataaacaatttgtttttctctctttcaattctgtgtctacatattttacccctcctggcaattttaaaataaagaccaaatcttcaaaagaatattctatccatttacaaacatctgagtacatacatatgtatgtatatgtgtataatttccccacacaaatattaccatactatgtactattctacacattacctttttttacttaacaatagattttgggccaggcatggtggctcatgcttataatcccagcactttgggagcctgaggtgggaggatcgcttgagcctaggagttcaagaccagcctgggcaatgtagtgagaccttgtctctacaaaaaatgaaaaaaaaaaaaaaa

SEQ ID NO: 52426 - DNA, 594 bp, Homo sapiens
cccccctcgagagtcttctagaattaattaacgcgggctggatacttttacattacaaatcaagattctatttttaatttggctgttttgtaagttataaattctacttataccctttagttattattttaaaaattgtatcatatcagcatactattactgccgctactactcctcctacaaaatactttgtggggttaaaaagaaggcagaacataacttttcacaacaaatctatgcaatctgggaggaagaatatcagagtcaagtttctaaattccttgtattgtttggagagaattaaaacattaacatgtagaccgtgttatcatttaaaagataaccaatagactagacatagagtctgtaatctttaaccaatagaatggggaaaaatcaagtgagaaagcaaattactattccaatcctaggtttatacccaaaagaacctaaggcagggattcagatattgtaaacccatgttccttgaagcattattcataatagccaaaaggcagaaaacccaagtgtccatcagcagatgaatggataaataaaacgtggcatatacttacaatggaatattattccgtc

SEQ ID NO: 52427 - DNA, 537 bp, Homo sapiens
  misc_feature 30: n = A,T,C or G
accgggcccccccctcggagtacttctagnattaattaacgcggggcataatagactatttccttctcaatcctccctgggaagccctgtaaaacatcctgatgtggccacacagctaaggggccacacagctctgccacataaacaccctaaacaggatgggacggtggttggctgtgtgctgttagaggctgccacagccaggacctcaagctgatttctgaattcccacagatctgagtgtgctaaacattgcaaaagagagaaaactgcagatttttatctagtcttcagacaccagatcaaacactcatgaatttgttcttaaaaccagtaattggtatggtgaaaagtggaggaaacccttcctttttgcatttaaagcatagtttttgaaaaccttatggcatgcaagatattagttcagctaactcatggaaaggtttcataaaaagaacctttgtatgttgcaaaaataaatttcatattagggtaatgcaaactagcatttaatacttgaattaacgcctgttgtca

SEQ ID NO: 52428 - DNA, 599 bp, Homo sapiens
  misc_feature 10: n = A,T,C or G
cccccctcgngaagtcttctagaattaattaacgcggggtacatatttatcttatctgagatggaaaacaacactagagagacagaaagactgtacacagagtatgaatgggctaaaacaaattaaaaacaaactctagcaacttttatagcaagttgaccctcacccacatatttgtatgatttagttgataaaattgctaatagttgtaacgaatattcaatgcctcagatttgctgaaataattctcttttatatttttctagaacatggtgggaaatgtcccatacaacagaagactataatttgagagagagtaaagaaataactaactacaacattaccattattttcaccaaaaaaaccctaacaacaacatagtaaaaacatgaagtaattactagatttttttattccaggcaatcaaaagcttatttgcaatgagtattaccgtctgaacaaatttttcccctcaaaacaattctaccaccatttcttttaagtattgccgtcatctacttagttatgtagactctaagtcagagattctcacagcaatggagatggggatagaagcctggaaagaggggtcctacttt

SEQ ID NO: 52429 - DNA, 535 bp, Homo sapiens
ccgggccccccctcggaagtcttctagaattaattaacgcgggtggtgcatatctgtagtcccagctacctgggaggtgggagaattgcttgagcccaggaggtcaaggctgcggtgagccaagattgtgcccctgcactccagcctgagtaacagagtagtaatacaccaagacacatcataatcaaattgctcagaaccagtgataaagtcttaaaggcagctagaaaaagacacattacagacagataacaaagctaaggatttcagcaggcatttttcagaaataacacaccttaaaagaatggagcaacatctgtaatgtattttaaaaagtaaacctataattctacatccagcaaaaatatctttcaaacacaaggcaaaataggcaaatcaatcttggaaaagatgaacaaagttaggagactcacacttcctaatttctaaacttattatgaagctgcagtaatcaaggcaaagtagtgctggcataaggatagacatatagatgaatggaatcaattgagagttc

SEQ ID NO: 52430 - DNA, 590 bp, Homo sapiens
  misc_feature 26: n = A,T,C or G
ggcccccctacggagatacttgctanattaattaacgctgggccatctatttttggaaaaactttctatgatccttcagtaggaatttgccttttttcctgtgtttaatagcattgtttgcaatcttgtaatataatttattatagcctgccaactatcagagctatctgtgtgcttcctcaagcttttacagtagagactgtaagtttttagattgcagggcatgtgtgttattagtccttgtatcatcttcattagctaaagcagtagacacagaaatatatgtggaattaaattgctgcaacatgaatttatttgatttaatttaaaacctgattctcataaaagaaatattgaaaattctcccaagataataagttacttgtagaggaaaagtaataattgagaagagaatattcatgaaatcttgtcatgtgtctcagggagataaccttctttaatgggtcacaaatgagctcaaattctccctcttctcttgaagatatccctgacattttatagccagagttaaacttatctcttggaatactaaatttatctctaactatctgacttccctactaaactag

SEQ ID NO: 52431 - DNA, 534 bp, Homo sapiens
ccgggccccccctcgagagtcttctagaattaattaacgcgggccctgtgagttaaaatagcaaatgaccatgatgaaatatttccacctgcacataaagatcttatcatatgttacagccagcttcatcacgtttaaaactggtggattttctgagagtcgttaactattaacaaaacgttctttaaaatcctctacaaagttcacagatataaaatatctctcatcaaatagctataaatatcatttgccccatcagaaaaagcaatcttccatctcttgcgttcaatcatctagatgcatcaaatataaatgttttcaattaacgagtttctgaataattgcctcatgtctacatgttttttttatgttgttgaatggtccatgtggtatatgacacatttctaaaaactgacctggctattgctaacttttaaattttaaatgtagacttaaacaatttgaacaacaatgggtatgtgtatctgcttattccaagaggagatttctctgtgattcaaattatgctgggta

SEQ ID NO: 52432 - DNA, 520 bp, Homo sapiens
ccccccctcgtgcagtccttctagaaattaattaacgcggccgcctgtagtcccacctcctcggaagactgaggcaggaaattggcgtgaccctgggaggccgaccttgcagtgacccgaaatcgccccactgcactccagcctgggcgacagaccaagactccttctaaaaaaaaaaaaaaaaattggggggttttgttcccgactcaagaggccccctatatccaaaaccaccaaatacctttcccaaaattcctttcggtcaaaaaaaacaccctatgtgtccccttccttaaaaacttatggaaagacactttcctgtgaagcaggaaataaataaagagtaccggtctaagtaaagaaagggtgtgattttaaaaaaatactgtattttatcctgccttgtaaacctatcaaagtaaaattatttgttttaaccttatcaaagtggattgcaaaaactttatttggattggcttcaaaaataagatgatttattaggtagaaagatttccgggtt

SEQ ID NO: 52433 - DNA, 574 bp, Homo sapiens
  misc_feature 21, 32, 43: n = A,T,C or G
taccgggcccccccctcgganatacttctagnattaattaacngcgggtcctccaccaagtctctcagttccaataactccagactcttctctttaagggaagagttattctaacccttagaataacttctaacccttaagggaagaagttattttatattagcatggtgctttatttcattttgtttgatgtttgtttgttccgctcttcaacacgtgttaccaattacctttagtgaattccctccattgaaataacattatgtggtttcttctttcctgattcaaccctgacacagtgcttgttaccgggagaggttctaggaaacaagactatcaaaaatgagagtctataatcccagcactttgggaggctgaggcaggtggatggcttgagatcagagttcgagaccagcttggccaacatggagaaacactgtctctactaaaaacacaaaaattagccggatgtggtggtgcacacctgcagacccagctactcaagaggctgaggcatgagaatcgcttgaaccctggaggtggaggttgcagtgagccatgatcgtgccactgc

SEQ ID NO: 52434 - DNA, 586 bp, Homo sapiens
  misc_feature 28, 548: n = A,T,C or G
cgggcccccccctcggggtacttctagnattaattaacgcgggaagaggctgtgctgaacacaggcagagtcttccttctgtgcactgagtttctcatatgccccatctggctctagaaagtcaaagcttcagttaggaactgcttccttcaagcaatgttgcccttccaagaccacccaaagattactaaaaaggttttagaaaatgttctagagagtatattagattaagtaacttcaagcagctgtcaatagcagtggactattcagtgaagaagtatgcaaatataaggacttactaaggttttaatttgcccccaattctggaaactcttcatcttggcccttcttccattttatatgcctagtcaagagctttcctatgtagtaatgtagtaattgttatcaaactggctctggttttcagaatcagatattcatcctgtttgtcaatttaatgacttgctttggctcattttacaataagaaatccctctttcatgtggcctaattcagtttttattaatttgccttttaatgatgaactntgagaattagttttataatgtcttggttacattttttc

SEQ ID NO: 52435 - DNA, 489 bp, Homo sapiens
  misc_feature 413: n = A,T,C or G
ccgggccccccctcggaagtcttctagaattaattaacgcgggaaggcttaatttcttcaatgaaaaatcgggtaaagtatctgaaagtgttgttttaaaggctagatgtgcccattaacatatatgaatactattagcagagggcgtgactcctcataggtttttaataatagtttatttccattctttgctagtccagtgaatttccttctcttctgctgaataagggaggcaacattagggatagtctgttggttcttacagactgtcattctttttataccttcctcttgaaaatatctatgaaaatctttagagagtagctctttcagtgatgaatttctgtttctctactaaattgtttactacagtaatgtttaagagtaagctgtgcaaggaaaaggaatcttangcacttccatcacttcataagctcttcactaaggaacccaccaagatatgacacatttggctccaaaaaaaaaaaa

SEQ ID NO: 52436 - DNA, 564 bp, Homo sapiens
  misc_feature 26, 517, 535: n = A,T,C or G
ggccccccctcggaggtacttctagnattaattaacgcgggataggcctagtgtgacctggtgttaaactaatttctctgttaagtttcctcgccctgagcaaagagtgagcctcaaaaatccaaagacattttgaaatatttaatggtaatcactctctcttccgtgatgggagaaactctgggatgtgggcccacaaatttagacatggaaggacaagaattaataagataagggcccctcaaacaggcagcgtctggaaaacatacagatcttctttcatttctggtagagactgtttcatgctattccatctgaaatgatccatcccaatttgtgtcagagttggctctttgataaaaattaatgattgatcaaaaaatgattcattacacattcaaaccaagaattctgattagcatgtgactgattggttccccttctctcccaaagaaaagccaggacacatgagttaaaattttgggggccacagaaagcaaactacatgacttggcanattcatctcagaaagttntctgtatgttatgatcagatattttcgag

SEQ ID NO: 52437 - DNA, 356 bp, Homo sapiens
  misc_feature 27: n = A,T,C or G
gggccccccctcggaaatacttctagnattaattaacgcgggaggatgtgcactaccagtgtatgagaatagctacttcctctccactctcacccatgctgacatattgtcaacattataataaagtgttgcctttgctaacattataataaaaagtatacatagttattacatttgcatttttgattgcataatgctaagagatgttaagtaataaatttggccaggcgcggtggctcgcgcctgtaatcccagcattttgggaggccgaggcaggtggatcacctgaggtcaggcattggagaccagcctggccaacatagtgaaatcccgtctctactaaaaaaaaaaaaaaa

SEQ ID NO: 52438 - DNA, 485 bp, Homo sapiens
ctgggtaccggccccccccctcgtacgtactttatataattaatgaccgcggggaaccttttttttgtcaagaaggaaggggtattttctctggggaccctgaataagggatcctcccttgtaattggacctttttggtcacatcagcacactggcacccctgggctataaaactggaatgaccttacatataatccgtgggggaaacagggaatgaaaaaccttaacttacctggttccccttgggtgggttggaacctattttctgtctgaaatgacccagaggaggcaggggaaaatattttctgcaatataaaaaataagaagggggagatctctaaaattcctacacacggtaaaaaaatattaaaagattgctgggaacagctggggacaatttactgaaaatacattggacttcttctatgaaagggacattttctttgaaaaactactaaatctcactcaaaaagaaatattaaata

SEQ ID NO: 52439 - DNA, 552 bp, Homo sapiens
  misc_feature 36, 517: n = A,T,C or G
tgggtacccgggccccccctcggaaatacttctagnattaattaacgcgggggggcagaggcaggtggatcatctgaggtcaggagttagagacaagcctggccaacatggttaaaccccatctctactaaaaccaaatattagctgggcatggtggtgcgcgcctgtaatcccagctactctggaagctgaggcaggaaaattgcatgaaaacctggggagcggagattgcagtgagccaaaattgcaccactgcactccagcctgggcaacagagtgagaatttaaggagctctcatgccctggcaatagatactcaaatttaaagagcatcagacatttggcacttgttttgttttgatcatcagtgaattagttttccagtgaataatatgaaaattattaaggataactttcttaaggtatcagataaagtcaaatggcaaagtttgcaaaatgacacaaattcaggataattgctgaagtgattattagctggagcatggttgattatctntgccagtgtggtggctcacaactgtaatcccaaca

SEQ ID NO: 52440 - DNA, 152 bp, Homo sapiens
attaattaacgcggggaattacatgacttaaatttaaccaatgcagggccccactttgctatttcttcctgaattaaaaataattcttctggaaatgaatcttctaaaatctaaagttagcctaaaatgcaatgcatggatttgagaaacat

SEQ ID NO: 52441 - DNA, 406 bp, Homo sapiens
  misc_feature 25, 29, 42, 44, 54, 348: n = A,T,C or G
cgggcccccccctcgagagtacttntagnattaattaacccngntcctctttanataaagaatctactacattagattgttgtcgtgtttaaataagacaatattttttaaacttttagaaaattatcttatgtttaatgtaaagaagaattgaatttcagccgggtgcagttgctcacgcctataattccagcactttgggaagccaaggcgggcggatcacaaggtcaggagatcgagaccatcctggctaacacggtgaaacccggtctctactaaaagtacaaaaagttagccgggcatggtgccaggcgcctgtagtcccagctactcaggaggctgaggcangagaatggtgtgaacacgggaggcggagcttgcagtgagccaagatgcgccactgcac

SEQ ID NO: 52442 - DNA, 366 bp, Homo sapiens
  misc_feature 20: n = A,T,C or G
ccccccctcgtacatacttnatataattaattaccgcgggacctgtaataacataatttctgccttttaccctctgctttattgagttaataaaaaaaaaattgcaccccaactaaggatgctccctcctcctaaagttatcattcatttctgaaatcttggcctttgcctttgtatcaaggatgaggggctgcggttttcactcttcattcccacaggtaaatgatgacccattctttgtatacatgtcccctttgggctgggctacactccatggggaaaggaaactgggggtaaacctaatcctgggcttaactccctgataaaccactcaaatatctctgctgggcattgggctgtctcaca

SEQ ID NO: 52443 - DNA, 362 bp, Homo sapiens
  misc_feature 25, 38: n = A,T,C or G
ctgggttaccgggcccccccctcgngaatacttctagnattaattaacgcggggatataatagtaaagaagataaagtcttttaactaaaataaattaagtttaaaatacatacatatttttaagaaacaattactatttagttcctagggtggaggtattttcaaaatgcagatgaaagaagtaaatgatacaattaagtgagtacagctttgggaaaatgtggagggatatatttttctcaaatgtgtcttagcatgcaatgatgaatattaaaattatgcatctttaaggttatgtccctaaaaacgtggatataactataatattgcagtatctatgctgtgtaaaaaaaaaaaaaaa

SEQ ID NO: 52444 - DNA, 626 bp, Homo sapiens
  misc_feature 27: n = A,T,C or G
cgggccccccctcggaagtcttctagnattaattaacgcgggtccacttactggaatggatatatccaatgtttaaaagcaaagagtgatcctccattatcgctgaagtatataaattagttatttcctatcacaatacaaatttctagaaagaataactatacagcatatgtatatttcattatatctatagacattgttcaagtagaaaaatgtataaaatgcactcaagagccttgacatgacatataaatataaaatctaattaaatcatatagttattaataatcatcagagaaacagaggccaacaagacttaaaacaatgtaaaaacaaaacccttatgtaacagtgttacaagtaaattcagaaaaaacaatgtgacattattgaaacatccagattgtttccaggatttactgcaattagttttctctacttaatatgcatgtgcttcagattattaaactaagaagcacatttgtatgatgaaccaaaggctgaaactttgatcagctgaaacttttcacacattttcaacaatctaattgccaacaaagtataacttagtgtgcaaaatgctactaaagtacagatatattttagggtgcactaccaattttttt

SEQ ID NO: 52445 - DNA, 602 bp, Homo sapiens
  misc_feature 10: n = A,T,C or G
cccccctcgngggtacttctagaattaattaacgcgggcaaccagctgtaagctccaaatttgtatttgatgacagacaggccttactcttggtaactcttagaaagagaaggacctcacgacttgccagcttagctcttttgttgtcaccttccacataaaggagactgaagcaaaggaaaagtgtcctcaaaatcggtcatcctgtgccttctacatccaccctcagcccccatgtatgtgttacacacgtccttagagtttccttgttccccatactcttccgtggacaaagtgtgacactgttcagtctggtggcagagaagggaaggaaaaaaagaaacagaactttacttttcttctctcaacagactttgcagaacaaaatgaaaaatcaaagggacccaaaatgatagatctgagattcagtccaccagctattacaactaaatagtggcagaaagcaactgatgctttcttactctatcttccaaccaagaccccctagaaagccctgcatgagcaactttaggctatctggcatttccaggatagttatttagaataatggaaagtgaaaaagattggcatgtgtttttcaa

SEQ ID NO: 52446 - DNA, 430 bp, Homo sapiens
ggggccccccctcgggagtacttctgagattaattaacgcggggcctgcctctaccaaaattaattttaagatatgcttacaacttgtttatatattgttagtaactcttttaacagcacatgctgttttgcttagccacacagtgacagtcttattgcagtgaactttaaaccttgcagccatggatagaatatatgcagccaatctaataggaagcagatgtaatacttcacctctcttttattaatttagttatgtcttaggtcactgatttttaaatgatgttcaatactaagtgtaattcataaatcaggaagatgagacttacaaaaagtcttctttttaacaggctcaaaataacaaatatgaaaatatttcagcatatagttttgctatttgggtttaccaaatgcattgtataataaactg

SEQ ID NO: 52447 - DNA, 587 bp, Homo sapiens
  misc_feature 24, 37: n = A,T,C or G
ctgggttaccgggcccccccctcnaaatacttctagnattaattaacgcgggtctgtgttattctaaattcacttgcatttatttttctctaatggttgtatgtgcagcatgtagtgactctgtggtaatcgcccttttccataactcttgtttcttcacggttggaggggatttaactaactatcagtagtgattttgatgtttcctcaagaacaaaaatggtctcattagaaatctagaatccaaggaaaattttataacttatttggatcagagagttgtctgtgatgagagaagatacaaacagataatttgtccattattttcctaattggcttggatccaaatgattcctcagacaaacatgggtcatgcccaggatagtttaatttcctttttaatttcagcccaaaaaatatgaaaagctgtagagataaatattttcatagaagtatatgtcataaaattatacatgtgtgtatttcacattaaaagtaatgcacagaccgaaacctttttgtaaatttaacaaattctgattaaaaatacagtttttatcaagagcataatttcctaataatcagtt

SEQ ID NO: 52448 - DNA, 604 bp, Homo sapiens
  misc_feature 26, 39: n = A,T,C or G
gactgggtaccgggcccccccctcgnggatacttctagnattaattaacgcgggggagggatagcatcaggctacttctttaagaattgatatagttcccccagaatctcagaagttgactgagtttaaagtgcctgataagcctcatgtttgaaaaagctcaaagagttaatagaatacacttgacttttcaagctatggcactgccactgccaagtatgaaaaacaagacagtttcaaacccccatgcagttgttccaagcagaagtttcctctctgtccaaaaaaacataaacccagtattccaacctagtattaacccaacgatcataaaagagactcaagatctgaaagaaaagagtggacttcaagaatcaagtcagtatatgccagtgtgaattcaaagttacatggagaaatatctaagcaaataaataattttaacattgtacatttctgattacggcgttaggtgtttatttttctgtactgcctttcttccttcagagacggacattaaaaatattgctactttttcacaagtattagaagtgagtactagtgataatcttagccaatacatttgaatggtttttaatttaca

SEQ ID NO: 52449 - DNA, 440 bp, Homo sapiens
  misc_feature 31, 409: n = A,T,C or G
taccggggccccccctcggagtacttctagnattaattaacgcggggatggctcaggtcaataaaattagaaacaaaaaaggagacattacaactggtaccgtagaaagagaagggatcattagatgcctttatgaacaactgtacatcaacaaattgaacaaatctagagtaagcagatgaaatcctagacacatacaagcaagattgaaccaagaagaactaacaaaaatgaatggaccataaccagtgacaagacggaatcaattaataaagaagtctcgtaacaaagaagagcccacaattagatggcattgctctgaattctaacaaaattatgaagaactaacaccaattattttaaaagactgcaaaataataaaggggagggaattctttcatattcattntacaaggccagcagtactctggtagtaaaac

SEQ ID NO: 52450 - DNA, 539 bp, Homo sapiens
  misc_feature 19, 32: n = A,T,C or G
taccgggcccccccctcgngaatacttctagnattaattaacgcgggggggaaggtaagcctctgttatgggtagcaaacggctgtagatggaatttataccagagtgatccatttcattgagtccagctgcccgctttaaagcaaggcagtttaaaccattctctaaaagaattcaaatacaatttcactgaaagcaggagttggtgagctcttagattagagcacgccaaatgacaaatctctcccatttttatggttctgtacgtagattctacttcgtatacctcagtatcattactatggaaacacaattccagttatttcctcaagagcaatgttaaaaatagttaacctaagaaggtttatattagaagcttgaaagaagaatagattgtacatttggggtatcatgtaaatgctaatatttttaattacttcggttttttatatgtatacttataaaataattaacatttcaaaactttcatcatctttatccaagtaaagtttttagttgccctttgaaaaaaaaaaaaa

SEQ ID NO: 52451 - DNA, 631 bp, Homo sapiens
  misc_feature 34: n = A,T,C or G
gggtaccgggcccccccctcggggtacttctagnattaattaacgcgggggggaaaatagctaacaccactaatccaaacgtctataaacataaaaacaaatacagaattttcaaaacagaagacgataaattaatgagaaaacaaactgagttcaagacttcagagcaagacaaattacatctaaattacatctaaccaagaataaaaacacattgtcaataggagcctggaaacactgtcagggttccccaccagtcaaatgtaaagacagcagaaagaccccagcagtttaccacaagagcctctacttcatgttgccctggtcaacatttttatcaaccacttgggatggactcaaaggtatgatcagtaaggataataaggagacaacagcctgacaggatcactaattcccagagcagatgaaaggttcagaaggattcagcaggcagaacaaggagcagatataaaataatccacaaaagaaaaaatataaagcactgccaagggtcaaaaaaataagctgcccatctataacgtgaggccttgctgatgagcaatcaatccatgtgaaataaaacatcaagtatgtcacagacagatgctgtctataaaagaaaccaataaca

SEQ ID NO: 52452 - DNA, 605 bp, Homo sapiens
  misc_feature 27: n = A,T,C or G
gggccccccctcggaaatacttctagnattaattaacgagggatgtaagctgaaactagttttatttaacattctcacaaaccatctggagatggtggtattcagtaaaataaagcaatgcattttaatactgtttcacaaaagcagaaatattactgtttattgctaaatagttcctgtaacagacataaacaattttaatttcatccatcacccttgtttcattcttgccctttgcttcatctctcatcctctactctttcctgacacctaccacattcaggattcacacccaaatggtgggaaggtcagaaacagatgtgaggatgtctggtttgcacattacttggtaagtttaaaagctgcatacttaatggtttatctataagcttatgtctaaatgacctcgaataaaaggggctccctcaaatcagccatatcacaatgtcacatacccacattatttttaatgtgtagattttcagaaaattcgtatgtaatttatctgagttaaatttaaacagaagaaatagaaactatattataaaacaactgactttaagctctttggagaaatatagaaagggaagtttgcaatcagtgtc

SEQ ID NO: 52453 - DNA, 420 bp, Homo sapiens
ccccccctcgtacatacttctagaaattaattaacgcgggtggtgacattctaattatctcaacctattgaactagttaaaattttccttgtcatttctgctcaaaggcatgcataataggccctgagggagggatccccactcaaatattatagggccactctaacaaactttcccccagctgcactcccagcctcctcacagagcttttactaaaaaaagcaagcttaaaccacacttttttttcccatatgggcttaatctttaacaaaaaaaccactccttgaccatctaatatgtcccaggccctactctagttgtttcacatacctgacctccaatttttaaaacaactctaaaagttaaacatcatttcctttaaaaaagtccaaacccggtttaaaatctaaagttatctgc

SEQ ID NO: 52454 - DNA, 592 bp, Homo sapiens
cccccctcgagagtcttctagaattaattaacgcgggctatgttcacaagtgatatgaaatttgagaatattggcagaggtatttttcagtcactgtcatataccctattccttatctccagtcaacattgcacctgcttactggacaaagagcactgagtaatgaggaaggaaaactagatatcgcttctcgtcaatgtggtgctatgcaattcacaaagatccttcacatccatgatcttatttagaccccaccataaaccatgtgttggaaattttgttctcgctttacaaataaggaagctaaagtttaatgaagttaaacgaccaactcatttggtgtgatatttccatcacaccaaaaagaaatcattgaaatcattctacagtggtgagtaaatagctattggcctcagactcccaaagaacctcctatccatagcctctcaatcgcccctgcaacctggaattccccatggtctgactaaagatacccagcccactcagcagagacttttcaggaccccacaccagtaataagcagcctcgttctgaatggttggcacctttgccacacctgttgttaaacaag

SEQ ID NO: 52455 - DNA, 392 bp, Homo sapiens
  misc_feature 32: n = A,T,C or G
taccgggcccccccctcggagatacttctagnattaattaacgcggggctgccatcgtggctttgtgtcaaatgagttggaagccaggctctaatgttgacctcatttggggagattacttaacctccctgaactttgtttctccatttataactggaaaactaatccttatctcaaaatctcactggtgtgcaagagggggtcggaaggatattaagattatgtacagcatcagaatacttggcacatattaacaaatggcaactatttgtgtgccctgcactactctggaataaaacctcagacctgttgttatctaatggttaaataatttaatattcaaaaggaaactcactgatcaatatgtagtcttcaagggaaaaaaaaaaaaa

SEQ ID NO: 52456 - DNA, 302 bp, Homo sapiens
  misc_feature 9: n = A,T,C or G
acttctagnattaattaaacatattgaccagtgtaacatttttttaaaaaaaattaagaaaataacagtcattcggattagtaggtagatagaatgacaaactcatttcgttttgtttttgtggatctaataatacttcttaatccttacataagaaaatacgaagtattaagatatgtttccagatcattataaagttaattgcatcatatataaaataattctagtggtatctaataagaagattcaagtttaatgtttttctttgtgttatctcgtgttgggggaaaaaaaaaaaaaaa

SEQ ID NO: 52457 - DNA, 464 bp, Homo sapiens
aattaattaacgcgggtgctttcattgttttggatatgcctgaaactctgataaagttaaatagttaactgaaacgcagagaaactactgtttaatcctataaaactccttatattaaagaatttacaagctctagactaagaaatatcctgttattatttaaaaaatgtctgcgtatacattaaaggctccgcctccttcacttaaaatgaacaatccaagtggaataaaagaatggctcacaactgaccaagaaatgaatatggttcattatgttaatgagaaaaaattaagagaaaatgttttcaatgttgatgaaaagtcaaggaacacagattacagtaaagatgattttataaataaaatccattaaagaacgcactacttcaaactttgattcagtaaatttgcagaaaggcagaaatgtcatactatcttacagattacacggttatgtactacta

SEQ ID NO: 52458 - DNA, 606 bp, Homo sapiens
  misc_feature 25, 38: n = A,T,C or G
ctggggtaccgggcccccccctcgngaatacttctagnattaattaacgcgggggggtgggaaagcttaaaattcaaactcccaatacaaaaatttaataactgtataaatattttttaaaattttaaagcaaagaatacataaaaataaaagtgactaggagaaaacacaatatattacaaataaatggttaatattcaaaatacaaaattactttaaataaattaatatgaaaaggtcaatgtaatagaaaattaagcaatggatctaaacaggcagttcacacaaaataaacacaaatggccaataaacatagaagagatggaaaagcttggcaataactaaggacatgcaaatttgaaagactaagaagccattttgcttatcagtgacaaaaatttaaatagcttgctaagaaccaatgccggaaaaaaattttgggaaagaagaaactcctgtttgctaaggacttacaggtgtactgttttgaagaaaatgttggcagcagcaaatctaattttaggaatccatcctaaagtattgcaagtacataaagttctacaaacatgctcactgcagcatgttaaaaggcccatcaaggttggg

SEQ ID NO: 52459 - DNA, 355 bp, Homo sapiens
attaattaccgcggggtaactgggaagttgctgcttataattttgtttcagctgagggctccaaacccccctggggatggccctggccctgccttacaattttgctggcccccatgtgccccagggcatgaaacacggtcaataaacctattttgagtcatttcccagcccctagcacattttttcgcataccacaggctctaaataaatttttgtggaaggaacaaattggcttgcagggcctgacactgtaaaaaaaatctttgggagagtcctttgggtgcccccctgaaaacacagctcacaaatttgggcccatctgtcaggctcctggagggcccaaaaaaaaaaaaaa

SEQ ID NO: 52460 - DNA, 481 bp, Homo sapiens
  misc_feature 306: n = A,T,C or G
aattaacgcggggcctctgattcaatactctaaaatatttaccttgcccatttcttggtttcaggaagaacatttatttctgacttttcctgtatgatgatatttgaatgtatttgtggaagaaacttttagtgtttccccagttgtatcactgaatgttttggatcattatcgcctcatttatcctcatccatggggttttactgctaacaaaatggggataaatccgtttccatttcccaaattccatagtgaaggcttactttctggaacctctctttgcacacacctggtctcttagcctgngtctgtggacagcagaagcctaagcacaaggttaaaatgccattattttattaagaaatgagctccaaaagcagaattgagaaagagtgggagtgtgatttcttccattcatttatgtgatttctatgtcaatatcactgatcatttctatatagacttcttcattccattacct

SEQ ID NO: 52461 - DNA, 495 bp, Homo sapiens
cggggccccccctcgaaatacttctagaattaattaacgcgggagagtatctgattcaaataagtgatagtcttttaaaatggaatttcatgactaaaatctcaccggatgacacattaaaaggtctatacttccctgaatgataagttttgtcatgcttgtttaaaaccacagatctatggtcctaaccattgctagcccttaatcctcaacttggcttagttctagtttcctcgctttattttcaaaacttgaagactgcaatacatctatcttcctacacactggattgcatacccgtttacagatctgggaaaagtactttcttagaggtaagtccctttgtttccctatagttctattgggttccactccttctctcccaccctctctcccttagatcttcaatgtagatgacaggattttgactcttcttggtatggtcctaaaggaagctgccgaatgagagagaatgaaattttcatacattctttt

SEQ ID NO: 52462 - DNA, 611 bp, Homo sapiens
  misc_feature 39, 588: n = A,T,C or G
cgggcccccccctcgaaatacttctagaattaattaacngcgggatgtacatgaagcaaaagactgggattgagtagccacatagggtctctgtgtatgaaaattatatattgttgtacatcaagtatcgattacacacacatacaaaagtccatttatttattttggtctctttgttagttttgtttgctgatgatgttgatgataatttgtgaaaaactcaacaatgattgataataataatggtataactaaacagtagttctaaatgacaattctaattgaagaaatacttttaccatttgtttatttaggtaaaaagctaatagataagaaagcagttttcttatatatcactttagaatgtgttagtgtctattagaagggattgaggaaaatgaagctggctctgtttctaagtatacaactatctattagtaagttttagaagtaaattctcaatattattcataggttagatagccttggaatcaacatggtgccaatgttgaggtgaagatactgaaaatatctaaatttttaattgaaagtgtataggtaaacatgtgatgctactttgcccctcanagtaccatattataaattaaaac

SEQ ID NO: 52463 - DNA, 564 bp, Homo sapiens
ggccccccctcggaagtcttctagaattaattaacgcgggcttgtattatatttttattggacagcatgttagacacaaaccaaaagattagaacagaaaatatatccagtagctatcatccttttgtagtattagtatgtcaccaataatggtcttctataaagttgttttcatgaatcgttccagtaatttataaagagaaaagcctaactgggttaagtgtgattttaataataatgagtcttaagaattggtttcttcgatccatccaaaaatgtccttaaaagctctaaattcttatcacttctccctaccccacccttcaggtaagaacttagagctttcaaggaagtttttgtccttagtgtccatagtgtatccattggaccagtattgtgatcagtatgtatggcccaatggatacacaaagatctttccagctggaagtgatctgtacctattcctctaaacttttttttactttttggacaaaagtatccaatttaaacttttttttttctttttctttttttgagacagggtcttgttccctcaccaggctg

SEQ ID NO: 52464 - DNA, 590 bp, Homo sapiens
  misc_feature 12, 25: n = A,T,C or G
gccccccctcgnaaatacttctagnattaattaacgcgggccctgtttgatctctccttgtgttgtcaagatttcgtaatggaaatgaaaaaatatgtaattccttccttccaattttatttttttgtcctttgtggcagcaagcttaccaagtaggaataaacaaaggaaaatctaagaaagcaagactggagaagctgagtaagtgagatcttcttgccaaaggttgtatctgggtgattcatccaaattaaatgtggtagagttgatctgattgttgggtctacttaatggcaagtttctgcaaagtcagttgactcaacatagcaatgagctgaattgaccattaaaccagatcaaacccagtaaattagctatcctttggtcctctgttttccagtcataacaacatagtcataaatcagataaacaaccatccaactgacaaacaaaaatcagaacagagtataaaatgagtacctataattgaaatactcatttcccattaggtgttcatgcaataaatcaaaataacttttgttttctcttttgattttgttaatgtactagtgatgccctggtatggactt

SEQ ID NO: 52465 - DNA, 536 bp, Homo sapiens
  misc_feature 9, 42: n = A,T,C or G
aagactggngtaccgggcccccccctcggaaatacttctagnattaattaacgcgggtccattcctaatttctgtactataaaattgaaaaagttactttttatgaaagaattgttagaaatgtatgaaatatgtaatcaaccatagataaagtacacttaaattccaaggttctttacaaagccatgcctgacaagaacccatattatctgtaatcacatatcttatgtgcaactattgtatattatgcttcagtcacacttaactctcactttacctaatgtgtaatcgtcttctatttgttcttgagtctggtaagattttgctcctcttacatgagcctctttttccctgtaattgacctgcctttatttttagctcacatatatcttcttccagaaagccaatcttgatattcagattaagggtctctacatagtattctcatagtatccagcattttcgttacaatattatgcttttaaaaaattactggttcaagtatctgtaccagtactcactaaaaaaaaaaaaaa

SEQ ID NO: 52466 - DNA, 582 bp, Homo sapiens
  misc_feature 16: n = A,T,C or G
ccgggccccccctcgngaatacttctagaattaattaacgcgggccaacccttatctcagttaactaatgtgcaacattaattttctaattcaggaagagagcattgcagatggttgtataaatccatttgattctgtaaaactctgataattaaaataaatatgtgatacttttttagcattacagcaagttgaaaacaacaattatttatgtatttttaatacacaatattttctaacctaataaaaaatatgaaaacataaaatatttagaaatgtttatagagaattattcataggcattccaaaagccaagtttatatttacgcacaattaattataatcgattaaggaaaattaggggaaattatctctacagggggagatttattttaaaataaagtatatgagagtaaaacaacaagacctaaaaaaatacgttaaaataaagagtcacattttggcagggaaggaaaaacatgggagatgaaaacaagaaactcagatgggtccatagatagcattgtccatctaacaactaatatgacatgtgaggtatgggaaaaagttctcatgtatgtg

SEQ ID NO: 52467 - DNA, 448 bp, Homo sapiens
  misc_feature 28: n = A,T,C or G
cgggcccccccctcgaaagtcttctagnaattaattaacgcgggccatacttcaataaaaatgaaggaatctctccttttttgctgatatgctttgaatgtcttacacgctatgctttgaatatcttatcttgtgatgaatatcctgttaagaatcttatgtcagactttaagttactattttaaaaggttactttactttgtgggattctctgaaggccaagccatttgcctgctctttctacaatcacataaatcttactgggtatacccaaaggccgttgcttttctacagctgccttcctccttctttgttaccatcacagattttggggtagtaggtacctgatcatcagggagaacacagaaggccttgaaaatgtgggtttaaccataccaagatctttcgctctgtttatgtactatagcctccccaaaaaaaaaaaaaa

SEQ ID NO: 52468 - DNA, 596 bp, Homo sapiens
cccccctcggaagtcttctagaattaattaacgcgggtagctaaggtaaatggtgacattcattttagaaccacagccaagctggggccacaaaaatagttttaatgtttaggattcataagtcaaattttagcctacattgacattttgtcctaataatattaatacatatatttttgagaaaccactggtttaaaacttgagcattttggccccaaatagatttgattttgtatttaaacgatattaccttaaaattgtgaggataaagacaacacctatggaagaaatagagtatatttagttgttagtcactctagtactcttcacggtgcttatgttcaataatttcagtgttcttggccttagttctctaatgcgtgttttggaaaatacattatttttattctctgcgtggttacagttttaagagaaaaatggctaattaagattcttttcctttggagggtattcttttcattcctgtcccacttgagggactttccaagatagaaaggaatttgcctactttctttctcttaataaatgaggaagattagatcaagagatgtggtttaaaatttcttcgctctcca

SEQ ID NO: 52469 - DNA, 442 bp, Homo sapiens
cgggccccccctcgagaatacttctagaattaattaacgtgggttcccagaaggccacactctccccagtcattctagagatgcctgcctcagttatatgaaccagtaaggacaaaggggctctgagatcatcagaaacaaagcatgtaggccaaggagccaggagcagcaagcaaggacatgtcagtctgaccccagataagggaatacttccaactcagcacagaagctcatatgctccatcaggagctctcctgtctaaatgcaccagcctttccttcctgtaatgaaaccatgtctcaatctctgcagtgcccccagaaaagagacaaacaggaagttgaacccaaattgcgcttgttttttcccttatccaaaccaaaaagaaggaagagtctatagccctcacagatcagagaagggagtacaaaaaaaaaaaaaa

SEQ ID NO: 52470 - DNA, 612 bp, Homo sapiens
  misc_feature 7, 27, 40, 560: n = A,T,C or G
aactggngtaccgggcccccccctcgngaatacttctagnattaattaacgcggggtatgtatgagattggtatagtcaataagtatttgctggtatttgtttcatacacaaatacatgcatatatacaaataactccgaatttttttttatttaacactcagacctctcacggataggttgcaaaaaaatgttatacaaataatgagagcatttcctcccatgaaacctaacttcaaacaaatccaaataaattctaagttttaaaaaagaccatccattttggtgccaacatccttttcaagtgaattatttatatactgaagtattataaaacctataaatagatattgttatatataaacagatacttttacgaattaaattatgcttcttagaagacagaagcatgaaatggagaaacgaggaaataaaatatgtaactaaaaatttgctaggactttaaaaaccacccctaggttatacaaaactacggggataacttagtttaattatctgtctaaatacggatttttacctctgtaagaaagatcaggccangcgcagtggctcatgcctgtaatcccagcacttttgggaggccgaggcaggc

SEQ ID NO: 52471 - DNA, 615 bp, Homo sapiens
  misc_feature 9: n = A,T,C or G
cccccctcngaaagtcttctagaattaattaacgcgggcttggctcactgtaaccaccgcctcccgggttcaagcgattctcctgcctcagcctccagagtagctgggactacagacatgtgccatcatgcccggctaattttttttttatttttagtagagatggggtttcaccatgttggtcaggctggtctcgaattcctgacctcaaatgatctgcctgccttggcctcccaaagtactgggattacaggcatgagccaccgcacccggctggtctcactgtgctgcccaggttagtctcaaactgctgacctcaagtgatcctcctgcctcagcctcccaaagtgctgggattacaagcgtcagcctctacaccaggccctaattcatgaaatagtggtactacaacaatatacacttggccaaagaaaattctatcaaaaaaaaattattcaagtctctcaaaatttaatctaggcataaggagaaataaagaccttaattactcaaagataaacagaaattaactttaaactattaaaattaatatccccaattataaccaaaacaagtgggcagttaaaacaacctgaataccaccaaaggaatgtg

SEQ ID NO: 52472 - DNA, 609 bp, Homo sapiens
ccccctcgagagtcttctagattaattaaatccattgttctcgaactgtctggggaagtgtccttttaagcatagcctcatcaaacgttaagaaggctcaacaactttgaaattcatgtttcgatatcagcttcatcgtgggagatcacaattttttaatttgtttgaaaggcagctatgctaaccacattctaccaatgccactaatttttctgataactcatgtaaataattacagccccctaaataagtattgagaattcagtaacaatgaaaagattctgggaaattaaaaacaactgaaaacaacttatgctgagtgtaaaaagctagatttcagggttcacgatatagattaagtagagaatgaacacataataggtttaaatttgtacctacatattcagacatgcaataaatgttgaattcattagttatttaaataaaattaaatgttacttcaagtctccatcccactgaatggacaggacagtttacttactttctgtcatttggtggtattgagagtgagagatttcttccaaggttatatgaagtttcccaggttgtataagacaccaaagtgttataatggtctccattcatcag

SEQ ID NO: 52473 - DNA, 600 bp, Homo sapiens
  misc_feature 578, 589: n = A,T,C or G
gccccccctcgaaatacttctagaattaattaacgcgggaacacgctgactctttggcctggtagagtgagtagtacagctactgagccttcaaaaagagaggaaaaaaaaatcatcacaaaatacgccaaaattaccagcaagaacaggtcataagatgagcccatatggatagattttgccttgtttctgtttcattgttgcacctccttctattgactgcacaaatggaacactactttaaatcatcagatctgtgggatgaaaattcttaacacttccttcttaatgcattgcggtagttatgcgcaaagtatcctaacaaaagttaaacttattaataaatcattatatttacaatatcatgactttcatgtaaaactgtgtctaaaacacatatttctgaagtcaaccacggcttgtatgtactctgtaaggttgtcaagcttgtgatttacaagagccatgttcaagatgagaacgtctcaaatttacaatagtattcttttttcctccaagcactgactattgctcttaaaatttttctgaatcaactgagctggaatgacaaaaagatntccaacatgtntgtatttgatg

SEQ ID NO: 52474 - DNA, 358 bp, Homo sapiens
  misc_feature 37: n = A,T,C or G
ctgggtaccgcggccccccctcggaggtacttctagnattaattaacgcgggatgataaatctagataaactgaaatgggttatgtgcaagtataatttaaaatagggaaaagaaacaaaaaattaagtataggaatatttaaataaaatacgatatatggatatgatagcaattaaaaatgatgttttagagcaatgttactaacctaggaataagagatagtatgcctagtcccttaaaacagtttcaaaagtagatgtaaacatgttttgaacatggattacataattggaataagtttatttcctatctcgttccttcaattctgtgatatttgagaggaaaaaaaaaaaaaaa

SEQ ID NO: 52475 - DNA, 261 bp, Homo sapiens
  misc_feature 238: n = A,T,C or G
taattaacgcgggtctgtgactgacactgagtcccttgtggttcccaagtgttcacctttgtgaaaagcaatctcactgattctctttctctgcctggcattatcttgcccattgcatcatttctcaaagatggaggttcatcctgcaaatccaaccccaggagtttaaagctcaccccctctacttgatatcccaatgggttagagtggctgcagtgatggggagctcagagcctgngtgcaggtggcaaaaaaaaaaaa

SEQ ID NO: 52476 - DNA, 544 bp, Homo sapiens
  misc_feature 16, 30: n = A,T,C or G
cgggcccccccctcgngaagtaccttctanaattaattaacgcgggtacctaaccaatagcataaaataaggttatcaaaaataaacaaatagaacaaatgaccctagggaagtggagctagtgttaagaacagaagaaaacataaaaatttgattggtatcctagtatatattcaagaagatattatatccctaaaacacaattagaccactccaaaaagaagtaatcaggaagtaagacagacttttaagaaattaaataagatttctaaaaggtaaagaaatgaataaaagaactcaataatgaatgaacacggctgaaaaatgaacttgagtgatttggaagatagggttgagaaaaatactccagaactaaataacaaaggaatggaaactatgggacaatgcttcatcaaatgccaattcagaacagatcaaagtatctagaattcttgagggaaataatattctttcccacacatgggaaatacagtcaaataaatgatagaaaaaaatttgactgagctaaaagcacaactgatta

SEQ ID NO: 52477 - DNA, 527 bp, Homo sapiens
cgggccccccctcgaaagtcttctagaattaattaacgcgggataggttggagttaatcctaccccctgtgttgttggtattaagacccatattatggcctgatcagcaattgtgctcagaccttgtttgagcttggttgaacttggttcattgagactcatccattatttcctttctgcagggcatactggagaataaaaggagctatgggccaggtacagtggctcatgcttgtaatcccagcacttggggaggccaaggtgggtgaatcacctgaggtcaggagtttgagaccagcctgaccaacatggtgacacccagtccctactaaaaatacaaaaaacaaacaaacaaacaaaaaatagccgggcatggtggccagcacctgtaatcccagctacatgagaggctgagtcaggagaataacttgaacccgggagtcgaaggttgcagtgagctgaggtcatgccattgcactctagcctgggcaacaatagcaaaactccatctcaaaaaaaaaaaaaaa

SEQ ID NO: 52478 - DNA, 192 bp, Homo sapiens
  misc_feature 23, 179, 180: n = A,T,C or G
ccccccctcaaaatacttctagnaattaattaacgcgggggggcagttgaggggcctctgtaatgagtcaaattataaaacttttacataaaatgtttgcaaagtacttagacaaattgagttattcttttccaagagattttcctgcaaatttcagtcatgcatatttggttcgttgnnacattaccttgg

SEQ ID NO: 52479 - DNA, 603 bp, Homo sapiens
  misc_feature 82: n = A,T,C or G
ccgggccccccctcgaaagtcttctagaattaattaacgcgggggctgaccacagtagagataaggaattcccaaataactngaaactcacagtcaatattgtatgctacatggttagcaaggcctattggttttatatattttgatacctgaacatttcctgagatggtgtcaaactggtttaaaaatgtgtagtctgataagtagtgtataagtaaaaagttgctttcacactatttaatgaaaatgaagattaaaaagataagtttgaaaacacacctgtaatcaaaagcaaatcttactcaattcacaaaactggtattgtactgaccacctcaatcatacagatcttctcagaattgctaatagaaaaactttgcaccaacagggataatgcttaacattttgctaccaggagtacaaagagtaaaaccctaagttagaataatctcctttaaaatcaggctctgattttatttaaaacatacacattccttggttctgaagctcttcatctgagcttgaaaacggaatgttcaagacaatttaattcatgagcctgtctatactccagtagaaaattagtaactttgaactaaaact

SEQ ID NO: 52480 - DNA, 563 bp, Homo sapiens
  misc_feature 120: n = A,T,C or G
acttctagaattaattaacgcgggtatgtacttaagtgagtacatagaagtaaaatgtgcaaatctccagcggcataaagcaagtttccttagaataaaaaaaattgcaactagaatganccactgaaaaacaaatcaagacatgaatgaacaaaagtataggttgtttcaagtacaatgcaagataatgaagatgaaatataaacagcagaaggaatcatggccagccaacttatgattatgaaatgcagtactgataaaccaaatagagttagttatctggtttgaccttaatggactctcttttgtctactcactggtggtggtaagaagcagtaacatgttcaaatagagaaaataacagcaccactaatgagaacagccatgtattgaactcctactctaggcaagcatacttgacactaatacacaagctaagaaactagctaatccaaaaaacggaatactgaaaactaatctcatagattgacaattattaatctaaaaaaatctaacacaattattcatctaaaaaatttcctatcccccaaaaaaaaaaaaaa

SEQ ID NO: 52481 - DNA, 621 bp, Homo sapiens
cgggcccccccctcgaaagtcttctagaattaattaacgcggggtagtaggttcttccaacagatgttagaaccttttctaaaatcaggtatttgacattttatcacaacttttattaacatcaatgtaacttgtgtatccactgttccctgattataatggaaaagtaccttaattttatccggaaataatatttgtgtcataaatagggtttcttccccaaaagttatttccgccttttataaccagttaatctatctctggttagaatcttataaactttcctcgcagtaagtgacactttctaacctgtctcgtcttttcctgatcttgtccctaaaatttggagtcattttatatttgttcttcaaacatctcatccactgggggagaaaattcaatttaaattttgagaacaagaactagccaatttaccttcgtgagctgtaatttccctatccgtgaaataaaagtaaaatacctttactccttcatgattgttgtgagaagaaaatgagataaagtagattctatctgaccatccagcatttatcagaacaccaccaatgaaagtgttcactacctccaagatagcccattcccttgggaacagttccaatc

SEQ ID NO: 52482 - DNA, 438 bp, Homo sapiens
  misc_feature 14, 27: n = A,T,C or G
gggccccccctcgngggtacttctagnattaattaacgcgggtccatactcttaaaagcttttatgtatgtagacccaggcttcaaaatatgttatatggcatagaaagatccagagtttactaactagtcatgcatctgtcctagcttgagggctactaaagttacttaggaattcaagtataattaatcacacatttatattctgcctatgccatggaaaaggaaaaaaatccagttatgacagcatttgcctatgaatatgaaaacaaaatgctgtatcactacaactggatctaatcagctgaaactgttaaaagagaatcatttggctaactggcttttgacaaaagtgcaaaccaattcagtgaaagaaggatagccttttcaacaactggtcctgcagcaattggacaaccacaggaaaaaaaaaaaaaaa

SEQ ID NO: 52483 - DNA, 540 bp, Homo sapiens
cctttatcaagtctatctctatggcctttaccttaagtaactaatttctttttatattccagtgacgtacgcaaatccacctttatagaagtgaaattcacacaaaaagagttgaggaattcagtaattaaaaggagctaagaatcaaatttaaatctctaatttcttaaaaggctccaattaaaaaaggtttctatagtcaaacacatcttaaaaattctggctttgatactcgtttcttggaaattcttccttatagtatcatattaaaaattctaaggcagccagctagagagaaacttgtttaccctcgtccgctaagctgtttgcacagcatcttcttccaacagacaagtatagatttctcctacaaatttcaatggataccagacctaagtgttacagaagagattcagggcaagcgatttttatcagacatgaaacaggacactctgcccttgtaagggtctagctgacacttcaagaggaaaccagataaggaagaaaaaaatgtgaggtaatggaatgggcagatgttta

SEQ ID NO: 52484 - DNA, 602 bp, Homo sapiens
  misc_feature 23, 36: n = A,T,C or G
tgggtaccgggcccccccctcgngggtacttctagnattaattaacgcgggtttctaaaaaataatctacaatgatcgtttgcattatgtttcactgtatattgagtgagaaaacaatgcaacttagtcaactgtatgtgtattttaatgagatatacacatacctaagtttttagtaattttttgcgaaacaaatcactttacgttcattgggccatggggcagaaatggcttttggagtccagaaaaatacatcgatttttgataaacggtagaactgccaggcatcaagaaaaaaaattgcctgtatgaaataggtaaaaactcttcctttttcaagacatctctgaatcataattctcttaatagtagtattcttcctctttagagtttcaccactcttcaaaagagcacaaatttattaatttctagattgtctacatcataatgtatgaagaaatttttgactcctatttccccgattctttctgttatgaaggtacaacttgtagcctacagaagattttccgagcaaaatttttgtccttcccaggtgtgaagatcagttgcttactcctggcttgcgtgggagctagcgatct

SEQ ID NO: 52485 - DNA, 604 bp, Homo sapiens
  misc_feature 16: n = A,T,C or G
accgggccccccctcnaggatcttctagattaataagacgggggagggatagcattaggagatatacctaatgtaaatgacgagttaatgggtgcagcaaaccaacatggcacatgtatacatatgtaacaaatctacacgttgtgcacatgtaccccagaacttaaaatattaaaaaaaagaaaaaaaaagaatttgcatctatttttagactttctgttctattcatctgtcacttcatgtgtcattattatgctttcaattattgtagctttataatatgttttattatctgacaaagattccccattcctattagtttctctttttcagaaaatttctggcttttaatgcctgtttatttttcattgacctttataatgaacctatctagttctggctgggcgtggtggctcacgcctgtaatcccagcacttcgggtggctgaggcaggaacattgcttgagagttcaaggctgcagtgagctatgattgtgctgctatactccagcttggataatggagcgagaccctatctctaaactaaactaaactaaactaaactaaactaaactaaactaaactaaactaaaagtaagataaa

SEQ ID NO: 52486 - DNA, 625 bp, Homo sapiens
  misc_feature 608: n = A,T,C or G
cccccctcgagagtcttctagaattaattaacgcgggttcacactatttgtattcacaacacatgcaaaataaagtgaaaatcaatatacatatatacatatgtgtatatatatagatatagaaagtcaatatacatatatacatatatgtgtatgtatatatatatgtaagaacaatttaagataaatatgacaaatttatgtgcggaagtaaattttgtataaagatggtgtgggaaatgatacctactaatcttgattaaattctgatttatccaagggccatggatggttgtacagacttttacagctgatgaggagacctcttatgactgtttctcttgtcttcacgtaaaaacaccttcaaaaataaagcattttgttttttttctaaaaacataatagtttcaattaaaaaaggtattcctgaaaataccatattaaccagtttgaataatttgaatggtgccttttcctaataagtcgttatgttcttaacaacactgaaatattcttctgtcaaagtcaattctcctcatgtccaacatctactaatattatcagttttgctcttaaaatgtattactatcacccaaatattccatctncaaacatctttacattt

SEQ ID NO: 52487 - DNA, 434 bp, Homo sapiens
ccgggcccccccctcggagtacttctagaattaattaacgcgggctgtcttgtataaagaacacattaagacatcttctaaaatttttagaaataataaaaacctcagtgtgattgaaggttataagatccgtacacagacatcgctagtttatgcacctggaattaacaggttgaaatgaaataaagaaaaacaactcaatttacaattattatcgaacagaataaaatacttattaaacaatagaacaaaagttgtgcaagacttttccatagaaaattctatgtggctgaaagaaattaaagatagataaaacaatttaaactatctctcatgttaatggactgaaaagctatatattcataagatggtaatatttcacaaatgatctacaggtttgataaaatttctataaaaaccacacttgccaatct

SEQ ID NO: 52488 - DNA, 594 bp, Homo sapiens
  misc_feature 28, 536: n = A,T,C or G
cggggccccccctcggaatacttctagnattaattaacgcggggggatatgaaaggatcattcacaacaaagggaagaagctgaaatccacctatttgttttgagaaggatatgatgttggggagttgatttcttcatgagacaaataggtatttctacatgaggaaaactcttctatacaaggcatttattatgaacattagtaaggcaggtgcctcctttttaagaagaatagagggacattaatttaactcagcaggttgatttggtgattatttttttaacgtaatgtttgatgattccatatttcctaaaaaaaagaaaggatgacagatatctggtctgtgttctgaaatgaattaatcagatgattaatcaaataaattaattagatgaattgatcagagcagatcaaataaacaggcccagaatactttactcaattattgcctactataaaataatccaattcaaaaaaggatgtaagtttagtgtttagaatatgcaggctttcagatctgatgaactatctgttntataaataaaaatagttaatttaaaagatactcaaagtttttcctggttttaagtatc

SEQ ID NO: 52489 - DNA, 624 bp, Homo sapiens
  misc_feature 22: n = A,T,C or G
ccccccctcggggtacttctanaattaattaacgcggggggaaaaactaagatttcttatacatggtactatctcggttatttcaaaatatatttagtgtagaataaataatcaaagctaatacagtaatacgttttcacattttactgtattattattctaggtgattattatttcttcacattttattttccaaatttctcacaattatatgtactactttcgtacttaaaaaactgtttttaataaagcaaattactgtcttcacagttgttgtgagaattaaataattcaagcaaaagtgttttggcaccctgcttggacctttttaggtagtccatacatattagttattattattattgctgtgataattcacctcttattagttataataactgtgtaagaactaattgagatctttcaggaagggaaatttgcatgaagggaaaagcgaaaagattatgaactactacatgtataatctcgaagcaggatatttcccactgacagaaaaaaaatccacataaccaagaatctgaatttgtaaatttttggaatatgttaccaacaataaatcattaactaagtaattgaagtacatattatttagtggagtctgac

SEQ ID NO: 52490 - DNA, 478 bp, Homo sapiens
cgggccccccctcggaagtcttctagaattaattaatttttcacaaaatatttaatcaaatcctgttatggggaaatgcagggtctttccaagtttttattgcagttagcatccttgtggttaaatctctgaacacaaccatgatttccttaagataaactccagaaagtgaattgttagatgaaaatatatgcacaattttagggtttttgatatgtagtgctcatttgcccttcacacactttctgcccatttcacattctcaccagtaggcagcattgaattcttaattcttcaaacttttaaatttgaagtataatgcacacattgaaaagcgtacaagtggctgggtgcagtggctcatgcctgtaatgccagcactttgggagactgaagcaggaggatcccttgagcccagaagtttaagaccagcctgagtaacatagtgagaccccatccctacataaaaaaaaataaa

SEQ ID NO: 52491 - DNA, 283 bp, Homo sapiens
gggccccccctcgaaagtcttctagaattaattaacgcgggcaccagagcatcatttgaagatcactgtttaactatctaaataccagggcctcataagcatctagaataattcttcttgaccagaatacacaggtggcatgtttggtaaataaaatatctcatatagctcatgtaacccaattgctttgcaactagtgctatgcaaattcccatacaaacagttcagtagctaaaaccatttgaaatatgtagtgtagtatatttcaaaaaaaaaaaaaaaa

SEQ ID NO: 52492 - DNA, 181 bp, Homo sapiens
  misc_feature 28: n = A,T,C or G
cgggcccccccctcaaggtacttctagnaattaattaacgcgggagggcaggtgaaaaacagcaatgagaagtcctggttatcagcaaggaagccaagagacagtgttatttggtcttactcactcattgtaagaaactcttggtgaaatggtttaaacctaaaggacaggggaaaggggg

SEQ ID NO: 52493 - DNA, 592 bp, Homo sapiens
  misc_feature 24: n = A,T,C or G
gccccccctcgaaatacttctagnaattaattaattattaaaatataaatatattttatatttcttatacatgtatgtatgtaatacaatgtaacatatatgacatgtattgtactttagtgtgttcttactgacaaatcatatgcctctggaaggatgggacaattgcaccctgtgtaccatccttagaatccaggccatgctgagcacacaactgcttcttaataaacagctaattaagtgcagtcttatgaaggcacctctttatccttctgtttcatagttatcaacagaaagtattattcatcagtcaagcaaatattcacaaaaattaactttgttcccctcatattttaatgtgtgctgtttctctagtctagatataaccctgaaggaaaaaatggcacatattttttgtcctttttatcctaatgtaaaggaacatatgacatgtttgctaattgtttgcaaagtttcatgtaagctttttttggttttgcaaaatatgtttttctaattattcttcctatcatgcatgtagaaagtcagtattatttgctataaattgttactatttgtggaaatttgagaa

SEQ ID NO: 52494 - DNA, 386 bp, Homo sapiens
cccccctcggagagtactgtctaaaattaattaacgcgggctaccgtacgttcctgcttggcaacttctattccttctttcaaatccagttcaaatgccacctccttggaaaggcctgaacatcttacacaggctaagttacttccagaactctttttccctccctcttattaaaataccatataggtttcattgttgactgtgaactccttgaggatagaaattgagtttactcatttatgtatttgccctggagttcaatccagaggagggtctcaataaatatttgtttgtactcctgaaagaattccactgaatgagctcagaaatccctcccagatctaaatttgctatggagacaatccttgtgaaacccaatggtgtaa

SEQ ID NO: 52495 - DNA, 381 bp, Homo sapiens
  misc_feature 17: n = A,T,C or G
gtccgggccccccctcnagatctttgattattaacgcggggggggagactcagaccgaggaaacatagcctgataaaaaagcatatctaagatgctaaatagggaatggatgtcgatttctgactcatatagcccactgtatagcaggtggcctgtggattcgcagataggaatacaaattaaaacattgcagaccttcatctattatcaaggggggaaaaaaatgtctggtactctcaactactatccaggtggaaaaaaatggatgatgcattcctgtgcaccggcaccatatattaacaggacttcaagtcatttatttacgtatactctacctgtgccctgtaagatttactatattagaatcatttgcgatggttc

SEQ ID NO: 52496 - DNA, 450 bp, Homo sapiens
gggcccttcctcggagtacttctagaattaattaacgcgggacctgcagccaacaatctcttctcatgggtggtcaccctgataaagaattgtgtttttgcagcagagatcccaatacttgaaatgcagtaaatagtatttcagtgcctaatttcgagccgtttgtcatagagctgataatttctagagtaattccctccctccttccttccctccctcccttccttctttccttttttgctatatttcttccttcacatatttaatacattacatggaacactgttaaagtctttccaaaaccataaggctggtaaacagcttaaagattatctagcccaaaaccgtgtcttcctatgaggcgtatgagggtcaattgacttgactgtggaaacactgccactttgtggctgaaactgagaatgtatttttttcacttaaacattcctt

SEQ ID NO: 52497 - DNA, 623 bp, Homo sapiens
  misc_feature 38: n = A,T,C or G
ctgggttaccgggcccccccctcggaaatacttctagnattaattaacgcggggaaatatacgagtgcatgtctttttggtagaacaatttgttttcctttgggtagattcccagtaatgggattgctgggtcaaatagtagttgtttttttaagttctttgagaaatctccaaactgctttctaaagtaagccctctctttaaatagctaggtttgtgcttgctatttagtttacatattaaacccccttcatatttatttacacgtaaataactgaaatatttcatttagagaatagagtgaataggagatgaggaagcagagactacaagtggagacaatttgtgtacgtctaaaattggtaatacgttggttttaaatgttttttttttcctatgaaaataaatgttggcgggcgcagtggctcatgcctgtaatctcagcacttggggaggccgaggtgggcagattgcctgatgtcgggagttcgagaccagcctggccaacatggcgaagccctgtctctactaataatacaaaaattagcccagtgtggtgacaggtgcctgtaatctcagctactcaggaagctaaggaagagagaatcacttgaacccgagag

SEQ ID NO: 52498 - DNA, 524 bp, Homo sapiens
cgggcccccccctcggaagtcttctagaattaattaaaaataaatagaatgttaccattagtgactttactcatctttacttattaattttaaaacactgtctctattatagtacggttttgagaaaccattagaaatatttaaaaatttatgttaaaaatattccaaagacagaaaagtatattcctttaataaacaaatcatcaaaagaaaaaacctttatctgtttggaaaaaacaaacagacaacaggaaaggaacaaactacacagtttcattcttccgaaacagaacaaaagaataatactttcttaggaacaaaaagaagttacaagataacaagctttttagttagggagaacttaggagaaataaaagcccagttcaccaattctgagcaaacacaacaggacagttaaagagcagaatggggccaaacttcagttatatgtacccaaaatgaagcaaggaaggactctgaaccgttaatggatttaataaacaagcctggtaattccctggggg

SEQ ID NO: 52499 - DNA, 508 bp, Homo sapiens
  misc_feature 471: n = A,T,C or G
ccgggccccccctcggggtacttctagaattaattaacgcgggccacctaggattctgagtgtaaacaatgaattagttcaccctgactccttttcagacctgaagtgaacaatgtaaatattggtgaagaatgattagagattattttttaatggaaaatatattttaattaccaaaaattctaaaatatgtataattgtggcaataagtttatagaaaagagatttactgtctcatttttctttttatattggtattcagaaataagaagataattatttaatgggtcataggtagttcatatcagaaaggcatttcgtcctcataaaatacgccaggaggaaaaaatacaagatatttaagtgcagttaagggactttcagatgaaggacaatattagtaaaacatatatttctaatgcatatccaacgctagtattacctattaaatgtttctcggtgattcttcanagagtgaaaaagtgcatgtactggtcttaaagctgat

SEQ ID NO: 52500 - DNA, 473 bp, Homo sapiens
  misc_feature 461: n = A,T,C or G
cgggccccccctcggaagtcttctagaattaattaacgcgggcatttgattaatagtggtttactctactattattaccattaggcctctataattttttttttcttttttgagacatagtcttgctctgtcgcccaggctggagtgcggtggagtgatccattaggcctctataatcttaatagtataagagtgcctggcactgcctttccaacattaagtatgttaggcaattccaacaggtacttatagtatagtatagctgctctgtattgatggtgcaagtcaaggccagattatttaagtgtctgaaaataagataaaattatccttttgttaatgcttaagcacttcaattgctcaactacctagagaccgaatcactttaccatgaatatagtcgacagaactgcttccaggtaaagctaatgtgttctgtacacatacaatatactccccanaaaaaaaaaaaa

SEQ ID NO: 52501 - DNA, 323 bp, Homo sapiens
  misc_feature 31: n = A,T,C or G
taccgggcccccccctcggggatcttctagnattaattaacgcggggtgtgtattcacatttcacatgaagacaaatatagttgaggttgttcactttcagcttcttgaatatatcgtcttaggataccgattttctccatagaaacttgattctaaaaatccctttaaaatgttttttaaattaacttccaacgttcctgctatgcagactgaattcttcatctgattattttaggaaaagactagcctcattcataagctacgtctaaacctaaaaggggaaatacgtttctaaccagaactttaaaaaaaaaaaaaaaaa

SEQ ID NO: 52502 - DNA, 458 bp, Homo sapiens
cgggcccccccctcggggtacttctagaattaattaacgcgggctcttaattttcatatatatcacttcaagatttgctgggaatatcagccaagtaaagcatcttcatattgaaagctcatacctatattttaatttaaaaaaatcatcggccaggcgcggtggctcacgcccgtaatcccagcactttgggaggccgaggcaggcggatcacgaggtcaggagatcgagaccatcctggctaacacagtgaaaccctgtctctactgaaaatacacaaaaattagccgggtgtggtggcaggcgcctgtagtcccagccactcgggagactgaggcaggagaatggcgtgaacccgggagacggagcttgcagtgagccgagatcgcatcactgcactccagcctgggcgacagagtgagactccgtttcaaaaaaaaaaaaaaaaaaaaaaaaaa

SEQ ID NO: 52503 - DNA, 435 bp, Homo sapiens
  misc_feature 37: n = A,T,C or G
ctggggtaccgggcccccccctcggggatcttctagnattaattaacgcgggccggctactgggaaggctgaggtgggaggatccctggggcctgggaggtggagttacagggagccatgattgtatcaccacactccagcctggacaacagagtgagactctgtctcaagaaaacccaaacaaaccacattgtcagtaatgacctgtagcatgcttctgccattcatagggaatttttgctcataatatgagtgaaagcaaaattttaaaatactgtaaaactaagtactacttttaagaatgctggtacatgggccaggtgcagtggctcacacctgtaatcccagcacttcgggaggtggaggcgggcggatcacgaggtcaggagatcgagaccacggtgaaaccccgtctctactaaaaaaaaaaaaaaa

SEQ ID NO: 52504 - DNA, 415 bp, Homo sapiens
ccgggccccccctcggaagtcttctagaattaattaacgcgggccacgtgtttagtaaattcatctaaattacttgtttcccttagagttatttccatatctagaaaaatttaaatgcatcttggtattttcatgaaataatacaatacagtgctctaaataaattaggatctatgaaatgagagaagaaaatctaggtcactaattttagttcatatcaaatcaacatggcttagaggcattacaatgctttttaattctctttgtctttagcagctcaaaaatctttacaatttttaggtgattcttacacaaaacctttgtggcagacagatggctaatttaacttatgagaaaatgagaacaacaagaagtcaaacgatcaacctgaacaactaaccaaaaaaaaaaaaaa

SEQ ID NO: 52505 - DNA, 523 bp, Homo sapiens
gccccccctcggaaatacttctagaattaattaacgcggggggaatgccattgcagctatgagaaaaaagcgtgaaatcatgtcatcgaagcatccattcattccattagatgaaactggaggtcattatattaagtcaaacaagcaggcacagaaagacagttatctcatgttctttctcatatgagagagctaaaaaaaatgatctcatggagatctaaagtagaatgatggctaccagaggctgcaaagggaagggatgggatgaaccctcagaggggttaatgggtacaaacttagttatataaaggcataagttctagtgtttgatagtacagtaaggtgactataactaccaacaatgtgtcatatatttcaagatagctacaagagaggatttgaaatattcccatcacaaagaagtgacaagtgtttgaagtgctggatatcctaaacatcttgattttatcattacacattttatttcatgtatcaaaaaatcatggtgacctcaccaatatat

SEQ ID NO: 52506 - DNA, 338 bp, Homo sapiens
  misc_feature 92: n = A,T,C or G
cccctcgaaatacttctagaattaattaatctctttgtaacctgagtctttgtgcttgaggctcttgatatatgagctactacattcctctntgaaagtctctaccatattctttccaattgatggtatcttaaattttctctgcaccattaaccactggccaactaacataataagtggacttccaaaaactacaattcttctccagatagactaaatggtctacttacaatgacccacactgaacattaacttccctgatattttagagcagcttttatagacatggctggaaattaagcttacaattaaaaaaaattaagaaaaaaaaaaaaaaa

SEQ ID NO: 52507 - DNA, 619 bp, Homo sapiens
  misc_feature 37: n = A,T,C or G
ctgggttaccgggcccccccctcggaatacttctagnattaattaacgcgggcttgcccagctaaaaggtaggacatttctgtcataaatcattgagttgatgaggcttattgcccacagcagtgtcatatgattggtcttgcttgcttgtgttcttcataaggttcctcttagccgatggaaaaaaagttaggagggaaaatgagaattgacagaatttaaatacacaccaaaaaccaataattaaaattggattacataattcttttgtcctaggcgagagatgaattagacagggaccacatgtttatgaaaatctgcaggacaggtcttgttacttcctctccccctgagtaagataagatggcttggatttcaatgaacttatctggaactagattacttgctataggttacttacttaatcaatgcaagtgtcagtttccacatcaataaatctgaataatgatgcatagctttaaggatgactatgagaaagaaattagctatgcaaatctaattgccctaatcaatgacaaattcataacaagttcttagtatatgttagatgttagtgatttattcattaaatatatttctaaatgcatggtacatcagc

SEQ ID NO: 52508 - DNA, 545 bp, Homo sapiens
cccccctcgaaatacttctagaattaattaacgcgagggaagagctgagaggagaatgattctaactcccagtccagtgtttttccatgacatgatgcagctatgtttcggatgagaaatcactgaaaccacaacaaaaatagcactttaagaaatgtacagcataatggtcaatggataaaatttgtatgtagcttcacagagaactgttaagtccagcaaaataccaggttccactatcaaaatgccactggcttttctgagaattatatctagagaaatgattagatttgacctaaaaggatacttaagggaacttaatttttattctaatagtaacacaattcaaagctgaaatgaacacatctggtttcattttctttactgattaggataactagagattctgagacatcatgcatgactctgtcctttatttgatatgcaaataaattcctggcttgagtgtaaatcttctactttcagtggtgcccctcataactaattattttttatatcccttcctgggtccaaaaaaaaaaaaa

SEQ ID NO: 52509 - DNA, 587 bp, Homo sapiens
  misc_feature 31, 65, 74: n = A,T,C or G
taccgggcccccccctcggggatcttctagnaattaattaacgcgggtctatttaaatatataanctttttgcntgaaaccatttgaaaataaggtgacgaggtcacagtacttcgcccctaaatatttcagcctacattttctaagattgaggacatcctcctttataaccacaataccattataatacctaataaaatgaataattctgtaatgtcagccatatccagcccatattccaaagtgtgtagatttttatttggatctagagccaatcaggtttcaattgcattttttttttttatgtttctctcagttcttttaatctagtcccctgtccattttcttgccctagcattggctttgagagaaaggctattttatatagctaggctagagagacataacatttaggcttaaaaataaacatgtcctacaatttgaaagagttcagcttgaattacacttgattttctcaagtaatcattgataaaaataggttaagatttaaatattgaacatattttctgtctctggataatgacaattgttatcaacatttactgaatactataagccaagcactg

SEQ ID NO: 52510 - DNA, 473 bp, Homo sapiens
ccccccctcggaagtcttctagaattaattaacgcgggtagatataaatgttagtaaataaactataggaaatgaaagttgttaaatattgaagtagtttaataatgataatattggaattatttttagatcttttaaatgtaaatttttaaagtacttaggctggatttgttcaattttgcctgaagaaaagagctagggttagatattttctcagtcatttaatagtttaataataaagaaaatactatgcacagaagaaattcacaaaggaaagagaaaagtataacatgatattacagaataaaatgtaaaatgaaaactcttaaaaatatgtaatatacatagtgagactaatttggtaaaatactctacatgcatggaccagtgtgtacagtaagttgtatatgcagtataattctcaaggcttcaaggtttaaggatgagagcatgtgctgggaagcttgcctgaa

SEQ ID NO: 52511 - DNA, 505 bp, Homo sapiens
  misc_feature 22: n = A,T,C or G
ccccccctcggggtacttctanaattaattaacgcgggggtcatgtgagagctccttacaaagtgtggcaggtgatttatgacctgtattaaaatggttagaaataagttgttgaacacaaactttgcaagaaatatgaacttgtagatgaatcataggagttaactaatttatcaatgacagggatgaaaggagaacatgaacacagatgaaagcaaggagttaaagagcttataagcacttaaaaaaagtgtcaaatgaaataattaatgcattttagaaataatcaagagtcttgtgtacccagattgatttccacacaattttatctacatatatgtttatttacatataacaatctaaagaaattgaatgagaacagtttagaaagagccaggtttcattaaaaaggctaactctgagttcatcttgaattagttaaattaacaattatgccaaagtgtagttggggtgtttgtctgtaagatttgcaaaaatttttgct

SEQ ID NO: 52512 - DNA, 482 bp, Homo sapiens
  misc_feature 436, 437: n = A,T,C or G
cttctagaattaattaacgcgggtatgggaattcattccaagtgtcacttctgtctctgtctcctatctgcatttattccaaatgcatttaaaggacaattgttccaaaaggataacttaaaaatcagcttcaagttctaattttatttggaaaatcagatatgaatcccaatgtctttgtccacaaaataagtccagcaaagatgacttcaccacatttaaagtgtctaactcttaattgaaattattataagtttttgttctattgaacacaaaaaagcctttcatttacattaaaggtgttaaatattttcacttgcctctgttatagccacccgtatccactacaaagcaaactgtccacagaccaaaagaagatttttgaattgccagagagttttgcttctgttttttaatttgttttcattaggaaagnncagcataaattaaaacttttacaccaggtccagtgaatagtaagt

SEQ ID NO: 52513 - DNA, 579 bp, Homo sapiens
  misc_feature 27: n = A,T,C or G
cgggccccccctcggaagtcttctagnattaattaacgcgggattcatgatctgtttggacttagtttttctctgctatcactgcatattttataagctgttaaataaataaatctggtaatagtttaactgactgtagagaaaagataaagatgcattaagttttttaaaaaacacctatacctgtatatgtaatataagtatatataattttaaaaattattttgtaacttttatagcatgctggttaatatgtctagattaagtctaccaaatgtgttatgaatatttttttccacataaaagataaactgttaataaatcttttccaggcatcagtgtctagtccacataatcattagcagacaactcccttggcagcagcatcttactcttgattaactgcttctcttagattaactgaaggattgaacagtgtatgaataatcattttttattcccagtttaaattttccttttcataactgctatctgctgtatgatgttaaggaaactgatcagtttagctaagataaaaattattatcaatttatgaaaaaggaaaagttgggaaactgg

SEQ ID NO: 52514 - DNA, 487 bp, Homo sapiens
  misc_feature 20, 31, 401: n = A,T,C or G
taccgggcccccccctcggngatcttctagnattaattaacgcggggttgcatgtagcactcactcatgattcttttactccacattatctgtagttatgtgccctttcttattcctaaattcctctatctttgctatttatctttttttccttgaataagcttgccaatgacttgtctattttgttgctggtggtgctcttttcaaagaatgggcttttggatttttttttttctagttggtataaagcatttttattttcactgagcagaaaaagaagctattgattcattaactgtgctgctttattggcatgtagctatgcactgttcacacattaatatataaaactcgtcagtctgttttattttgtctgatgggaaaacatgaacagtgagatntcttatgcaaaaagtgaacagttcaactatgctagctccatatacctttattaacattccagagactaatcctctcaacatgatct

SEQ ID NO: 52515 - DNA, 435 bp, Homo sapiens
ggccccccctcgaaagtcttctagaattaattaacttttaaataagaagatgaacctttcctttttattgtaatttccctaaaatattttggtaataggtcttacccacacatgtacataagaatgttgtaaataaaaacatatttctggtgatgcatattaatgaaccctacaaaatatttgagtaatctctaaacatgaagaattttggtagtgaaaaatgaataaacgcattaatgatcaagattaaaacttaatgataatcattatctatgagtacaaacattaaaaatgagcattctaaatatcctaaaataaaggtaaatcaatacaaattaataggtgttagattttagagaagcttccacatggaaaatagattttaaaaattagaagaatatgatagaaaaaagcataacaaaaaaaaaaaaaaaa

SEQ ID NO: 52516 - DNA, 123 bp, Homo sapiens
  misc_feature 17: n = A,T,C or G
ccgggccccccctcggnagtcttctagaattaattaacgcgggaacatgctcactttgttaccaattaataaacattcacatttcaaataattttcattaaatctgtcaaaaattttattttt

SEQ ID NO: 52517 - DNA, 604 bp, Homo sapiens
  misc_feature 34, 542: n = A,T,C or G
gggtaccggggccccccctcggaagtcttctagnattaattaacgcgggtcttcaatcatccataaaaattaagaaacgtaaccttttgtgtttaagttaactcaggaaagacagcttccatgcctctgtcctggagagatggaaacatttttaagataaattgttgcatctgatactttcataatatccaaaattgaaactaaacaactacctgtaatatgtaaacctaattttctgtttcttttaaaaaaaagaaggattatgaggccacaaatattttgactgatagaaaattaatttgtaatcattaggtcaaaaatgcatctagaagataaaatgtcattgaaatattaaatttaacacatgtttataagaaatctgaaaaatatacagatgtagtttaaaaacttaattccatcttaacatttatagcagttactcttcatgcctataaacagactgtttagaaaatagttgtgttggccaggcacagtgactcacgccctgtatcccagcacttaacagaggctgaggcacttanggaggctgaagcaggaggatcacctgtggtcaggagtctgacaccagcctggccaacatggc

SEQ ID NO: 52518 - DNA, 606 bp, Homo sapiens
  misc_feature 588: n = A,T,C or G
ccgggccccccctcggaagtcttctagaattaattaacgcgggtcccattactttgagaacgggctcaaattccttggtatgacatttaataaaaggaaatttaggtcttatcttttctttcctgttttatttctttccattttctaaccacttataagtatcctggcttaaacaatgcattatatagtcaatgtagtttagcatttcgggtttaaatacttgctaatcccccccagatacatatacttaaagtctatgttgacttttctcaatttctttcatttatttgcaaatatctctgcaaagtaaagaatattatagctgaagtaaattagagactagaaaaataatagaaaagattgacaaaaataagagtaactttcctgaaaacacaaaatgaaaattaacaaacatttagctagattaactgaggggggaaaaaagagaaaactcaaataaataaaatgaaaatgaaaaaggagacattacaactgatacaacagacatacaaaggatcataagagactactatgaacaattatacaccaataaattgaataatgtagaaaaaatggattatttgactncagtacataccaagactg

SEQ ID NO: 52519 - DNA, 604 bp, Homo sapiens
  misc_feature 12, 25: n = A,T,C or G
ggccccccctcnaaatacttctagnattaattaacgcggggagcagttgtctactggcaatttttattgattatgcacagaaatttgaattcatggaacagcagaatactataagcatcaggtttttaatttaatattggtttcaatttttaaacactcatagtgtttgcctatcattaagaaatcgtcttaaagaagtcagcattcatagaaaagctaacatgggaaagtattttttgcatagaaatataaacctgttgtccaatgaaaattagtattaaaaataaataaatatcagtggaactatatttcatcaagtaagataaatgcatagtgttcgaattagccatatctttctttattctacctacctacctacctatctagtatatataacaactgaattataaaagagcataaaccaaaagctcaaataaaaagaaaaacaaataaaaaataaaatcactgaaaatcaaaagaatgcaaatgaaaacaataaaaccatgtgaaaacttttgtctattaaataaaaatacttaaatgccaagtattgcagctgcaaaaactgttagtataactgtattaaaaacagttcattctcaat

SEQ ID NO: 52520 - DNA, 609 bp, Homo sapiens
  misc_feature 28, 580: n = A,T,C or G
ccgggcctcccctcggaagtcttctagnattaattaaatgtgcgtactttcttgggtgttttaatcagtgtctcagaacattgatatattttcagcaacatcaataataaatactttgttcagtgcttcaacaatacataaacatttgagacctggggcctagcacatagtaaacactcagtaaaaggtggctgatatcttttcccataattgttgggagtcctttctgatagttttgatcatttttattttgtttaaaactatataggctacatgagcagttttaactaaataaaactgtattaatacctgttatttaccacctagtataacccaacagaactagctttcaattactatctagattaacccgtcaaattagacaagggtcaccttatagtctttgcaagtatcagtttggtaaacagcacactcattatttttttcgtgtaagtacatgtttaattccctcaaatgttaacataaattgctacttaaaaaatatgtagtgttttaaggactgttttaaaataaatggataggctaggcactgtggctcatacctgtaatcccagcactntgggaagccgaggcgggtggatcacttga

SEQ ID NO: 52521 - DNA, 383 bp, Homo sapiens
aacgcgggggagagatggatctcactgtcttgcttaggttggtctccaactccttgcctcaagcaatcctcccgccgcagcgttccctcgtcccacatgcccaagctgcttcttaaataaaacatttcaagaatgcaaactcctctactctctttttcaacaaattctcaattagttgtctgtgtttctatgcactctaagaagttcattttgactatgtataattatattatgataatatagtaatactatatttcactccaactgggatagaattttgctcatgtgacatgtttattttttatgtgtgctttattatggcacgttagtacttaatagagtattgggtaattctgaaatcaaagtgattttgctttatgtaa

SEQ ID NO: 52522 - DNA, 600 bp, Homo sapiens
  misc_feature 14, 27, 591: n = A,T,C or G
gggccccccctcgngggtacttctagnattaattaacgcggggatccacgcgtcagaaaaatgctcccatgcactgctctacctccatgaaacgatgcacttagaagctgttgcatgataattacttgatactgagagatttccactggtaatacgaagttagtagaaaggattccttggtccggtgaagactgctttaagcataagcatattttgtcagcagaataacttatttaaaattttggaaaaagaaaagctacacaaagataaaagttttgtagcttggaatgaagatggttaggatgctgtgagagtgtccataaatcaaaacgttgtagattatgttggtttcatctagcataaagtccaaactgctgctagctgacagacatgtatgcatttcagactatctggaaagagcaaagaacatattcacttttcccacatttcctaaagggagccaaattattctagatcttgttcatcccccgcctctagtcaattttttttacttgcaagtatcacctgtagtgaaaccatatttatggtatatttgcttaggttcagatttatgtatttaagatttacatngttaatgta

SEQ ID NO: 52523 - DNA, 386 bp, Homo sapiens
  misc_feature 23: n = A,T,C or G
ccccccctcggaatacttctagnaattaattaacgcggggtctctgtgattccaactgggtccatctcttctcttgccacttttcctttccacttgcatcttcaccttctaactcattctctcctaaccttttgtgtatacacttttacgtttctgtatcttaacaccggccatgcccttcttcaggaaaggctatacccaggccctgactccatcaatatccagtggttactgaactagtaatttttgggaagccttatctgctgtctcttgtccatgcttctctttgattacttttgtttattattatatgtacccatttgtcttttcacctgctggattgtaaactctttgaaaaagagattctatcttataacctaagtatt

SEQ ID NO: 52524 - DNA, 396 bp, Homo sapiens
ccgggccccccctcgaaagtcttctagaattaattaacgcgggaggcgaaagttgcagtgagctgagatcacaccactgccctccagccagggtgaaagagcaagactctttctcaaaaaaaaaaaaaaaattgtgattttttattattttgtttacagccaagctccttaattttggtattcaaagtgcttcatgattttactctgaacgccctattccagccttaattctcacttctcacttagtataacttgtatcttcatcaaactgcacatttgtcaacagaatataaaataaaactccgaaaaacccctgcactcttgctgatttctaaacatgcttcattttcccaagtttttcttcccctgaactctgcctggcaaaaaaaaaaaaaa

SEQ ID NO: 52525 - DNA, 580 bp, Homo sapiens
ccgggccccccctcggaagtcttctagaattaattaacgcggtggttaagagcctggtgttctgttagcctctgagttctacttctttgtaccttgggatcttattccctagggttgtctggttccagtgaaaaaatatgtgtagtgcttctgtcaccaccctttgtggaaaatcggcccacactgacgtgcttgtacttctggagtgaagagaagcacgtttggcctatagtatttcaagttccacttggcttagaatatttttgttgcttccccccacccccgcaaagattcatttgcaacttagaaaattgccctctttcccagctactgtactttgctctcgagggatgaaactttggctttaatcacagattctcgaagtatctgagatgcgtaattggaatttagtgaccgcagaagcggctttaaaaatgcccttctcgccttttttcccatttacagtcgaaaagaacgatggactttttggtagtgagggaaaattaccagatgcttgtttcagtttctggatgagaatggacagatagtccaccttgcagctctgtagaggcacgaatcg

SEQ ID NO: 52526 - DNA, 432 bp, Homo sapiens
cccccctcggaagtcttctagaattaattaacgcgggacattattaaatgctcaggggaagatgtgagacaatcattgacagacctgtacacactgaacagcacaaaacattacttaagttaaagaaggcccaaacaggccgggcgcggtggctcacgcctgtaatcccagcactttgggaggccgaggcgggcggatcacgaggtcaggagatcgagaccaacctggctaacgcggtgaaaccccatctctactaaaaatagaaaaaattagccgggtgtggtggtgcgctcctgtagtcccagctacttgggaggctgaggcaggaaaatcgcttgaacccaggaggcggaggttgcagtgagccgagatcgcgccactgcactccaggctgggcaacagagcgagatttcgtctcaaaaaaaaaaaaaa

SEQ ID NO: 52527 - DNA, 593 bp, Homo sapiens
  misc_feature 19, 32: n = A,T,C or G
taccgggcccccccctcgngaatacttctagnattaattaagcgggaatttcattgtgaaggactataatttcttagcttaagtaagtcattgaaaatttgaaacattttatttactaaaactagctaaggcacagtgaatgaagaagcatgtcgaacaaatggtgagagtaagcaacagtagtgtaaaaacatgaccctcattactgagtgtgtgcattcgctagtcttttccaatggagactttttgggaaaaacacccatagaatgctggttgggtcatgagagtactgagacaaaactttataatttgttgattttcttaatgttgtcttctttctccatattaacaaaatcgagtctttactctccttactttgctggcctcaaaaaacgatcagggaggaaatctaaaactgatctaaaaaataaagtctaaggctgggtgtggtggctcacgcctgtaatcccagcactttgggaggctgaggtgggcggatcacgtcaggtcaggagttcgagaccatcctggccaacgtggtgaaaccccgtctctactaaaaatacaaaaattagctgggcatggtggtgggt

SEQ ID NO: 52528 - DNA, 542 bp, Homo sapiens
  misc_feature 28, 530: n = A,T,C or G
ccgggccccccctcgaaagtcttctagnattaattaacgcgggtagctgcaaaataaaatttctttttagtgacattggtgtaatatttgcttcattcccatccccagcatcttttcagacacacaatgctgtaatcatagtgctggaaagtgagctaaaatgttatcactatgagagctggagttttgcctatttgttctttgttgcagccctaatacttaatatgctccctgaaatacagtatgtatctaatatatatagttgagtgactatttattgaaaaagatgcattcaaatatatgcttgattaatactactggatgcatgccctttaaagtggtcctgtcggtaaacctttttcgaccaattatttttcattcctctccatttacgcatttttaagcacatattgtttgaatatttactttacataatgcactattataacccctggagatacagtaccgagctaaattgacaaacatcctcagactcatagtttacaatccattgcagggatactggccanaaaaaaaaaaaa

SEQ ID NO: 52529 - DNA, 574 bp, Homo sapiens
ggccccccctcggaaatacttctagaattaattaacgcgggcttagtgaataatatctttctaatgccagagaagatgtcatccatggaaaaggctatcagtggtgtgtggtcttgggtttggactagctatggtgcgtgccagcatggaactctccaacttcagcagtccttggttctgacaaggaactctcagcatttgaccaatcacctgcagtcacaggtgagaacatggggccctcactgagcaaagaccaagccttttaagtgtacctcaaaaataagctaagttaatggaaaataggagtgaatgactgcagtgtttatttttaaattgctttcaagtggtgcatctgttgtataaaacaagacatttcagctcaataaatttttggacaatgtctcctctagttatcagaaacttggtattaatgacgaactctggcttctagctcaaagtcaaagaacagtggaaaatgaatgtgcttcaatgaggaaccacaacctaatagagatttcatggagtgtgttgttcgcatttttacattgtcttaaatgaaagcagtgaataagta

SEQ ID NO: 52530 - DNA, 580 bp, Homo sapiens
  misc_feature 10, 543: n = A,T,C or G
cccccctcgnaaatacttctagaattaattaacgcggggatatactgtcatcataaatgacaagatctaggtaaaaatataatggaagagaaagtcttgtgtaccatatcaacaggaacaataaaattaagaaattcaatacaataacaatgaaaaggtttctacaggttttatttattttcaaccctggaagaaatggatgtgctgattcgaatttacagcaagaaaaataaatgaacaataaaagccactgaaactctaagtaagaaaacaatgtaaggagaccagccctatcagatagtaaaatagcacacaataaaaagcttcaataattggctgggcgagatggctcatgcctgtaatctcagcactttgggaggccaaggcgggtggatcacctgaggtcaagaatttgagaccagcctggccaacacggcgaaaccccatctctactaaaaatacaaaaattagctgcgtgtggtagcacatgcctgtaatcccagctactcaggaagctaagacaggagaattgcttgaacctgngaagcagaggttgcagtgagctgatatcgtgcccagc

SEQ ID NO: 52531 - DNA, 606 bp, Homo sapiens
  misc_feature 574: n = A,T,C or G
ggccccccctcggaatacttctagaattaattaacgcggggacatctcatacttatggacaaaaagacaatgatggcaataccctcaaatagattaatgaaaattgaattaatctgattaattcaatcttcaatttgattaatgaaaactgaaaaatgaattaatgaaaattgataagatggcaatacccccaaatagattaataaagtcaatgcaattcctatctaaattccagctgcctttggcaataccctcaaatagatcaataaattcaatgcaattcctatttaaaccccagctgcttttgttttttcttgtcaaagcaatctggaaaaagaagaaagttggaggactcacacttccctacttcaaaactaccacacatctacagtaatcagtgcaatgtattggcataagaataaacatatagatcaacagaataaaatggagtgtccaaaattaagcccttatatttgcagtcaattgatttcaacaagagtgccaagacaatgcaatcaggaaggaatagtcttttcaatatgtagtgttggaataactggatatccacctgcanaagcatgaagctggaccccttccttatactac

SEQ ID NO: 52532 - DNA, 242 bp, Homo sapiens
  misc_feature 23, 25, 36, 60: n = A,T,C or G
tgggtaccgggcccccccctcgngngtaccttctgnattaattaacgcgggacatcaaanaaaaaaaaaaaaaaaaaaaaaaaaaaaaaaaaaaaaaaaaaaaaaaaaaaaaaaaaaaaaaaaaaaaaaaaaagaaaaaaaaaaaaaaaagcggtcccccccgcggcggagctccttttccccctttattttattggttttcgccccccccccggggcgttttttatttcctttttgagggg

SEQ ID NO: 52533 - DNA, 595 bp, Homo sapiens
  misc_feature 582: n = A,T,C or G
gccccccctcggggtacttctagaattaattaacgcgggagaggtggattcctcaccattagttttgtgaaaaaggaagcacattctattgctcaggtgaacccaaccaaaatcattttgctgggataactatcattaataaaagaagcaactctcagttatgtaaataaactcttagagactaacaaaagaagagttgacatgtgcataatgaagaaacttaatgagacatatttcatctctatgctaaatgctttcaccaagccttctcttattaagtcattttagaaattataaatatcccttaacactacagatcatactttttaaataaattattgttcccctaacattacagatctgatagcttagtactttagcttaatttgcatcatgtaaacatatttacaagaatgctctatggaaaacaatgtatcaggcgtgaaataatgggtgcccagtgaatttagttactaacatcagacaatttataaaagcctaattctttaaatcaggtataagttattgtatatcaaaaggagaggcacaaggaaaatttaaaactaagtatatctataattntagcattagttcc

SEQ ID NO: 52534 - DNA, 615 bp, Homo sapiens
  misc_feature 13: n = A,T,C or G
ggccccccctcgngggtacttctagaattaattaacgcggggggaaactggacaaaaataattgttcagaggaaaagagtaactagcttccattagaatttatagttaaagtatatagtaggaaataaccaagaaagcatacctgtatagctaaaaatctcaggtgaagatttgattttctctctctcttttttttttttcctgttggagctactctttcctatcagtcgggatggagatacctgctttatgcacacattgtatatctgtctatatgtctcatgtttttgaggcattccttgtgcacagaagcactgaactatatcattgtaacaatgccatggtttacagtatatttcatatgaatacctgaaactgttttcttgagttgccttcacatgctatataaaatttattttattatgtataatatgtgaaatattgatctgcatacctttaaaacttgtaaaagccaatgacttttttctacagtgttaggtagatttgtaaactgtgtttttcagagtctgtattttactgactacaaagttttcagtcactgttttgtagagggccttctgtttgggctttttctttatgttattttttcttttt

SEQ ID NO: 52535 - DNA, 357 bp, Homo sapiens
ccccccctcgtacgtacttctagaattaattaattaatctgagtctaccagttgtgggcaagaatacagagcaactacagctcctcatccactcttagggaaaatggtttacccactttaaaaaaaagttgggaacctttttatatctaataataaaacccaccctttctactcctgggttttggttaaaaatacaaaaacttatgcccacacaaaaacctacatgtgaatgttcatcacaactttttttgtaatacccaaaaactggaagggatcatattgtcacataacaaatgattggataaacaatttgtgatatatccacaccacaaaatgcttttcagcaaaaaaaaaaaa

SEQ ID NO: 52536 - DNA, 534 bp, Homo sapiens
  misc_feature 13, 15, 26: n = A,T,C or G
ggccccccctcgngnatacttctagnattaattaacgcgggtctgggacaaagaaaagtcaggttccctccttagttgtagataatctgagatgacaaatattcagacttcaggtatgaggagtggagagactccatcagggctttgaatccatcaggactttaaacattaggcctcatcttttcctcttatttgagctacaagagttttctatttgttaggaagataagattttcctaaactgaggagctgatggacagaagtaaaatgtgatgtcggccgggcgcggtggatcacgaggtcaggagatcgagaccatcctggctaacacggtgaaacctcatctcttctaatagtaaaactacaaaaaattatccgggtgtggtggcaggcacctgtagttccagctactccgcaggctgaggcaggagaatggcgtgaaccaggaggcggagcttgcagtgagccaagatcacgctccactgcactccagcctgggcgacagagcaagactccacctaaaaaaaaaaaaaa

SEQ ID NO: 52537 - DNA, 586 bp, Homo sapiens
acttctagaattaattaacgcgggaggtcatgtgctcctgctggtggtcttagtcaatgactgggcaagaccatgacacagagtctagcaatgtctgctcactgcagaactactgtgatattggccctagcccccgctggactcgacacgattttgttatgtttgcatcacaggctctcaacacagcatgcccaatcctgtccatcccatttgctttcacagatgtgatcccacataagctttcaccctcctaattccatcttactgtcattttctgtaggagccaaccaccatactactaaaaatatatacattttttaattttccagagggagttaatgattcagaataagataattttgactcttaggaaactgttcttcctgttgcaatgtcacatacctcatgcctttgtttactttggaaaaaaatgtaacatttctctaaaatacatctaaaatataatctctaaaatacattctctaaaatactccatacatcttttagaatttaggatgactcggtcctgtatcagcatggaagcattatgttcttttcagttggccagattatcatctttacaaaa

SEQ ID NO: 52538 - DNA, 593 bp, Homo sapiens
  misc_feature 12, 25: n = A,T,C or G
gccccccctcgngaatacttctagnattaattaacgcgggaggggtggtagagactgtggatgacttcacagaggctgccacctccaagtttgagctgggattgaaaggataagggaagagccttccaggaagaggaaccacacgggccaagtggtgacgggagcatgggatcttagcaagtatctggtgtgacagcatggtcatgaaggggagtagcaggaaatgaagctagagaggtactgggagccaggaccacacaaaactttgtatagcaagctaacccagacccttaaccttcacctgtgatctctcgagcaaggattataaatcatcaacaattaacctttaggatggatgtcaatgtagacaccatcaagtccagttctctcattccaaaggctgggaagggagttacagtgagaggaaggcgttctccctgtaccttccaataatccttgcatattccactacattatggaattaaaaacccccacacacagagtctccatgaagagctaaccgtaggccaggcatggtggctcatgcctgtaatcccagcactttgcaaggccatggtggaaagattgcttaa

SEQ ID NO: 52539 - DNA, 605 bp, Homo sapiens
  misc_feature 8: n = A,T,C or G
acttctanaattaattaacgcgggggtcacggtaatgtcattccccttccccagtgactggtcaagggtcatgtgatgcaacctgggtccgtgagatgtgaaagggtttcccaactggatggaatacaaaccttcctgaaaagaaaacccttgaccccctaccccctttgagatggctggcataagaaatggggaacctgccaattagcgggcataatggtgcgtgtctgtaatcccagctaatcgggaggctgaggcaagagaactgcttgaggctgggaggtggaggttgcagtgagcagagatcgcgccattgcactccagcctgggtgacaagaatgaaacaacgtctgaaagaaaaaatgtggagcctgccatattggcagcatctggtactcacgaggtgacaagcatgaggaaagactagagtgctggagacactggagagcaaagatggacatggctgaattgctgaatcaaccacatgcctccagactccctgtaaagtaagccataaatcatggtttaaaccaggtcattgtttcatagttgttgcttgtagctcagtgttctgtaatggaatacttagcgttcttccaggtgaa

SEQ ID NO: 52540 - DNA, 620 bp, Homo sapiens
cccccctcgagaagtcttctagaattaattaacgcgggtcctctatcatgccacttacctatttaaatatcatggaaaacaagaataataccacttctattgcacacagtggtaatattgcccttagattaggcaaggggaaactctacccttagttacacaatgatcaattagtccatttgccagtaacagtctttgttttaaaccttaaaactccctccatcccagtaaatgcctcagtctcatgcagaccacaaaagctagttaccctagcattgcctacgtggcaactctgagtactaaggagatctatatatcaagcataagagctataaatttgctttagaattgaaagcaaaaagaggaaataaaaaattgccaaggttaataatattttttttaaaaagggaaatgagttataagctgtgtctagttggggttcatacaagaaaataagctaaaacaatttatgtttttatttaaagacataatctaagaacatgtttctgaaattgcaaaatgtcttacatgtatataattaagggtgcattatgtgctgggaaaaccaacccagaatgattaacaatgagaaaattctgctaagttattcaattaaaaag

SEQ ID NO: 52541 - DNA, 535 bp, Homo sapiens
  misc_feature 26: n = A,T,C or G
gggccccccctcggaagtcttctagnaattaattaacgcgggggctttcacatatgctagcctcattttcaatataatctttaaactactttgtaaatggttgttgaatgagtcttttacgtaccatatacattgtagacatttagtagttattagttgaatgtatgagtataggatgcaacttttctgccatttaagctctctcttcctttacttatgttctgttcttcagtcaaattggcttatttggctctttctggacacatcagcaattataggtttctatgtctttgcttatattgctccttctgcttgaagatttttataatctctggcataacaattcttactaatccctcaaagataatattgctcataatttttcccattagtgttattactagatctcttcttaaacttcgctaagctctggcttatcttctgcatttactatttttatggtgttattacaaggatttgtctagttgtcatactttcccctagactatatgcttcatgaaatcaagcctattta

SEQ ID NO: 52542 - DNA, 549 bp, Homo sapiens
cgggcccccccctcggggtacttctagaattaattaacgcgggcgtgcaccttggtatatgagcacaggcttaatggtcttttgaaaaaaaattatcttccatatccaaacttcaaagactctagatgttttcacaaaagaattgaggctgtagtttcatctttggaggtattaccctaagttaggtagttctttcaagaacctagggcctggcatcactttttgttatcctattgatctaaagacatagagaatgtgtgtaaatacaaaataaaaatgctgaaagttgtcacattctgaagctttctgctacccttaacactcagtaattctaagcagaacaactgatgttcatgtaacaatttaaaggtccccagaattttctaaagtcctgttaagattctgcctccagcttgagagaaactgctgatagttctgttaattcatgatgtgtaccatatattctgtctaatgtttactaatgattattatcttaaaaaaagtttcttgaatacactgcagcacttttataatcattgcttgatactc

SEQ ID NO: 52543 - DNA, 585 bp, Homo sapiens
  misc_feature 8, 9: n = A,T,C or G
aacgcggnngccagtccctacagaggtgttttaccaatatgatcgcatttactctttaaaacaatcccttttgggtggtcaccattttaaataggagattgtattttaaaactgagtcaaagagagcaaatagtagagctaggaattagagtcaggtctgtaggtcttcaaagctttatgcctgctcttttaataaaatttccagataatagacatgtaatttataatgccagataaaaaaggtattacagcacataattacaccactctgacctcgattacgctgttaaattcctatgttgtaatccttatgcatttgaaagactaactttagaaatgccacttacctttcaaatattttgcagtgccttctcactgtttatcttattgttgagaaggaaatctatggattctaagtgtttcatggagttgataatttcatataattactcagaagataccttcaacacattccaaaagtttgaaacattaaatgctagttactaaacagaatactgtgttccacgcagtatgctaacatactctatatatgtaacattcatctacatatagttgatgcccaca

SEQ ID NO: 52544 - DNA, 479 bp, Homo sapiens
  misc_feature 34: n = A,T,C or G
ggtacccgggccccccctcggaggtacttctagnaattaattaacgcggggggtctcccatattggatctcctttttttctggagtcgatgccttttgtttccttggtttagtctcttcttttggtggaacacaccttccagttagctccctgtaaaaggaagctgtcagaaaatgtctctcttctattctcatacctaattgatcatttttggctggatacagaactctagctcaaacatgattttccctcagaattttgaaggcattactccattggcttcttgcttccagagttattgttgagaaaactaaatccattgtcatcttgatcatttgtatgtggcctgtttttttttctccctctctgaaagtttataaggggtattctttttctttttaatgttctgaacttttatagcattgtacattggtgtaaagtaatttttatttattggggctggcccctttcaatcatgt

SEQ ID NO: 52545 - DNA, 613 bp, Homo sapiens
  misc_feature 26, 39: n = A,T,C or G
gactgggtaccgggcccccccctcgngaatacttctagnattaattaacgcggggaatactacccagccataaaaaaaatgaaatattgtcctttgcaacaacctggatgcagctaggccattgtcctaactgaagtaatgcagaaacagaaaatcaaatacttcgtcttctcacttatacatgggagctaaacaataagtacacacagacataaagatggaagcagtaggcagtgggtattctcaaagcaggagggaggaagcaaggcgaagttttgaaatactactattgagtactgttttcattatttgtatgatggcatcaatagaaagccaaactccagcaatatacatatatccgtgtaacaaacctgcaatatacccctgaaacttaaacaagcaaacaaaaagactagaccattttgcactcctgccagcaataaatgaaaatttgtgttgttcaacctccatgccagcatttagggttgtcagtgttttgacttttcactattctaataagtgtgtagtggagaatttagtgttgttcaaaatgaatctctatttttattttataataaaaaaattaaactgagtaattggatcattgtcttgg

SEQ ID NO: 52546 - DNA, 481 bp, Homo sapiens
ccccccttcgaaagtcttctagaattaattaacgcgggaggttagtaaactagtacttagcacatagagttgttgcatggattaaatgagctatctatagattgctcattagcgtgcttcgtgcatggtaggtgctcagtaaatgttaactgttatttttgtcatcactattgttattaatgcctcctttatttattcatgcattcaacagatgtttattgaatgcttatattggaagttggtgattaaacaaaacaaagttcctgcccttcttgagtccctgccctcaagaagctttcattcactcttgtgaacaagacagttaataagcaagcaaataaataattaggctgggtgcggtggctcacgcctgtaatcccagcactttgggaagccgaggtgggtggatcacgaggtcaacagattgagaccagcctgaacaacatggcgaaaccccgtctctattaaaaaaaaaaaaaaa

SEQ ID NO: 52547 - DNA, 542 bp, Homo sapiens
cgggcccccccctcggaagtcttctagaattaattaacgcggggcatctgttgatcatccatttattttttttccagtaatttcaaagcactagaatttgcccatatgtaattcatacttctgaatagttgtccagttaaaattaatgaatgagaaaaattagaatttaagtagaaaacagtaatcgagatccataaacagtaaatttggacgtataagcaagtgtgccctcccgtcaccacaagctttaagaattatgcagctctataagaagtgaagagggggtttacatgtgcccaacttggaagctgcaaattcaagtacattttagatatgagtaagtggcagctaggtcagggaacccagtttcttattcaaaattggaatctaatagaattatatttgaatataccaaaaactttccatggttaaaatcagagtgcagaggaaaaccattctttttaaaatgcaattattatttttattttatatagtggtggtactagaaactgatctattgtgataccaaaaaaaaaaaaaaa

SEQ ID NO: 52548 - DNA, 539 bp, Homo sapiens
ttctagaattaattaattgcgttgccttaagaattgaccagtggcactaaattaatctttttaccctgaattatctgtaggaaaactgagaattaaaatgattaatttcaatagaaatttaggaccaatacttaaaaatcgacattgctaagattatttttaaagctatggcaacagagaccaattccaagattggagaaataatgtagatgactcaagctgcaaaagctgcttagatggcaaataaacctcagcacagaatattcaggaggtctctcctcgtcagtgaccttcagactttttggagtgtggcattctattgttttgttgttggtgtttctttaatatttccaggtttttagttcatttactttcctcccaaaaagtgtaggcttacacatatatcatctagatgcgtaatgtgtatgcacacaaaattaaagcagacttttctgtggaaatttatgacaactctatgaataactgtagagatgctgtgttaacatgggatcagggttgaaattactctaaaatgttga

SEQ ID NO: 52549 - DNA, 584 bp, Homo sapiens
  misc_feature 561: n = A,T,C or G
cgggccccccctcggaatacttctagaattaattaacgcgggggtacatatttatcttatctgagatggaaaacaacactagagagacagaaagactgtacacagagtatgaatgggctaaaacaaattaaaaacaaactctagcaacttttatagcaagttgaccctcacccacatatttgtatgatttagttgataaaattgctaatagttgtaacgaatattcaatgcctcagatttgctgaaataattctcttttatatttttctagaacatggtgggaaatgtcccatacaacagaagactataatttgagagagagtaaagaaataactaactacaacattaccattattttcaccaaaaaaaccctaacaacaacatagtaaaaacatgaagtaattactagatttttttattccaggcaatcaaaagcttatttgcaatgagtattaccgtctgaacaaatttttcccctcaaaacaattctaccaccatttcttttaagtattgccgtcatctacttagttatgtagactctaagtcagagattctcacagncatggagatggggatagaagcct

SEQ ID NO: 52550 - DNA, 471 bp, Homo sapiens
ccccccctcgtgcgtactgtctaaaattaattaccgcggggccccaaccaattgggaggtgttaaacctaattcttttctatgttttgcgggctgttaatgtcctttagaagtctttatctttctgggtaaaaatatgtctatcgttatggccctttacagcatcaaaaataaaaattccttcctttcttctataaatggaggcttcaaaataaaaatttgggattttcaaaacctccagtacagaacctaatctgaatttttggatgctttttctttcggcggggaataccttgaaaagattcaaatgatttcaaaacccacctttctaacgtcggggaaagaatccctcaaacacatttaccagccaaaacatttctttagagtataaaaaatgacgcttggcccttcaaagtaaaggttacagtttctataaatgaaaaaaggccgaatttttgctaccaaaatattt

SEQ ID NO: 52551 - DNA, 521 bp, Homo sapiens
  misc_feature 61, 62: n = A,T,C or G
gccccccctcggggatcttctagaattaattaacgcgggaccactgacctagatgtgccannactgaagaaatcaggaaatcaacagagatctattacttctctgacaccttttccttctatttaccttttccttgtttattagttgcttttggagtaaaccaaaataaaaacaagaggtttggggcttgctaaaaagttctcagagatttcaatcacgcatctctgagatttttgtggatcacttagttcaaacatagagataatgcatgcagcattttacacaattgttagccatgtagatttgtttattggccatctatctcaagtaatcagtagagcacgctgtgtgaaataatgccaaaatgtcaaagaatgtctaaaagaggccaggctcggtggctcacgccagtaatcccagcactttgggaggccgaggcgggcggatcatgaggtcaggagatcgagaccatcctggctaacatggtgaaaccgccctctctactaaaaaaaaaaaaaaaa

SEQ ID NO: 52552 - DNA, 534 bp, Homo sapiens
cccccctcgaaatacttctagaattaattaacgcggggcactaagcaacaaggaattggggaagtacaaagttagtgatatcattagaagctgtatgaaatagcaaataaaaatcctaaagaaactcagagaaattaaaatttacttccttttttattgatttttcatcttcccttttatatcaaggtaatattggcaattcattaggtaaaggaagagctcatatgcttgagaacttcctttatattaagggtgaaagtttcccattgttcctaaaataaatatattgagttttctctccaggtcaatattctgtgatgtatatgttcatttttattgttttcaaattatacttcctcaaactgtgtgactactcttcaccaccggaaaacacagtgaccaagatgctatgcacacggcaaactatcagacagggctctcatctcccatcaaacatttgtcttaattctctaggtctttggtttctcatctatacataaggaaagctaacctctacccaaaaaaaaaaaaaaa

SEQ ID NO: 52553 - DNA, 546 bp, Homo sapiens
cccccctcgagagtcttctagaattaattaacgcgggtcccacccataatgatgaaaccaggaatttttcttcttagattatttcacacaaaacctgatttccaagcaattcccactgtcagaacacacctagtaaataattctgtaaaaagatcctgaatgcaaatcttatcttttatttatttctattgatgtacaatttttgtacatatttatggggtacacatattttgacacatgcatggactatttaatgaccaaatcagagtaggatatctgctacctcaaacatttatcatgtatttgtttgaaaacatttcaaattttctcttctagttaatttgaaatatacaatatattgtacttaattatagtcaccctcctgtgttatcaaatattataatttattctttctggctgggtgcagtggctcagtcctgtaatcccagcactttgggaggctgaggtgggcagatcatttgaggtcaggagttcgagaccagcctggccaacaaggcgaaaccccgtctctaaaaaaaaaaaaaa

SEQ ID NO: 52554 - DNA, 614 bp, Homo sapiens
  misc_feature 28: n = A,T,C or G
cgggcccccccctcggaatacttctagnaattaattaacgcgggcagttatatgttcattgtacagtcattttttttagtaacagctttactgttaattatttcatgtaccaaccttttaaagtgtacaattcaatggttttaatatatttgcagaattgcgcaaccatcaccacgatcaattttagaaaagtctcacggtccccaaaaaagcaatcctgtgcccattagcaatcactcctccttcccctccaactcctggcaaccattttctgtgactatgaatttgtaatctacttgctgtgtctatgactttgcctgttctgggtatttcgcataatggaaattatgtaatttccatgtggtcttttatgactagcttctttcacttagcataatgttctcaaggttcatccatgttgttgcatgtgccagcacttcattcctttttattgctgaataatattccatcatatggatataccacatttatttatccattcatccattggtcaatggacatttgggtcgcttctgccctttggctatcataagtaatgctgctatgaacattcatgtcaatgggtttatgtgtggacatatgttttcattttt

SEQ ID NO: 52555 - DNA, 628 bp, Homo sapiens
cgggcccccccctcgaaatacttctagaattaattaacgcgggacctctataaaaaatgacttgagttcaggaaggtgttgaaacaggtttagggttgaagtgtctattttggttggcttctgcactgcttcttctgctgataatcttggagggtgtggttccttcaaaataattttaaggaaaaacaattccatatctatgttattaatctctcactatgttccttcatatacactaggctctagctacaatgaattacataccatgcattgttgacaattataggtgttggctcagactattctcttagcagagatactacttttttcatttctttggaaaccccacttctactttaaagtttttcttactgatatctctcctaaattttcaagtcagaatgtattattctcttttattatttttccttggcaaataatttatattttaattataatttatttctttctatattggattacatatagttgtttatggtctgtcttccccagctaggttataagtgccttaaagctagagaagccttattcatttttggatttccatactagactagtatcttacacgttagatgcttggtaaaattaaatgtagtattcaaaattc

SEQ ID NO: 52556 - DNA, 566 bp, Homo sapiens
ggccccccctcggaagtcttctagaattaattaacgcgggatagtcttcattattattacatttttacagaaattccctgtgtaataatagttcctgagttccggctgttcgtaggtgtcaaatggtttctctgtatagtatcttgaaggaataaaactgatctctttccatgtttgcttactaggcatatatgtatataatctattttataatttatgaatgactcataaaaatgaaatattagccttcagttaatttttataacagaactgttttaaaatagaatatgtgtgaaatattaaagtatttgagcatagctatctgaaatcttaatagtattttaatgaaatgaggcttggatgttatttattgatattttactttatataattttttactagatacttcactaacgatttagaaataaaacttataaaaataaaaagtatagggatggataccccattctccatgatgtggttatttcacattgcatgcttgtatcaaaacatcttatgtacccctaagcatgtacacctactatgtactctcaaaaaaaaaaaaa

SEQ ID NO: 52557 - DNA, 597 bp, Homo sapiens
ccccctcgaaagtcttctagaattaattaacgcgggacctcaggtaaggcaacctggcaagctgtagataataagactcctgaagttcaaggttatgcacaggaaagtgaaagtctgtgttttattgatatattacaaaatagtagactattgaagaactatataatatatattttaaactaatggagtattcaccatttcaaattctataactctgccatttttgaatgcattaactctcaccagaataaattacaaggaatacttacaacatcacatttttttgaacaattcaccagtgtaaaattcagagtgtgaaagcctgtatggttatctttttcttccagacactctatagtataacaaaagtcttcttcaaaatactttatcatggattgtccaggattcaatactgatacttcttgaaatacacacacatcatccttttctaagaacagaaaacatagtcaataagaaaatatactgttgagttttgtactaatccatcgttggaacttatatttgagtctatgttttcattgcgatgtgccaatttttcaaaactaatgaagatctttcatatttacgtatttaatg

SEQ ID NO: 52558 - DNA, 544 bp, Homo sapiens
  misc_feature 532: n = A,T,C or G
ccgggccccccctcgaaagtcttctagaattaattaacgcgggggggcaaaataaactgaaaaaagaagctgaatcctatatctcctcttctccccagtgtaatacctacctgcgtataaacaaaaaataggactttggtgactaaaaaactctgaactacttaatgtaggacatgccataattcatgcttcttttaaaaataattgtacatgtgcattcttttcagatgattttcaaatttggctagactactgcaaagtagttatatttttttgtcaatataagcaaagatattaatttaatgtcctagaaaattggacttcaaagttttggtggaatgcagggttctcatcctagtcccccaaaattaagtctctgtttccaaaataagacctagcccaggccagtcacagtggctcaaacctgttatcccaacactttgagaggacaaagaggaaggattgtttgagtctaggagttcaagaccagcctggataacactgggagactctgtgtctacataaacctaanaaaaaaaaaaaa

SEQ ID NO: 52559 - DNA, 507 bp, Homo sapiens
cccccctcgagagtcttctagaattaattaacgcgggtggttgatcaagagccatttgggccaattgggcagctatctggaagtgtgataacccctatcccggaactagttgtgatggatttcagagaagcaaagcagcatctctttgccctcaggcaaatggcttcctctaccttctcatcctaagaccatcctacctccttcctctctcccttcttcctggcttagatgatgggtaaagggtgtgtattcttcaaatgataaactccttatgagattggcagtatgttacatacagaatatacagaaactgtcattgcctggtcctggttatttaaaggaatcaggaaaacaaatacaaaaacaaaatcaagaatatctttttgttggctgtgtttccacaggccatatttttgaacatgaggtagaaggctgtagatacataaaagagaagaaaatggttagagtagacaggcaagttgactgctagccaaaaaaaaaaaaaaa

SEQ ID NO: 52560 - DNA, 384 bp, Homo sapiens
  misc_feature 349, 364: n = A,T,C or G
cgggcccccccctcgaaagtcttctagaattaattaacgcggggggatcctggtcacagcatgtagttttctttgcacgagccattccttgctggaatcctgtcaacttttccccataaagtttctgctcaagcattactttctttgtgatgccaccactaattccttctgtatggcactgtatagtaattactcatctgtctctctctccaccagactaaaaactgagggctgacactgaatttcttcatttgtttgttgaataaatgagtagcaattagcacagtatcatctgtgaacagtgaaccatgattcctgtgtactttgggtgatgatcaaatattaactntgggaaggacctcanaaacaatgtaggtcagctct

SEQ ID NO: 52561 - DNA, 601 bp, Homo sapiens
  misc_feature 32: n = A,T,C or G
gtaccgggcccccccctcggaatacttctagnattaattaaccgggtcctgcaatcatttctgatatacttctttttgggaatagtagagaacaattaaattaatcacttcttttactgctttaagaacacattcactgttattcaccatttcattcaatgacaatttatattacatgttaattttataagcaatgataattttattccaactaaaccagtcagacctccctcctatttaagcccacctttatacgtaggactcatcattttaaaatcgatgaaaattatactgaggcaattaaaatagcaataaaatatttagcacttctgaaagtaattcacaaatatttattcatttttatcatgaactttaaagtaacactagaggtaactttgagagtttaatgattcctttgccaattcatatacttggtaattgtaagaccttgaactcaaacagactcaagttctatattctgttcatttcattcatcatgcagcctcttagtagagacaacttgtctattgaaaattctgcctgaggattattaactggaaataccatttggctcctctgataatatttaatcacaaattta

SEQ ID NO: 52562 - DNA, 337 bp, Homo sapiens
  misc_feature 22: n = A,T,C or G
cccccctcggggtacttctagnattaattaacgcggggtaggctgacaacataatgtaattttgaattggtgtggactcctagctataaaatgatgagattcttgaagagtgtttaattggggatgtgtcacattataccaaattttgcacagacactttatgactgcgtttaatagtgctgtgagtttcaaatataaagactccacattttgcatggaattacgccacataacattcaataggcaaagctatcctatattagttgaatactcacggaagcatataccctcattctgtgttttgggcctattggcacccagggaaacaaaaaaataa

SEQ ID NO: 52563 - DNA, 556 bp, Homo sapiens
ccgggccccccctcggaagtcttctagaattaattaacgcgggctgctttgtattttgatatgtagttctttgactttagcaagcttaagttgccccactgaataattttttcaactgattcatctagaattctgttctttttcatggaagagactttatctttcagaaagagattgcttgcttctccaaaatttcattgagatcttacaattctagaatttctattgactttactttttttcttagtgaaacactaatagtctagaagtcttgataaatggggtcttttcttttgtgatcagccaggaagaggagttcacaaaactctgccatagctcctcacccttcccaactacaaagagcatcattatgagaagcctgttatagatcaagatgcattgatgccaaaattacttttttccttccaaatatcaccttctgactgtttccaccatggttaagagggctgaataagatgatcattctttagatgacgaattaacccttgcttcttcgaaaggttttagggaaattaacaaaaaaattcccagatgc

SEQ ID NO: 52564 - DNA, 596 bp, Homo sapiens
gggccccccctcggaagtcttctagaattaattaacgcggggttggaattctgtttcggactttgaaatatataaataagtaaaaaattgacattgagagaggttaacaaaacgtgtaattatgatataagcacagaattagagtcattttggttgagcattacaagcagtgtactttaggtattaacttttaataggcaaagttctttttattgaagttgaaatgaggtttagtaatgttgggtctcttattccctttgaatgtttcattttaaaataggcattcactttttttttggtataggagaaattcaggaatgggatgacattttaatagaatatcataattatggtttaaaatttcagtcttggttactagcaatttattacagatcattttctgttgactgaagtcaagtaacgtatatgtaacccaactagctacaaccaactagagtgtgttagaagaatactcctaggggtactttgatttctttttctctatgggtgtggttgaaagaaaatctgtgttccaggaacactttgtttgtcttttacaaaacaaatgtgcaatttattcattcttagatttatct

SEQ ID NO: 52565 - DNA, 214 bp, Homo sapiens
cgggcccccccctcggggtacttctagaattaattaacgcggggaaggacgccaacctgacagtagagaacaatggcaagagccgctaaggtcaaagacagaaatgttaaagctggcagaggagttaaaaggattacagtcgggagctacctaatgagtgagggaagtagcattgtacactttctagtagcctctggagggcattcccagcatt

SEQ ID NO: 52566 - DNA, 463 bp, Homo sapiens
  misc_feature 36: n = A,T,C or G
tgggtacccgggccccccctcggaggatacttctgnaattaattaacgcgggaggcaatcaggcacatgttcgacaggctggggagtaacctaaccttttacacttttacagtgagagagaatgtggagttgccaggggctagtgttctcggaatttgggcagcttatcttggagaagtggttcagggctactgtatgtagcttgcatttcactggttcttaccccatttggcagtgtagaacagaaaaccaaatatacacatccctcaggccaccactatatctgtgtcatcacgggggtatacctcttgtacaacaaaagtccaatcaagtcagacacgatggtgtgtgcctgtaatctcagctattccgaaggctgaggcaggagggtctcttgagcccaggagttcaaggccagcctgagcaacatagcaaaaccctatctcttaaaaaaaaaaaaaaa

SEQ ID NO: 52567 - DNA, 532 bp, Homo sapiens
  misc_feature 424: n = A,T,C or G
acttctacaattaattaacgcggggtgtgattacaaataaagacagttttgtttttgttctttccaatctggaggcttttatttatttgttgttttttttcctaatttaactagatgaaactctctatagaatgtcgaatggaagtggtgagggtagaaatctttgccttgttcttaatccttaggtgtaaaataatcaatgatgttagctatggtcttttaaaaatagatatattatatcaagtttcttctaattctagtgcttcaagagtttatttcaggaattgatgttgaattttaacaagtttttttttctgtgctaatagagatcatcatatgatttttattttttagtttataaatatggtgaattaaatagattgatttttgaatgttaaaacactgatggattatgatatattgnctctctaatatatagttgaacatgcttgccaaaatttttttgctataattttacaccaaaagtcatgatagatattggcctgtaaatttctcttcttgcaatgttttt

SEQ ID NO: 52568 - DNA, 624 bp, Homo sapiens
gggccccccctcggaagtcttctagaattaattaacgcgggggaatcgcttgaaccctggaggcggaggttgcagtgagccgagattgcgccactgcactctagcctgggtgacagagcaagactctgcctcaaaaaaaaaaaaactctttagaaatataccaaagtaaatgcaatatcatttttgatttttacaaactagcttcaagcagaaaagacaaaagcttcaggggataccatatgttcactccccaggcaaagcctatctgtgtgggattaatgacagcattgagtgggtggctgtgtgcctcgtgggagaatatgttactaatggtcactggaagaaaaggagtcagctttctcttttcttatgtctttaacgatgcttaactctcccttatttaaaataaaacacatattagattctgcatctgaaccaacattaacattccatttctttctgctaaattaactttcttggacaactggatcatgttcatggatagtgcctctcccatccactttttctgggaatcttgctttccttccatgttttggtccttacatacctccctcatttcatcctgcgccacttccccccaatcacagaggtccagtcacactc

SEQ ID NO: 52569 - DNA, 513 bp, Homo sapiens
  misc_feature 481, 488: n = A,T,C or G
gggccccccctcggaagtcttctagaattaattaacgcgggttgtatacctttgtcattaattcataacttctggtaaacacagcttaatttaaccttggctttattcttagattttgattgaatgcttcttttatcttaccctggatcatttcataaagttgttacatagacttctgggcttatgcaagttattttaaaagccattgtagtcgctcagaactggcatcacacattaacttccaaataagggattttttttgatctgtcttctttcataagtttctgttgaaatctttcctttatataacagaagaactgaaaaagggagaaaaacatgaaggtcattttatgctgatagcacaaaaactgggtttttatctaatcatgtggaagtgcttttctctctggtgttaaataaatgagaaatataaaatctccattgatttataattgaaagctggtagctatatattattcanaattcanaatatactacaagtcgttgcttttt

SEQ ID NO: 52570 - DNA, 388 bp, Homo sapiens
gggccccccctcggaagtcttctagaattaattaacgccggggcaggccaggtattgggaagaccatggacgtgaaatcccaaccattttatttcttttccttccagtttccctcttcctttcctcactccactacctttcctttccttccttttaaagtagccttaagataatgctcacatgtgccagtgctacacacatactctttctggggataggtactgagacagataaggaatgtctactgggctctgtagtttaagatttttaccaatgggtgtggatgaccggaagtgatggcagccaatggttaactatttattaaggattaacgggtttagaaaccccgactcagtggccagggaacaaggggaaaaaaaaaaaaaaa

SEQ ID NO: 52571 - DNA, 578 bp, Homo sapiens
ccgggccccccctcggaagtcttctagaattaattaacgcgggttccttcaggagccctggttccttctataactattttttttaattgcgatataactcacatactatataatccacctatttaaaatgtgcaactcagtagcttttgatatattcacagatgtgcagccattgccgcaatcaattttagaacattttcatcaccccaaaagaaatcttataccccataagcagtctactgtccatttctcatgttccccggtcctagataacactcttttgatttacctattcgggatatttcatgtaaatgaagtcatataatatgtgatcttttgtgcctggcagcttttacttagcatgatgttttcaaggttcgtccatgttgtagcttgtattagtatttcattcctttttatggccaaataataacttcattgtctggatataatacatgttatataatcattagttgaaggacattggtttatttgcgtgtttataccttttggctattatgaataatgctgcaatgtatattctatacaatagcctttctaaagattttgttgttgtt

SEQ ID NO: 52572 - DNA, 533 bp, Homo sapiens
gggccccccctcgaaatacttctagaattaattaacgcgggcccagaagttatagatcaagataatttatttgtatcctgtccttaagaggtcactttcttctctgtaattaattatgggttttcattttatcacctcttaactctacttttacattaactaaatactaatataaaataaaaagctaaagttttttcaagtaatatcaaagaattttattctaacacattggagaagaaagcaagataaaggaaatatttaatctcaaattatgaagatatctttctaagtaacttttagaaatcatgaagctatgctagcagtttcatgtcctctgctaccttaaatttgactgaattttaatgtcctgtttataataacttaatgacccatgagagaaacaattttcctaagttgcttcaaaaacacacgtgtgatttccccataaattatgaattatcatatgtggctattccattccgaaaagccaatccaaggagatattcaattatcatctgataagtctgccttct

SEQ ID NO: 52573 - DNA, 467 bp, Homo sapiens
  misc_feature 9: n = A,T,C or G
acttctagnattaattaacgcgggaggaggggaggaggatcacctgagcccaggaggtcgaggctgcagtgagctgtgatcaccctactgcactccagcctgggcgacagaatgagaccctgtcaaaaaaaattttgtacatggattccttaaaatgctacaaatagttgattctatgttgtcttctgcataaaacaatatgcagtagttaaagacttgcaagaaaagttccttctgctgctctctctgtcattagttcttgagtcctcactcaagcttgtgctctaactctacaggcagggctaacataaattatgcgtagtccaggagaccacacacaaaataacatacataatcattactttcttgtctagaggcttagtctggctacttttctcccattggcttgaggtgtaaattcaccaaaaccagcccagaaatgattttacatgggaaaaaagtttatg

SEQ ID NO: 52574 - DNA, 489 bp, Homo sapiens
cccccctcgagagtcttctagaattaattaacgcggggacctcaataaagctataaataaaaggtatgcatatttatgaggagatagcattgctcatatatatatgctttgcacatttaaaaagtttgttatctagatggtgactacacaattcaaatgttctactcctgaacttttccttgcatttgaaaatgttcaaaatataaattagaaaaattctttgaactttacatttattgcagtataacctataaattataaagatgagagcattgaataatactgtatgctactttatcatattaaatgtaatttaaaattattaactattatgatgactgcttaatttatttttaattattttaaggtctttataagtgtacaggcatttatataatttcaggagagcattcttataaagaactgagcatcaggcttttactcagaaacatagccctacataacattcatccaaaaaaaaaaaaaaaa

SEQ ID NO: 52575 - DNA, 631 bp, Homo sapiens
gggccccccctcggggtacttctagaattaattaacgcgggcactcagttaaatctgagtctaaaattcattggttcaataaattcatatttttcacttttgtattttaaaatgatcaaaataaagtcatacattatctcaaagaagcattactctttgtactcatattttttcctctttgtaaaatacaatatcctctcaccaaaataattttaattttttagccctaggaaagacaaaggccttttctgagctcaaattagatgacacttgtccatgcactaatttttttacaccatgtttatataatctatcatactttgttatttattattattatttgcatagaaatttattgttcgattttagatagtatgccttttaacaaaagaaagtgtgacagagcattgttaagtaggacgaacacagagtagcgttttacatttgtgagcatattctaagaagtcaatatgccagttttcattctttgttctgttcaaattaacataaaaattcacaatcagtatctttaaaagcattaagacaaaaattttagctaaaaattccacattaaagcactttgttgaggaaatcataacacttaaagagatagtgtacaaaatgccaaatt

SEQ ID NO: 52576 - DNA, 606 bp, Homo sapiens
  misc_feature 29: n = A,T,C or G
ccgggcccccccctcgaaagtcttctagnaattaattaacgcgggtgacttttaagacagtttctccctgtccaaccaggatgagaaagcactggaggcaacatggtccagaaataggtcctgagtcaatcttggattcaagcacagccctgccacctacaagccatatgatgctagcatgttaggtaacctctccgaatctcaaaatacttccagagcctgccacagaacagaggatcaataaatattaattcatggcattcctcaccatttccattcattcctggccaacttttaaaaagtgtggtgagaaagttaaaggtgacaggagcctaagtgagggagaaagaggggggagagagtagagagaaaaggcagaatctggaccctgaatgataatgagtaaccagaaattgacagggtttttttccttttcaaactttatttcatctgagtcacctgttccagacatagaatcccagccttgagcaattcaaaaggagtggcagagaatggaaagggaacagattatcttgaatgtgtgcattcatcagcatggttaataaaacactaagcagccctacctccagacctactccaggcctg

SEQ ID NO: 52577 - DNA, 528 bp, Homo sapiens
  misc_feature 19, 33, 464: n = A,T,C or G
taccgggcccccccctcgngggatacttctagnattaattaacgcggggttgtagaatcaacatagcagatttcagttaataggcacagggaatggtagtaaattcatagagtaaattcatagttgaagcattctgttatcaaaatcagcaagccaagatgcatactgctttttgaaaccaggcccaaatatgagatgttttaaaatgataaatcgataaaaaccttaagtcaatcataattctcaccttcctaatgattgcatttgtaacataaaaatgaaatggaatccactgaggagtgagattcttgcagaatgtgaactgaaattccctagtacacctatagacagttaactctcaatcactgggatagaattaaaaattaagactaggtatggtggctcatgcctgcaatcccagcacttcaggaggctgaccaaagtgggagactggcttgagcccnagagttcaagactagcctaggcaacacagggagacctcatctctaccaaaaaaaaaaaaaaagc

SEQ ID NO: 52578 - DNA, 431 bp, Homo sapiens
ccccccctcggaatacttctagaattaattaacgcggggtggcacgatcatggctcactgcggccttgattactgggctcaagtgatcttcttatcttagcttcctgagtagctgggattacaggcagtagcgaccatgcctggtagattatccctttaaaaaaattccttctagttgtttgcctaatatttgttatctgcttctgttaatctgtgctaaaaatgagtggaaatgaccttactgattcactaagaagacaaaaagttagccgggtgtggtggcggggacctgtggtcccagctactagggaggctgagacaggagaattgctcgaacccgggaggcggaggttgtggtgagctgagatcgcaccattgtactccagtgtgggcaacacgagtgaaacttcgtcgcaaaaaaaaaaaaaaaa

SEQ ID NO: 52579 - DNA, 616 bp, Homo sapiens
cgggccccccctcggggtacttctagaattaattaacgcgggacctgtctctaggattatgacttgtttggagctcagtcttctccttgttagaaagccatgtctttttcatctccctggaaaagaaatgaataaacagaagatttggtaatcagaacagaaacagtagttttctcagatttaacaaaagtgaaagacaaaatatattttaattattatctctagtttaaaagaacatcatggaaaatgtgatcataaggataaatttactttattttcactgtagactcatgtgacagcccaaacactgcagtgaactttaaacctgacaaattgggttgtaatcaggtgttagttatattaacataacttaaatactttatataaatgtaaatatatagaaatatagatatataatatatatttatatatatagcttatatatgcatatgtatatacacattatatatgtgtatatacatatatacacagacacacacatacactgaaaaagaaagcttctgacattgttaacttcccaaaacagataactctgctactttatgggagtcagccgaagagggaattaaatcaaaacctcagatattaatcctac

SEQ ID NO: 52580 - DNA, 626 bp, Homo sapiens
  misc_feature 33, 38: n = A,T,C or G
ctgggtaccgcggccccccctcggaaatacttnctagnattaattaacgcgggccacacccaccttatgcttggaaaagcctcctgttttacatttccaaagtcaacttcttcctgtcaatcaaaacctaacaaaattcactccctctgccttttatatgctcgcagcaaacaataaatgattaaagtgctgatggtaaactcatctgcaaaaaacatgtattctgagcaatggattttggcaaagaaaagatagggaggaactgcaacccacttagtaatttctctaaccaaccgttaacacatttgtgctaccataattattgctctggcaaatactacattgtcatagaaacattgtttcccaaacacttatttatagattttattggtggcatatgttaaccgtgaagcagtttccatagtgttgttgtgagctttgacaatgaagagtgataaggaacacgattcagcttccacagttgacccactaattggaagtctgtaaaacaagaaattttcccagactttctatatgtcaaggtgagtagagctggtgatccccagatgcacttcttatcataaagtttattgcccccagggagaagagtaaatgaaccacctaga

SEQ ID NO: 52581 - DNA, 620 bp, Homo sapiens
  misc_feature 140, 577: n = A,T,C or G
cccccctcggaagtcttctagaattaattaacgcggggaataggcagaggagactgcaaatgcaaaggctaaatttgtaagaaagaagaactagtttgaatgcaaatctaactagattcatgcagaggaaataacccatngaaaagacaacacagagaggacagagcaaagaggattacacaagaaggacagaatttcagggaaggggttgtgtgcgtcatgattcttaccatactcaataatgctagtaagaacaggggcttcaacagtgcatggcccaggcctttggaatggagtgatgagggctacagaaggagtatacaattaataccaaaacagcctcagcctccaaatgaagtaaagcctgtttctaggcatttaatctctattaatggttccatagagccttattgatttttctgtttagagaaatgaggacaaaaacatgaacttaattagggctcactctcctcatctcaactcttaagtgctggcttttacttttccaatgcatctgccctgaactggaatttgggctctgggatctgggaatgcctctgtctgagaggtgaggctntgggaaataaactcaaaaaaaaaaaaaaaagcggccgccaccg

SEQ ID NO: 52582 - DNA, 415 bp, Homo sapiens
cccccctcgagagtcttctagaattaattaacgcgggacttatacaacaaatattgatgttcattggtatcaaggagtatgagttgatatcaattgttgatataaattatatcaatgataatgagtaagctcattccaagtaaggcactgtaagtgatattaatttgcatgtgatgtggactcaatattcaaggagcacacagcctaataaggtaaatcattattgtaatacaaggtaaaataataaagaattgcaaatatagtgctgtgggatttcaagtgagcaggaattccttctagtgtcactaatatcaatacaatctcacttcttgggcttttagaaatcacaaatctgtctactagttggctaattacaatattcagtgtgattttgctttccaaaaaaaaaaaaaaa

SEQ ID NO: 52583 - DNA, 584 bp, Homo sapiens
aattaacgcccgggccagccaagaaaaccaacaggaatgtgcgagcacagtcataacgtaaaataaaattcttagcactcgagtcccgtgctgaagctgagatgttcagaaaaagccaagcactgtggcatgaacccgagattgcatttggacagggatgtattcaaatctgcttgggaatgacatacttgattctggaacaaactgctcacttttaacgtggtttgaactaatgaacaagtacgtcccagcatctataagccaaagaactattccctcttctaatcaccaactttgattttttttaactgaaaactgtagaaagaaaatacatcgttgccaaacatatttattatgattaatagcctgtaatatccctcaccaaggcttaatttgcacttgttttcaattatgaagctgcaccactctagtccagtccccttttcaggtggagatgaatttcttgtggtctttactctttctattgtattgccacccagcaaggcacaattagttaaaaacagtaaacctccaccttggctccaacagagcaccagattacacaaaattagagaagaaaataa

SEQ ID NO: 52584 - DNA, 642 bp, Homo sapiens
cccccctcggggtacttctagaattaattaacgcggggggtataagtcataccatatttttatgttctattttaagttggcaactcacaattctgatttagccatgaggcagcatttaagcgaaaacctaagttcaagtaaccctaactgagtatatcagatatgccagtaatacttggatgtgtattttaaacatttctagggcaaaggaaaattaaattactacattatagtttagaatgtaatgtgccaacatgactaatttgaataatagtcaacctaatgttgaaatcaacttttcagtatggtaaacccacttaatgtaaatatggaaataaatattgcatataaatccaacaaaagtgctaataaattaaaagatcaacccagaagcatcaaggtatgcaaggtacattaacaattagtttcagctctagtgcttatgtgatgtacctacatttgtagggtgacagacatttctcaaatgtttcaaatttatgcgatttatattatgtatgtcttagtgttcgtagagcctacactgctagaggtgtacaaacacttaaaaaaacccaaaaaccattattctctgtatccactgaaaaaatgaaacgcacaaagaatctcagaaaaccatactaa

SEQ ID NO: 52585 - DNA, 638 bp, Homo sapiens
gggccccccctcggaagtcttctagaattaattaaccggggggggatcatgccctcattttgtaaataaagaaaatgagaagaacagagcttaggaaagtcaggactcacagacatgaaatctgaagtaaaatataatgtaattgtatatctcagatgtcatctataaaacatgctgtaggactatgcagtagacatttagctgtcaatatatacatatatattcttctacattcccagaattaggtctattgaagagacaaagctttgaatttctagcattgctctttatatttcacacagatgatcttttttctcaaagataccagaaacattctctaaatcatttggtattaaaaaattgtttaaaaataaaatagagttctttttgtctacaactactccctctccttagagtgaataccgtgctactttaacttgaacacctattattaggtaaaagttgtgaattattgttaaatgattagtctttgcagaaagaaaggagaagacacctagatgaggtcattagtctgggctgcaagcacagtcttaaccattggaggtcatgtttaacttatacaagtctttgatgatatcactatcaggaaaataaggatacttatcgactataatcag

SEQ ID NO: 52586 - DNA, 604 bp, Homo sapiens
  misc_feature 37: n = A,T,C or G
ctggggtacccgggccccccctcgaaatacttctagnattaattaacgcggggtaatcccataggatgatgttaactctcatggtgttcaacatttaaattagaggattctatccttggcaaacaacacaaatacattctggtaagctatcatttatgacaagtcgaacttgcttatttatgttgtacaggtctctctatataaaatcaataacattttcatcttctattatattctatatcctagttattgagatttgtactagatatgtatagatacctattgcacctcaagtcttgcttttggaaacatgtaccttgcagctcagaagacacttaataaatatttattgaatataaatactaaatgccagaccagtcacttgcaggtctaataatacataagatttagaaatcatcaggtctaacttgctgctgttttaaatgtctgtctctacacaaagtttaaagcactaggaagacagaggaaaaattgatatttatatattttactctattcctactctgaataatttatttgacaagacagttaaatatagtttccaacctaagtaagtgaaataactgcattatgctttgggtat

SEQ ID NO: 52587 - DNA, 395 bp, Homo sapiens
  misc_feature 27: n = A,T,C or G
cgggcccccccctcggaatacttctanaattaattaacgcgggaatgctggtaaacttgtccttgaaaacttgatttgtaatcatttttaaatcactaaactttatttagttccaaagacctgctcaaccatgaattagcccctactatgtgttttgttttttagaataaagaaaatgaaaaaggcaattcattttgttgttgtttgaggcaatcattgctttaaattttttctggtagtttctcagtttgttagatgtaaacaatgacataatctgacaaggaagacaataccatttggtacctccttgaaaataaggagtcagtattgatcaggtcacatattattgatgacttcaacatacaccagagaaacagtcacaaaaaaaaaaaaaa

SEQ ID NO: 52588 - DNA, 577 bp, Homo sapiens
  misc_feature 32: n = A,T,C or G
tgggtaccgggccccccctcggaatcttctanattaataacacgggagccctgtcaggtgacatgaggcccctacagatcctacctttcccttggagtcaacactcacaaagtagcacttaactctccactcttggtccacctgtccaactatactagttttctctctctctctctctactaatgacaactacaacttattctgctcctgtatacttttaggggctaggaaatgcctcagaatattcactgtttctttgctgccaccatgaatccctaccttccttgaggggtttttcacagttggaacaaataatacttataaaaaatcaactgaattctgtggaaaaaaatactacatgaatccaaatatatttttattgaagtgacttcagatagcttttttaaaaactaggttaagatctccaaacctccatcacccattcaacggaatgtgtgagggaaggctggaggcagagggggaggagaggagaaaaaagaatggggagggagccttggcttctaaaaagttgactgctttgttagccatctaaaatagctctgcgcttctggcgttc

SEQ ID NO: 52589 - DNA, 482 bp, Homo sapiens
  misc_feature 9: n = A,T,C or G
acttctagnattaattaacgcgggcactataaagagaatcaaaatagtaagtggttagccatttacattattgataattatacttttagaaggtaagtaaaatacaaaacaccaaaatgcatcttttgagatactgtaacttttacctgctgaaattatctaaattgttttttgctccagcaagtgagttcacaggaacaaatctctttatatgaaaaatgtcgggctgggtgcagtagctcacgcctgtaatcccatcactttgggaggttgaggcagggggatcacctgaagttgggagtttgagaccagcctgaccaacatggagaaaccccgtctctactaaaaaaaaaaatacaaaattacaccggtgtggtggcgcaagcctgtaattccagctacttgggaggctgaagcaggagaattgctcacacctgagatgtgaaggttgtggtgagccgagatcatgccattgcactcca

SEQ ID NO: 52590 - DNA, 322 bp, Homo sapiens
ccccctcgaaagtcttctaggattaattaacgcgggttcccctatttggtaactgctaactctaaaaagttccatcttgttcttcccctaaatcttcatgaaataaaatacctgcctatttttaattataatttatcctgctgcaacactgctgtgaaaccaatctgatccagatactattgctgaggaagtttagttattaaaatatgcatctgttctctgtcaacttggctttgttgaaaggcccacagtaacacatgaccaagaaagccttgagaaaaatcaacacaccaaggttttcatccccaaaaaaaaaaaaaaa

SEQ ID NO: 52591 - DNA, 613 bp, Homo sapiens
  misc_feature 24, 35: n = A,T,C or G
tgggtaccgggcccccccctcgangatcttctagnattaattaacgcggggggtaggggaggaacacacactgtgaaagaaaaccaggattctccaaaagacagtcctactctctaggggaaagacattaccagctccaataatatatggtgtccttgagattatatgttggttactgttatttaaagagtcaaaattattgatttttttaaaagaaccagctttatgtttcattaatttgctctgtttcttgttttcaactaaattaatttttcctctaatgtttatatttattttcttctgcttactttatatttaatttactctccttttcctagttcctaaagtggaagctgagattattattttttgaactttctctttttctaatacacacattaacactataaagtttcctctaaacactgcttatgctgcatcccacaaatgttgaaaagttgtattttcattttcatttagttcaattttttttaatttttattgaaagttcttgttaacacgtgttatttagaagtgtcttgtttaatttcaacatatgttcggattttcctgttatctttctgttactaatttccagtttaatcccatcatg

SEQ ID NO: 52592 - DNA, 604 bp, Homo sapiens
  misc_feature 40: n = A,T,C or G
ccccctcggagagtacttgctaaaattaattaacgcgggnaactttattatacaatattaagttgctaatattatttatacctatagattcttaattcatgccctttactatctatttataaattcattcattccattactaaatatgtataattgacaatcccagttataccttaatttatatttttttgtctatttgacataagccaagtacccatgccatgattcaacacagaaaattacaaagcccaccttactgtagactgctgctcttattgcatcaacattcgtatcttccacggaaaataattaacttagttctataatcaggatatgcctggtttatttacaaggaaatatctatcaggtgctaatttctcttagaattagaaatcttggccaggcatggtggctcacacctgtaatcccagcactttgggaggccgaggtaggtggattacctgaggtcaggagtttgagaccagcctggccaacgtggtgaaccctgtctctactaaaaatacaaaaattagtcgggctaaagtggtgtgttcctgtaatcccacctactcgagaggctgaggcaagagaatcgcttgaacct

SEQ ID NO: 52593 - DNA, 558 bp, Homo sapiens
acgcggggggcccgaagcactactatgagaactagagtagaatctgaactaaaatataaggtagtccccatttaattgtgtcacaaagaaaaacttagaagataaaaaaaacttaagaattcagaagtcaattgctaagaagaaaatcaaaagataccaccattttttatttatgttaatttgcaaattctaatataaacacctattggcaaataataagccaaattttacttgttcagtttcaagtatatatagagaagctttacagtcttatatttattcatattatgcaataacattttacctaatctcctttaaggagaaaaatatctaaatactatagaagccaggagacttatataaacaacataaaccaaatataaaattttaaaaacacctactttaatcacattccctaaaaatatataatcaaaataatttttaacattttccaacctttacaaataagtagctttaaaaatgttataaacagccaggcatggtggctcacgcctataatcccagcactttgagaggccaaggtgggcagatcagctg

SEQ ID NO: 52594 - DNA, 610 bp, Homo sapiens
  misc_feature 535, 592: n = A,T,C or G
cgggccccccctcgaaagtcttctagaattaattaacgcgggatatctattttttaaggaataaacaaagtaaccaaactataagctccaggagctcccagtattgcaccctggaatacatgcctgtattttttttcaaattttatttttaattgacaagtaattgtatatatatatgggatacaatctgatgttttgatatatgtacacaatatggtatgattaaatcaaactaattaacatgtccatcacctcacatacttatcattctgggaggagtgtgaacatttaaaatctactgtcagcaattttgcaatatacattactaaacgcttgttgaatgaatgaatgatctgaatgtcctttggtgaacatttgacacagtccctaaatcactagattaaaaaaatgtaggagactgagtggcttcatgagtaccatgaaaaataagagttttttagatataattacccataaatcctcattccaaaccacgtgtccatggggccattttgcagatgcttaaatgacttangaatctccctggaagatatgtgggaagagagcttgctgtcactagagaaaggaatgngaagcagacctttatcct

SEQ ID NO: 52595 - DNA, 585 bp, Homo sapiens
  misc_feature 25: n = A,T,C or G
ggccccccctcggaatacttctagnaattaattaacgcgggcatcatagcaagaatttaaattgatgagccaaattaataaagcttaatttttaaatttttaaattttaaaacctagtatgtacaacataacttgaataataaaaataataattattattaaaatgggctggggtgcccattttttgggtttctcaattcagttatttttatttttttaatttttattaatcccttaatactccattcatggcaatcaattcagtttctacaccaagacttcttaatagtcattctgataagctcttttttctcaggaagcagttaagcacaacataacaccttttgcttgtttcattggtctttttctagccagtccttctgtaaaaatctgatactgagccaggcatggtggctcatgcctgtaatcccagcactttgggaggccaaggcaggtggatcgcctgaggtcaggagttcgagaccagcccttgccagcattgtgaaaccctgtctctactagaaatacaaaaaattagctgggccgtgtggcaagcgcctgtcatcccaactactggggaggctg

SEQ ID NO: 52596 - DNA, 487 bp, Homo sapiens
  misc_feature 384, 385, 404, 426, 443: n = A,T,C or G
attaacgcgggcttatgacctcagggatttgtagcattcaattaaccgcaaaaacaaaaatccagtacattactttttgagttagttttaagactttcccccattggatattggcattttttaatctccagtgaaaataatcaaaggtgagatgtgaaagatttatattctcttgaatgctgatgtcagtatataagcagacaatagatcaaatacaaaacattcctctaccattacccctcacctccaagtcaacttcctggaaaaatatatgtgtatgtactgtcaattgaatatataaatcaattgtttgtgatgttccttaccaagagaaataaacaaataaaaactggagaattattttcttatgagttagaatctgannagaagatgggactatacanacatttgttttagttatagcanaaagaaaaactgtacantaaatactagtaaaaatcaaatactttgattaaagcaattttgc

SEQ ID NO: 52597 - DNA, 494 bp, Homo sapiens
  misc_feature 456, 457: n = A,T,C or G
cccccctcggaagtcttctagaattaattaacgcgggtctcatgtaaaggtaagtgtttccagtgggggatggccatgtcggatgcagtgcaaatagcatcgtctgacaccagcataaagagcagtgaactggaaatgggatcatgtagcaacggtttctgaaatttttttgttctttgcagaattggcagcagcggtaaaaatttccacctcttagtgaggcagagatttttcagtgggtagaatcagtagaaaaatacatgggtagattttgtgccatcccaattatagaataatagatgtgtgtaccaggaatgaatgtttgagcccatgaagatgtgtgttttgtgttggaatcctgtattcattcacctgtgtctttggcattttatgctctccttgagtgggaaagtatatcttaacatagattctgccatctccctaaagggcagactnntatttcacttaaattcttcatatgcaaagtaacacac

SEQ ID NO: 52598 - DNA, 595 bp, Homo sapiens
attaattaacgcggggagagctattgcttaatgggtacatagcttctgtttcggtgatgaaaactttggaaatactggttattattgcattaacaattagtatatttgatgctgcagaactctacacttgaaagtagttaaaatggtaagtttggtgatctttatatgtactttattacaattgtaaaaatagtaaaaaaaagtgtatgagataaatttaaaataagtggagggaaaagctgagactttaaaagtttctgtaggctaatttagaaaactgcccatcatttttagcattgttccatggaaaatgtattccaagcaacaaagagttgacttacaaatgaaacttaaaaacaacttgcttccaagttgaagattaccaaagttctggtttttggcaacaatcgttctgaaaatccgagtttccatcaactttgatggctgcctttcccctaatttaagaggcaagactgccatcatgtggcaagtaaagttaagttgtgggttttcttctaatacagtacaaaggaagattcccttttagagcttataggaactagcctgtaggaaatatctaaacctttcaaactct

SEQ ID NO: 52599 - DNA, 494 bp, Homo sapiens
  misc_feature 437, 474: n = A,T,C or G
cgggccccccctcggagtacttctagaattaattaacgcgggcttagtcagttccctgaatgccctctgaactatgcacaaaggacccagtataaaactttcaacaccatccaaaataactttgatggaaaactgcaacttgcagcaaaggagaaaaaagcaaagtgtgaaaacataaaaagtgctctgagaaacattttattacagtcattgaggccctcctgagaccttttctgatttatttttaaagaaaatacatttcctgatcacagacttcaaaagtacaatgaacaaaaatactctgttgtacttagtaataaaggtttcaaaattcctctggctaaagaaaatctccctttgcatcagaaatgtctcctcttgtcctaactatgacaaaataagctaacataccaaaaccaaagtataaatcgccatanacacttccatgctctggtgacatatgtaaagtcattntggatggacgacattgaggg

SEQ ID NO: 52600 - DNA, 593 bp, Homo sapiens
  misc_feature 23, 36, 569, 582: n = A,T,C or G
tgggtaccgggcccccccctcgngaatacttctagnattaattaacgcggggtagcataagctcaaaatcaagctaaaaatataatatcctaattaaacgtatcatcttgatagctttttgtaaaagctatggatacactttcaacaacatatttatgaaaggatctattatgaccccagaattcacggttaaaaaatagtcacctgctgaataggtgactattcagttgcagcacatccatataatagaatataacctactgagaaaaatggatggaactactgactcacaaaccccgtggatgaatttcaaaatcattatgttgaacaacagaagctggacataaaagaacatatattatatgactccatttatactcaactaggagaacaaatcaaatttgtagtgacagaaggcagatcagtgtttgcatgggctggaaggcatagaggggtggggattaactggttaactaggtagggtcagatgaaacttccacggcttggttgtgatgatggttacatgactgtatccatttgtttcaagactcttcaaactgtatacttanaatggatatgttntatgtaaatca

SEQ ID NO: 52601 - DNA, 437 bp, Homo sapiens
  misc_feature 16, 27, 40: n = A,T,C or G
gactggggtaccgggnccccccctcgngggtacttctagnattaattaacgcggggtgatcagacactggaagaggtcactaagagagctcataaactttcagtccttggaaatcattataaagtagtcagacgcacttattcaggaataaactttttggatacaggatgtcaatatcctcaatatcctttccagatttgaggtatttgtatcaaaacaaactaaacatcataccaagtaaggaagtaatgtttagtctcagaaatgacatatgaggtcagccatctcagtcaagtcatacataaatatttcaaaataggatcatgtaaaaagcatttaatttgggaggctgaggcgggcagatcacaaggtcaggaattcaagaccagcctgaccaacatggtgaaacctggtttcttctaaaaaaaaaaaaaaaa

SEQ ID NO: 52602 - DNA, 396 bp, Homo sapiens
  misc_feature 13, 26, 211, 310: n = A,T,C or G
ggccccccctcgnaaatacttctagnattaattaacgcgggagtctataaaagactggggataacatcaacatgaatattctggttatagtataggaaagtgacataaaatcagaagtttcaagttaaattaagggagagatgagggagattaaatgcagagtaataaatccatggaaattatatttaacacaatgtgaaggaatagactntaaaagctgctttttaaaaaacctaattttcagatacataaaattttagcaatatggctgtagtgctttgaacttttatcatttgactatactttgctntaaagtttacatcaagagcaaatatgtatatttgaaaagtttacaatagctagaaaatgtattataattccccaaaaaaaaaaaaa

SEQ ID NO: 52603 - DNA, 590 bp, Homo sapiens
  misc_feature 11, 23, 25, 36: n = A,T,C or G
tgggtaccggngccccccctcgngngatacttctanaattaattaacgcgggggggtaattattctttaaagaataattactcccccttttgacttatgtagcatcttgaggtgatctatgaccgtttgtacttgtcatgacttccattagattaaactctggggcaaagacgttgctcttcattgtgctcatatgacaccattactgccagtggaattgaaataaattgagtaagggcgagtgtttcctaacaaatgttatccggggcctgaggaaccatcatcaagatggagtggccctgcgattaattttggacttaaagcaaaaaacaaacaaatttttttctttaaataaccagttggcacagatacagaataaaataagatagatccacgtgtagtttttgaaaatttaggtcaggtggctcactcctataatcccagcactttgggaggccagggcgtgtggataacttgaggttaggagtttaagaccagtctggccatcatgatgaaaccccatctctactaaaagtacaaaaattagctgggcatggtggcgcatgcctgtaaacctagctactcaggag

SEQ ID NO: 52604 - DNA, 521 bp, Homo sapiens
cccccctcggaagtcttctagaattaattaacgcgggccagtaccatacaaaacagcattctggttataatgcaattaatttgtaactaaaaaactataagcctagattttaagatagttcaaatactttgtagatgaaaaaagatcacagcagaagcttgaaaatatttaggaccaaacaataacaaatataccgcatgctgaggctcacagcttggaatagaaaagatgagaggagtggagagagtcaaatatttagtaaaacagaagacaaactgaacatgaccgagctaagcactcgatttaagaagttagaaaaaggatagagggggctggtgagatggctcagtgggtaagagcacccgactgttcttccgaaggtccagagttcaaatcccagcaaccacatggtggctcacagccatctgtaacaagatctgactccctcttcgggagtgtctgaagacagctacagtgtacttacatataataaataaataaatcttaaaaaaaaaaaaaaa

SEQ ID NO: 52605 - DNA, 449 bp, Homo sapiens
  misc_feature 32: n = A,T,C or G
gtaccggcgccccccctcggaatacttctagnattaattaacgcggggggagagagagagagagagaaaatatttgaagagataatgactgaaatttttccaaacatgatgaaatctataaacctacagatttaagaatctcaatgaacctcaaatgcaacaaatgtgaaaaaaacaaaaagccagcatcgaggaacatcataaacaaattgttcaaaatcagggctataagagaaaatgttcattacccaaagaaaaaaaatgttccatacagagaaagtcaaggatgacagtaaatttctcattagaaacaatgtgttcaagaagacagtgaagcaatatctttaaagtgctgaaagataaaaaacaaaaataaaccaaaaaaaggtccacttagaattctatatccagggaagatagcttttgaaaaacaaaggtaattttttttt

SEQ ID NO: 52606 - DNA, 287 bp, Homo sapiens
gccccccctcggggtacttctagaattaattaaacttatacgatgcatgtacatcatacctaaagacataacctataaaaattgaataagcaacatgagagttaagtgctttgttgttgacagcctctgattcaggaagttagccatctggaattggggatgctgaggaaaagccctacctgtaccagttctgcattaactgccatggacatctgttcatcatttattcctgtttggccaagattgtccccatttatgtatattttcccaatggattaattaatttc

SEQ ID NO: 52607 - DNA, 599 bp, Homo sapiens
  misc_feature 28, 534: n = A,T,C or G
cgggcccccccctcggaatacttctagnaattaattaacgcgggtggctggatacagtaactcacacctgtaatcccaacactttgggaggccaaggcaggtggatcacctgaggtccagtgttcaaaaccagcctggccaacatggtgaaacctcatctctactaagaatacaaaattagctgggtgtggtggagcacgcctgtaatcccagctactcgggaggctgaggcatgagaatggcttgaacctgggaggtggaggttgcagtgagccaagattgcctccttgcactccagcctgggcaacaagagtggaactgcatctcaaaaaagaaaaaaaaatctgagatataaaaattttaaacccccattgcttttaatttgtaccatgtaaaatacaaacatgttacataatgttaactccagggatgttaagtaataagtcaacgtatcaggcagagtccaatcagaaaaaaaaatagaacctaaaatgaatatttcaatgcaatgaaatagtcaccaaagagtaaaanagatgaaaaggtgcaggtttaaaagaaaatggtggccgggagcagtggttcacacctgtaatccc

SEQ ID NO: 52608 - DNA, 467 bp, Homo sapiens
  misc_feature 421: n = A,T,C or G
cgggccccccctcggaagtcttctagaattaattaacgcggggacagtggcacctgtccaacaacatgtccaatttgtcaaaaaggcctgactgaagtccttcattatcatatgttagtgaaataatttgcctgaaggggaaatggctctttaataagaggaatgaattgcacattgttttatcctaatacccacacagcttcttcctcataacatatattcctgtatttacttcaaattgtctacctgcttagtgagtctgtgtaagaaaattgaagcagcagtcttgaatagctacacattgtacgtgtcaaagttacctgagggaactgaatcaaagtagatcaggaagtcttttgtgttttcttttaaaggtactaattattacaaaatatatcggtgtagacttctcaagctctangcctcaaatcaaattgaagaggtatatagtaataagagtgaagaga

SEQ ID NO: 52609 - DNA, 520 bp, Homo sapiens
  misc_feature 26: n = A,T,C or G
ggccccccctcggaaatacttctagnattaattaacgcgggtccctagaacactaatattctttcagggcattcgtgtttctttgatttaacttaacccagtgagccacatttttcccaaagggtgaattaaaaagtccattaactctttcagtacatggcttcatgaaatctcagcaaggccattagtattgtttcgccttaggctttacattttttaaaagtcagctgtcactttcaaagcaatccagaatagcacactcaacagatccctggagctttggaaatgttaatgccctccatcagcagcgaccttgccagagggaagtgatttaggcactacggagaaaagggcccactatctttatcacatcggtttacaccatcagcttcagaaattgtgtgagagaagaataatcaatagtgtgttaagaccaatctcgaggaatgccaagacaaagtaccgccgctctgcaaaatgctgagttgaaggagaacttttgaatacaaaaaaaaaaaaa

SEQ ID NO: 52610 - DNA, 522 bp, Homo sapiens
gggccccccctcggagtacttctagaattaattaacgcgggtccagaatccttgtcagcacctgtgtggctaatacttagagctataggagggaaaagctgtattttattcaccttatactttttacagtcgaaaactttttcttttcttattttagaggatcttaagttttaacctgagcatttaatgttttcttttttcagacaatccaagaaggttcatgtattgtactttgttgtaaacaaggaattctgcaggcttttctaaaaatgctagattagctgtttttttttttcctctgtgggtttttagttgtaaaatacaacttactttgttacctttcttttctgtgcagttgaaattacgtagtgttaggctagtaaaacttgtgttattcaagttgactttccacagctcactgatgtcctttaaaaatttagtaatcttaacttattaatctttcttttcgcctcaatataaaatgtcctgccttgaggagatgccttggacccagagtcgata

SEQ ID NO: 52611 - DNA, 438 bp, Homo sapiens
  misc_feature 23: n = A,T,C or G
ccccccctcggaagtcttctagnattaattaacgcgggtaatcgataatcaaaatgaatgacctgagttgggaacatagaacctttgtagctctgcatagccagtcaaattaaattccatcagtactaaaacaaacaaaaataagactattggaactaaattctttcttattattcactaattcatttgttcaaaccatgcttgcctttcttctgcatgttccttgtaatacttctttcttgcatattctaccatattagacttttgcaactttgaacttcttgtctccccactcacccttgcaccacaccaagaatataaaatctgaatacgttttaaaaaattattcctattttattgctcaactagaacatattatctcattttagtcacaaaagacttgcacatatgttgtatatactccaaaaaaaaaaaaaa

SEQ ID NO: 52612 - DNA, 593 bp, Homo sapiens
  misc_feature 39, 505: n = A,T,C or G
actgggttaccgggcccccccctcggaaatacttctagnattaattaacgcgggtattcctagatgggtatcaagagaccagagttttatagtatggatatagctttctagagtttataaagcaactttcttttacctaacttgtataaattttacaacattcctgtgagaaaagttttgttatccaagcaaggtagatattactgctgcccttctagctcatggaagacctccctacagctggatcaggctgggagatgagttctggacaataggctgctaaaagaggaagcatggggctgggtgtggtggttcacgtctgtaatcccagcactttgggaggtcgaggcaggctgatcacctgaggtcaggaattcaagaccagcctggccaacatgctgaaacccatccctattaaaactacaaaaattagccaggcctggtggcaggcgcctgtaatctcagctactagggaggctgaggtaggagaatctcttaaacctgngaggcggacattgcagtgagccaaggtcatgccactgcaccccagcctgggcaacagagtgagaccttgtctcaaaaaaaaaaaaagc

SEQ ID NO: 52613 - DNA, 600 bp, Homo sapiens
  misc_feature 23, 25, 36: n = A,T,C or G
tgggtacccgggccccccctcgngngatacttctanaattaattaacgcgggtccacactaagcatataattaaaatgctccagtttaaatatttctccccaaggtattaactactaagatattcagacaatgatgagctaaagttagagtgttcatggatgatggctcaagcttttaagtacttcagatagggaaaagggatttattacaatgggtctaattgatataaaagaggaatggtaaaaagttgcctttaattactcaaaggtctcttgatatattagcctttggtcttttaagtaactaacctccgtcagtagttgactaaattttctcctatgtgaatgtgactgggcaaatattaaagaaaatttcccaaatcaaaagaaagctttaagccatttatgtgccagaagttcagaagtcctgggctggctgatgctgactttgatcttctgtgattacttctataactttgagagagtcagtgttagcactcctggcctttgccttcttcgttaagcagctctgtctttcttaaagtagttctgttatccacagggaaactgaatcatagagaaggtggcatttaattgggc

SEQ ID NO: 52614 - DNA, 416 bp, Homo sapiens
cgggccccccctcggaagtcttctagaattaattaacgcgggcctaagtaacttgatacccctttgcaacagagaacacaaaaataagtagttgcttatgggtcatcagaagatccataagttgcagaaatttgagcagttggaaactaaattgatattgatgatttgaaaacattatcagaagaaagtatgaaaaatgaaataaaaagtagaaattaaggaaataaggataacaaaaggaacacttcagagacccaactcgaatgtttggacttagaaagtattatagcatttaaaataccagtattaagagttattttcagaaatgctctaaggaatgtttctattctatgtgcatccctgtgcccttgtgttaggggttgaattgtgtctacctctccaaaaaaaaaaaaaaa

SEQ ID NO: 52615 - DNA, 578 bp, Homo sapiens
  misc_feature 195: n = A,T,C or G
cccccctcgaaagtcttctagaattaattaacgcggggggaggaagagtatataggaatttcctcttttaagtttgacatttttcaaattaaaaggtacaagaaaattaaaaactaacccctaaaagttaaaaggttgctacactattatgcaagattaggagctcaatattatttagaagcaaagcatcaacangaaaaacatactagtcaaggaaacatccacatagtcatgtacatgtttttcattgttgcttctctagaacacattatgcgtgtgtgtgtgtatgtgtgtgtctgtcattcatgtggctttgtgactcatgtatgctgggtcctctcactgtttgaggacagcagtggctcacttggaccatttacttaacttaggagaccactttatatggaagatggagacatttagtttcatgaaggacggaacaaaacaaaagttttgaataacggcaggtaggatgtaggttaaaatgcaaaatgaatgctttaagaatataagcatcgggagtagaagttactgagttggctataaaatattctctcaaagacattttaaagatattt

SEQ ID NO: 52616 - DNA, 575 bp, Homo sapiens
  misc_feature 560: n = A,T,C or G
ggtaccgggcccccccctcgaaatacttctagaattaattaacgcggggacagaggcagaaagatctttcattgtgaattaccttatttgaatcactgcagattcaaaacaaaatccaacttcatagcctatggaatagtcgacattttccaataagagggtacacaagttacttggaaatatacttttggaactgtcctccatacaagtcctgattattaagtatcatttattaattcatcatccatttgtttgctgaacaaatatttgtcaaatcccggccgagtgcggtggctcacgcctgtaatcctagcattttgggaggccgaggcggcgggatcacgaggtcaggagttcaagaccagcctggccaacatggtgaaaccctgtctccactaaaaatacaaaaattagctgggcatggtggcacgcacctgtaatcccagctactcgggaggctgaggcaggagaattgcttgaacctaggaggtggaggttgcagtgagccaagattgcgccactgcactccagcctggcaacaggacaagactctgtcacanaaaaaaaaaaaaagc

SEQ ID NO: 52617 - DNA, 466 bp, Homo sapiens
gggccccccctcggagtacttctagaattaattaaccgggacatgtcacaaagctgtgtaaaagttaaaaataaataaataaaattttagcccgttagaggttcctgaattctaatcatctgatgtatgggttctcatttaaaatttctgaaaagagaatgaggatacataatataaccttttctccctttgcttatatttcatcccaataaagatgcacagtccactttgggaggccgcggcgggcgggcggatcacgaggtcaggagattgagaccatcctggctaacacggtgaaaccccatctctactaaaaatacaaaaaatcagccaggcgtggtggcaggcgcctgtagtcccagctactcgggagcaggggaatggcgtgaacctgcggggcttgcagtgagctgagataatagcgccactgaactccagcctgagagacagagcaagactccgcctc

SEQ ID NO: 52618 - DNA, 407 bp, Homo sapiens
  misc_feature 25, 38: n = A,T,C or G
ctggggtacccgggccccccctcgngaatacttctagnattaattaaaattaccaagtaaagtttatctgtactttacgaatctaatagatcaatcagcataaagtatattgttctggctggtgtggtagctcaagcctataatcccagagaatttgggaagccgaggcaggaggatcacttgaagccagaagtttaagaccagctggggcaacatagcaagaccctgtctcaggaaatattattaaaattagccagttgcggtagcacgtacttgtagtccctgctactctgcggaggcgggaggatctcttgagcccaggcgttcaaggctgcagtgagttatgatcacaccactctccagcctggatgacacagcaagaccctgtctctaaaaaaaaaaaaaaa

SEQ ID NO: 52619 - DNA, 613 bp, Homo sapiens
  misc_feature 15, 32: n = A,T,C or G
taccgggcccccccnctcggggtacttctagnattaattaacgcgggatgtattacatattttaatatattgaacacaaatcactttagccaacatattcaaatatttaatagaagcacaccactgtcttaaagactcttatccccaattggcagtagtgttttatataagaattattaattataaaatcaaaagcatgaaaagatagaagaacttcagagtaggtccacatagagttcttttttttttttcagttggagtttcactctgtcagtcacgttggagtacagaagatcagaacacacaataacctcaaacttctgagctcaagcaatactcttgcctcagcctctctagtggctaggactgtaagcatgcactatcatgcctgactaatttattttattttattttgtggagacaaggtctcactatgttatccagggtcatctcaaactcctgccctcaagcagtcctcctcctttggcctcccaaagtatagttctaatggaataaaatacattacatggcaaataagaaatactagaaataataattattcacaagtttccagaattgaagaaagacatgtgttgttcagtaaaaacaacaa

SEQ ID NO: 52620 - DNA, 302 bp, Homo sapiens
attaattaacgcgggtctcacccaggtaaaaacttttccctctgtgaaaagcttccagtttaagaccttaagtaggaaagctagagggagctataaataaatggtattctccagtaggatgattcttaagatacgttgcttcattttaagttagaatttctatttaataaaagtatattctgatataattttatctattgaaaatagcagtggttttacctttaatctggtaactgcctggagcatttgcttgttgttgtattggatgcttgatttctggaggtgtctaaaaaaaaaaaaaa

SEQ ID NO: 52621 - DNA, 425 bp, Homo sapiens
gggccccccctcggagtacttctagaattaattaacgcgggcagtatcacaaaagggacctaaattagtgtaataaaataacaactgctaaggaaatatgatatattctaagattataagcaatcacatatgtgatcaaagatacgtaccattgtgttttaatggcccttttatcatccaaatatcaggaactacaagtagaatccctaaatatagtactaattcttttgtataaaatcttccactgctcttgcaccaaaaattcaatcaaatcattattaattttaaaactaataaatgtcagggggctcaaaaaaaaaaaaaaccccagtgatgattctttacctttagggattacaagggatataggacagaaatctttacctcacataacatgattcatacagagagaaatacgatagaag

SEQ ID NO: 52622 - DNA, 539 bp, Homo sapiens
ttaattaacgcggggttctgctcctctctctcctcctcccctcctcctcaggtacacttcagtgtctgttgtttccttctttgcattcataagttcttatcatttagctcccacttctaagtgagagcatgcagtatttggttgtctgttcctgcattagtttgctaaggatgataacctccagaaatcttttgtatatgaattggacaagaagttttatttaacatgtgagtgtacaataaaaaagtactagtttataaatgatttttagataaaccttgtagagtttggggaaacactgagaaccatatacatatatatatatttttcctctctggtagttgtaacttcatggagagctaatattttggggggttaaaatctcccaattaaaatactattagctctacatatgcaaacattttgtaggcatcatatctcggtatccaacatgaaatctaaaaatagtattgatatgcacaaacatgaaactgcctgggaaacatctgcagctgagactttccatttgcttgaacaca

SEQ ID NO: 52623 - DNA, 626 bp, Homo sapiens
  misc_feature 550: n = A,T,C or G
ccgggccccccctcgaaagtcttctagaattaattaacgcgggcaccatttcaaaaagtgctaaagcatgttgttgataaagtagattgtttatagctgaattgaaaatttcagaacaacacgtattgtaataacgtcagggaggaaggtctgggaagactgcagctgcagcttttttaaacctatgtcaacatcactgttagaaattggaagatgtgctattctgccctacaaaatttaataaggaaatttttataaactatattaagtgacaagtattaccaacagccataaagtctgctgagtttttatttactgaaatgctttcctagcacattgttcccatattgcagtctcctttatagtgttgtgttttgtaatgtactcagctactcaggggtgatttcagtgatagtaaatcctgggcctatgagtccccatgtgtaccatagtaattttaatacttctgtagttaagtactgtcaggtataaatttcagcaccaactttagttgcttcagtgtgtttttttcttgtgactgtttttgcanaagcacattcaataaatatgaaataagaaaaatgcttaaacaaatgacataaagaagtgagatggtactttttttt

SEQ ID NO: 52624 - DNA, 565 bp, Homo sapiens
  misc_feature 24, 37: n = A,T,C or G
ctgggtacccgggccccccctcgngaatacttctagnattaattaacgcggggatgcctggatgatatatattcccagcctgtgctctagggaaagtaatagcaacacagcaagtggaaattgtaccttgctagctctgctttaatcattttcaagcactcgtatcttgcagacagctttgaacccaaataagctgaaggctacgtgtgccctgctataaatgcaacaccttacagaatctaattaatcattttcattcatttctagcctaggagcatggtttccatggtttaccaagcactataatctcatatatgcatatagctaatcagagagttaaattccaaagggaggctgcattttaattttttggttataattacaatatgaaactaagtcatatacaaaatacaaaatacatatagatatttttatgggtttccaggatattttgactatgattttagcactcgtaaagtacgttaagaataatatatagagtttatatattgagacttccttagatgctgatttcctttccttacctttaaaaaaaaaaaaaaaa

SEQ ID NO: 52625 - DNA, 549 bp, Homo sapiens
  misc_feature 480, 493: n = A,T,C or G
ccgggccccccctcggagtacttctagaattaattaacgcggggtggggagcgcagcgcggaggaggcagcgctgagatgactcaacagtgcggcatttgggggcgccgcggaggctgggactgcgtaagcggcgatagggtaggacccacagcctcctcgcaggcattcttggagctcggttccgcggtcggtccggatctcccgggaagtctcgccggagtcaggcaggccttaagaagaagctgcctgatgtgcaaggtttcataggccgtcagagggggcatcctggaggagccctggcatcaggaaagtgagccccccatggcagcccgcaggaatgaaccagtgctcaggaagagatctccctgttgtccaggctggtcatgaactcccagggctcaagcagttctccagtctcagcctcctgaagtgctgggattataggcatgagccaccacgccaggcccctaactcattntaaatggctgtgntatgtggatgatgacagcacctacctcaaggagctgctgtgaggactaaatggctc

SEQ ID NO: 52626 - DNA, 159 bp, Homo sapiens
  misc_feature 25, 38, 75, 108: n = A,T,C or G
ctgggttaccgggcccccccctcgngagatacttctgnattaattaacgcgggattgcacttttgtttaactagnaacatacctgtgaaaataagccaaagttttttncagaacccgttaccttgggtttgccagtgggatgtttcaaataccacccgc

SEQ ID NO: 52627 - DNA, 605 bp, Homo sapiens
  misc_feature 37: n = A,T,C or G
ctggggtaccgggcccccccctcggggtacttctagnattaattaacgcgggatgacagaaaaaagtgaagctgtgtctgtagaggctcaagaaagagagaacaataccgaagtattcaattcccaactaagttcacaaccagttttttaaatatataaaagtaataaaaaatgattttctaatcagcatagtcagagaatgcagcatgtaagtaacttttcttcaaaatacaaccaacggaaggttcaaaatcaagatctcaagaataggtaatctagaggtaagcagaagctgtgagcattgaatccacttacatttagaactaaaattgaataattgataatacttacaaaataaaattataattccttaaatgtagtggttataacaataaataattccgtaacaataactataaaagtatgtagaattggaaaaaaaacttaaccataataaaatacacagatggaagtgaaaaagctttagaggataaatattaacgggcctgtaatcccagcactctgggatgcagaagcaagtggatcatttgaggtcaggagttcaagaccagtctggccaacatggtgaaacccatctctactaa

SEQ ID NO: 52628 - DNA, 312 bp, Homo sapiens
  misc_feature 27: n = A,T,C or G
gggccccccctcggaaatacttctagnattaattaacgcgggatgttatagacattatcaaatccattaatgttgatactaattttctaattaggtaaatgtgtccatgtatcttttgctctggacctgaaacttaaggggcgatgtatactttgggctctaacacagatgagatggactgtaagttatccatagtatcctgtgtaccaacttgaactccatcctttcatcttgcttgaacaaagactgacagcaactgataatgatgttaccacagggagcactatgaattgctcaactttatttttaaaa

SEQ ID NO: 52629 - DNA, 610 bp, Homo sapiens
ccgggccccccctcgaaagtcttctagaattaattaacgcggggtcagctcattttctgcctgtttatcagcagacacagatggggtagttttctcacttgcacctacggaaaatcctccttgctcctagggttgtttgactcagtgtctcccttttcttgtgtctgggaggttgatggcatagtacatttactccccaagtagtctgtgagtgtggttggttaaggtggctgaactgaactcggcatctcccagcaccaccaacctggaaagtgtttttggtaggtgctgtgtgtacaacatccttctgattgcaaaggcctgtactctagcattaggccgggttaattcctgtcaggtcttttttttctcttagagccccatttctaatgaagggattaatttggcaggtgatatcaacttgcaagccaaatttagagttgattttccaaatgacttctcccaaatgccctattatttcctgtctccattgtaaaatatttcttcttcctggaattctctaactccctcttctttgagaaataaaaaaatatcaattttagtgtaataatttgtcttatttaattttgttacttaatatcattcacat

SEQ ID NO: 52630 - DNA, 569 bp, Homo sapiens
  misc_feature 37, 89, 492, 501, 515, 529, 535, 540, 541, 542, 543, 544,545, 546, 547, 548, 549, 550, 551: n = A,T,C or G
ctggggtaccgggcccccccctcggggtacttctagnattaattaacgcgggcacccaaagtgtatactgtagttggtatgccactggngaaacataatttaaaaattgtctcatttagggaataaattttttaaaaattctgacttcaagactataaaagaaacatgcgctccataggaaatttctagagctgataggtaatttcaccatggttacaacaaaaaagtaagcaagcaatattcggtgacaaattgagacatagcgtatgagcaaaattaatagaaaatagagtaaaacttaagattgaaataataaagtatttttgaggaggtaactttaaaattgattcttaaaagatgaaaagagcaatggagaaacctagggaaatatcttacaaaaataatcttgtttgaagtctttaaaacaccgaggcagtggctatgtttaagaaaatgaataggctaacacggtgaaaccctgtctctccgaanaaaaaaaanaaaaaaaaaaaaanaaaaaaaaaaaaanaaaaanaaaannnnnnnnnnnntttttaaaaaaaaaaaaa

SEQ ID NO: 52631 - DNA, 499 bp, Homo sapiens
  misc_feature 25, 38, 488: n = A,T,C or G
ctgggtttaccgggccccccctcgngggtacttctagnattaattaatttcgacctcaacaccaacaaaaaggtttgcaagtagagttctcctaggtgtgtagtatttaaggatgttaattttaatgagcacatttattataaaacgatgttttctttcactgtgattttaaaacaagtgtagtttaaaagctctctttttcaaacttattccctttcaacacaaagcaaagaaaaagttatggctctgaataaatgaggttacacttattttatggaaatcacacactcaggagatcaagtgtcttggaagccaattaatttattactaatattaaggggcatgtacttagaaatgtacttacaacatcaattatgttcaactatctatcataacaaattttactggcaaatgtatggtattccaatggatcatattttatacgctatttttaccaagaataagccatttgacatacacttctgaanaaaaaaaaaaa

SEQ ID NO: 52632 - DNA, 325 bp, Homo sapiens
gtaatcagctgaggaataaatataaggatataaatgtgggggaaataattgcacttgaaggaagagaatatgtgagcaaattaattggtttgtgtgcattacaatatgctatgggatattaataaattcactcttaaatggaatctggggcttttattccctgtgggatggacaaatgtggaaagaaaaagggatggggatatatatgggaaatggaagtgtgggttacctgacggatggggacagaagtctggggtggggggaaaaatgagtggagaagaatgagtggggaccacggaactgggatgaggaccgaatgccaagg

SEQ ID NO: 52633 - DNA, 618 bp, Homo sapiens
cgggcccccccctcgaaagtcttctagaattaattaacgcgggctcacccctgtactgttaaatgtatcaatatctaagtcccagcaccaaaatgtcgcagtaattacttcctgacccacaattaaagcatgctgcatttttcagtcataacagccaattctttctgagtcatacattgaaccaattaaacttagaatctctatgtctgaacggatgacttctaatgaaaagggtgaaagcttctaacctcaacatccaatcatatctctgtttggtaaatcagggggagaagttcaactgaatggcttggaatagagcccatcccagcagattgtgctgggtagaaataacactagtctgtctaggtaagatcagtgccaatggttccaactaaaattagaaaaaaggagacagtaccttggctcatgcttatgttggagacaagactctaactcctgctaaagccaaatgatggcaattcaattcctgcctgccagttgcaaatccctacactaccactgcagtattatcaaaagacgtttgcaatccagtgcacctaacaagagaggtgatttcttagattagtcacttagtgggttagcaactcaagagttagt

SEQ ID NO: 52634 - DNA, 570 bp, Homo sapiens
  misc_feature 10, 521: n = A,T,C or G
cccccctcgnaggtacttctagaattaattaacgcgggcaagattgaaaaggcattactaaaagaaaaatctatatttaggcaagaaatcaacaatgcaagaaaaattaggtaaaactagtaaatgttaatcagactttaaaaagaaatatcatcgttttaaagttttacattgccttgctacacttgatttgtaataaaatgttacattttatattgttttcagctctaataatctaagtgaattatgcaaataagtctgtataataacatcactatacacctgtagggcaccctttctatggaggtgaataaagaaatgatcagggggaaattacaagtacaggaaatgacttttctatttaattatatttccattgaaacttctattccatttctagtggtatgaaactcattaaagtgattaagaaacatcacatcagcacatttaagtgctcaaattgcttcctatttagtaagttcccattactgtgatagggaatgtggcaggttacaattaanaaatcccattttcaagggagacaattcaactcttaagaaaaaaaaaaaa

SEQ ID NO: 52635 - DNA, 574 bp, Homo sapiens
gggccccccctcgaaatacttctagaattaattaacgcggggtccttaatgaggactgggccaagaaaagttatactgaagataggactgtaaaaaacagaactctgggccctacccctgcttcaaccaaagagctccgattttaatttattttttattttacacataaaaataaattttttaatgtgtaaaaaatgttctgataaattttcatttgaacaaagaattccacagctaaaacatgcctaaaactctctttggagaaagctagaagcccatgcctcataattctgacaaatgtttgaaaccagtcactgaacagtaaagttgcaaagatagccttttatcagagaaccaaatatactagttttaaaagttctttgggttaatgtttgttttatttttcttacatgcaaaatcatagcattagatctaataaagaaaagccaaacatactaccaaagttttaagcataagtaaatattaatactaaacagaagcattgataaaacatgcattcaatttgtttctcaattgagacattcagtgaaatgttttgaatattatttttgaa

SEQ ID NO: 52636 - DNA, 493 bp, Homo sapiens
  misc_feature 36: n = A,T,C or G
tgggtaccgggcccccccctcggaggtacttctagnattaattaacgcgggcagtattggaatgcagactacaaattagatcctctaatttgtagagcataaaaccaatggatcctaagaataagccaacaattttgacaagaattgtagttagctctgtcattatgatttacacacttttctcttactgaaattagtggcagtgaaagcaatatataacccccaaaatagcataagatgataaaaattacatccaataattcataatgattttacccagtttgtatgcagcaacatatagtcatatgaatagctgtataacagtgccaccaaccaggaaaaaagaacatatccagctgtgttcaaggaagagtaaatgatgagtttctagttaaaactaaaaaaaattgcagctgtatctgcagctgtgacagctcttaaagctatagtcaagaaaagttgttttaaatgagtgtccccaaaaaaaaaaaaa

SEQ ID NO: 52637 - DNA, 668 bp, Homo sapiens
cgggccccccctcgaaatacttctagaattaattaacgcggggtggttttgattttaaatgacgagtgaatgggtgtagcacaccaacatggcacatgtatacatatgtaacaaacctgcacgttgtgcacatgtaccctaaaacttaaagtataataataataaaattttaaaaaaagaaattaaaaaaaagaaataataaaattaaaaaaaaagaataaagtgtctgtaaacatttatgttcagtttttgtatgaatgtgggttatcattccacttgggtaaatacttacaagtgggattatctggttgtatattaagtgtaggattaactttatgattaactgccaggttattttccaaaaaaggctgtacattttgcatttcaactaacaaggcaggagagttcctgtttgtctatatcttcaaaagcactcgacattttcagttttctggtgttttggctttttttcttttaatttctttacattttaatccttcttttaggtttgtagtggtgtcttgccatttaagtttcatttgcttaatgacaatgttgttaattactatctgtatctcttctttggtgaaatgttcgttgaaatcttttgccccatttaaactgtattttctgtttccttattattgagttatgagggtactttctat

SEQ ID NO: 52638 - DNA, 527 bp, Homo sapiens
ccccccttcgaaatacttctagaattaattaacgcgggatcatacgtaatactgagaaatatatttcaaagtaaatatttttccttaattctatccctgttgtttcttctcttggtttccttcctttcttgttttctatctttctccctctaattcttcctggtattatcttgttttctatctttctccctctaattcttactggcattggctctgatgctgtacagaaatctaaaaaatatggcactaatttcagagaaaacgtggtgcaattaaaaatctttgttccaagtttaaattaagattataaaccaaaatgtggcagaaatgatctaaaaaccaagaatatttctcttacaatatacgtgcttcattaatacttcacaaatctagggtctttttttagccagtttttctcagggatttcttaagcttggaatgtatgctttggaagaaattatgaaaggttactaaagatacctgggacagctgtaaaaggaaggcctcagcccataaaaaaaaaaaaa

SEQ ID NO: 52639 - DNA, 340 bp, Homo sapiens
  misc_feature 28: n = A,T,C or G
cgggcccccccctcggggtacttctagnattaattaacgcgggtctactttataaatatagggttaagacaaagaatacaaaactattttatttaagcatattaaacttttctttcatatgacaatcagcattaacttttattaatcttttcataaaagtcagattattaaaaatagttttttatttgcatgctttaaaatacacctttaggccaggtgcggtggctcatgcctgtaatcccagcactttgggaggctgaggtgggaggatcacttgagaccaggagttgaagacatgcgggcaacatggtgaaacctcgtctctaccaaaaaaaaaaaa

SEQ ID NO: 52640 - DNA, 571 bp, Homo sapiens
  misc_feature 32, 87: n = A,T,C or G
tgggtaccgggccccccctcgaaatcttctanaattaattaacgcggggtctctagacatgtttatctataaatacacacacacagnagaattctgaaatgtatatatatatataggtatatataaacacacatatagtttctaaactattgcctattgtattatcccttataaaattataatgtaccagaacttataattcctatgaacatatttatgtaagttctgagaattcctgctgtagagaaacttgttggaccattcagtcttacattttgtaaaggtacttgtgaaaaactaaatggactatgatattttcaagataacttccttagtgtgattgttatttggtaattctaaccctagcgatctatttaaacagagaataattaaagaactgcaagaataatatcccacagaaaattatctcattgactgcagcaatttaagctgataattcatcttatgccaagagttttcatgttgaagatcaacaataaaatagaatactagaatatcaaaagttgccatgggtgagataatctaaaattcttgggcatgaatattactt

SEQ ID NO: 52641 - DNA, 609 bp, Homo sapiens
  misc_feature 18, 31: n = A,T,C or G
accgggcccccccctcgngaatacttctagnattaattaacgcgggacttatctgttattactgtgttaaaaagtgatcactctctctctcctcctacagttttgcacacattatgccacagtatcatatcaccaccatagcagcatccccacactggtcggacttccatgagcacagggatatagtattgacacagatcaaatgtttattgaataaagaaactatttggtagaaaaatacgtattatagccattttattattttgacatttcacagcttattaacatataaatgaagtacattaaactatacatatttaaagtatataatttgctaagttttgacatatgtgtaaaccctttaaactctcatcataatcaagaaatgaacatttttacccccaatttttccacatgcccctctctaaatcctccccctccccattcagtcttctcaacatgttcagactattgtgcctttcttaaaacaacttattgtacaaaaaatttcagggctgagccttgtagttctcacttataattccaaaactctgaaaggctgaggtgggaagattgctttagctgagaagtttgagaccaaactgggca

SEQ ID NO: 52642 - DNA, 611 bp, Homo sapiens
  misc_feature 27: n = A,T,C or G
gggccccccctcggaaatacttctagnattaattaacgcgggaccctcatctcttatcccttttatctaattctttctcattcttaagttctcatgttagaatctgtagcccagtatgtcttttttccccagtttgattaagtgtctctctttgtgcattcttatcacatttaaactacttgcttcactaagttataattcatttttaaaacttatttatttccataatacatcgagcttaaaatagatctttaagataaatttataaaatagactaccggacatttctcaggcatacctatcttcattgctgtgttgattaagcaaataattttattttgtctaaatttcaacaggggcgtcatttaatccaagggtccttgttcttttcataatattatgctacctaatgaatgaatgagtaaacaaatgaacaaatgcacaagaaataagctgtactaaaatgtgtaatataaacagtctttctcatatcaaagaaaatgattcaaaatgtaagggatcccaaaatcctttaaatttttctaaattgtccacccacatgtagaaggcacattactctccaaatgtgtcctgctagcaagatcccactt

SEQ ID NO: 52643 - DNA, 326 bp, Homo sapiens
  misc_feature 16, 29, 47, 76: n = A,T,C or G
cgggcccccccctcgngaagtacttctanaattaattaacgcggggnaatccggtaccccaatcctttagctgttnatttgaaaactcaattcaaaaaaaaattaaaacaaaaacagtaccataaagatatttctttatacagattcataatgttataacactcaaatgattattctagaatacattaaaaagaaggttattttccctattattaagggctcctttttaatagagttatttattgtattttcctgaagaaattatgtctgtctgtcttctcttctattcccagttgttttgagtaaagggagcaaaaaaaaaaaaa

SEQ ID NO: 52644 - DNA, 605 bp, Homo sapiens
  misc_feature 28: n = A,T,C or G
cgggcccccccctcgaaatacttctagnattaattaacgcgggcataaatatatacaattatttgtcacttaaaaataatggtaataataagaattctaatatatattatagaaaccctttatataaaataggaaaaatgaaggtgcaaagacaaagctttggaattaggtgagatgttctcttttcaccataaatgttctatatccgtttgtaacattggtgcactatcaatttgactttactcaagtgagctacaatgttaattattttcatataatttatttagttttcactaagagtagaaaactattaggtactggtagaaatgcaaatgaaataaagaccctggatcttaaaaagcttaatgtaaatttgtagggacaaaacatagaccccagaaatgaggaagaataattataaataagaagtcaataggtgcaaatcatattctaattctacctatcaaatacgtgagtcctttaaaaaaccaaacatacaaaaaacgatggctaacaatagaggtggtttcacaggttagcaaggactaggcctacagaaggctgcacaagtttcagcagatgaaggtcagctttatttcacattc

SEQ ID NO: 52645 - DNA, 601 bp, Homo sapiens
  misc_feature 40: n = A,T,C or G
agactggggtaccgggcccccccctcggggtacttctagnattaattaacgcgggggaagggaggaggaggaaaggaggaggaagaagttatggaggaagaagaggagttggagtagatgggagaagaaaaagaggaggttgcacttgagctgtaaaggctcagaagaacaaacagaataaacatgatgatattgaaaagaagaaaattgtgaaataggagaaaaaacataaactaaatagaaaataaaacaacaaggaaagttaaaaccataaaatcaactctggactaactgcaaaatagataactttttttctcaggactaatcaaataaaacagatgcctgtaatcccagcactttgggaggctgaggcgggtggatcatgaggtcaggagattgagaccatcctggctaacaaggtgaaaccccatctctactaaaaatacaaaaaacattagccgggtgtggtggtgggcgcctgtagtcccagctactcgggaggctaaggcaggagaatggtgtggacccgggaggtggagcttgcagtgagccgagatcgtgcaaccgcattccagcctgggcaacagagcaagattctgtc

SEQ ID NO: 52646 - DNA, 611 bp, Homo sapiens
  misc_feature 11, 23, 36: n = A,T,C or G
tgggtaccggngccccccctcgngaatacttctagnattaattaacgcggggtacaattttacttcacctttagccacaaacaccccaaatttccaaaagctatcttcatagaattagtattaatttcacacatttttaaaataatattatcattttacaacaaatattagttgacagcaatctctatgttcaagcttagtccgtactctgatgctatactgcaaatgttccagtggtttagccgggagaaccttgtgacacccatatgaaaaacaaaacaaacaaagcattttgcatttaacaaggagatttagttaactatttgttatggttatagaggatagtacttattttgattttcttctacctgttcccatggaagagaccaactagaccttaatacatacgtctgtagacatagtataatgtcatctattaaatcaacatgataattatgtaaaataataataatttttgacatttgcattttatatcataattttaagcatttccaagctcttgcattttttactaaaaatgttgatgccatttttacctataaatttgtatatacacacaaaaatcaagctaaatatttgattaaatttgt

SEQ ID NO: 52647 - DNA, 582 bp, Homo sapiens
  misc_feature 28: n = A,T,C or G
cgggcccccccctcgaaatacttctagnattaattaacgcgggtcctattcctcttaaaatcgagagcaaaatcagcaaaacttgactcctgtgtccaaccttatctcctatctagttctccctcattcactttgcggcagccatcctggccttaactcaacaagtgccaaattctcccacttttatgtgctatttctctctctttccacctctacctctacctctcttcatctagttaactactgcttatcatttcagatctcagcctaagggtattctttagggaagacttggagtaaagaatcacagctataaaacctactctatgccttcggaaatcagctcttttctaattgttttattaagttggaacaaatataaacagatttaccatatatgatttatcatacaataactaaaataaaaacttcacgtaacagtgttgaataagatagaggaatagcttgctgaaccagaaaattacttttttttgcaacccaaaccttcagaatgcagccttgaacctggaagtaaaatgaaaagtatttctgatttacattgatcacaaagtaaaaattcag

SEQ ID NO: 52648 - DNA, 187 bp, Homo sapiens
  misc_feature 24: n = A,T,C or G
ccccccctcgaaggtacttctagnattaattaacgcgggccctgcatattacaagcccgatggactcaaagttggagatagagtccctgtagtctgatgtttgcctctctaaattgcttttgaatgcattcgaaatgcaaattccagaatgcatgagtaatatttctgtctctgagtttcctccaat

SEQ ID NO: 52649 - DNA, 642 bp, Homo sapiens
  misc_feature 615: n = A,T,C or G
cgggccccccctcgaaatacttctagaattaattaacgcgggtatgcattcctgaggtatcaactagttctgattcatccttgtcatcactgtaatccttctgcagcacagtgtctcattctacatttaatcttaaaaaatgtgttgaatgagtaaatgaaatgtcgattgcctgccaatgactaccaggtaggggttgagggatcaggaaggataagcatcaaactttgtggttatccatgggaaagtgagatttcagagggcttttattttatattttctatatttctgaattattttaattttatgatatgtatccataagtttaaaatttttaccccactcctgttgaatgcaataactttttaaataaaaaacagtatcaaagatttcaaaaaatttttaaaaggggtaggtgggagagagaacattgatgttatgaagcatggctattatacttcaaatgcattgtccatgtgaacaagaaaataaaaaaggagggctttgcaggtacctatggaagtatttacatatgcagaagcactcatcctaaaaaataattataaggtttatagaattatttgaccatttaaactatgtacatgtacagctgantaaaatgaaaactaaaaaaaatgttgt

SEQ ID NO: 52650 - DNA, 577 bp, Homo sapiens
cggggccccccctcggggtacttctagaattaattaacgcgggctcccatgatcaaacagtcctcctgcctcaaccttccagtggctggaccgataggcatgtgccaccacacctgaataattttttttttttatttttagtagagacaaggtctcaccatgttgcccgagctgggaactcccaggctaaagtaatccctctgccttggcctctcaaattcctgatatgacaagcatgagcaccgtcccaggtccaacgtgcagttgtttaatacatcttttttcacatgctctcctcttccttggcagtgacactagaccacctctaccgcagcaaaaactcttttagagccactctgtttctgtattcttaatagcctctaagatcgaacaagaactatgtagcatatatgaaacaacatataaatgaatgaatgatcaaagccctcagtagcacatataaatattttacagtttttgccaaaaatgttgttagaaataataaattcagtgcaatatttttatacgtatttctttgactgttttaaacagaatatttgtaaaagaaagagtcagc

SEQ ID NO: 52651 - DNA, 475 bp, Homo sapiens
  misc_feature 449: n = A,T,C or G
ggccccccctcggagtacttctagtattaattaacgcggggtgttgggattacaggtgtgagccaccgtgcctggcctgagccttttggttaaattgctttttctgtaataagacagtaatgtgttccttcgagaaaaatggtttaaaaggtttaaacctttattgatcccaggaagacttgtctgttcttacatgcacagttaagtgagaaaacctgaatctagttttgtatttgtgctgttaaattctatccgaagggtaatgaggagtagatttcttcaggggattttcttgaatctggttttattttacattttatcaatgatcaggtttagagagtttgatcatatttgtaaataaggcctgtcttggaaggaggggaaggaagaaaacagaattttaaaattaatctgcataaactggtaagtggcatgaaaccacagcatanagcatagcagatattgttgcacaagt

SEQ ID NO: 52652 - DNA, 375 bp, Homo sapiens
ccgggccccccctcgaaagtcttctagaattaattaacgcggggaaccgtaaaaacttgcccaaacttgcagacctggagacgtcactttctttaagaggcttgtacatttccactttggcttggtacagattgattttttaaagtttcctctcagggtacaatatttttattttctagactttaggaagtaaattactgtattccttactaaaaagtcatttctttaggatgtatttacagaagtaggtaaatatttccaaagcatttataggataaaggctcaaacagttcatgtttatagtacgaaatgtttctagaacagaaacatcagtaataaaggttctatcgtaatttctcaaaaaaaaaaaaaaaa

SEQ ID NO: 52653 - DNA, 566 bp, Homo sapiens
  misc_feature 465, 509, 524, 525: n = A,T,C or G
cgggccccccctcggagtacttctagaattaattaacgcgggtcctacacctgccccacatcaacccccacgcaacagtcacacagtccccttctgcacaaaccccttctaggttgctgtttgttgattactgtccttgccctcacaaaagcagatcaagcacccaagagagacaagacgggtgtgtggaaagctgtatgcaagtttctgaggtcgtgactaagaatctctctccaatatgctgagctccttaaagggaagaaaaaggatgaccccatcttctgcatatcttatactgaaaatgacccactgggcatgcttagagcacaacatatgtcttgaaaaaaattaacagctactgtttaactcctaaaatctttcagaagtgtaattcctcaattgtttaaatcaaggaaaaaaagcaatttatttaaaagatgtggctaagatactaatgaattacancgtaatatgaggttgattttagcaaaataaatgaaaatactacnaaagtaaaaaaggannaaattagcaccaatcaacctaccagtttcatgaaaaaaaac

SEQ ID NO: 52654 - DNA, 436 bp, Homo sapiens
cgggcccccccctcgaggtacttctagaattaattaacgcgggtaggggaaaaataattataaatatcctaaattgctgatatatatttataagtcatattcagaccagccctaataaccatgatatcaaatggaatctagaataagctgtcttgaataaatatcctatctcttaactttttcaaacattatagtttttttaaaaatagctagcatctatggttttcaagagtcactcacatgaatatggtagaaagaccaaattatgcagctatgtcatccaaatgctgacagtgttcagtgtttttgttgtagacagtgcaaaactttcagtcatgtgaggaacactggagggtttcttacatgacattacattgatcttaaagtgtaagcactgcaaatatggctttatttgagccacaggattgcctgaaaa

SEQ ID NO: 52655 - DNA, 408 bp, Homo sapiens
  misc_feature 27: n = A,T,C or G
gggccccccctcggaaatacttctagnattaattaacgcgggtgaacaaatgactcagtccccacatgctcttgatggagcccggagcccacagattcaacgggagggggaacagcttcctctcaatgggaggggggcaaagaatttgcagtcttttttctgttcgtttgtttgtttgtagacagggtcttgctctgtcacccaggctggagtgcagtggcaccatcaaagctcactgcagtctcaaccatctgggcttaagcgatcctcccacttcagcctccagagtagttgggactacaggtgcatgccaccaagcctggctaattttaatgtttttgtagcaaagggatctggagatgctgcctaggctgatctcaagatccctttgctacaaaaaaaaaaaaa

SEQ ID NO: 52656 - DNA, 639 bp, Homo sapiens
ccccccctcggaagtcttctagaattaattaacgcgggattccttgtatgcaagtttagtgaaacctaataaatatcagatctatggatctgcctattaaacaaatattcttgctttatatcagtcttacatatcctgtgcttatgtggaaacctgtttaaataagcaggtaataaaagaataactgttaaataagtaattccctttagtactaagtaatggaataaaataattatgtccaccttgaatctgcacttataccttgtttcaattcttgaaaggagaggttaatttttaagtgcatatattctaaataaatatgtgggatatttgtggagttaaattatctttgaattattgctttccaaagttggttatctatagtataactaaggaaatacttactcaaatgtcataaatttttgaatacttaggaagattttgtccaaatacagaaattcaaaatgaggaagacatagaaatgtgtaagtatttacagtgattataaaatcttatctcagctactaaagatagcttaactagctggattccattgatctactatgaagcttcatcaactaaagcttttttttaattgattctccattttgtcttctcattttcttaacagtgcacagc

SEQ ID NO: 52657 - DNA, 652 bp, Homo sapiens
  misc_feature 609: n = A,T,C or G
ccgggccccccctcggaagtcttctagaattaattaacgcgggccatatcacctcactttctgaagaaacgcacactccagaacttcaggcttctgccacatgtcacacagtcagttgagcagtggagttgatatttaaactcactctgttcgtctataagtttcacctcataccaccacagctgcgatgtcaaatttgatacaaaaatcatttgcatggtttgtcttattttatctgtccttcccaacaatgctggtggagaaaaaaattaagctgtaatattatttccaaagaacattatatgatccttagtttttaaactcaaactctgattgacatactaaggagttataggcttgggttattattgttgttaatgtcagactctcatcaaaaggaggaattacacttcttaggaaacaccctgaataaaattaagtttaaaataggacctgtctttccagatacctcaaactccagaggtttcaaattagtctagacattcaatggcctggaggcaagagtctggaacagttgtctattctcactgatccaattaagaaggacatgagaaagactatcagagaggtgtttactgcacacaaggntaccagtggattcttcctccaattctgttgcccaaaaaaaaaa

SEQ ID NO: 52658 - DNA, 107 bp, Homo sapiens
ccgggccccccctcgaaagtcttctagaattaattaacgcgggtacactctgatgatggcaagattggagagaagaagagatgaagcctaggactcaccaaacatca

SEQ ID NO: 52659 - DNA, 670 bp, Homo sapiens
  misc_feature 15, 52: n = A,T,C or G
cgggccccccctcgngggtacttctagaattaattaacgcgggcacctgggnaaattttagagtagttcatattttttttaaacattgctcatgaattccaccattgttatatgatcatatctgttatctgacctcacccttccaactgaacatattttatacatatccttatttggattttctctcaaaatattctacagaaattagaggagaaatgttatataaaatatttttagagaatagtaagttaactgtatctgacttttataagagcacttttaactatggtgtctttttattaatacctgccataatgaattcggttactttgggttggacaaatattttctacagtttttttattgacataaaagtatagctattatttatttacttcagatctttatacattaaaaaaataagtttaagcattctgcagcaaccacttccctattttcatgcaatattaactgcatatatataaaggatagttttcaaatgacacttaaaaacgctcacttgtgttttacttcatgtacataatttgcttggttagaatgaaggttaggctaacattttaatactagctacactgtgatttatttatgaaagcttgtcaagacacaactgaaccattactttcactcctttctacattaattcctacat

SEQ ID NO: 52660 - DNA, 427 bp, Homo sapiens
  misc_feature 33: n = A,T,C or G
gtaccgggcccccccctcggaaatacttctagnattaattaactgttatagttttaagtgatgccattaacaaactgacataaatttcagttttactttcctatatttagaagcccttcatggaactgtaaaagctggagggcctaattcttttcacagagtttcaaacaaaatactaatatatttataataagatttttattatttagggttgaaggcattttaaagcaattcatctaattgcctttttttttctttttaaattagagggtactcttcatttacttttttttttttgagatagagtttcactcttgttgcccaagcggaggttgcggtgggtcgagatcatgccactgcactccagtctggatgatagagtgagtcctgtctcaaaaacaaaaacaataacaaaaaaaaaaaaaaa

SEQ ID NO: 52661 - DNA, 369 bp, Homo sapiens
  misc_feature 32: n = A,T,C or G
taccgggcccccccctcggaaatacttctagnattaattaacgcggggagtgggcggccacaagcattacttggccacaatagtgagggcacctcaaagaagtctgttccagatactaagatggtgtcagcaaaggtgtatatcagccaacaaaggtctacaacaaataggtaatttaaaagagaggtgaattactgcaataggaaattcccagcttgctatgctgctagcatgcagagaacaagagatcaggcctttccacagttctatccctgaaagaaaaacaaacaaacacaaaaagaagcaaacaaaccctacatgaatttgaatgctttatagctgaaaggtaaaggacaaaaaaaaaaaaaa

SEQ ID NO: 52662 - DNA, 558 bp, Homo sapiens
gggccccccctcggaagtcttctagaattaattaacgcgggctatatagagatttaaggttttcagcaccatttgttaaaaagacagtcctttctccatttccccatttcccaactggtctaaagttaaatgactgtacatatgtgtgcatctatttctggacttcccttctgctccattgacctatttgcttattctgacatcaacaccacactctatttctgtaattgtatagttaatttttaatcaggtatatacatcttgctactttgtcctactttttctaaacagtttaagctcctctgggcctttttaaatgccatataaattttagaatcagcttgtcagtttctacaaaaaaaaaaaccctgctagaattttgatttaattttgattgagatagtgatccaattttaccttttaaaagtatagataacaattttcccagcacacttaaaaaaactatcctccctgattttcacagccacgtatattatacatcaatggtacatatacatacgcattcgttttctaggcaatctattgtttcattcacac

SEQ ID NO: 52663 - DNA, 598 bp, Homo sapiens
  misc_feature 25, 38, 61, 574: n = A,T,C or G
ctggggtaccgggcccccccctcgnggatacttctagnattaattaacgcggggtacaaanaagaacaagagttgtcatgttttgctaaagaactcccagctgtttaattttatagtaaaattactttaagaactttgctaattcaaagacaaaatcaaacaactgttgttgcaaaactgaacttccacatttgagtggaaaagccaatttgagattaatctgcccctaaaatcatattataaaaatacagagcatttctgtaatgctggttggaggagtggcttttatctgaagagaagacacataaaagagaaaaatggtacatttactggtagtaagatttaaaaaagtagtttatgttctcatgtactttgccctgacttctcccccagctttctcttaagctcttcagtctgttttaataccaggtttgtttgctttctggggatgggcctgttaggcaggaaattgttgaaaggcatacagcagaaattttaaatggtgtttttaaaagataaatacccaattgggtaactgactattaaatttggagttcagaattttttaaaattntatttttagacaatatagaaagat

SEQ ID NO: 52664 - DNA, 468 bp, Homo sapiens
  misc_feature 378: n = A,T,C or G
cccccctcggggtacttctagaattaattaacgcgggtagccaagtatccaaacttgttttaaagaccttaaaaatataacttaggcacttttgatgcctaaaagaaaattagctgtagtttacaaatgcaaaaggacatatagtctagaacgtctgggccctgagttgtatgaataatctgatcatatttttgaagttttatgtctttgaaaatgggataaatgtgctttcaattttatataaagaaaggtcagtttcattaacatatagtggagattttttcccttaaattctgagcatgggaataaggctacacatgtgtgctaagaaagtagaaggcactccagcctgggtgacagagcgagactccatctcanaaaaaaaaaaaaaaaaaaaaaaaaaaaaaaaaaaaaaaaaaaaaaaaaaaaaaaaaaaaaaaaaaaaaaaaaaaaaaaaaaaaaaaaaaa

SEQ ID NO: 52665 - DNA, 576 bp, Homo sapiens
  misc_feature 559: n = A,T,C or G
cccccctcggaagtcttctagaattaattaaacgcgggcccattatgtgcaaggtattattttaaaagcagatggccccagatcctgtaatgagtaggaaaacactactactatactgaagaaatttataaaattgcagtgaaatatcttacacagttttttaatgtttctgccagtgtcctttgatcaactcagattgtgcatacgtcaaggactgtgtttattcataattctctaatatatatgtttctacaatgttaactggaagttttagtactaatagaatttaagaacatgggtctctcatactctttgttttacattcagccttttcatgactttctgattctatgaatgtgtgcgcatatgtattgtgtgtttattcagtaaggtcagaatattctgcaacaacccattaatagtttgtattcatttccactctcctaactaccacatgcacttattcatatatgttctctaatgaccaacatcttagaatatttgcaaattacaaataagtatcagatctctaaaactgtcccaataaaatcattaattntataattcatattaaga

SEQ ID NO: 52666 - DNA, 525 bp, Homo sapiens
  misc_feature 27: n = A,T,C or G
gggccccccctcggaaatacttctagnattaattaacgcgggtggttgcacatgcctctagacctagctactaaggaggctaaggcaggagaataacttgaaacagggaggtggaggttgcagtgggccaagattgcgccactgtacctcaacctgagcgaaggaacgagactctctcaaaaaaagaagagttttggaattgctataccatcaccaacatcagttgtttttttgttggaatgcagtatatcccactgagggtggatggtcagattactatgttcagaagctacttagaatctgattctttccttctctaattatgttatcaccccgatatatgggtaggttttttttctttgtacttcgttttagggtccttcttatctatctaatttttaaaatatgtgaaaaattaacatgacttaaatgtcaaaactttttatataaaaatgtttcctcaggctagtcgcggtggctcacgcctgtaatcccagcactttgggaggccgaggcgggtggttg

SEQ ID NO: 52667 - DNA, 519 bp, Homo sapiens
  misc_feature 491: n = A,T,C or G
cgggccccccctcgaaatacttctagaattaattaacgcgggcaatatcataatcacttgtttgcatgcaccctcaaattccttagacatctctcccttcttttcactcacattacacctgaatgtggattgagaaaatattttaaatgttttctgtatatgcaaggcactgaaatttagttcaaatctattatctccctcttctacaatagttggatgcccaggtagataactattgcattatactttcagcatcctatgcccctatggcagctgtgctgatttaaccaattaaatgtcagcagaagcgatgttttcattctttgtcattttacttacaaaggaatttaaacaatcttctgtgatcatttgtgtatgtgagtcgtattctaacatgcaattcaagtcagtccctagaaaaaaagacaataaagtctgcaaagaagcttggtcatttaataatcttctgtagtaagagcatagctctgcanactggagctatcacctcgggtctgttac

SEQ ID NO: 52668 - DNA, 550 bp, Homo sapiens
cccccctcggaagtcttctagaattaattaacgcggggggaagtctatacaagaatattaaggccctgtgcgtgagcatgtctatagttaaagacttaatgagaaagcatcaaattgtggtgcaaacagctgaaagtagaagtaaatcagaacgtaataagatgcaactttggaggagctcaaagcaacagatacgtttttatccaaaaaggagtaaaacaaaaaaatcgtcaacggcagttccttcagataatcaacagatgattcatttgaaaaccataattaactaggttgtttgtaaaataacttttttcaatttatactttttaatgtttattaaattacttttctctatagatatgcagataagatgttttaaatgtgtaagtggtataaatgtcccatgtgtcttttattctagagcataagaaaagatgggaagctacctcaaacttgttttgaggcaaatgtagtatgaatccctaaacataacaccagtactgctaaatgacagttatctaatctcactgatgaacaagaatatgaaaat

SEQ ID NO: 52669 - DNA, 627 bp, Homo sapiens
  misc_feature 31, 577: n = A,T,C or G
taccgggcccccccctcggaagtcttctagnattaattaaccgggtacgcagacaacccacagtaaggataataatttattacaacagcatttcaactcttatggctttgaagactttaagtggttaagtatatccctcagaatttcaagactaaattatctctaccttgagccattacgtactttccatgagtaagaccgtatagattacaggacagctaaaacttcacctaaatccccaaaataaaattttaaagcaagcccaatctaatatttgagcctacaactggagaaggttagaaattttacagaactagcacatatcatgaaaagctttatagatggtgacatctgaacaagatcttcaagaggagcagtacctgtcatttaataacaaggactgtgcttagctctcacaattatacaactcttaagtcaccacaggttccatacctgtaaagtgggagttgaaataataaatataaagtgtttaccaagatacatgaaacaaagttagcattcaacagacaataacagttgttaaagaaggatgaactgaattttctaaggccaaganaaggggagttcaaagtaggaatattctttaaacagaaatccactgagacc

SEQ ID NO: 52670 - DNA, 658 bp, Homo sapiens
  misc_feature 643: n = A,T,C or G
cccccccttcgaagtacttctagaattaattaacgcggggttcttaaaatacacaataaaatctttgacgttatagaagactagaatgcagcaggataatgtgatcagttctgattatctgcatcatagatcatccacatccatagctatcaaatatgttttaacattgggtcagtgtgcactttccaaccaaaccttctatggcatctcatcctttctctctaataacaaaggtgtcttgttatggtatctgtattggtaaaatataaattaattttatgatttttaaaattatacatctgctaaaaggatctcatggtggatccccaaacatatgtatttttttttctttttggaaaatataaactttgtaacctttagttaacgacatataatatccaaatgttagggagaagggaaggaagacttgtgagtttctcataccactgccctcaccattcgcatggattaatattaactagaggaggaaattgtttccccaggaatcttgtagaccttgttcttagagtgatgtaaaggcaagaaaagttgcactctttaatttctccaagtagtggctaggaagcagaatgaagagagacagggagagtgtcaagggccttgccttgaaattcagaacatntggcagcatttgttg

SEQ ID NO: 52671 - DNA, 461 bp, Homo sapiens
  misc_feature 20, 22, 33: n = A,T,C or G
ggtaccgggcccccccctcnangatcttctagnaattaattaacgcgggacctttgagcttatccatgcttcacttctgcggcggtacaaaatttagtttctttgtatgtccatcaaatccccttctgcggttgtgagtgttcctgggatttatgtctttgaaaaaagaaggggaaaaaaaggtttgcatttattcctgtgtcactttcaccacgtgctctacaaaggatatacaaaacaactgtgtttataaatacacacccacagtttgtaaacctaaggaagcagttgattgacctgagagctcgctgctaaaaagcagtgcaagtggccatgcgcggtggctcacgcctgtaatcccagcactttgggaggctgaggcgggcgcatcacgaggtcaggagtcgagaccatcctggccaacatggtgaaactccgtctgtactaaaaaaaaaaaaaaa

SEQ ID NO: 52672 - DNA, 584 bp, Homo sapiens
  misc_feature 14, 27, 67: n = A,T,C or G
gggccccccctcgngaatacttctagnattaattaacgcgggggcctgatttttacatgaataaacncaatcctagataaatcattggaaaacttttacaccactggcaaaatgaagtgcatagtaagatttcatcatctctactatttaaaaataaaaccattatgtacttttccttttttggaaataacatttttaaaaatcccataacatttagctctttaaatattttaccattgattatctgtctgtaactacatagtccaataaaggggaaaaagttgataactttagtgattttcttctaagatagttattaacactgtagaaataacaggaatttctgaagggaaaatgagttttgtgagttacattatagtttttctgttccttgtaatgaagggatgctttcctttttgagaacaaatcctattcctaaataataacaataatagaagagtcatatattgtgctaactctctatgacctgtacatatagcattaatccacatagtacattaatgagacccgttttatttaatcccaatgctacaaatagggaaaaacttaggtatgtaaagttt

SEQ ID NO: 52673 - DNA, 467 bp, Homo sapiens
cccccctcgagagtcttctagaattaattaacgcgggaaattaggtgagttaagtgctaaacaacattgttaagaactcagttcattttcatctcttgtgccctgctcaacgttgtaaataccattgttaatagccaaatgctgttctattccatgaatgacctagaattatttaaccattacttttgtattctatatttagattatttctaattatttgtacctatcaatgacattaagaaaaataaatttggacttgtcttctttacattgtggttctttttctttaagttagactcaaagaagtgaaagtgcagaatcaaaagacattgacaatttaaggctctagtctagaaatagtctcataccttgtaagcagctggggtatgagaattcctgtcccactgcttgctgtttctgtatcatcaccagaattgagtgttactaaaaaggaaaaaaaaaaaaaa

SEQ ID NO: 52674 - DNA, 377 bp, Homo sapiens
  misc_feature 36: n = A,T,C or G
tgggtaccgggcccccccctcggaaatacttctagnattaattaacgcggggcatgtcttgtaatttcatcagctgtttgactaagttttaatttattttaattacattaaaaatccacttttcacttctgtgttacaactgttgtattacttgatattttaaaagatgaatctcactgaatgtaaaataatgtcaggttacattaatggtaaaaacaaacaaacaaacaaaaaaaaaccgttgaccgggcgcggtggctcacacctgtaatgccagcactttgggaggctgaggtgggcggatcacgaggtcaggagatcgagatcatcctggctaacacggtgaaaccgcgtctctactaaaaaaaaaaaaaaaa

SEQ ID NO: 52675 - DNA, 487 bp, Homo sapiens
  misc_feature 18, 31: n = A,T,C or G
accggggccccccctcgngggatacttctanaattaattaacgcgggcggtgctgaaagtcacatgatgtaacaaaaggcaaaatccctttcttcacggtttagaaatctcagggggaatcagatattaacttattagcacatatggagggctatgatgactaaactgttgccatatctgcacagctacatattttattaatctgagattactaaattacagtctatgtcagtgccacatatcttcatggaaaaagtccatgaaagtcataaattagagggaattaatcttgttgaggccagttctttccctctcagaatctttcatccagcatggatagcattgcaatactaatccctaccgcagctatacctgttagaccttatagttcgctcatacgacaaagttctggattgcatgttggcagtcaatgtttgtaagagaaaatggcccattagaagtaatatttttaatcaatacgtcttgt

SEQ ID NO: 52676 - DNA, 467 bp, Homo sapiens
cccccctcgagagtcttctagaattaattaaccggggactaacaaacacttatcttagatatatttgacactataatcaacctccttgaggaagaaaaagagtacttagaacgaaaatatttagttaaaataattcttgggtttttttcctaaatttctaaatttcttaaaatatttccctctagatccccccagccatgacagctaactttttcattgtgattccacatttcctggtcttcgtctgttccagttaagggctggcaaatgcagaaaagatcttcaaggttttcaagatggtttatttaaaagttctaggtggataatttatgtccatcctcagtgtattcacatcaatttccccaccccaccctcacaatatgacaggcaaaactcttttattgcaacagcattttttggcatagcaatatgcttactgttttgtttatagcaaaaaaaaaaaaaaa

SEQ ID NO: 52677 - DNA, 623 bp, Homo sapiens
  misc_feature 581: n = A,T,C or G
cccccctcgaaagtcttctagaattaattaacgcgggggggtggttaggagttcaacatgaattttgggggcgtaaaattcacctcataacaccatccatgtattaatactttaacaacatatgatttttccataaacataatttagtatcttttatatattcaacttttgtataaatgacattgtactatgtacatcttttatcactttctttttcttactccaacaatatgttgagatatacttagatgacaaacttttcaaatttatttatagtattttattttatgaatttaccaccaccaatctcttctctatactaaaatttaaaatatatacaaggttcaaaatgtcttccaatcagtaaataataatggatacgtgcatcttgggcttggattaaatgagctctctgttatccttgccaagaccatgtggctgtttaactgaactttttgatcttgcaattttataatttcaggcctcagcaggttctatcattaaggaaatagcaggcaataagaggagagccacttaaatgttggaaaataccattaaataacaagagaaataagacattntaattgataaagaaattttaaaatttgtatctggtttgggag

SEQ ID NO: 52678 - DNA, 593 bp, Homo sapiens
  misc_feature 22: n = A,T,C or G
cccccctcgaaagtcttctagnattaattaacgcggggtggggaggagaaggggaggggatggttaataggtacaaaaaataattaaaattaatgaataagtcctagtatctgacagcacaacagggtgactatcgtcaataataatttaattgtacatttaaaaataactagaagaatataattagattgcaacacaaaggataaatgcttgagggagtgaataccccatcttccatgatgtgcatataatattaagtggggagaaaaacacaagaatacaaaactatagaatataatacttgagcttataagaacaattaattgaggcatatataggcaaaaataagctttcagacatagatattgatttaggaaaagaaaaaaaaacatagatatacataacagctactagtgttatatttggcatgagattaccaatagtattttttaaagtatttcctgcgctttctaaaatttcataatgagtacatcatcggtggcaaattaatactacatcatgtatgtttaaatgcaaaaaacaggatgagatgccactttattcatcactgccaaaacttggaggcaaccaaa

SEQ ID NO: 52679 - DNA, 421 bp, Homo sapiens
  misc_feature 32: n = A,T,C or G
taccggggcccccctctcggggtacttctagnattaattaacgcgggggcataaaaactaaaataaaaactagaaataaaaaataaaaaaaaaaaaaataaaaaaaaacaaaaaatataacaaattaaaacattctcgtaattttaaagagacacggtgtagaagtataacatagactgagcttgaaccgttggatttggcaaattcatctcctacagaataaaatgttctttcccccttaaaggcacttggtttctattggaatcagaaaattacccgcagaatcctatattgaaaataattgaaatgtttatcctctcaatctaagtgtgaactaatgaaatggaaaagccaaacgttatatttttaaatctgtcactacttaaattttgtattagactactgtctgtctctatcatat

SEQ ID NO: 52680 - DNA, 611 bp, Homo sapiens
  misc_feature 38: n = A,T,C or G
ctggggtaccgggcccccccctcggaggtacttctagnattaattaacgcggggcatggcaaatctttattacaacaagtaaaacagaaattgaccttaagtattgtaaaaggtaattaaaaagcatcaccattatggaaataattaaatataagttgctttctgaacaagcaacgaagtatttcaaaaaatactttaaaggatagaaagggaaaaaaaattaaaagcataaataaagacatgcagacaaaaatatgtaagcacaataaaattaaataagcttgcatacaaatagggagcatccattgttatatatgtcacatcaatatagaaccacttgatgtgatttctatattttagttctttttttcatttaaatttaatgttatttttcatataatacatttctatggctcaaaagaaaattatattaaaaatatttattgtaaagttaactctcccctctttctgtattaagcccctctcccatagttaatcatttttcttcctcttcaatgtatttctgtcatgtttctattaacaaattgtatttgtgttcccttaaatgtgattaaaagcctttttaactcatctcatttttcttagcttat

SEQ ID NO: 52681 - DNA, 510 bp, Homo sapiens
cccccctcggaagtcttctagaattaattaacgcgggagttgagaccagcctggccaatatggtgaaacctagtttctatttaaaatacgaaaaattagccaggcgtggtggctgtaatcccagctacttgggagactaaggtgggagaatcacctgaaaccgggaggcggaggttgcagtgagccaagatagcgccactgcactccagcctgagtacaacagagactgtacttaaaagaggtatcattccaaaaccaccaagctcactagaaaaggtgcaataagatgctttactgataattaaatatgtggactttcagcctaaagacagtttacttggggagtcactggtaatcagaacaccgatgctattttggactatatggtggtcctgtaattgttagagaacaattattaacataaataaaatctaggaggttggtttagcagttagactgttttgtatttacttatcaggttcattcatctattagcattgagaattttga

SEQ ID NO: 52682 - DNA, 485 bp, Homo sapiens
gccccccctcggggtacttctagaattaattaacgcgggctcccttcaactacatattgttttaaagaacacttagagagtcaaaaagaaaacattccttacactcaatttttatttacttcctatttttaaaccgagtctccaagtctgttcatttcactgaataagtgacctttaactttcccagttagttttcaatatctaaaatcaatggtttccagttttaaatattagcattcctttcattcatatttatattactagaatcttccctctctgaaagacaaaataaaatgctgtcaaatcactgaaataatttgtaaactttgcaagtttggtcattaggtcaactatttttggaatggcttccttgaatgttgccttgcttaagtcttgacagcttttcagtggcttatgttttagtgagtataacagctttccttaaggaaaaaagtaccaaaacaccccccaaaaaaaaaaaaaaa

SEQ ID NO: 52683 - DNA, 393 bp, Homo sapiens
gggccccccctcggaagtcttctagaattaattaacgcggggagactgcaaaataatactgactttttgtttcaattggaaaagaaaaaaaattctttaaaataaatgaaatctgttttccttcccgttagtctagttctgcccattggcattacctggatcaagtcgaatgaccaatgggcagagctagactgatgggaaggaaaacagatttgaaaagtctaatgacttcttcaggtatttgaaaccagaaatcatatacgacctctcttaatgtctatgtgtcttaataattcctcatggatgtaggaaccagccttttccaggttcaggtccctgtggtccctgttcagttctctggttgatcaatggtactccaaaaaaaaaaaaaaa

SEQ ID NO: 52684 - DNA, 641 bp, Homo sapiens
  misc_feature 558, 620: n = A,T,C or G
cgggccccccctcggggtacttctagaattaattaacgcggggtctctttaaaattctctttaataaaaacaaaaagtgatgctagtgtaaaataaaagatatatatagaaaattgtgtgtcctcgttaatcttctttaggaaagatatatgcatatatgcagtatagttttgggtttttataaaaatgagatcatgctattagtatagtgaatagcctctatatagtctttcgtaacatttttactttttctcggtgtatggatatcaatttaggtcagttgctgcggagtttgaaacgagttaaaatttcagcagttcacaaaatggatgattcatagtttagtcgagccatcatctgttgatggacagtcatgtggtttcttgttttttctttctctgtgtttcactaatgaaacaggattacagtaaattgactcgtgtatgtgtatacatccatctttgctggtactatagaaaagtgtattgctggctgggcatggtggctcatgcctgtagtcccggcaatttgggaggctgaagtgggtggatcacctgnggtggggagtttgagaccagcctggccaacgtggcaaaaccctgtctctgctggaaatgcanaaattggctgggcgtggtggc

SEQ ID NO: 52685 - DNA, 555 bp, Homo sapiens
cgggccccccctcgagggtacttctagaattaattaacgcgggcgcccggcgaagaagacccagtttcaaattttaaccaaaagtgtaaaagtcagaaagccaaaagaaatatactcaaatattattataataataatcgattttgatggataaaaggaagaatctaacaattcctactcattttatccttggctacttgaagttcttaaatattagaaaagtataattgaaagtttatctttagctacctgaacaagttctagtctctcttaaaaagtataattgaaatagaaactgttggtggtgtgccgtggctcacgcctatcccagcattttgggaggctgaggcgggcagatgacctgaggtcgggagttcgagaccagcctaaccaacacggtgaaaccccatctctactaaaaatacaaaattagccgcgcgtggtggcgcgtgcctgtaatcccagctactcagcaggctgagacaggagaatcgcttgaacccaggaggcggaggttgcggtgatcgcaccattgcactccagcctgggcaactg

SEQ ID NO: 52686 - DNA, 607 bp, Homo sapiens
  misc_feature 32: n = A,T,C or G
taccgggcccccccctcggaaatacttctagnattaattaacgcggggtgtgtgttgtatgtcttagaggtgcccaactgcaaagaactctccattgttagagacaaattttcgaaaggaggtttctaatactcattcagagacctgtaatttaatgtgtttttgtttttttgcttaaactctgatggaatatagaattgaatatggaatctaaccaagagggataaaccctacagctttggtgttgtctgtattttctgattagagtgtgccgctagattatttgcacactcagaatacatcatgacatttgcatacgacatcttgacagactccgccatgggagactgtctcttcagcttttctcaaaacagcctgtaattcccctgtctctcacaaactgtggccaagaactttgtctttatttcttgaggcttttttcaacatggcatctttttgctctaataattttgcaaagtagctttctcttcacaataagttggttcctgaaaagcggtattattggattattggaaatcaaacatgtattcgatgtaaccaggaaacttatcctttatggaaactctagcaaaaaaaaaaaaaaaag

SEQ ID NO: 52687 - DNA, 599 bp, Homo sapiens
  misc_feature 10, 78: n = A,T,C or G
cccccctcgngaagtcttctagaattaattaacgcgggtcttctaagtgagtgcatgtttctttaaaaaactacacangaaaaaagacagtaaaagcacttacacagttgatagaaattttggaaactaattccctcaaatgatgactatattactgtagctaactttcaaagagtgaccttgttgaagaaaattgtcttttattgccattatcataattacacagtggtaatattttgtaaattttaattacagtgataaaaaatccttataattggggtgatttattttttattatttgaatgctattaagctttaacactatttcaagttttttatatactgatataaaatattccaaaatatcagtatagcttcttttaactttattagctattaaaatgtttgagaattaattatataaaagctgtcaaaatgaaaattcttatgttttaagaatgcgacatatttcctattattaagacatatctcaaatctcttttctggaaagagttttgtgcacttgaatcagtgtactgttttcttttcttattcaaatgcatatttctacaaaagtggtgttaacactttatatatta

SEQ ID NO: 52688 - DNA, 494 bp, Homo sapiens
cgggccccccctcggaagtcttctagaattaattaacgcggggaggggctgttttggtactgtatacctgcaaattttaaatattgatttactttacttccaaaggattggaaattttgtttttttctttctttgcccttctttgaaaacattgtacaaagtaaatctctttattttactaatggagaagcttctgaaagaggctgaacatacattgaagtacctttgctcagctgtaagcccttctggatcagaggtcggaccaaagtttgcagacagttggtccctgtggaccagactgaatccacacatgagtttatttggcctgtggagcactgaaacaaaaaaagtgcaaatcctgagccaacgtttgggagatcccatattataatacaaatcgagatttccaggtttctggaaggtcttggcaatctagccacactgggcctgcatctgtgcaaggctgcatggctagaggtcgaaaaaaaaaaaaa

SEQ ID NO: 52689 - DNA, 562 bp, Homo sapiens
  misc_feature 20, 31, 75: n = A,T,C or G
taccgggcccccccctcggnatacttctagnattaattaacgcgggacgtatttaatgagcaatctagattttgngagaaatctagaacagaaattttttttaaaaaaatttatattgtcttttttttctattgaaaatattttaaatctcttaatttttattaacttttgtttggtttgtgttaattataattccacattataatactataaaagtcaccttcaaggtggctctgttatattacagatggaaacataacatctagtataattaaaatataggtttcctttataaaagaggatatggaaactcatttgtatgcactaaactacataaatcagaagacaaggtaaaatactcccaaataaggtacaagattctcagtccccccactacccactctgccatttcctgtgaatgtaaaactgatcttatgtacatggagtgggggttctaataggcataatggaaaactcacatatttgctctcttaaggatcattctctcctcctaactcctcctaactgcttgggatattctagatttttgcccacttgctct

SEQ ID NO: 52690 - DNA, 327 bp, Homo sapiens
cgggcccccccctcgaaagtcttctagaattaattaacgcgggccccatgtgttattcctaggctgcagttttgaagacacatgggtctcaggccaatgcctggtaggaaaatgcttttatctctttcagaacaaagcaatattccacagaatgtcagcccagttcatcttactggtattgtccatggatgttttcatgtacatgtttcatgtacatgtacatttattgagtcaaataaaactcaatatatattttttattatacctactttctttcttaaatctctagctcaattaatgtcagcaatttatccagctgtacaaatt

SEQ ID NO: 52691 - DNA, 424 bp, Homo sapiens
gggccccccctcggaagtcttctagaattaattaacgcggggtaccgctgtagaacatctcaataaacgtgtgagatgaaagaataaatatatatatatgtgtttgtatatatgcaggtatattgtgtataaatatatgtgtgtatatatatatacacacacacacatatttaaatgagcacagaccacatgcaaatcattgattagttttctctcacaattactttgttgaagatatcgttacatagtatgtataaattatattaaaataaaaacaagtggtctgaggccaggcatggtggctcacacctgtaaacctaacactttgggaggtcaaggcagggggatcacataaggtcacgagttcaagaccaccctggccaacatggtgaaacacctctctctactaaaaaaaaaaaaaaaa

SEQ ID NO: 52692 - DNA, 392 bp, Homo sapiens
ccccccttcgaaatacttctagaattaattaacgcgggcccacttggctccaaaggcacctatacaatgtgatgtaaatgctgggacttcgtaatatgttttaatgttgtttctagaaaagtctattttgctattaataggctccaatgtaacccctaaatgtactcaactgtttatatgaaaataagtagtgaggcagaaaattgcctttttataactctaggaatgatgattctgcaagtctgtaaaccattgggaatattataaacaagaaaatccaagagatagttttagtacatttggatatatgcaaatctaaagaatagcaattttaatttcctaataaaattctcaaactatagaatttattcttctccaaaaaaaaaaaaaaa

SEQ ID NO: 52693 - DNA, 617 bp, Homo sapiens
  misc_feature 32: n = A,T,C or G
taccgggcccccccctcggaaatacttctagnattaattaaggcgggtggcctacaatttcatgcttaagtctatgtaacatgatccagagggagtagctggtagcatttctatatttaactgtagccagtgatactgccagggccaactggcatattgtgaagctcggaaatcttatcttggaattacaaaatctgtctcccactcccctgcatttggatccagttttttttctgcagttacctcaaattacaactcttgccctgtgtatgatacagtaaaatagatctactaacctggacatcttctcaagtattatgcctgtatttttaaatttaatttaatttttatatttttgagataggagtctcactgtgttgccctggcttgtcctaaaccccaggcttctagcgattttcctgcctctatctctcaaagcactgggattacaagcaagagccactgctcctggtctcttacctgtatttttaaaaatatttttcaagctaatcctaatgtgtaaatctcatttctttttatttcatcctcctctatataatcatttactatttttaaaaaactttcctaagactttgtccttgtgtattagtatttat

SEQ ID NO: 52694 - DNA, 524 bp, Homo sapiens
  misc_feature 45: n = A,T,C or G
ccgggcccccccctcggagtacttctagaattaattaacgcgggnagccctaacaatctagtgttaggatactgtcatctaagaaaatactaatacagtatgataagcacttcaaaggagccctctgcaaggtgcacagaaacaaatgctttggcagagagtgaacaaaatggcttagatagtcttaatagagaatgattataagtctggaaaacaaaaaacacattaaaaatttcaacaaagagtccaggggcagtggctcatgcctgtaatcccagcactttgggaggccgaggcaggtggatcacaaggtcaggagttcaagaccagcctgaccaacatggtgaaaccccgtctctactaaaaatacaaaaaattagccaggcgtggtggcgggcgcctgtagtcccagctacttgggaggccgaggcaggagaatggcttgaacccgggaggcagagcttgcagtgagctgagatcacaccactgcacttcagcctgagtgacagatcgagactccgtct

SEQ ID NO: 52695 - DNA, 500 bp, Homo sapiens
  misc_feature 462: n = A,T,C or G
cgggcccccccctcggaagtcttctagaattaattaacgcgggtggtatttgaatattatatcattatcaatttctcacaaatgttttaaaatattttctaaagacatatttttgaactctttttccttgtatcccaacttcacaatctctacctcagtcttaagatatatataaatatttattgttaaaaagtataggttgaggccaggtgtggtggcttgcgcctgtaatcccagcacttttgggaggcagaggcgggtggatcacttgaggtcaggagttcaagaccaacctggccaacatggcaaaaccccatctctattaaaaatacaaaaattagcgggtgtggtggcatgcacctgtaatcctagttacttgggagactgaggcaggagaactgcttgaacctgggaggtgggggttgcaatgagccgaggttgtgctgctgcactccagcctgngtaacaaagtgagatttcctctcaaaaaaaaaaaaaaa

SEQ ID NO: 52696 - DNA, 628 bp, Homo sapiens
ccccccttcggagtacttctagaattaattaacgcgggagtgggagagggagagggactctcagataactttctaaaacctccgaagatcttttttcatgtgtgagataataatagaagatattcctgagagttttgtgtatttttgtgtattttccttgcttgtggatggaagcgcgatgtcttctattaccaaatgtgcctaagccccagcctgtggctctaaagaaggttacatcaacataaaagtcacattttaattttctgtctccctgcacctgcctgctgactcaggatctcagcccagccacgtggcatctcccaccacctccacttgtttctgggactacctggagcagcttggatgcactgtggctcagctccctcacagtcttcagtccagccgctgtcaggctccttgtggggaggcctctcgctgctgtcccttcagccgggggtctccaggggcgctgctgtggctgtctccagagctccccaaggggcaagtctgttgaaggtgccagagcgttctgcgttccctgccggccaacacatcatcagaggtggggcgatgctcctcctcaagcagttcactctctgccccgcgccagctgggcctgaccacactg

SEQ ID NO: 52697 - DNA, 385 bp, Homo sapiens
  misc_feature 31: n = A,T,C or G
taccgggcccccccctcggggatcttctagnattaattaacgcggggtagacatcagtggttttaagatcagtttctagtgaggagggcagggtttgtatccttctctcattcaactgaaaatcatttaggcttttcttttaaaaagataaccaaagtaatctaagcttctggtagaacttattaaaaatagggaagtagctgggcaaggtggcatgcacctgtagtcctagctactcaggaggctgaggcaggagtagcagtagagcttgagcccagggatttgaggtggtagtgagttaggatcatgtctgtgaatagccattgcactccagcctgggcaatgtaacgagaccctatctctttaaaaaagaaaaaaaaaaaaa

SEQ ID NO: 52698 - DNA, 624 bp, Homo sapiens
  misc_feature 14, 27, 83: n = A,T,C or G
gggccccccctcgngggtacttctagnattaattaacgcgggggtgggtaagaacaagaacaggatctaaagccaaaggtctnatattggaaaacaggcaagattccacagccagcaattaaatgccaacagaaaagcccaggggcatgcaagaagctattcaggaagatgagctggttcagaaaatgctctcatcccctcactcactttgacaggggagacagccactgtggtgggttgaattcatcaatgtaagtgccctcacagccaatgccaccatgaaactgcccgttctctgttcacagccatgtaactatataagctatgtgcaagatcttgaaagctccaaagaaaaacacaaaattgtctactgacagaaattctagaaggtacagcacgccaaaagtgggaagtataaaaccaactaccagaggcagctgggggatcctcccccgacatagtcactacacttctctgacactgcatgaaaagtaaaaatagcaaagggaaaataaaggggagaggggaagagggattggagaagagatcaggtgagatggtcaggctacagtcagaagcctcccgagaggagtttctgatttacagtatgaagcaggcaaaaca

SEQ ID NO: 52699 - DNA, 456 bp, Homo sapiens
  misc_feature 40: n = A,T,C or G
agactggggtaccgggcccccccctcggagtacttctagnattaattaacgcggggagtagggaatagaggtaaaggggtctttaatcacacacatgagcacagcaagtttgatcacatttgattaatttagctttaataaggatagaaatgttttagcaagagaagctagatgaagtaattgggacaagaatattttaattttttttccaaagtaatttgcaaaatttgcacgtatttaaaggtggtatggaaagaagggaaaaactgtgaaaaagtaattgaggtccggcgcgatggctcatgcctgtaatcccaggactttgggaggccgaggtgggcggatcacgaggtcaagagattgagaccatcttggccaatgtggtgaaaccctgtctctactaaaaatacaaaaattagctgggcatggtggtgtgcgcctgtagtcccagctact

SEQ ID NO: 52700 - DNA, 484 bp, Homo sapiens
  misc_feature 454: n = A,T,C or G
tgacagaatgaaagcaatttttgctgttatttgattactcagtaatcactgtagtcacttaacaactgtataccccgactttgagccgtttccacagatatctgcatgactgactccctcatttcaaatgtcagtttctcaatattgcctattaggatcattctaattataagagcaacagacccttgtcatcactaccaccataggctttctgatattcttttacttgtttgttttcaatacactgatgatctaatatataatgtaacttattaattatatttagtctgttatctcaccccctagaatgtaagctcctgaggtctaacttggatttttgttatttttattcccaaacactttcccaacccttggcaatgttgtgattatagaaaagattctatgcttggcaacagtagatgctcacgtaaatatttgttgaattatgcatgtnataatgaataatccagaaagagtaaatgaa

SEQ ID NO: 52701 - DNA, 471 bp, Homo sapiens
cccccctcggaagtcttctagaattaattaacgcggggtggtcacctctccccaggctgcaaaaccccagacatgggacaagtcagttaacagcacttccaccttccccagcttcggaacttgtgggtgaaccctggccacaatctaatcagcactgccattaggacctttcagggtctcacacaggaccaggaagcagaaataagaaggataccgctacccatacttgttttaatgcaagaaactgaaagtagagtgatagagtccttctttagggccagtgtttacatacaggctgcatagaaacctgaacctacaattcgtcttggcatagaagggaaatacccaattgacaacaacataaaaacttttaaaaaagcaaaaatcacacttagaagataagttatttcatagctcccccaaagacattataaataggaagtcaccacatgaattcagttctccaaactc

SEQ ID NO: 52702 - DNA, 486 bp, Homo sapiens
  misc_feature 26, 39: n = A,T,C or G
actggggtaccgggcccccccctcgngggtacttctagnattaattaacgcgggtccattgcactaactcatggaggacccagaaatttcctttctccttcccatttgcagaaatacctaatagaagccaaatcacatgggcaaagctcaaccaagtctttcttaagtccttacaagttgatactacagtgaaggatattttttaatgggtaagatattatttaagggtgtccctttcaagacaagaaatccaggttcacactcctcaaatccaagactgctggcctgaagtgatgctgtactgatgacctacctatggcaatgtactcaatgggaaaacatgccccagcatggtggatcaaagaaggcagcatcatggatcaaagaaggatgctcctttaggaaacaagatccacgtgttttattctcaaaggattaaatggggatgagagctctggatatcgacataaggaaaaaaaaaaaaaa

SEQ ID NO: 52703 - DNA, 618 bp, Homo sapiens
gggccccccctcggaagtcttctagaattaattaacgcgggaatgcactaaaaagtgggaacaaaaaattactataaaatgtgaacgaaaaaaaaccctgtaatgtgacatgggatgtatttaacagtctctgtatttgtggccatttgtaagacagcaaatatgaccagaggtaagtcaatcttggtttaggaatagatagaattcctcaacatcttttccagtttcatgcttctggagcaaaactaccacgttttggaactggaagagacctagaaatcacagaatcagctcctctcatcaaagggagaatacgctgatggccagcaagatcaagtgtccattccagcacccagtccgtacaccctgagcgggcctagggcaggtgccacatggagaattgtctttactaattcacactgtaaggaaacacagtttgagtttccaggtgttcattcatgtctatataaatgtcagttcattaaatggctttacaacagaccttcttctgagctggctttaaccagttgatgatctgaaattagctaatgttaatagtgttttagaataaacacaattcatctaccactattaaagagaactactgtctcatcaata

SEQ ID NO: 52704 - DNA, 633 bp, Homo sapiens
  misc_feature 36, 559: n = A,T,C or G
tgggtaccgggcccccccctcggaaatacttctagnattaattaacgcgggataacaggatctctgaagcctgctgtactatagagtggcaatgccatggtcatataattcagtcggataaaagttcattacatgtgcttttggacgtatttggtcactgtgctacaatgacagctaagtgtttacagtaccaaacgtcttttcaactttatcctttccaaaagtgcactttgttaagacaattttaaaaaataacatttacccagtgtttctacttggcatgtagggttttttttttaatctgctcagcaatttggaagtttgcttggaacacagatgagttaagataaaaagctgttttttaaaaaaaaatgcctctagtaagtaaaaatgaagatactatatctgaatgaatgtgaaaagttgtccctttgtatatttttaaagcttcctaaactatccccagttctcagccaaatgcagcctacccagattgtctttaggaaagtagcaattcacagagatttgcagttagccatgtatcaaactacactctctntagtccctgcttacagctccaccattttagaatatggtgagatatgccagagccctaccatctgtttaatgggc

SEQ ID NO: 52705 - DNA, 552 bp, Homo sapiens
  misc_feature 29, 46: n = A,T,C or G
ccgggcccccccctcggaatacttctagnaattaattaacgcgggngaaaccattaaaattgttatggtaaaatatattacctaacttcagaatgctgcacttccaaatcaaacatgctgcaaatgttactatggaagagaataaccaataaaaagaaaagataaaatagacagaaaagataaatgcacagagcaatggaagggggcctctatttcagtagacactgtttattggagacataatttaatatcaacaaaattaattctagtatagaagcacaaattaaaaagtaaaatatatcaaatattgtttcacactttatttaattttcaataatctcatgatctgttgaaaataaattaactttctaataatgcaaacattcaactgtgcaaaatggtgcatgcagtatttaatgagactgaaactgcatatcaactaccatattaaagaccaaacagtttagaataaacctgtttagtttttattaactcggtgttttccaaatgtatttggtcataaaagtcatctttagcaaaaaaaaaaaaaaa

SEQ ID NO: 52706 - DNA, 525 bp, Homo sapiens
  misc_feature 466: n = A,T,C or G
gggccccccctcggaagtcttctagaattaattaacgcgggatggtctttttataagcaaagagtgggggttttcaacacctgttaggaatgtatgtaaaatatattaaatgaaactcatgagggaaacagcatgagttccaaaagcaagtgatgtgatttttcaagcagcgcacttggaaaaataatatatctttcattatttcatctcgctatgagtctagtgatagagaacagtagagaggaggttgataaatggagaaggttgatgaattgaaacaaattacctgattattacatacaaaacatttaataaaaatgatattttagaaattattttggtaaaatagtttgttctcagccagtgatcagagctttataaagagataatcccctttagtatttaataacaagatttcaaaaatacagttatactgggaaagctacatccttttacatggtaaatntaagttttcttatgagattgaatgagggaaattgtgcacacattatttgcccaatgcgt

SEQ ID NO: 52707 - DNA, 510 bp, Homo sapiens
cgggccccccctcggaagtcttctagaattaattaacttgggggtaggcaaaggtttcataagataggtcaaaaaaaagcaataaccataagagaaaaaaatttatatacattagacatcatcaacatttaaaacttctgctcatcaaaagatgcctttgagaaaataggcaagccacacactgagagaacatattcactaagaatgtatctgataacagcctggtatagaaacagctcttacaaaaacaaagaaacaactcaatagaaaaggagcaaaaaatttggacaggcacttcacaaaagaaggtatttgaatgggcaataagcacatgaaaaagtgctcagcatcatgaagttatcagggaaataaaaattaaaatcacaataagatatcattgaatacctacaagaatggctaaaacaagagactgataacatctaacgttggcaagaatgtagagtacctgcaagtttcacacatggttagtgggaatataaaatagtacac

SEQ ID NO: 52708 - DNA, 573 bp, Homo sapiens
  misc_feature 32: n = A,T,C or G
taccgggcccccccctcggaaatacttctagnattaattaacgcgggctgttggcttcatttataattctattttttttttggctgtctacacattatttcattttgggacctgctacactgttggatttttggctttactcaccttttccccccttctccacttttgacccatctcctcctatttcattttggcaccagtaaagtaatggttcatgtgtatgctggaagcctaccccatacatctctatgggtgcagtattcctttttattgtgttttatttttcaaaatgacaagcttatatttccagtatgtgaaaatgctttagaacttcttgttgaatatagattagttgacattttaagtcttagcccatgttgtatggttgtgttttggttttctatttcttctttactcttttcatcatataccttgtagtttttgtcatcagtgaatgatttttgagaatcctaatgtgcacagcattctgctggatcttgtactaagcagtttaaagagaccctgtgcaattacccgacatttcctgtgtgcttcttataggcagaatttcat

SEQ ID NO: 52709 - DNA, 417 bp, Homo sapiens
  misc_feature 35: n = A,T,C or G
tgggtaccgggcccccccctcggagtacttctagnattaattaacgggggtgaggggagatgggttgagaaactgcctattgggtactatgcttactacctgggtccaataaactcctgtaacagtctccacatgtaccccttgtaagtacaaatgaaatctgaaatttaaaaaaagaaaaacatcttcaaaatatttcagaaaatctttggattatctattacaaacaaaaatccactatgaatttcttatccaaacttcatgatggtcagtgttatgatttactcatcagtctaaaatatatatgtttaacagctatttatgatttgtaatagttgcaaaatattaatgaaagtaatctgcatctgaaaacactaaatgagaggctactaaagcagttattatatgaataaatta

SEQ ID NO: 52710 - DNA, 602 bp, Homo sapiens
  misc_feature 26: n = A,T,C or G
gggccccccctcgaaatacttctagnaattaattaacgcggggatttataggtcaaatggcaagagtttatacattgccattttgagattccatgaaactacagccatgagcattaaataaaagaaacataaatttttataggactttagtattttctttccatttaaacacaaaactaaagtgtataatattattagtaaaaacaacaagtttacattttgacaaggaactgcttgcaactctttaattcttcagtttttgtgatcacaaattccacacaagatacatgccatagcagatttaaacaagagttttatttttatgtaagcaatataaagcacactaaattttaaatgtattaaatctttgaaaatgattctaggcagtatttaattataacattcaatttttttaaaagaagatagtaacaattaatatgccaaacagttaaaatttaaattaattgtaaaactttggataatgccaagttttccatatttaccgataaattggagaaacaattttacactccaagagatgtgtcgtgtataatagtgctaatgaggacttctggttacgatggcagggtgagctaaattag

SEQ ID NO: 52711 - DNA, 519 bp, Homo sapiens
  misc_feature 26: n = A,T,C or G
gggccccccctcggggtacttctagnattaattaacgcgggcacccagcagctctagttcttgcatctccacacccactccactgtagcaggcctgaggagaaacctctatataataataatagaaaaagtttagagttttgactgtaacacaggcatgaacattttatttaccaactggagaatcttgtcttatttttaagtgaccagaatttagtggagcagaggaataaatagcccaacagagagaattttttgtctctagtaggagataataataaattgctttgtaaatatatctcttgacctgtcatgcctgcccaaagcagttataaatttgctaaaggagtgttagttatctttatcaactttttctctggtaatagttccctgcacataggagagtaggagaggctcgtttattcacttgttcaagcatttattgagcaactcctatgtgccagtcatgtcatccctgaggtgaaaataacatgactcctgtcttcaaaaaaaaaaaaaa

SEQ ID NO: 52712 - DNA, 515 bp, Homo sapiens
  misc_feature 22: n = A,T,C or G
cccccctcggagtacttctagnattaattaacgcgggccttagtcctgatttgaagtcctgtcttccttgatgctttatttgagatactagacagaatatgaaaagatgaaaagaaaacttaaaataagacaaatgttttgtagtcatctatattacttccatcatttagtttttttttctcattttttaactttaacttatcctctgatacaaagtaaacaaagtggccaggcgccatggcttacacctgtaataccagcactttaggaggccaaggcgggcggattacgaggtcaggagatcggcaccatcctggctaacacggtgaaaacccgtctctactaaaaatacaaaaaattagccaggcgtggtggcacctgcctgtagtcccagctactcaggaggctgaggcaggagaagcgctggaacccaggaggcggaggttgcagtgagccgagattgcaccactgcactccagcctgggcgacagagcaagactctgtctcaaaaaaaa

SEQ ID NO: 52713 - DNA, 511 bp, Homo sapiens
  misc_feature 36: n = A,T,C or G
tgggtaccgggcccccccctcggaggtacttctagnattaattaacgcgggtcacaactaacaccagcttctgcaactgtgtattgacatttatttctcacaaccttgtgtaccaacacaagtcaatagcagtgaaagtcaagagcagtgacaatatggtctttctctgatttctaccttccaaatcacactgaagaacatctagtttgcaaaacataattactgtacagaatgcttgttgcaaggaaatctgatacatgtaggattcttgaattctggacattttattaaagaaaataacctcacacagtgaaaccccgtctctactaaaaatacaaaaaattagctgggcgtagtggtgggcgcctgtagtcccagctactcgggaggctgaggccggagaatggcgtgaacccgggaagcggagcttgcagtgagcagagatcgcgccactgcactctgcactccagcctgggcgacagagcaagacttggtctcaaaaaaaaaaaaa

SEQ ID NO: 52714 - DNA, 498 bp, Homo sapiens
  misc_feature 26: n = A,T,C or G
gggccccccctcgaaagtcttctagnattaattaacgcgggatagtcttaatagtataaaatttaaaactttaatgaaaattggagattatctttacacttaaaaagtaagttaaacttcaacagtaacgaagacctactacagaaacaaattcacttacaaggaagtaacaggaagacaaagtttctgatgtttttctcaaattccagtttgaccatttggtgtctccttagctcttatctctttctaagggcaaccagttgtattttaagtgaagttttaattatagttgtttgattagtaagtagttcttgaaactttaagacagagtttaggttgctttgctatttaattcattcaaaatagtcttacatcttacactgtggctacccttttagtgagaagtgcagtgatatgtacataggatattacaaaaaaaaacacccaaaacattgtgacattgtgaatgtgctaattacggtgctaccactgtcatta

SEQ ID NO: 52715 - DNA, 567 bp, Homo sapiens
  misc_feature 27: n = A,T,C or G
cgggccccccctcggaagtcttctagnattaattaacgcgggggtgctcacgaagaagacagactgggttccattttagatcttaattgttaagaaaaatatttaaaaactccagaaagacaatcagaagaacgaaatcctgagttgagtattagatgctattaagcaattattcaggaaagttggtaattttgttgtttgtgataataatattgtgcttgtgtctttttagagttcacatctataaaagttacatatggaaatatacacaggtaaagtaatatgtcatattgaatttgcttaaaatacttctctgtccaaaaaaaaaaaaaaaggaaatggcagggggtgatggatgaaagaagaaggaagaaggaagaatggagaatggcaacatgttaataattgatgaagatgggtgataagggctaaatttgagtctgaaaatattcataagatttagttaaaatagccattgcaacttaattattagctatgtgatattggacatgttttaaattttctgagctctgattttctcattaatgaaacagggataaaaatgtt

SEQ ID NO: 52716 - DNA, 371 bp, Homo sapiens
attaattaacgcgggggtggtataatttgtattgtttattttgttttatttgtgatttaaggttgtgtatatgaaggtgtaaggtatgcatgttcatatatatcctcttatctagaaatccccaaattatttctttaattctggaattcataccttttaccaatgttctttctcccttatcattatcttatctaaaactactgacttttgaattttttcttaatttgagagttatttgatggtgttttgctccataagttttatcataaaaataatataggaatacattatttttctgaaaactagaaagatgacagtcattcaagattatgatagtttaaagattcaatttttccaaaaaaaaaaaaaaa

SEQ ID NO: 52717 - DNA, 583 bp, Homo sapiens
  misc_feature 33: n = A,T,C or G
gtaccgggcccccccctcggaaatacttctagnattaattaacgcgggtcacatagatttattaagaaactgtattgccatgtggatttaagttctgattgtaataactttgtaatccaacccagggatttatggcctgcatcttaaaagccattggaatgattagatattttgcataaacatttctaaaatacagtttttactagccacatgcagcctgaaaaaaatggcttccaggaagatcagttttatttctgtcatactctttgagttgatttcaagaaaattgcatcactcattacctataaagtgtgtatgaaagacctatggctttataacagataggcatgagtgaatatttaatataaatattttacatacattttattatttcacttaaaagcacaacagctggggtgggggtgttttattatttaatataatataaaatctaaatagttaacatgtgaaaatgtaactaaatacttgcctgaatgtctaggtttattttggggatttttatcatttatatgaatatagtttttttctgataaattttgcaaaacccaaaaaaaaaaaaaaa

SEQ ID NO: 52718 - DNA, 415 bp, Homo sapiens
  misc_feature 367, 368, 370: n = A,T,C or G
cccctcgaaagtcttctagaattaattaacgcgggtcctaaccttaattttagtacttagttcttatatggtccaatatcaataattttttaatagtataaatcctgcttccacatacttactgttttctacttggttaaatttccacaattaagattttaaaaaatttttaaataatctcacaatgtgtaggaactgctgtttaaagacatctattttaatgagctataaagtcttggttctctgctgcaagcggtggctcacgtctgtaatcctagcactttgggagaccaaggcgggcagatcacctgaggtcaggagctcaaaaccctgtctctactaaaaatacaaaaaaaaaaaaaccccnnanaaaaaaaaaaaaaaaaaaaaaaaaaaaaaggaaaaaaaaaaaaaa

SEQ ID NO: 52719 - DNA, 423 bp, Homo sapiens
cccccctcggagtacttctagaattaattaacgcgggtaaatctaagtttaattttgatttttcattcttcggtacagagttaataaattaactagtcaaaagtagattagatgacttgtggaacaaaattaagagctgtttctaaaacagcaagggcccttgaaagaatctggaattctataaatgaaatggaaaggccataaaagtcaaaggaacaaataagccaagaaaagcattactatatccagaatttagttttacaaagggatttcataatatgctctacatttgtagcatcatctttttaagctaattgacttggggcacattaatgcaacccaatgcagaagtttgaagtttagaatcttccaaaaatacatttaatcacttcagtaaaatcaacatcaacagcacatcatgcc

SEQ ID NO: 52720 - DNA, 517 bp, Homo sapiens
  misc_feature 27: n = A,T,C or G
gggccccccctcggaaatacttctagnattaattaacgcgggatacttcatgatcataaacctcccctaaataatccactttctccatatgtctgatacctaggaagaagacatttaaatttctcacactatcaccggtacccactgtccttcaatgctgccatgatgagatgttttatatacttcccccttacaatctgctgtatgtttacattagaatatttaatcatcaggcctctaaaagcaaaaggcaagttgtttcatgcctaaaacgtaaaatatatcaccttaaaaagtacaagtgaatgggtatacaatgaatgtggactgttccacaattattttgttagttattactcacctgatgtagatgatagagaactcaggttaaaatcaggtactcagttggagaagaggaccattccctatgaattataaacttttccttcaccctaatttttaagaaatccatgagtttcaccttcagcatattgtctttccaaaaaaaaaaaaaaaa

SEQ ID NO: 52721 - DNA, 375 bp, Homo sapiens
ccgggccccccctcggaatacttctagaattaattaacgcggggtattaaatgttataaagcagtaaatattaaaattcacatatttttgattccagttattaaaatgacacactccaaactttgcaagtaacactgaagaacaaataggtataaaatatatgcctcaaatatcacagcagcaaattttgtaaagcagagactgtagaagatacaaggaaaattagagatattttaatattaggttggttgtggtggtttacacctataatctcagcactttgggagaccgaggtgggataactgcttgagcccaaaagcttgagaccagtccaggcaacaaagtgagactttgtttctaaaaaaaaaaaaaaaa

SEQ ID NO: 52722 - DNA, 623 bp, Homo sapiens
  misc_feature 38, 54, 79, 609: n = A,T,C or G
actgggtacccgggccccccctcggaaatacttctagnattaattaacgcgggnggcctacttcagggtggagggtggngaagagaggattacaaaaaaataacgattgtttactacgtttagtacctgggccatgaaataatctgtataaaaacctcctgtgacatgagtgcacctatataataaactccacatgtacccctgtacctaaaataaaagtttttaaaaataagtcaaagatgtaatcttttctctcatgtttttatatctctgaaatcaagacatattttacaattgattgggagcaattttcttgcttgaacataaaataacattgaatctcgtcatcagagtatcttggattagacaaatttagtatgttcagaggcaactttaggtagggaatgacagacctcaaattccagtgtgtcacagacttattaaataggaatatggtatgcaaaaatttgctgattaatcagcccatcataactgaggcttgactctatgcctatgtgcatttttactttgtctttcacttcaaagcaggtgcagctgcacagtatgaattcaatacccatggtaaagagtccctttaaaggctatatntttatattaaatat

SEQ ID NO: 52723 - DNA, 377 bp, Homo sapiens
  misc_feature 27, 40: n = A,T,C or G
gactggggtaccgggcccccccctcgngggtacttctagnattaattaacgcgggaaattatggagatatactggctgattattttcaaacttaaaatgaaaactataaattcacagattcaagaattcccacgaatcccccaagtaaggcattttagcatcaaattacaacgaaaaactattaaaaacaaccagcaggggaggttgcactctacatgagaattaatgttcagaataactaatggcttctcatcagaaaaggtagaaaaacaaaaaccctaagacattagaatgctattttttagagtactaagatagatagacagacagacataactataaatccactaaaaatatcctttaaaaaaaaaaaaaaa

SEQ ID NO: 52724 - DNA, 478 bp, Homo sapiens
ggccccccctcggaatacttctagaattaattaacgcgggtagttgatcactttaatggaagcattatcttcctgctcttttactgccaaaatgtaactgaaatacatttataaaatgcacagatctttggggccataaaactgacatctctatactgccctatcatatcaatagtgcctatgaggaatttttaaaactaaaaggtgctattacagataggtcattatgtaatgtcaaaataacactgcaagatgacaagtcctccctcaatctgcttgttattaagttagttatggcagtaattcctgaatcacaacacaagactataaacttcagggaatttttttctccttgcttactcactgttggctctgttataattgtgtaagctagccacttaatgaatattaatgcaagttacacaggatagaaaataaacaacacaataaaatgtagatcttccaaaaaaaaaaaaaa

SEQ ID NO: 52725 - DNA, 622 bp, Homo sapiens
  misc_feature 36: n = A,T,C or G
tgggtaccgggcccccccctcggaggtacttctagnattaattaacgcggtccagatttcctggtatgtgagataatacacccccttatggcttaaatcattttatgttgcattttatctatatgtagcttaaaagatcataaatgatacagacagaaaaaagtataggtcaaataaaagatgtttgcagtcaaatatgacccagaggcaggcagtttaccaccctcagtgtttccctagttacttggattaaacactatttctcacagaagttctccctgcattattcagatcaactgagagctcccaccctccttgtttctgtagtttaggcctcagtaaaggtacatcggactacagtgatttcctcaaagatttacttggtaactctgatgaacaaggtcgattatgtctgcagtgccaggatgcctgtttccgaagatgctgctgccagccctgtggctgactttatttagcaactgttgtccttatcccaatattttgttatctgaaatctgctttgtctgatattaacatagtcaaaccagctttgtttttattagcattagtgtggtatatcttcttccatcctgttagttcaatctgtatgcttacatttaaa

SEQ ID NO: 52726 - DNA, 628 bp, Homo sapiens
  misc_feature 20, 33: n = A,T,C or G
gtaccgggcccccccctcgngggtacttctagnattaattaacgcggggtggggcgggagttgaaccagagttagtgcccaggggtctctgaacaccactgtgttcagcatctgtctcccagcatcccagaagttttgcccatctccccgggggaggggtaccaggacttgcacccaccctagacgggaagtgactttgtagagaggaagtgtgatgtgagcgtgggggcctcttattcccttctgttcttatgctgcttatttctcaattttattaaagccatcactgtctcagatcctgttatcctagcccaataaatggaaggagaataaagataacaggggtactttttcactgccatctcgagaaagaggagacacgagttccgtgggcatctgtggttcccatgaaatgtagctcaggcgttgatgtcagccctggcctcagagactttcctaccaggaagaaaggaagaactgctatttcgggcagctgccaactcctctcgccacctgccggggctccaggcaacatgctctcattttgaaaggctaaaagtcacagctttgtcctactaatacaaagcgtccctttctgcccttcccagggctgtggaaaaaaaaaaaa

SEQ ID NO: 52727 - DNA, 411 bp, Homo sapiens
  misc_feature 24: n = A,T,C or G
gccccccctcggaagtcttctagnaattaattaacgcgggcatctttggctgatatattcctctgccttaacctaatttttctcactcccttaaaggattcacctgaaggtaactccctcaataaatcaatttttcaaaaatgctatctcaggcttgcttccacgaaataagaagtaatttagttggtatcacgagagtttctaggaaagagtctcaatgtctgaagggccaatagtaacccattagtggtgttacatggagtattgacagtgcttggaatatagggatgtgctagcttttgtaatgtctctggtgtctacaaaatacagggatcttagtgaatacctggattgtactttctggatggctgttgctaagcaccactgatgctttgaaaaaaaaaaaaaaaa

SEQ ID NO: 52728 - DNA, 602 bp, Homo sapiens
  misc_feature 473: n = A,T,C or G
ccccctcgaaagtcttctagaattaattaacgcgggcctatgtttcttttcaacacttatttttttcagactctaagacctttgttctgcattaccgtctagacctaattatgttgaattgctgcaggtactcttctcctttttctctccctccttcttcttttgtaagaagggattttttttttcgtccctaagttgttttcttagcggcttttgccttgcaacagcagccattcaaatctaaaattacttcatgtcttgaaaagagtgccattcaggattcatacggcttttaaacacatttttttaatttctttccattttttctaaaaatattgccatttacacattttatttaaaattaagtggggtgatttgggattaggtttaaattagactccctctttgattacatgaaggcttccattcataggaatgattacttcttgagatattaatgtatattttatgtntactgctatagaagaagaggaaataatggattcttttattttgtttccagtttttatacattcctcatttaagaaatgagatatagcattgtgctgtcttactttgggaccatctgcagagctctaatc

SEQ ID NO: 52729 - DNA, 530 bp, Homo sapiens
ccccctcgagagtcttctagtattaattaacgcggggtatttgaaggatgctacatagaaatgaattaaatttaaacctttgattgaaatgctccatgactgtgttcacatatttccctatctacaatactattaagagattcatttgacacagcatttcctttgccttcaatttaaaaaaaattctttaaactttgcatacattaaaaaattaaggctgtttaagattccaaatgttattttgatgtgtgctggctttcaaacagtaaataattacttttaaaatgaagcctagtggtctacatattatttgaccaaaccaattcacttcaatatagtaatgtcttcgaggtatgcaaacatctaattcctgattacactatcctgaccttaactaatcatgttttatatttgtatccactattgtaatggctataggcatccacctcctttcctcagcccagtaggaaggactaatataaaatgtgtcatttgtctttaaatcaattttatttttatattgcaaaatg

SEQ ID NO: 52730 - DNA, 518 bp, Homo sapiens
ccgggccccccctcggaagtcttctagaattaattaacgcgggcccacttccaagtcacctgttgtgactcagcttctctctgccttggggcaccagcctgcaatcctgatggtgccttcctcaaagggctgttgggaggattccagagaatacacacgcagggctctgtgcactcccgcacccggttaaaccctagaaatcatgcccactgcgtgcaccgtgttcagatggaaaactgcgttagacacgtgtgcatctgtggttgtaaacgaagaatgatgcttctgtgactaagaaagttcaaatgcgtttcaaagcctgactaaagtcaatgtgatttgttttgatcatgacagactgactctgtcagtgtcagtatggggatgaaagacttggttcacaattttcttatcttaaaaaaaaaagatctccatgcttaaaagacaaaacaaaacattttgatccacagctttaatgctcaggatcattaatggcattgtagaaaaaaaaaaaaaaa

SEQ ID NO: 52731 - DNA, 478 bp, Homo sapiens
  misc_feature 396, 464: n = A,T,C or G
ccccccctcggagtacttctagaattaattaacgcggggtgggacatctgagtccttctccatccaacacaggctagatatggtggtttcttggttccaccagggagagagcaagaactgcaaagcctcttaaccctggagccagcactctgtcccttctaccaccttctgttggcaaaagcaaattgcatggccagcccaaattcatgggatggagaaatagactccgtatctcaaaagggagagcccactgccacttgtcagaggagcctagactcaaggagatatgattcctcgtggaccatggctgacagtctccataaataccaagagcagatcccatcctctctagcaaaaaatgagactttattgccttgaccgagtcctgaccctcanagctcacttgaaggtagctgctaagtcacagtgtcaagatccctcactggaagactaaatgcatgctntcactgcctgtgcg

SEQ ID NO: 52732 - DNA, 287 bp, Homo sapiens
  misc_feature 26, 39, 55, 89: n = A,T,C or G
gactgggtaccgggcccccccctcgngggtacttctagnattaattaacgcgggnaaatatataaaatatattaataactaccttaatnattttttattcaaccaacaaaaatttagaaagctgaaaagaaaaagaaaaatcctacctcacctcacttaagcatatttttgtttactatgtttttttcttctatcttgatattctgattcctttttttctttttttaatgttgaaataatttttagtcattatttttgaagaggtctgatgacaaaaaaaaaaaaaa

SEQ ID NO: 52733 - DNA, 520 bp, Homo sapiens
ccgggccccccctcggaagtcttctagaattaattaacgcgggtccgcctcccaagtgctgggattacaggcgtgagccaccgcgcctggcccttctctctctctttttttaatgtcactttagctttttctcttatcctcttattcttcatctcttctcacacaggcagctgtcttgggagtgatgctggagtttggatcatattccatgcgcccgtggctccaaatgcccatcattcctcagtactgggcaaaggttgttcagcctcaggtgaagtgagacaaagaaggacgtcaagaggttttgctgggtttgatgggtttcatctgggacgggttacaatgcattttgtgtaatcatctcttttcattaagtggcaggcattgtagatacagttcagtcattcttttttatggcatgtttagttggcaaaataaaatgttagtaaaagttggtgactcttttttttgtcctttacattaaaaaacaaacaagcaaacaaaccaaaaaaaaaaaaaa

SEQ ID NO: 52734 - DNA, 501 bp, Homo sapiens
  misc_feature 30: n = A,T,C or G
accgggcccccccctcggagtacttctagnattaattaacgcgggtgactttaaaactttttaccttctaatacaactgaatcagtgtgactttctggaattagtggaaaggcagacttctaggagaagataataccataagactactagggcacttggctttaggggagagtaataggtttagcatcctcaggtaaaatagggctgctaagaaaaccaaagtataggttggacacagtggctcacaccagtaatcccagcacttgagagtttgaggtgggaggactgcttgatcccaggagcttgggttcaacctgggccatgtagtgagacccttgtctctcaaaaattaaaaataattagccgggtgtggtggcgcatgcctgtagtcctagtttcaggaggttgaggcaggatgattgcttgagcccaggagttcaagcttacaacttgagtggctatagtcatgccactgggtggtaaagtgggtggtagagtagc

SEQ ID NO: 52735 - DNA, 530 bp, Homo sapiens
gccccccctacagagatactgtctataattaattaacgcgggacagcctgtatttctaaatttttgtactagtcctccaagtttttttcccaggatttttctctgactgcagactccttgttttttccaaattattgtttaaaaagaataatttgtttttaaagggcacatggataggaatatttcaaagagctaggtaattattatctacaacagaaacactcatttaatcaggttttcaacaaatgtttgattccattgtgttagattctttactatgtagaattgtttaaaggatgaataaagttgggttactgcctacaggtaagaatgagggaatggcaagggatttaggaattgcaattaattgagaaaaagaaaaaaatagtattttttttctggtcctccatttaatcatcttttaaatgaaaataatataaatattagaattaataataatattagtatatcaataatattaatagctacctcaaatgatttttttggggggatgagctcaaatcatcagt

SEQ ID NO: 52736 - DNA, 400 bp, Homo sapiens
  misc_feature 17, 28: n = A,T,C or G
cgggcccccccctcggngtacttctagnattaattaactctgcgtaaagctttgagtgattgctgtcctgaaaaagtaccgcatcactgctcatccttgtcggctactatcaattgtggtatctgatccttcagtttactatctgatatgtcctatgttatagctagtatgtaattcattgaaccgggagatcactagaaaccattacactccttggccatggtgaaataaagcatatgccctctcccaaagaacagtgtggagcctgctgggcctggtggctcatgcctgtagtcccagcactttgggaagctgaggctggcggatcatgaggtcaggagattgagaccatcctggccaacatggtgaaaccccgtctgtaccaaaaaaaaaaaaaaaa

SEQ ID NO: 52737 - DNA, 493 bp, Homo sapiens
ccccccctcggagtacttctagaattaattaacgcgggcctactctgtaccaaatactcttctaggaaccaaaagataaatcagtgaataaaacagataaattgcctactcttgctgagcttacatatttacaaacaaagtagaagtagataaattaacaaatacataaattctttttccaatgatattaaaaactatagagaattaaaaagtggtaagtagaagagagaataatagggtaagattctagttagagggcacatcaagtacaaatattctgagatggaaagatatctggtatgtagaagaaagagcactgaatataatggtaaaggtttagagttttttctgtaaaatcagagaagtgcatattgtttagaatttttttatcatgagaaaatatacacaagttaccatttaagccatttttaagtgtacagctcagtgcatgtaatacgtttccattgttgtgcaaccatcaccactgtccata

SEQ ID NO: 52738 - DNA, 607 bp, Homo sapiens
  misc_feature 31, 559: n = A,T,C or G
taccgggcccccccctcggggtacttctagnaattaattaacgcggggtcattatttgaaaaagaagtgcagcctttgtgagaatattattgatggaagctcctaaaatgatacgggaagcccttacctaattctattttagtggacaacattcttctatgtgatattttaagagggagaaatatttattacactgcaagacttacatttcaaccactagagaaaaaatttcaaaccaaagctaacaaaatcagcaatgctaagctgctacctcaaatggctgttatagatctattaacctaccagtacatcaatgaaatcattttaacattttctgtaaataatgaaatttttaaagattcttactgaaaatccatgtatattcaaatcagaagcagtattttatatataaataccactgagaaaattttatgagaagtacatcaaattaggctgtttgcaatatttgttctcaatattaaattatgaaatgagcatacacagcttattagttttaagcatttctaatatctaagcataagggaaggctacacctatntaagctatgaaatagaaggcactatgtttctacaaagactgatttcta

SEQ ID NO: 52739 - DNA, 593 bp, Homo sapiens
ccgggccccccctcggaagtcttctagaattaattaaaataaattgcttggacagttaagttgtcctgcagattgtctccgaaggctataaattcagattaagggttttgttgcttgttcctgagcttggaaagattccttttactgcattagtagtagctcaagaaatcaacaaccttgcaaaagaacagtcatttgaattcttgcagaaatagctggataaactgcatatatagctagttatcataatcatataacaaaatcttggcttaagcaagcaaacaaattactaattcatgatggcaagtgttgatatataatagtattgagtttggacataattatatgtatttctatgtattttaaaaatatacatttatgtatgtttatatctattatatttatttctatgtatttctatatattttattatatatattaaattgggtttcgggggttctaagtagtgtaccatagtagcaaattgtgagatatttttgtaaaataaacaaataaacttcattttctggatattaaagcattcaattaggtcaaaataaattgtggggagtgggaataacttactctgccta

SEQ ID NO: 52740 - DNA, 552 bp, Homo sapiens
cgggccccccctcggaagtcttctagagttaattaacgcgggatgctttagaaagaaatcatgggaaaaaaatgcacaatgagttctagagattgaaatcagctgaaacagtataaaatcccattaatgatttattacatgatattccatggtttgtgacctgtcatacgggattaagttataccattaagatagtctgaacattactattttgagaatgcctaactttaaaaaaatagctttccatgtacagtaacagtgttatgggttattagttaattagctttttttgccaactcactgaatatctcataaataatattgaatatgcacttctaattaaatattcagtttgaaatcaaagtattttaaaatctttcttctcccaaaactgtatcaaaatcgcaatatactaatcaatgttcgtataaacatatgggaaaattatactagatgggagctaacactagacaaagaatgccaacaactgtggaaatataaagaggtggatgacgacttagtcaatgtgcattgctgaatgtaagtgcttgc

SEQ ID NO: 52741 - DNA, 595 bp, Homo sapiens
  misc_feature 16, 29, 517: n = A,T,C or G
cggggccccccctcgngggtacttctagnaattaattaacgcgggatgcagttaacagctggcttcccatataaaacaatagagggcaaaaagcaatcaaatgaaaaaactgttaaccaagagttccattatccagaaaatctttcttcaagaatgaaggtaaaataaagacattaccatataaacaaagacaaaataattcattatttctaaaatcttacaaatatattgcaaaattaataaatccagatgtaaaatatcacatgcatattatttggtttatatttaactcaataacaggaagaaaaagtttgatattggataataaggccggacacggtggctcacgcctgtaatcccagcactttgtgaggccgagacaggtggatcacgaggtcaggagttcaagaccagcctggccaacatggtgaaaccccgtctctactaaaaatacaaaaattacagtgcgcctgtaatcccagctactcaggaggctgaggcaggagaatcgcttganacctggggacggaggttgcagtaagccgactctagcctgggtgacagagcgagactctgtctcaaaaaaaaaaaaagc

SEQ ID NO: 52742 - DNA, 528 bp, Homo sapiens
cgggccccccctcggaagtcttctagaattaattaacgcgggtgtctttttattttaggatagtcataattgaaaagtcaaaatttggaattaaaagattatggcacaaaattataataaatattattcaactatgaatcactagaatgctgatttagaatagttgaagatgtaaaaacatgtttttaacatagtaagaataacggccggccatggtggcttacgcctgtaatcccagcactttgggaggccgacgcaggcggatcacctgaggtcaggagtttaagaccagccttgccaacatggtgaaactctgtctcaactaaaaatacaaaaacataataataataataatagccgggtgtggtggcgggcacctgtaatcccaactactcgggaggctgagggctgaggcaggacaataggttgaacccagggggcagaggttgcagtgagctgagatcgtgccattgcactccagcctgggtaacaaaagtgagactcctcctcctccaaaaaaaaaaaaaa

SEQ ID NO: 52743 - DNA, 481 bp, Homo sapiens
  misc_feature 433: n = A,T,C or G
ccgggccccccctcggaagtcttctagaattaattaacgcgggacatatgaagtgcttagaatatgtcatagcccaatagtaagcatttaatagatgtagtaattgctgatattagttctacctggtgacagaattgatggtggtgattagacagattgctaacttttgagattaacatgttactttcagaaaaataccacaattcctggaaatgtctagttcaggtcagctaagaagttcatcttattaggacattttggttaaaatttccctctaggaaataaaactgagcttataatgcaaggaccaccttggggaaaaaggtcatttactttaggagcgaagatgttcatatcttctaagacgtttttcatcccactttacaaaagctttttgttcttattttgctacatgaaccccgaatacagaatnttttcttttgtgcgactgtactcagctggtcactcaccagctcaaacc

SEQ ID NO: 52744 - DNA, 469 bp, Homo sapiens
cgggccccccctcggaagtcttctagaattaattaacgcgggccacaggcatgaaccacagtgctcagcctcacccttcattttctgattgtagctaccgtcccactgtcactttctcaaatatcactaaacaattcatggaagtttcaatatatagaaataacaatttcaaaatcctagccattcagttcctggaactctgttcctataaatgatttttttccatttccctacttcatccttgttattcacatgattatactatagacattacaattgcaattactgtactagttctataatttaaatgtgacatattctgttgtttgatcatcagcttctttctactagctcactcacaatcacgatttttaattcttgattctcactaacttagccctgtctttcactcttttgttgggtctaagctctagatcacatcagtgcactcttctaaaaaaaaaaaaaa

SEQ ID NO: 52745 - DNA, 556 bp, Homo sapiens
ccccctcggaggtacttctaggattaattaacgcggggaactcatacaattagagtcaaaactgaattgcgatacccccatttggggaagaaatggaacagatctaaaaagaaccagtaggtactcgtaaacaagtgacgataatatatatagtattgagatgaaattcaaaatctgctcaacatttctatgtcaaaacctgctcaacatttctatgtcaaaacctgctcctagcatattattaatttccaattaaggttcgttctatctttcttagcatactatttatccttcagtgactaagccatttgatctgtaattaaaaaataatgatttataattttaaacagtgaccaaggcatcaaatcaaatataattttctgtttgtattttttcaacctattgttactcctattgattcttgtttaattatgaaatattaaacaaagcaacttaattttaaaaacttacttttatgcgacattttcacaaaaatgttttgagccataatatttctctgcatacatattgtcattgcttcattcataaaaacata

SEQ ID NO: 52746 - DNA, 479 bp, Homo sapiens
ccgggccccccctcggaagtcttctagaattaattaacgcgggttgctaatgatttcaacattaaaaagttttaggctgggcacggtggctcacgcctgtaagcccagcactttgggaggccaaggcaggcacatcacttgaggtcaggagttcaagaccagcctgaccaacatagccaaaccctgtctgtcctagaagtacaaaaaaattaaccaggcatggtatgtgtgcctgtaataccagatactcaggagtctgaagcaggagaattgcttgaacccgggaagcagaggttgcagtgagccaagatctcaccactgtactccagcctgggcaacagagtgggactccatctgaaaaaacaaaaacaaaaacaaaaaacaaaaaagaaccccttaaatttacttgtattcaaatctttgcttttaccttgtaatttcttccatgctttttgtttataattccttctccactttga

SEQ ID NO: 52747 - DNA, 387 bp, Homo sapiens
cccccctcggggtacttctagaattaattaacgcgggtaaataaacactcttggccaagtaaatccccaggcagagcaagggagacagaaggaaaaagcctggctggcatattctcctccctccctgaccatcatgagctgttctgctgtcagaaataatgaattggaacccccaaaatcattggtttaaaataaaaaaatctttcttcccttaagaaggtgtggtggcacacacctttaattgcagcacttgagaggcagaggtaggtggatctctgagttcaaggccagcctggtctacagagtgagttccaggacagccagggctgcacagagaaaccctgtctcaaaaaacaaaaacaaaaaacaacaaaaaaaaaaaaaaaa

SEQ ID NO: 52748 - DNA, 288 bp, Homo sapiens
aattaacgcggggtgaaaaaaaaaaaaaaaaaaaaaaaaaaaaaaaaaaaaaaaaaaaaaaaaaaaaaaaaaaaaaaaaagaaagacacccacgaggaaaacctataattcctcttattatgtaattttaaaaacacctgattggcccccgctttcccgggggggaccccctttaacccttttggggtttctttttttcccctccttgggcatctttttttttttcggctggtgtggaaaaaacgaggagtgccccaattttttttcttttcaattgtttcccttttt

SEQ ID NO: 52749 - DNA, 539 bp, Homo sapiens
  misc_feature 17: n = A,T,C or G
ccgggccccccctcggnagtcttctagaattaattaacgcggggaagttaaatttctggagagcattttatgttagttttacactcaattgcggagacaatcactaccagtaatactaggtacttaagtaattgttagtggtatttttaagagaattaaggtaagatgggataataataaagaagaagttgttaaaattttaatttaataaagtacattatttaatatcagcaatatcaaactaaagcaactaataaaatagacatttagcctaatgaatgttttaaattctagtgaagctttttaacagttgcatttcttgaaaggtgatttttttatgtgcctgagccaaagaagtttttatatatatgaaacataaatataaaagaatttaaaaatcttataagctttatatcactgtgtcttaatcatcttaacatggatcaatgctttcttagattaaaaaaaaacaaacaaactcccaatccaattttataaatgcagtactggataccatagaatcaagggaaaagcaaact

SEQ ID NO: 52750 - DNA, 424 bp, Homo sapiens
  misc_feature 371: n = A,T,C or G
cccccctcgaaagtcttctagaattaattaacgcgggaggatttgggcagatattaaaggttaaacattgagtctgttggaactccttcccttcctatttgaaattcaaagcttgttaccatgctaactggacatgaccttgtaagaaagtgattgagcatttccagtttctgttgtttattttgaatttggagaaacagctggaaaatgtcatgttcagtgactattactgacttactgactcacatcgatgtcataatgtggaggtcctcaagcactctgaaagcagtcagttcgtgtgttttcagtgatgattgaataaggcagcttttcatgcagtgggcacaccttaggcgttgcaggatcagctntggactttcagggtccctgtgggaggagggctggatttgctttctgtgaacct

SEQ ID NO: 52751 - DNA, 628 bp, Homo sapiens
ctggggtaccggggccccccctcggaggtacttctagaattaattaacgcggggtggggggacttaaaaaaaagaaaaaaaattactggtagagactaaagctctaaagcattttaaatattgtttatatctaatatacaggagctatttattagtcctctgatataataaaaaataggctcagaaatagtatacagctgtgaagcataagttgtatatcatggtcacataaagacaattgcccagtttcatatggtaggttgttaccaatcgagcaggtttacaaagttagtgttgttatctggagtggattctctttttagctctaaccctattccaccagtctcactgctttgtgaaacagcaagcaatggaacggatgttgggatttgacttctccttccagatctctctggaagtgtctaatttggttaaataattgtatctattcttggtttttcagtgtgggtcaaaccatgtactgaatcctattgctgaaaattttcaaataaaaaccataaaatgggctgggcacagtggctcatgcctgtaatcccagtgttttggaaggctgaggcagaggaattgcttgaggccaggattccaggcaacataacaagacccatct

SEQ ID NO: 52752 - DNA, 605 bp, Homo sapiens
  misc_feature 534, 572: n = A,T,C or G
cgggccccccctcggaagtcttctagaattaattaacgcgggatccctgcaggcatttataagtatacctggacagaagaaatacaagataccgttctattaactcaatatagtgttgctaagttcgtacttgtgcttggtttatgttattttataaatacgtatcactcgcatggttccaaatgcggtaggcacagagagtatatatgatggaattacatcctccttccctgcactcagcaaccgagatcttcccgctacgggcactcaaaggtttcattgtctgaaatatcagcctaaacgtagtttatgtttaggaagcaacaaccgcaaataggcccacatccaaacggagtggatttaggtttcactttttcaaggaaaaaccatcaaagaatttttccacatacttataaaccatcccacgtatagaatccatttttactgacacaaatttagtaccaataaacgactcttcttctcaatttgttttatttaacaataagtcttgaacgtcattcccagttaacattntgaagagtttcctctctttcgttctgttttagctgcanagtattcttccgtaaggatgaacgtactataat

SEQ ID NO: 52753 - DNA, 594 bp, Homo sapiens
cccccctcgggagtcttctagaattaattaacgcggggatgtctctcttacaaagaccaaattaaaaaaaatatatataaaaacaaagaatgaatcaaaatactgctaaatttgtctagaagatcaaggaggaccatagtagtttagctgaaactataggtttacaaactctagggaaataaaaaagtgaatggaattcactctaatgatatggtcttttcagaaaaccttcctgtttaatccatagatgatactatactttcaataaattgtggtctctgggtttccacatagcagtcaattggatagccacagatccatatatgcatactttatctctccaaactaaaacactacatttattgtatatctatactttaattttattatataattagaaactaacaaaaacatttaatgtctatataagcttactaagaacaatatcattatagcaaacagtgtagaaggcaaagttttcaacttatatttttccaaaaatcaagcacctgcaaagaagtaacataaaataattgtacaaagagagacaaggagactaggactgactttgccgatatgaaaatgcggaaaggg

SEQ ID NO: 52754 - DNA, 284 bp, Homo sapiens
gccccccctcggaagtcttctagaattaattaacgcgggctgctacagcaagacacccatgtgactctaattgtcatgcctagcaataaatgccaagtaaatccatcttaatatgatgttaaaggtgattcaaaggtacagtcctgtttgcataatgcttttcttcactattggcagaaaaaaacatatgagttgatgacattcactgagaaggatccgtgaatcacttcaacaaaaaatgcaggactttccaccatgataaagctgccccaaaaaaaaaaaaa

SEQ ID NO: 52755 - DNA, 354 bp, Homo sapiens
ccccccctcggaatacttctagaattaattaacgcgggacaggactgcacctgaggctatcacagtacacgggtggagccatggcatggtaaacagacagtccccacagcaaggaaatcctccccatattgccaggagcagcccataatcttgatcataaatttctgtaagtgatccatgctatgccagcgctcctgctgggcaagaccaggcctcaagttcccggagccagccaggtggccgtatggcagctgactcctgttctccacattctcccacttaacagagtataaacacaaatattccatttgaatttaccattttaattcaaataagtgcaaaaaaaaaaaaaaa

SEQ ID NO: 52756 - DNA, 549 bp, Homo sapiens
  misc_feature 11, 36: n = A,T,C or G
tgggtaccggngccccccctcggaaatacttctagnattaattaacgcggggatgaaatgtagtggaattaaatgtctaaaaactcgaacatttatggaacttttttaaagcggcaactccaatcactgggtcaaagatgggcttttaatgaatggtgttggggttaactggctaaccatttagagaaagataaaattagatccattcctcataccacaaataaaactaaactccaaagggatcacagagctaaataaattatgaaactttatatgcactagaagtatgcatggatgaattcctccttataatctgggtataggagaaggctttctaggactcaaaaataaatatgcaataaaataatatgttgataaatgtgcctaccaaaaaatatacataagtgaaaagacaaatgatagtcatggtaaaatatccacaacatatatcacaggctagtatctctagtatgttgttttttttaatgaaggatgaaaataccaaaaataggcaaaaggcataagccaacagttcaaaaaaaaaaaaaa

SEQ ID NO: 52757 - DNA, 644 bp, Homo sapiens
  misc_feature 19, 32: n = A,T,C or G
taccgggcccccccctcgngaatacttctagnattaattaaatgattctttaagatctgttgcaagtgaacatagtgcatattatttaaaattgtctaaactattgtggacatcgagtcaaaatttaaatcaagaacacagtaataaaatggtttatatttctatttttagtgttctgaatcttgtattctttataatgctagcattagagctgttctacaataaatgaggtcaagtctttgaggtatatttatttagatgttaaaaagctgaagaatataatttgcaaatttacaaagttaaatcatagctgaattaaaataacttctcttagtaactgaaacaaacctgaatatacagaaaattcatgtgtttaattcaagcaactgaagcataaatctgacaataaaaataataaatttgtaatgaaaattcaaacccaagaggagcagttccttctgcttccactactcagatattatcttcgcagcctttctccttgatttacatgagaagccagaagtcattgatggttaaacacaatggctttaaaatagtttcgttgactttttcaacattttttgtatgtagtaagccacaggaaagcagaaatcaaattatttctgttgagaaaataacaataa

SEQ ID NO: 52758 - DNA, 292 bp, Homo sapiens
gggccccccctcgagaatacttctagaattaattaacgcgggccatgcttattactaagctacagctcaccttctttgattatatttcacactttttaataatacagtgactgcccataaacaaactatgcaaaacaagataagaactttagctattacattgttctctaggctcctaatgcagacatgcaatcaaaaagcttgtgaccaaggaggaattctgaagtcagcttgagtgggtccattctgagaaatataaatcagagaaaacagcgcaaaaaaaaaaaaaaaa

SEQ ID NO: 52759 - DNA, 612 bp, Homo sapiens
  misc_feature 32, 543: n = A,T,C or G
taccgggcccccccctcggaaatacttctagnattaattaacgcgggtatctcacttagaatgttttgaaaaataaggaggaggccctttctctttattattgttctatgataagccataatgctagggaagtgcacatctgaaatacagatacactggattcctaagcgtgaatgttctaacaggtgtgctgcacatcaagattttcatctattttcaggcttattctgaaaaggaccatcaacatgccaaatcatgacaaatgaaggtatgttttgaagacattcattacagacagagccagagtatacatataagccaccaatgcacatgcattacaataaaaatgaaatacagcattctttcaaacaatcacatggggctcttctgtgtatttgatcaaataatttctcaattagttttctccactaaacactgattgctttggcctcgtgtagcctgggcagccagaagccactggatagatttccagatgacagaagatctgaagatatgcacagcccagtagtactccaaagagtntagcctttattcatcacctgttgagcaactcaagaacccctaagaagtctgaaagtttatacctttgtc

SEQ ID NO: 52760 - DNA, 651 bp, Homo sapiens
  misc_feature 28, 41, 642: n = A,T,C or G
aagactggggtaccgggcccccccctcnaaatacttctagnattaattaacgcggggagggatagcattaggagatatacctaatgttaaatgacgagttaatgggtgcatcacaccaacatggcacatgtatacatatgtaacaaaccttcacgttgtgcacatgtaccctaaaacttaaagtataataaaaaaaaacataggtaatatcacattgcaaatgctaaaatactttaaaatatagacacacacaaaaaaatggtgtgtgtttataagcatattaaaaaattttagagcattcacacacaatagtagttataaatggagagtgggttgaagcaagcaggaggagtctttcacacttttatataacttttctttttaaagaacagtgcgataagtgactgtagacatggagttttctggtatttttgaaattaaaaagatgtaaaagaagtaagttaatttaaggaactgagaaataatttcaagatgttttaaaaagtcattgccaataaattcaaagatgtcttcctggtttcccagtagtaaaagaggttgaaaaatatacgtatacacatataatatttaatatctctttcctggtatccctgctttggtttgaatagtgaatctaaactntaaaaagtt

SEQ ID NO: 52761 - DNA, 421 bp, Homo sapiens
ccgggccccccctcggggtacttctagaattaaagcagtggtaacaacgcagagtactttattaacgcgggctgggcgacaaagcaagactcttgtctcaaaaaaaaaaaagcaaatattatcccataattctgattaacccaagtttagagaagtaactcctccagactcattcagataagggacaaagctaaaatccgtacctatatctgcttacacatgtatcaatgatgcactctaatatatttcaatcactgaaaacaggcaaaattctgacatggaaaaaatgctggaaagcttgagggggtggatatgccatctaccataacgtaattattatacattgcatgcctgcatcaaaatatctcatgtaccccataaatatatactcctactatgtacccacaaaaaaaaaaaaaaa

SEQ ID NO: 52762 - DNA, 621 bp, Homo sapiens
  misc_feature 33: n = A,T,C or G
gtaccgggcccccccctcggaaatacttctagnattaattaacgcgggttctcacattagaggagcatgtagcccaatatatctttgccaccagaggtgaaatgatttagccatatgtcaattttcagagatggtaaaaagtaaacccatgcccatataggctgcttaaaaagtgaaagttttctctcagcatacttaattgagtgtttaatagagacatcgatgttaggaagggcaaaggcagtagaagtgaataggaagccatgacatcaccacaccgtggtgtatactaacatcatccatccatacttctgaggcttcaggaagacagtggtttctctgcttctccgaagcacctccttctcctcatgtatctgcattcctttaccaatgctcgataagagaacaaattcaacgagatctgtagaggactttgaggtttgtaaagctctcccaaatatgctatctcatttggccattaacacaaccttttgattcaattaggtgtgaatgtatatatgcatgtgtcattattttcatttacagatttaaaaaactaagtttgagggagatttaaacactcttaaaaagtgtatataactactaaaagactgagctgga

SEQ ID NO: 52763 - DNA, 304 bp, Homo sapiens
  misc_feature 52: n = A,T,C or G
ggtaccgggcccccccctcgagggtactgtctataattaattaacgcggggngaaaaaaaaaaaaaaaaaaaaaaaaaaaaaaaaaaaaaaaaaaaaaaaaaaaaaaaaaaaaaaaaaaaaaaaaataaaaaaaataaaccggcccccacggggggggaacccccatttcctcctataaaaatgtgggcccccccgcgcgggggtgccccattttttcccatttttggggactggttaaaccccctcccttgccccccttttttgcccttgcgggaaatgggaattccccgggctgccttattt

SEQ ID NO: 52764 - DNA, 439 bp, Homo sapiens
  misc_feature 28: n = A,T,C or G
cgggcccccccctcgaaatacttctagnattaattaacgcccgggtctccttaaaaaaatttttttaacctgtaatttcattatcatctaagaaaactagtatttttttctaatttcatttaatatccattctacataaaaatttcctcaattaaacctcatgtttcttttacattttcaaatgtttcctggaattagatatgctaggcttacctgctccttactgacaatcaccgatttctcctatgagccctggtttcttggagaaccagatttttttttttttttttgagacagagtcttcctctgtcacccaggctggagtgcagtggtgcgatctcggctcactgcaagctccgcctctcgggttcacaccattctcttgcttcagcctcctgagtagctgggactacagaagcccgccaccacgcccggctta

SEQ ID NO: 52765 - DNA, 575 bp, Homo sapiens
  misc_feature 521: n = A,T,C or G
ttctagaattaattaacgcgggatccctatatttgctcttaaggtaagggtagtatttatttattgatcatgatgcattatccacacagtggaaactattaagcagtttcatctcctgtgatatttctaaataattcagaaactgatttctgttttctttttatcattaaagtctgtctcatttaaacgtaaaaaatttaagtgacctatgattttgtttctttactccccagacagcacaaatggcgtaaagtagctacatagaatttgcagatataagtatcccctattgtttcatctttttccgaatcagcaccaatggcataaagtagctacatagaatttgcagatataagtatcccctattgtttcatctttttctgcatcagcagcttttctttccaagtatttaggaacaaaacacaaaataattttagaaatatgctttttaaccgggctgggctcggtggctcatgccctgtatcccagcactttgggaggctgaggcgggtggatcacantgtgaaggatcgagaccatcctagccaatgtggtgaaaccctgtctctactaaa

SEQ ID NO: 52766 - DNA, 489 bp, Homo sapiens
  misc_feature 35, 476: n = A,T,C or G
tgggtaccgggcccccccctcggggtacttctagnattaattaacgcgggtactctttatatttagattaatgtcttttatattgaaatgcaattaccacttattttatcaatatcatagagtctgaaaatacttatttttctccttaacctattattatattattttagttgttatattaaaatgcaactccttgatttagtgttatttatgtacttttgtaatgtaatcaattacatccaatccataagtagcagcaggattactgacaacattcagcacaagcaatgaggttgatttctagattttagacactttgttggctgctaaataaaaacagcagttctggccaggtgcggtggctcacacctataatcccagcactttgggaagccgaggtgggagtttgagaccagcatgagatcaggagtttgagaccagcctggcaaacatggagaaaacccagtctctactanaaaaaaaaaaaaa

SEQ ID NO: 52767 - DNA, 519 bp, Homo sapiens
  misc_feature 26: n = A,T,C or G
ggccccccctcggaaatacttctagnattaattaacgcggggtgctgggagtcagggaagcagagagaagggtacagctggaagatggggacagtggggcctcagcaaagtccccaaagccagagaatggcaacagcagaaccaaaacagatgggggtgctgggagtcagggaagggagttgggaggggcaggcaggggcttggtacctgggtagaattcacttctccaaagatgtcattttatttattttttattgttttttgagacgtggtctcactctgtcacccaggccagagcaagattctgtctcaaaaaacaataataaaattaaattaaattttaaaataaagtctttcagctgaaatgagtactgttaacaaaatactcttaggtattttctaaagatcaagaggcagaatgtctgctctaacaacttaggtgaatggcatatacaagctatatatattttgaaaataaatccctaagaactaaatgttaatatgagaagggctaaagaa

SEQ ID NO: 52768 - DNA, 391 bp, Homo sapiens
cgggccccccctcgaggtacttctagaattaattaacgcggggggtggaacagaacaagattaagggaccttaactaccagatttcaggtttagcacagagccacagtgattgagacattgtggaatttaagtaaggtttgatacataaataaatgggctagaaaagacagcatagaaataaattcattcatatactgtcgattgatttttgacaacgtttcagaatatttcagtggagaaacggctgaaaaacttgatacgtatttggaaaaaaaaaactcaccactattgcatgcaaaaatttaactcaaattgcatcatagacaaaaaagttgttcatgaccttgaagtggccaagattttctaaataagaccaaaaaaaaaaaaaaa

SEQ ID NO: 52769 - DNA, 517 bp, Homo sapiens
  misc_feature 31, 438, 450: n = A,T,C or G
accgggcccccccctcgaaaatacttctagnattaattaacgcgggagtgcagcacaccacctgcacattgtgcacatgtaccctaaaacttaaagtataatacaaaaaaaaataataataatgataaaaagaaaacttatctccaggccaggtgcagtggctcacgcctgtgctgggattacagaatcctaacactttgggaggctgaggcgggcagatcgcttgagatcaggagttcagggccagcccggccaacatggtgaaatcccgtctctactaaaaatatagaaattagccgggcatgctggtgggtgtctgtagtcccagctacttgggaggctgagacaggaggatcgcttgaacccgggaggcagaggttgcagcgagctgagattgctgcactccagcctgggcgacagagcgagaactcatctcanaaacctcacctncaatgagctgcatatttctgttctggacaccctgcagcactacatccagtcaaccctgacagtactt

SEQ ID NO: 52770 - DNA, 577 bp, Homo sapiens
  misc_feature 506, 512, 540, 564: n = A,T,C or G
gggccccccctcggaagtcttctagaattaattaacgcgggcagtttgtttctctgcaatccttatgcacctttaatttttttttgtcgtactctactggctactatctattgtacaatgttgaataaaagcagtggcaccctatactgttgactcgtttattttaaagaatcacatatatttttctttttctcaaataactctgagccatgaaaatttagggtagaatttgtagcttcaagccacatgacaaaagacagttaccaaggaaaataattctatactgttaattatatgccaagaagtgtaaaagtgccttttacatatattttcattaatctttattaaaatataaggtagaaatatttattaggttcattttatagaatggtaaagagaatattgtctaaattatatagctagtaagtagttgagcagggcttaataattgggtagtttgtctttcgaattcatatttttaacttcattatgttgcactagatatntatcangaggcccggtgtggtggctcatgcctgntatcccagcacttcgggaggccgnagtaggcggatca

SEQ ID NO: 52771 - DNA, 624 bp, Homo sapiens
  misc_feature 39, 602: n = A,T,C or G
gactgggtaccgggcccccccctcggaggtacttctagnattaattaacgcggggatgttagtagcagaattcagtagaactgactaaagcagggaacaaattttgtatacatcaagatttttttgaaggggcgggaaaagctaaattcttcctagttttaaggtaagccaggaaatcaaactagtctttcaacagtttgaaaaaaaatgctgattgttttggatagtctgttttttttctgacatgtgtaatgtcattgtatgtgtgactcctttgtacattagttgcttgtttgaaattaccacgagggcttcacagtagctctctcacacttgattatgtcaaaagataacatatagccccttattcagtggaccttccctttgctaatagtataaaatactattttatttactttcccaaattttggtagagaataacttcacactaaaaatgactaaaatgggctgggcgtgggtggctcacacctgtaatcctagcactttgggaggctgagatggatggcttgcacccaggagttcaagaccagcctgggcaacatgacaaaaccctatctctacaaaaaatacacaaactagtnttggcgtggtggcgggcacttg

SEQ ID NO: 52772 - DNA, 486 bp, Homo sapiens
  misc_feature 28: n = A,T,C or G
cgggcccccccctcggggtacttctagnattaattaacgcgggatgctgtgcatttattcttcaggacactatgaggtaagtgtaattttgtagataaaggactgtaacttagtgagaggggccaggattcaactcatgtttctaacaaataagctgtctctagagcagcagttaactaaattttggctctcacagaccctttcccttaaagtccatccactgactcattaaaataagtctcacctcagattatacttaaaggcattcaactggaaaccagaaaatgttaacattaagcattacagtactgtgataatgtttgtgttacaataaaagtctaatgaatcttaaaacacatggagaaaggtactcaattttgtagacttggaacactatctggaaaaaaacaaaacaatagcagcgcattctggtttctagaatttattgaagctaatacgtgcagtatattgttagaaaccattcta

SEQ ID NO: 52773 - DNA, 461 bp, Homo sapiens
  misc_feature 16: n = A,T,C or G
cgggccccccctcggnagtcttctagaattaattaacgcgggcttcatgataaaatgtagaaacatgatttgattcatcaatcatctatataaaatgttacaagaatgcttctaccagtctttattttctttcttgatagttatttctactaggtccacttgtcctaaatcagattctacagatcaaaatttgggcaagaagattagataattgtgtcaatttcagtcaataacactttttttttcacaatgcagttttagccattgccactttcattttgcaatgattatttcttctaagtctaaaattcctaagtcaatttttgcaattttggaagtttaacatgatgggattcttcaatttttctcttaattttgctgagtgctgctttatcttttctcaatttatctctgttgattatttattgcagtacttatttatttcttggataaaaagccgt

SEQ ID NO: 52774 - DNA, 471 bp, Homo sapiens
  misc_feature 30: n = A,T,C or G
attaacgcgggcataggcgctcgcgaatanaatctcaacaaaaggcccttgtcatctgtttattaacaagctgttttaagtgattctgatccatcccgagtctgatcctggtctcgctaattattttaggtcatctctgtaagtttggtaccttcttcccctttttttgttttgtgttggaagctacatattggtatacattaacatcggataatttaagatcttcaaaagtaaaatgctgttttggttcccaaaagtataaaatggttagaaaacatccagaggtgcggtttgtatggatgtcacaaaaatataagatgccaaaatcctcctatcttgttggcctctgataagaaagggcttttaatcccagcacttccggagtccaaaaatggatcacctgaggtcaggagtttgcaaccagcctaactaacatggtgaaactctgtctccaccaaaaaaaaaaaaaaa

SEQ ID NO: 52775 - DNA, 588 bp, Homo sapiens
  misc_feature 521: n = A,T,C or G
ccgggccccccctcggaagtcttctagaattaattaacgcgggttatggtacaaactgggaatcttaggaaactaatatagcatgtaagttccagccctagaaaactaatatagcatgtaagttccagtaagtagctgcatcacatctttgataaatgagaagaatgaaccaattcataatcaatttactatcagcattcatccatctatagtgtcacacatccagacttcttatttctctaatgtgacaccccccactttctattacatcatatcttattagaattttactctttatttgcacttgagattttattggcaaaagtcactttaacggttatctgaaccacacatataacaaaagatttagggggaaagactttatcgcactcttcatctctatatctatcatatcatatgaacatatgcttctctaaatcagggagctcaaacatttattaatgtgtcccacagaaagaataatatttgatgttataaccagtgtccataacctattcatntacataagctgaaaaaaaatcacttacctttactgttcttactacatgtgaaatgatattttctact

SEQ ID NO: 52776 - DNA, 566 bp, Homo sapiens
  misc_feature 27: n = A,T,C or G
gggccccccctcggaggtacttctagnattaattaacgcggggtggctatagtgataaacaaataggcataatccttgccatcctagatttttactaacaggagagatagacattaaaaagtttctatactttggaagtggatattaaccatacatatgaaagaaaacacttaacaatgagcacacagtacttttataataaaagggaaataacttgaggatgccagctagtacaagttgccacatgggaaaacagttgtagtttagaaaagcctagaagatgtaactacaggattatttacagaacgctgcatgacactgcattctgatttcatgtcataacgtgatgattgaaggcttcaatgtcagagtcaaatttagatctcccactcagagattatggtaatcagaatccttctgtcactgaatcccatactatttgaaatacactgcactccagcagtgaaatgacagtatgaggatatagagtataagtttgatttttctctttcttatcttttctaaggaagtttaagaatttttcctgggccaaaaaaaaaaaaaaa

SEQ ID NO: 52777 - DNA, 496 bp, Homo sapiens
  misc_feature 32, 441, 452: n = A,T,C or G
taccgggcccccccctcgagggtacttctagnattaattaacgcggggcatctcacttttaaaacatggtgtattccataagtgtcagctgcaaagtaactttccagaaatggtctgatttccccattgacttccattatagaactagagctgtgttcccatggaaaataaatttggccccaggttataataaaacacagtgaagaattcagaaaatcttataaagtcaagtttttcaaggcacaattatcagtacttgataaaataataacaccacaaaatattaatactctatagtagatcttaaaatagtatgccccagactgcaccattatttttctatacaattccaagtctattacttttgcatctagagaaattttacttctgtgatcattattaattgttaatggatttaactctaatttaaactgttgattntgtttcctttnttctttatggttagtccacttacctgtttctaaacattcttatc

SEQ ID NO: 52778 - DNA, 626 bp, Homo sapiens
  misc_feature 21, 38: n = A,T,C or G
ctggggtaccgggcccccccnctcggaatacttctagnattaattaacgcgggcccagcatttgctttcgcttttattaaaatctgatagtttaccctttgcctggattttcatgagttatgagtatgtccttccaatagtacttaccacaaatataacttgattgaaagtagtttaagttgctctacaaaggttatttctaaaatactgtgtttctcattgagatttctctttgagatattacctaacttgatctatatattaggtagatatacaatatattaggtagatatacaatatctatatattaggtagatatacaatatattccaatatgacatgcacagtacataagataaagccctcacactttcacaccactaaatatatttaaacaacgtcaaattttgaaagaaatttcaaaattcaggaccaaatagtctgataaagacttacaataaatatattgatttttattataatgattgataaacatattcatttagatgtatgtgtttatcaattttttaaacatcaatcacatttcttaaataacatacttgcttgttggagactgcttgaatatgttcatactgattttaattacaactaggttcagtaaagga

SEQ ID NO: 52779 - DNA, 641 bp, Homo sapiens
  misc_feature 11, 36: n = A,T,C or G
tgggtaccggngccccccctcggaaatacttctagnattaattaacgcggggtttcaaaattaaaaaacataacaaaaataaccgataacaacaaggcaatcactactacataatattacagtcttccaagtacaaaggaaacattcatgaaaatgagtgaccaacttaaaaaacacaaataaattcaagatgaagcaatacagattcaagaagcaggtcaaatatttcaatttttaatagaaaatacttaaagataacattcaaatttccacttctgttatttcagaaccacctgcctaagatattcaagggtctattaaacatctttggtggcttgagaagagcaacgtaacattttgagccctgaacttattgcaaaatccactaaccagatgaatggcagattgacaattacttcaaactaggcagcaatgaaacatattttatttacactgctttatactacctattgatgtagagaatagtaaatttaaaatatggcagaacactacacctgaattcatttgaacctgaataatagctacggtttgttttttccttgtctactgggatttttgacaatgacaaaatgaaaggaattacaaactaatttgagggaagaagttaaaaattgctttta

SEQ ID NO: 52780 - DNA, 630 bp, Homo sapiens
  misc_feature 39, 612: n = A,T,C or G
gactgggtacccgggccccccctcggaaatacttctagnattaattaacgcgggcatgctcacctttatccttgcatgtttcacactgaaataatctggttactcacaccctactagactgtaagctccttgagggtgggcattatactcagtcacattagtataaatgcattcatacattcaacaaatattccttagacatctgccatgccccagcactgctagaaattcattcctaatggttgacacagtactagccaggaataaggaagaactaaaataggtagattaaatttaacgagtattgaaagcatcttaagaattggtaattttcaaatagtctactaatctagaattaaactgtttatttcaatttaacaatatttcctgcatgcacacctcaatacatgcttcagagaatgcaaaatagaatatgcattcatgcactcttccctcaaagagcattaagtctagtagcgataagatacaggaataaataggtatgatagactacagaatataaatgttgtgagaaaagttcaatgtcttatgagaatgcagagaagcttccttggttgggcacggtagctcacacatgtaatccaagcactntgggaggccgaggcaggc

SEQ ID NO: 52781 - DNA, 493 bp, Homo sapiens
  misc_feature 405: n = A,T,C or G
ccgggccccccctcgagaagtcttctagaattaattaacgcggggggttggccatactttttttcctcttctgtcttgtagctgaggtggaacagcctcctaatgaggcagatgtctttttaaagtcctccagttttctctagagaatgctaattactcccaaaccaccccctaaaaaaactccactcactttaactagaaattataaaaaaggtatatccagatgtcagcaacaaagataatattttttaaacttggaaaaaataactgtaacaatatgcatggaaaactatataattcattcttttggataggccaaaataaagtctttttttttttttttaaggttgttgagggcagattaactagtgctgagtgtgtatattgtcaatattgtgataactntgtagttggaagataaaataacttcttttaaatataagctaggtatgaaaaaaactttaaaatggtcttggccgggtacagcggctca

SEQ ID NO: 52782 - DNA, 558 bp, Homo sapiens
  misc_feature 25, 38: n = A,T,C or G
actgggtaccgcggcctttcctcgngggtacttctagnattaattaacgcgggctgcccatttcatattttctttaaatagagccttcatttttttggttaagaatattttataaaagaagctttacgttatcctaaaagaaaaattagtaaaacatgataggaatagaaaatatttaagaaagcaaattgcttaaaacaaatcaacttgttattaaattttgggggaatactactccctgcagtctgagatctactctcttaggtaatgaaggagattttcagttgttggatagatgataaatacatttgtggcatcaaattgaaactttaatcttgccgtaatcagagtactaaatgaaaattcaaaaaggaaggtataattttcttattatatgtgatttgtgccatttaatgacacctacaagtataccctacaatagttttgaatatcacccctaatcttgtatatctgcagtgatacaccttctgcgctttcagaaacactggaaaaacagtggcaatgatattgccagctaatgccagttcatatgtattt

SEQ ID NO: 52783 - DNA, 456 bp, Homo sapiens
ccgggccccccctcggggtacttctagaattaattaacgcgggtcattgatttatatacagtgcctgcaaaatgctacaagccgcacttcactgcattgtccaattttatctgcttgccaatcttaataattaggccatattattatctatgttttgcagataagggctataaagcatctatactataatagtacacatctaatttaacttaaatgaatataacaatttatttttcttgaaactgtataatgtctaccatggtagaatatataattgtttcagaaatcatccctatgaggtacatataaaaaataaccaatcttgggctgggcacggtggctcatgcctataatcccagcactttgggaggctgaggcgggtggatcacgaggtcaggagattgagaccatcctggctaacacggtgaaaccccgtctctactaaaaaaaaaaaaa

SEQ ID NO: 52784 - DNA, 628 bp, Homo sapiens
  misc_feature 35, 148: n = A,T,C or G
tgggtaccgggcccccccctcggggtacttctagnattaattaacgcgggcttctagaattcccctccatctcaaatagaagcgatttttactgaacagccttctgcgtgagtgtgtccaagtggctcacacagtactttaacacttngaagaattatataaaaacaacttattttaatattttttcttcagtgagttttttcaaaagtctatttttttctcctgaatgctgtgaaaattaacgtaattttttaaaatcatgagctcagtaagttgacttaaggaaagattattgtttatatccacatgtatgggatgagtaggcaatgggaaaccaatgaaagctgtcatctaattcctaattagaccagtttaatgcaacgtatgttagtatttgtgtttttatgtctttacttttgatgtgcatctgtaagaagaaactgcaaatacttctggagttattggtgccagggaaaattagtttaaggctttagtttgcagtttgtttgttttcttttatacttggaagtagagatgttgaaaaacaaactattgtttaaaaagcccaatttactaattcttatcccacttagaaatgcttttcacctttactgaatatcttccacta

SEQ ID NO: 52785 - DNA, 520 bp, Homo sapiens
cgggccccccctcgaaatacttctagaattaattaacgcgggagttactatttgagaatagatttctaatcagtaaactgtaactactttgcagccattttcagtctaatgaggaagcacatttttatttatgggatcaatggctacttaattttaaacttaaaatgtgttagctgttagttacatatgcaacttaaatttaaactttcttaatatctttcttttttatacattgatggtgtatttaaaaaaatctcttcagccagataattatgaagaaaactatttttatcattatcattatagttctgatatgtatggtttttagtgtcatgcattgatagtgtgactttttacactaacataaagaaaaaatctgtttttctatgacactttcagtggaagaaaaataaatatgtagccttgctaagtctatctaaatttgtggttttaatgcacagcttataagcaactcaaaaaatgtgtcacttaaagttaatgattagatgtagttagggcc

SEQ ID NO: 52786 - DNA, 614 bp, Homo sapiens
  misc_feature 32, 582, 588: n = A,T,C or G
gtaccgggcccccccctcggagtacttctagnattaattaacgcgggcactaacaaaaccacatgcgtttctactaaagcgcaatattaaatatgccaatagacacgaaacttcctgagaaaatatggcaatttacacatttttaaaggttttagaacagaaatttcctttcaaaagaaatgaaaccccagttagcactaactgaactgggaaatgatgctgtagaaattatttttccaaagaaatagaaaagtaatatatgtagccttcttctttaaagggtacaccctgtcagggagacaggatatcaagagaatattaaacaaggtattatctgtctcaaatttatttttatgagaaaaaacaagttatattgaggatttatgtttcaaatgcagccttcatcctacgtcaaagagattatatagatgtaagccaatatcttatccatataacaataaaagcaaggactattattaggtcctcatagtttgctattagattttatatttgaggctgggagcagtggctcacgcctataatcccagcattttgggaggatgaggcaggtggatcacctgnagtcangagctcaagaccagtctggccaacat

SEQ ID NO: 52787 - DNA, 531 bp, Homo sapiens
  misc_feature 37: n = A,T,C or G
ctggggtaccgggcccccccctcaaaatacttctagnattaattaacgcgggctagtaacaaacaagatacacacaggctacttctacactaagcttaccattgattaaaggaggttttattaaagtgtgtgatgaagcactttgcacagcattttacacataataatcaataaatgtcaattattgatattattacttcttaaagaagtaatagagcatgccatcctaaaacaaaagaaaaaggggggtggatggtatgaatttacctatattcatatgtatacatacacatacattcatatacacaaatatatgtgtatacatacacatactttcatatacacaaatatatgtgtatacatacaccaagatttccaaatacacaaacatttcaatgattctgcaatatccactacaattctctattttaaaagtataaaattcaatttagcttctcttaatatagaggcttgggattcaaactaatttaataaagatttttaatgaagttggaatagtcagtgactcat

SEQ ID NO: 52788 - DNA, 619 bp, Homo sapiens
  misc_feature 610: n = A,T,C or G
taattaataaacaatggtagaaaattatcaaggatattcatgaaaatggagaatttagtcatttgagaaacctagtattaagaaactgcatctcataaataccacttaacacacagcgtttccttaagatgaggcaagttctcttaaggtcaagagatcagctcattcttcacctcagtattccaagaaacaattagagactctgaacagaagcaataaaatgttgattctgaattattcattagttcatgaatttaccatgattctacctcgacaaaaacataacatagcacttttgagttgatggaaccgaaagacgacattcactagggcaggtaaccaggttggctccctgaagctgacagattgtcagcaacacaacttttcaattactctgccctctaataactctcagagctggccttcctgttctaaacatttccaatctgattcttctcatgagtcttgcttttcctaacaatttccaaaaaagaaaatgcattatttaaaacatataggatattatgaggtgggtatagcattaaagtaaaggtcttattcagtctcagtatggacagactatagcaaaagcttattttataaatagcanactcatgca

SEQ ID NO: 52789 - DNA, 613 bp, Homo sapiens
  misc_feature 26: n = A,T,C or G
ggccccccctcggaaatacttctagnaattaattaacgcgggtcttcctacataaaaacttttaattcatgtctgcttaatcatccaattctctccatcatatcctacataggtggcaattctggcattatttttcatttcgtcatgctacttgtgtatctcaaaaaccctcaggatatccccaactacacagggtagaattgaattttcttaaactagaatgtaaggtctcctctacttccatttccaaactggcattctactatctccaaaaagaacattctgatcaggccagacctgttttcctatccatagaacatgctgtatgctttttcactttcattgtgatgcctttctcctggcagaatttcctctcctagtcttccctgttgactcaaatcttacccaacacttgaggctggactcaagttccaactcctatgtgagaccttttctgaacactacagtcagtagggtctcttctgcctctgattttttgtagcagatgtagtatgtttcttttatataacattttctcatcttatgcctttattaattttcattatatgtacagctttttaaactagattttgaactaactagtaattgcaat

SEQ ID NO: 52790 - DNA, 457 bp, Homo sapiens
ccccctcggagtacttctagaattaattaacgcgggatacccataagaactctaagaagcagataatatgttattctcatttcagagaaaaaaaactgtcaggaggaagttatgaaggtcacacagctagtaaatagcagagctgggatttcagaatctatgattttaacccctgtatgtgctgcctctgtgattaaatcacatttctcttaggattaatataaaaatagctgacatggtgggttttatgacctagagtgatcttgtctctgccaacaacttcatattcatctcacactgcaccttccattaatttctaaatgctggttggtttctcagtttcacaaatctctcatgttccttccctccttgtagaagagtccatgctgtttcttcttttcattgtattcttctcgagcctctttaaaattacttacctttcaaaaaaaaaaaaaaa

SEQ ID NO: 52791 - DNA, 600 bp, Homo sapiens
  misc_feature 583: n = A,T,C or G
ccgggccccccctcggaagtcttctagaattaattaacgcgggggtgacagagcgagactgtgtctcaaaataaataaataaataaataaataaataaatataaagacaatgctgtatacttggcaaaaacactattcctaagtatataaaaagatagtactgaaatattaaaaataaataaaatttacattgtaaagaaacactgcaaaaagataggtttcagtgaacatagcagttaattgataaaagtaatgttactgaagaacaataaatggtaagtactataacatgtcaggcagtgtgctcggtgctgtatagatatcatggggttgtagtctcacaataatcctataaagcagatactattgaaactattgtctttatccccattatacagataaagtcatgaagtagtagaaaactttctcaaagctgcacaacagtaagtattagaactgcactttgaatgttactattgaagtttacataaccaggacaggaattctggccttttcatatattaattactttactcatctaaccagtatttattgagcttatccatttggggtcgagcactanggacctagggtgagaac

SEQ ID NO: 52792 - DNA, 607 bp, Homo sapiens
  misc_feature 28, 485, 576: n = A,T,C or G
cgggcccccccctcgaaatacttctagnattaattaacgcgggttctgtttaaaacagtcttttgtggtctagtgtttaaaggaagattacattggatacatttatgtcttatttattgtattatatattttgtgcatgcatctagtacttgagctatcttaaattctggtgttcatgtggttttatatggcactgagttgtgatgacttttttcctgctattagcctctcagatggatgagaattatttaaagtctgcagtatagtaagatacatttagatacatttagagcactgtataattgactttgcttatattctttgttttggttaaatttgtttctaatcgtagtttaaatcttccctgacaacttaattctggtttatgaagcattattaaaagtgtgtgtggccaggcgtggtgactcataccttcaatccagttttggaggccaaggtgggtggatcacttgagcccaggagtntgagatcaacccgggcaacatggtgaaaccttgtctctacaaaaaattagccaggtgtggtagtacgtgcctgtagtcccagttactcggnaggctgacatgggaggatcacctgagtctgg

SEQ ID NO: 52793 - DNA, 615 bp, Homo sapiens
cccccctcggaagtcttctagaattaattaacgcggggaggaattgaaagtcatgcttactctttgtgtttactccttatattattttgaaaaagtttcctgattaatttttgaacatttttgttttcaaaatcatactgatattttctgtgctatcaattcatttgtgaatgcttattatttattagtgtttatgtttattcacttattgcaagggtttaaattactgtatgctgcaatactaacaagttgtgatattagcagatccttattactcgtatggaatctcttactaaaacatgtttttaatggagaccctgatgttacccaaacatctcactaaaaaggattagttgatttttatgtataacaaaataatggaataaaagcaaattagtgtttctccaatttcacagttctgtacattgttcagaattaaaaatatttttttctgaaaaatactttgggccaggcacagtggtatatgcttgtaatcccagcactttgaatggccaaaggaggtggatcacttgagcctagaagtttgagaccagcctgggcaacatggtgaagccccgtctctacaaaaaaaaaaaaaaagcggccgccaccgcg

SEQ ID NO: 52794 - DNA, 638 bp, Homo sapiens
  misc_feature 23, 36, 602: n = A,T,C or G
tgggtacccgggccccccctcgngaatacttctagnattaattaacgcgggcatacactcaagcatgttcattgtgacattgtttatggtgatggaaataaagggtatgttcaatatttatttttagggtgaaagatttgtaaaatggaattgtatgccatggagtactatgcagctctaacaagcaacaaagtagatgcatatacaataatgttgacagatcttaaaaacattgtaagaagtgagcagagtgtgatttatagtgcaaaattatgtaaattaagaaaaaatcaataccatatattttacaagaatatatatttaagaatacataaatataaatacatatatgtaagaatataaagcaaacacattagatagaaaaaaataaaaagtcataaaactttgcatgaatccattatgataatgtgatatgtactgaagactattatgagttccattatctgccccaatatcaatagttaaaaaaagaaaaaaaaattttttttttttgagacagagtttcacactgtcacccaggctggagtgcaatgggcaatctcagctcactgcaacctctgcctcctgggttcaagcgattntcctgcctcagcctccccactagctgggattacagg

SEQ ID NO: 52795 - DNA, 565 bp, Homo sapiens
cgggcccccccctcggagtacttctagtattaattaacgcgggcctcaccttatagtatttgctagattgtttccataatgacatatataaactacttttctttgtgtcaccgttagaacaatttaacagagaaaacacataaccaaaataaatgatttatttaataaaaagaggttttgtggaaaaactatgagggaaggattcctgagtcaggtaaacctacacgtaaaattcaaggccattgcaagaagttgaaactgaagtatacagaatactacagagtcaagaagattgttcttctttaaataaaagcaagatatttcaaatacaataaaatatttacaatattttgaaatgaaataggaagttaacatgaaaaccagagatatttctggttatttcaagataaagtattttaaaactgtcgaaattagccaggcacagtgtcatgcctgtaatcccagcactttgggaggccaaggcgggcggatcacctgaagtcaggagttcgagaccagcctggccgacatggcataaccccatctctactaaaaaaaaaaaaaa

SEQ ID NO: 52796 - DNA, 594 bp, Homo sapiens
  misc_feature 530: n = A,T,C or G
cccccctcgagagtcttctagaattaattaacgcgggaggactaaataaaatgcataaaaacatctatgtttttctgcaacttgtgtgttttcccaccaaaatccataaaaatataataccattgcattactgtgagacaaaaaagaaactgctgatatgattgaaacagagtaatctggcactagacaattccccagagtaatatacatatagcacaagggtttttgttgttgttgtttttgattttcagtaaaaattggcaggaagcaagcctacttatcaaaaaaagattgaacatataattttgccattaacccattatgaaatttcaaaacattactattgtgaactctcaaaaattcaaggataaaacagacatcacatttttataaaacaaaattcaaaggaataaatcacacgtagtatcatagttctcataaattttttataaagatttcaatttttaaaatctaaactttgatgtttagccaaactttcaatctaacctatatgtaagttaagtaaaatntcagattagcagatctcacaaagcttatttcacctgtagacactccttctgaagaagttacttg

SEQ ID NO: 52797 - DNA, 532 bp, Homo sapiens
  misc_feature 28: n = A,T,C or G
cgggcccccccctcgaaagtcttctagnattaattaacgcggggagctagttccttcctgtaaactacactgaaactggcttccagggcctctgcatgggaagttagggtttagattgtaataacaatcattattataataaacagccgttatttgaggggttctggacactgatctcaacatcctcactaaagggtaagattaaagaaaagtaattagatatttgcaagcactgtacatttttgtaagtactgatataagcataatatatgataaatataaaaaattatatataagcatgcatatacacattagataaaacgcaattctaagcaagatataaatatttttaaaactggactgggcatgatggtcatgcctataatcccggcactttgggaggcccaggcaggtggatcacctgtggccaggagttggagacccgcctggccaacatggtaaaatcctgtctgtactaaaaatacaaaaattagccaggcgtggtgacacgcgcctgtaatccctgctactc

SEQ ID NO: 52798 - DNA, 535 bp, Homo sapiens
  misc_feature 28: n = A,T,C or G
gggtccccccctgcggggtacttctagnattaattaacgcgggcagttgattaccttcaaagatactgaagtgtggtaacaagatatttaggtaagagtaaattgatgattaaatagaatttaatgtattatctaaggtacaaattagcactatttaaaaaatctttatcgtattgtcattacatgattatatgaaatttagaaatgaaattagaatatttctgacattaagaatttaagggaagctgggtgtggtggctcacgcctgtaatcccagcactttgggaagttgaggtgggtggatcacttgaggtcaggagtttgagaccgcctgaccaacatggtaaaaccccatctctactaaaaatacaaaaattagccaggcatagtgacatgtgcctataatcccagctactcaggaggctgagggaggagaatcgtttgaacccaggaggtggaggttgcagtgagccaagatcacaccactgcactccagtctgagcaacagagcgagactgacaaaaaaaaaaaaaaa

SEQ ID NO: 52799 - DNA, 631 bp, Homo sapiens
cgggccccccctcgaaagtcttctagaattaattaacgcgggcaataccaaattattaaagacatttcatggttcctatgaagatggaatgccaagtgctttttttttctctttctcctgaaggatttcatgatttgattgcccaagtgatatttatattgtcacatacttttgtgaaatgctttatgttaattacagttttcacattttgcatggtgacaaaattgtcatattatctgatgattgaaatctttttaactaaaaagtgacttgtgtaaagaggtcttaaaagtagatatttcttccaaaaacctttattttaactaagtaaaaaatgactttttggaaagagttttcttttctttattttttatatttatttatttatttatttttgctagaaggagaagtaccataagctataaaaatgccatgggtgttcaaatgtaagaaaaaaaaatactatgttccagataaaagcttagtgaagtggaatgatattcatggtcagtaaaattggataatgagaatgattgacaaatatgtagttctcaatagactacaaagtattttcaagattatcttaagaaaaatattcacgcccttgttcctgctcccactatgtgagatg

SEQ ID NO: 52800 - DNA, 403 bp, Homo sapiens
tcttctagaattaattaacgcggggagctagttccttcctgtaaactacactgaaactggcttccaggcctctgcatgggaagttagggtttagattgtaataacaatcattattataataaacagccgttatttgaggggttctggacactgatctcaacatcctcactaaagggtaagattaaagaaaagtaattagatattcgcaagcactgtacattcttgtaagtactgatataaggcataatatatgataaatataaaaaattatatataagcatgcatatacacattagataaaacgcaattctaagcaagatataaatatttttaaaactggactgggcatgatggtcatgcctataatcccggcactatgggaggcccaggcaggtggatcacc

SEQ ID NO: 52801 - DNA, 449 bp, Homo sapiens
gggccccccctcgaaagtcttctagaattaattaacgcgggtttgcttgaatttaacagattagtctccacccatccatcaaaataatgatttaaatgaactcttggttattcaaaggcaatttatcccatttacctagaccctttgcttctcctgcttattaatcataatgataactgtgaattcctgatcaaagggtagaagggacatggggatataaatgaacttcaagtgaaataatgtagatacttattagcagttaatatgaaaagtttgctagagaaaaaaaaattactgccacaaaataaaacattaatcaaaagtttgtttcgtgttttaatttccaagtggtgtgtatctgtgatctctctgtccctcaatactcaatactctaccatacaaagaattagaagagcaggccgggcacaatggcttatgcctgtaatccc

SEQ ID NO: 52802 - DNA, 613 bp, Homo sapiens
cgggccccccctcggaagtcttctagaattaattaacgcggggtttcaggccaaatctctgccactaatgaatcctaagaatttgagaaaattgcatttcctctttgaccctcagtgtcatcttctgtgttataaaggtttaaactagggaattcctacgtatattaataccagtaactcagtgacctataatttgacttgagaataaaaaagtaaactcaagcgcaagtaaaaaataaaaataaaaatcagtcatctaataatttcttaagaagaaaacaactactaattaaatagacataatggattgattacattgaaaatttaagcctcatcaacagcacaaagcataatctattgattgcctggtttttgtaggtcggtagctggttagcaactgaatttagaatatttgcaaatatacagctttcaaaatccggtgctctttttgaagtcagactctgctacaggcaaacaaaacatagcttcaatttaacttcaagatgtgtccataacaactgattacccccaaatccttctatttttctctcccaatgggaaaatgcaaaagttttaaatacctctataattatagtaaacacagacaaccatc

SEQ ID NO: 52803 - DNA, 542 bp, Homo sapiens
  misc_feature 441: n = A,T,C or G
gggtaccggggccccccctcgaaatacttctagaattaattaacgcgggtgggctacactcaagggattgcaacctctacgtcaagaggcactcaacctagatcaagggtgggtgaaaggctctcactaaattgcccaccaaaagtgccaatgatgctgctaacccaaggcagagactctcaagtccaagtgcaaccaccgcacacccaacacattcacccaggcccctgctagttgtaaaaagaaacagcagaacatgctcccgcttcctatcccaccccaacccatacaaccaggttaccactatagagagagggtggcaggcattgcagggcagcctctgagcccccaggtggtagagagctagcagacaagaaacttccagaggaggtaaggaggcaggagaggtggggtctgtgagctaagactgtaagcccctgnggtacgctctattgtcccagcagacttcacttactaaaacacaaattcaaagataaagaattaaaaatggtaagaggctactagaatattaaataccaaca

SEQ ID NO: 52804 - DNA, 486 bp, Homo sapiens
  misc_feature 19: n = A,T,C or G
taccgggcccccccctcgngaatactttctaaaattaattaacgcggggggtagttggggatattttctaaattgaaatctcattaaaaatattataacagtcaatttctctacactgacccaggcaaccattaaattactttttcctgatacttgattatgttttgactatttgggaatttccaatgaatgggtttatactgtatctgttcattggcaactggcttgttttgttcatcatatggcaagggatggagagaaacatttttaggctgacggaaatattgtatacattaattttgtggtgataaaataggtgtatacatttgtccaaaagtcattaaatgcataattaaaatgggtctattttattatatgtaaattatatcttcataaagatgattttaaaaaataacccggcacagaaaactcaaagccaaaatgcattttgtgataaaattctttaaaatttcagaaagaaatact

SEQ ID NO: 52805 - DNA, 345 bp, Homo sapiens
cggggccccccctcgagggtacttgctagattaattaatttgtatccttttcatgtctattaaaaatgggtaccttaaaaacattttgtctaaatgttgatttaaaaagcaaaagtttttttttctgaagaaaaaacattttaaataagagcgtaactagttttgataagatcaactttaaaatgtaatgtgtaattaagtagagggaaatggagaataacaataatagcttacttctcagcaaacagcatttttcgtgaaaagtgtttataatatttattaacatacagaattagtcttaacctgctagaaagaagagaaaatgcaacacctttcaaagatgca

SEQ ID NO: 52806 - DNA, 510 bp, Homo sapiens
ccgggccccccctcggaagtcttctagaattaattaacgcggggggaaaaaaaagaaaccaataataaaaaaaaaaaaaaaaagaaaaaaaaaaaaaaaaaaaaaaaaacaaaaaaaagaaaaaagaaaaaaaaaaacaaaaatactagccttgaaactccaacctaaaaaaaaaaaggggcccccccccggggggaacccccattcccctttaattgaaaaaatttacccccccccaatgggctgatttgttactcagagacaaacgtggaaatccccggccttcccccctttaagagatttgcaaactaaacccttttatgggttgggtttaaccaagtaaaggccacctactatctgctctatacaaactggctctaaccccagatgaaaaagaaaattgcctacttctttttttggaacaaacctaaccttatttctaataattagagtattttttaatacatatggccgactttggcatttttttttaaggacaaaaaataacta

SEQ ID NO: 52807 - DNA, 638 bp, Homo sapiens
  misc_feature 28: n = A,T,C or G
cgggcccccccctcggaagtcttctagnaattaattaactgatattagttactaatattttaaatctatcactttacattttgctttctctttgcttcacttttatatacttctttttctcttcttttttgtattatttttattcctttttttaactctgtttataggctatattctgtctttattattttttagagtttagcctaacatgtttatatgtatatatcacctattaagtaaaaagttagtcactaatgtttttcttgtgctaaataccacaaaaactaaacaccaacctcattgactctcttcttaatttgcatgcttttatttttgtgtatttatttactttttcatctcatatgacattgttaatgctgtgttatgcacaattttgcattgtttagatttattcatatatttaccactctctttactcttcattctttcttgtacctcagagcatccatctaggatctcattctttcttccagaatgacacccttctgaattcctttgtacaaaggtctggataatagcaaagtctctgtgtttctacttgtttttggaaatgtacatattaatactatgccctcattcttgaaagattttttttcactaagaatagaataatatgg

SEQ ID NO: 52808 - DNA, 516 bp, Homo sapiens
cgggccccccctcggaagtcttctagaattaattaacgcgggatctggttttcagcaattgttaaagatatcccaacagttcacaatggtttttaggcatatatgtgtttcccttagtcctctaaaccttttagtaatgatactctgtttttagagtgcttctttacttttcaaagcactttttccatgcatatcatttcatttattcttcttatattaaaagagagagagaaaatgtattatcctttctcagaaaatgggcaggtgagattgcagaagaaaaactaaagtagttttttcagtgctaggcaccgagcttggtgctttacctacatttctttacttatttcccagacagccctcagttagagatatcagctcccttttacagatcaagaaactgaaatccaggccaattggttaattagctagaaatgttctcagaatatttgtttcctaaaatgtatatttgtgtccttgttttagtgcatttggttgttagtaaaaaaaaaaaaa

SEQ ID NO: 52809 - DNA, 436 bp, Homo sapiens
  misc_feature 16, 29: n = A,T,C or G
cgggcccccccctcgngagtacttctagnattaattaacgcggggtctgggtcataaaaaaaaaccaaaattgaaccaatagaactataaacaaaaacaaaaaaaacaagacaacaaataaaaaaataacaataataaataaaaaaaattctgtatgtaagaccaagtgcaaaggctcatagcctctaatcccatcacttaaaaaaggccgaggccgccggatcactggagacctcaggagttctgagaccagcctggccaatgcggcgaaaccccgtctctactaaaaatacaaaaattagccaagcgtggtggcagatgcctgtaatcctagctactaaggaacctgttacaggagaatgtggcatgcggaagttgcagcgagccgagactggccactgtactccaccctgtgcaacagagcgagactccatct

SEQ ID NO: 52810 - DNA, 378 bp, Homo sapiens
  misc_feature 20, 56: n = A,T,C or G
cccctcggggtacttctagnattaattaacgcccgggtcagttcagggacattggnagcttcatagataaattgttttactggttttattcatgactgatagtttgaattcattctattctaaattctctctactcacaaagaactacaacctgatttttataccagcaatacttctccatcatacctcaactccaaggcaagtgagtaaggggtgatttctgctattatttgtgtttaagaaaaggtaatattgtttctataactgaaactgcagactccattattaggagaaaaaagggtcatactttcaggtggaattgaagttggtgagttggtttgatttttgcaagtgagagatgttgaatacattcaattc

SEQ ID NO: 52811 - DNA, 616 bp, Homo sapiens
  misc_feature 25, 38, 506, 521: n = A,T,C or G
actgggtaccgggcccccccctcgngggtacttctagnattaattaacgcgggagtctcaggtaaagttataaagtaagaattggttctcttcttcattgttagtaatggtataaatatcttttacagaaggcagtttagctataggttttataacttaaataggttcataacttttgacttagcaatttcacatataagaattctaaaacaataatcagaaaggcataaaaattcattggaatgtgaggccattcaggatagagttctttatactagtgacaaaggaggaatataaatgcccacaacagagaatttgctaaataagttgtgatgcacctgtgtgatacagtagtattcatctactttcattgtgatgtagagtagttggtgatttgggaaaatggtcatgatgtttttgttagtgaaaaaatattggatataaaaactgcaatgtatgaattgagtgagttgtttttagtgattagttaatgtctctgatgtgtntaatcttaaaatccncttttaggatcattttttttcttctagctccatgataagggcaccatatgctcttaattctgccttcttggggatagttccaatgctcttaagct

SEQ ID NO: 52812 - DNA, 338 bp, Homo sapiens
  misc_feature 23, 36: n = A,T,C or G
ctgggtaccgggcccccccctcnaaatacttctagnattaattaacgcgggtggcactgtgacaaatgtagcaaaactgaaagcaggctatactaagagaaagaaaaagtcttccactggccatctgtgaaaataaggcatgtggccattaaatgcagaggctgtaaatatacacaaactccatgaagcaaatggcaaaaaaggactaaacttcaagctcaaacaaatcaaaatgtttaatgcatagttaccactgctggacgaaaacagctctgatctttgcagtctgcagactcggcatgtatttcaattaaatacccccaaaaaaaaaaaaaaaa

SEQ ID NO: 52813 - DNA, 602 bp, Homo sapiens
ccccctcgggggtacttctagaattaattaacgcgaggaggttatagtttctttggaactttcattaatgttgaatcatcaaccctttagcatatgaatatatggcatttatttttgacttagacctatcttcatcttcctttaaaatgtatttagaaccatgtcttacaaatgggctattcagaaattgagaaaccattttgtagatattatagactatttccttgtaagtgttttcactttcctgtcttcaaaatatgagactgtggttcacttgtctcttcatcctagctcaaaaaaagttttataatcaggtataaaatattgcttctgtataaataatgtgtgtgaaatattatagaacatgaagcaatatgggttaaaggcacccacacttgaataagtagaatataaggttaaaatgatgatgtggaataaattgtacataatttttaggtaaacccaacatcattatgtcctttacagatagagaaagccaaataatatgagaaaaaaaatttaacattctggttatatagataattatgcataaaattaattataggtattgatgactactggcatatagatgctggcttttg

SEQ ID NO: 52814 - DNA, 602 bp, Homo sapiens
  misc_feature 20, 33, 538, 589: n = A,T,C or G
gtaccgcggccccccctcgngaatacttctagnattaattaacgcggggctgtaatcaaatggttggtgtgcattataacagaaaagcaatctaaaatttcctcaagaaaataagttgtcattgtaactgagacttcttttaaagaatgtaaaatataggcatttgacattgttaagtttctagtcataattttagaatgtacaatttttcaactatgtgtcttcttatattatggaattctgcctattgctgttgaaatcttagcctcttatttaatattaagtgttattattttttgtagtgaactacatttttcttcttaaaacctagggctgccagatatggtaacaagtcattcaataataaaaatggtattttgtaagtgtgcctgtcaatattaagaataaaaatgcaatatatgtctgggctttgttattcaataaagccagtttattgacctaaaacatgtagatcaaggtaggcagaatgctaaggaaatgtggctgagccttgcttttacttgaataaattaaaaanaaaaattacattttagccttcttcctaaacaacactttgactggaagtatngacatctagaaaa

SEQ ID NO: 52815 - DNA, 430 bp, Homo sapiens
attaattaacgcgggctctcactttttgatgaattatattttcctcctcatccctactatgccagctttaattcagacatgagtgaattagacactactttttatctgtaactcattttttctgtagcctaacataaatatcacactgctttacagacctgaatttttctaaatatggaatctaatcatgatattctcctactttaaaatatataataccattctaataccaaaaataataaacactaaatctcttggtcattttttccctaataaatgtatttcataaaatgcttagaggcaagaatgatatacacaatatttacacagactaagatgtagctagtaactgatcaggaccagcttactgagatgatgcactagcatatctgtgatacttccttcccctattcccaaaaaaaaaaaaaaa

SEQ ID NO: 52816 - DNA, 455 bp, Homo sapiens
cccccctcgaaatacttctagaattaattaacgcgggtactctcaaacagtatagatattaaaaatacatgtgcacgtgtgtattatatctgtgtttagaaaaagagagattttgactgaatgaatgctaaagcaaacatggcagaatatgtccctttgggaaatctgggtaaaaggtataggaatctttgtacagctaaaataaaaaaaacagaaagggagatgtaaaaatacttacatgtaaagaggaaaaggttgttgtgattacacaattacaataacgaaaacttgtcatatacttatgtcaaaaagaagcccccccacaaaaaacccaatattaactgaaaattctttggtagttcaaactgtcttaacgtaatataaaacaaccagtacagagtggaaggaggatgcaacagtgtatttcctatacatttcataaaaaaaaaaaaaaa

SEQ ID NO: 52817 - DNA, 628 bp, Homo sapiens
  misc_feature 25, 38: n = A,T,C or G
ctggggtaccgggcccccccctcgngaatacttctagnattaattaacgcgggacctgaagtgatcttcagcagattccttctttgatttttctttatttcagaaaagtatgaatcatattaattcattatctacaattgcattccttacaagttcacacctaatagccagcccctacataaatcagttttgtggaatcttcataagagataataatgagggctgcagaagacattcagagaagatgttgggagaaattgttgcacagagtgtgtgaggttgataccaagtctaggacaggataactaagctattgaaaagatcaataaacatggggaacaaaaggtattttatatttccatcgaatgacaacttatttttctaggcttatctctgacctctcccacatatctgattcattagcatttttcctgatcattttctgattataacatgtccttttatgaccttggcgtatattatccccaccatctagaatgttttgtcttaaccctcacttttccttctttagctagaaacctcctattcttttatcaaaaacctaactaaaattatatcaaatactctctcagaccacagtggaataaaattggaaataaactccaaa

SEQ ID NO: 52818 - DNA, 214 bp, Homo sapiens
ccgggccccccctcggggtacttctagaattaattaacgcgggcgccagagagagcgcttatgggaatctgtcactataaaggggggttacctccgatgagagccacgttgtattcagctacagagcggagataatccgtccttctgatcctcccaccttgctgtgattacctacctgagccacggggccaccattgaaaatgatatgagaaag

SEQ ID NO: 52819 - DNA, 467 bp, Homo sapiens
cgggccccccctcggaagtcttctagaattaattaacgcgggtaccatgtggtagtatctagttgcatggcaaatgattcagatgacccagaaaaagcttatattaccttctcaagattatcgttgacagtaaaaccccaaattttaaatctcatagaaaatgtgagaactctcagaatacattcatggacacagagggttggttaacaccagttaaagaaacagtaccccaggcagggagaaggtggacaaataaaataattgactccactgttcaattttagaagaaaaattctacttaagactaagttgggggggaaagtattttttaaaacaaactatccatggagctgtggcaaatgtttaaaagcactattttagaaatctctcacgcatcccaccaaaaaaacaactaagctccaaacaaccaagcactcaaaaaaagaaaacctaaaaaaaaaaaaaaa

SEQ ID NO: 52820 - DNA, 621 bp, Homo sapiens
  misc_feature 32, 584, 606: n = A,T,C or G
taccgggcccccccctcggaaatacttctagnattaattaacgcgggggtggtatccagaatctcatgtcccatcgatgtcatttgctgggtaaccaacagcaaagatcagatatttacctctgacatgcaatgttcaaatgaaatagtaaaatgtctctatgtacatgttttatgcctctttataatatcaattgaattctatcctttctgaagtcactacaccatttctcccagtataaaattgtctatgaaatctcagagttggttctgacactactaattttgagttgagtgaccttagacaaaccacctactttttaagcttcacttttctcatataaaagttaggcatgttaataatagttaactcatcaagcttttctgaaaattaaaataaaagagcatataatgtggtaaatagggtgactcacacctactgagtgctccatggagtacattgtacattttaaaataactcaaagagtgagattgggttgtttgtaactcaaaggataaatgtctaaggggatggataccccattctccatgatttgcttatttcacattgcatacctgtatcanaatatctcatgtaccccataanaatatgtacctacta

SEQ ID NO: 52821 - DNA, 617 bp, Homo sapiens
  misc_feature 11: n = A,T,C or G
gggcccccccntcggggtacttctagaattaattaacgcgggggacacaaagaaggaggaaaaatcaccagggtgaaggaaggcgtgaagagaaggtagtctaaactctaaagtattagcattttcttatagttatatcactgctacattcagctgattattacaaatgcatctctaatatatttttctcctgtgtttttctacaagaactttctcagagaggttggtgataagaatatcttattagtatttttatactctgctactctagtggaaaatctattctgaaaaacataacattctaaaagctaaatatgttataggcagaaaacgaataaataaacaaaatgaacattgaatctaatattgaatattggattgggcatgttatttctattaacgttaaatggatatgtaagcattttagtagctatataataatacacatatatatgtaatattgtattagatgtttgtacatgtagaggtaaactaaaattattaaaattaaaaattagatttttttgacaacataaaaataaattattgtataatgacgttcgtaatctctgaatagacaaaacaatagtagcgttgtaattacctggatgattttt

SEQ ID NO: 52822 - DNA, 636 bp, Homo sapiens
  misc_feature 25, 38: n = A,T,C or G
ctggggtaccgggcccccccctcgngggtacttctagnattaattaacgcgggggaggaaaatattcaaatttatttagttatgtgctatgcagctttaaagcaaaacaattctctgttataaaggcatttaaaagaagcaaaactcagggcaccagttcctacctcacaatctatttgtaaagacaaagctgagccaaattaaactatataaaacttgtcaaatcaacctgtctgtgaatagataaaaactggttctctactcaatgaaaaaaaaaaaaaacgcaatgaagcctgatcgacatggcaaaaccctgtctctacaaaaaaaaaaaatacaaaaattagttaggtgtagtagtgcatgcctgcagtcccagctacttgagaggctgagactacaggcatgcgtcactgcacccagtctgtactagacctttaaagaactattggagaagctgtaaaagacgagacaatagtagaggtatacaacttagggaggaaaatattcaaatttatttagttatgtgctatgcagctttaaagcaaaacaattctctgttataaaggcatttaaaagaagcaaaactcagggcaccagttcctacctcacaatctatttgtaaagacaaagctg

SEQ ID NO: 52823 - DNA, 589 bp, Homo sapiens
  misc_feature 25: n = A,T,C or G
ggccccccctcgaaatacttctagnattaattaacgcggggattcaaagaagtgtcattgtttttataatttgaagaacaaaaggcctgtattatataaaatattttccatttaatatattctttctataaaagttaaaaatccaaagaaatctttcaaagtaaattattgttctcagaaggaagggtagaagagtttatacatttgaaattaaattggctgggtgcataactaagaacatgttgaaaatgtacagcacttgaaccctgctgtgttatcatcatagtgaatcacaagttttgcttggttactgtcaaatggaaatagaaattaaatttaaacagagcttattaagacttgttagtctgaagagcacttcatcagctttaaagtgtatgtaagtgtcatggctaattaaaattgagttttagtgcaactaacataattttctgtcttaaaaatatgctatctgggaacctctccagtactttgtcaagatgttcttggtaccattattagtaatcattagggaccattatagttaatgtctatttgaccttccatccaagaaactaaaaaaaaaaaaaaa

SEQ ID NO: 52824 - DNA, 631 bp, Homo sapiens
  misc_feature 560: n = A,T,C or G
ccccccttcgaaatacttctagaattaattaacgcgggtccctatctaggagcatagacatggatggctcacaattacagtaatcctcctatccagaatcatgaaccatactttattttctaattctcttaacttctgtggtataattttgcttcacaaacccttctaacactacttttagtttgctatgtgtaaatactctttggatgtaaaaacaatattgaattgtaaacttttgctctcttttgaaggtctctgctgagcttttgagatcttggtgtcaatgtaggagaaaattctagtggttgacgaaataatgtaaataagagaataaaaacatagtaaattggaaaaatgagcagaaagtcatacttttaaatacacatacatttttctagctcagatattattaaaagaagtccaaaagcactttttatgtcatttgcccatcatgcttttcttagtgtgcccttagggcccagattttgtttcgtctctaattttgttctctacataaaagggaccaagtctcattggaggtatttgacttcctgccttanggtgggaaaacaaatcaagatatttgagtacagtttcaattatcctgttgtcaggaggcaagaattctttc

SEQ ID NO: 52825 - DNA, 369 bp, Homo sapiens
ccgggccccccctcggggtacttctagaattaattaacgcgggacctgagattgtataatgtcttaaaaatctgattttttaagaggagggacagtgttctgtgacccatctatctccagatagctcagatggtgaactaattcagccaaccccctatctcctaactaatacccacactgaaacaactcaataataaaaacacgaatggctccattagaaaatggacaaagcaggccaagcgcagtggctcacacctgtaattccagcactttgggaggcctaggtgagtagatcactcgaagccaggagttcaagaccagcctggccaacatggtgaaactccgtctctactaaaaaaaaaaaaaaaa

SEQ ID NO: 52826 - DNA, 560 bp, Homo sapiens
ccccctcgaaagtcttctagaattaattaacgcgggctaaccgaagagagacatatcttgctctaacctatcccatacccacacccaaagcaatctttgcgagaaaaaaaataatgaataacttgggttctcactctacacaccaaaagtgctctctgaaatttgtttcacaaatgtatgctgttatttttaagatataaagtaaaagcagaaaagtgatgttattttaggatagttaacatctagacgtctctctcttaagatgaatttttgctttattccagacacccaaaacattcaagtaaaaaaagctttccactttgataatttttaagtactcggtaaaaacaaaacaaagaaatacaaacaaacaagaaaacttaattgaagaagaaacatgaagccctcttgatctctgtgaaaatatagctaattatcaagacaatttccaaataactcaaaagcttgtataaatgtcttttagcactgggagagtaaaactaaatatttattccatgttaaacaaaattaagatacatttggcaaaaaaaaaaaaaaag

SEQ ID NO: 52827 - DNA, 629 bp, Homo sapiens
  misc_feature 24: n = A,T,C or G
gccccccctcggggtacttctagnattaattaacgcggggccgtattgaaacccatactgacgaaagcttgtattgagagattgacagaagagccgactgaagtaaaagtgatgaagcagtccactggccatccaggttatgaaaaattaaaccattatagataaactgtagctgtcgaaaattactgatcatgagtgtgtagcatacaataccatgctatgatctccgccaccattctaaaaaaaagtaccctatctaatggtgaaaaataagagtgatgtttctgagaccattccattgtgcagttctcttatatttgaaatgtgggaggtcgaactaaagtgagttggttcccttctttaaaaaagtatagtgtatatgtgatatgtaggtattgatataaacaaaaatatcgagatctttccttgaaaatgactatcgaggtcagaatgattaagcatctatatggaagatgaataacattgtatctgattggaagatgatgatataaagaaaatgtataaaatatgtgacaagttgtctgtataaaaaactataaacagtggtccgttgcctattaacaaagagtttcatgttatctaaaaagtcttcaattggctaaaacagc

SEQ ID NO: 52828 - DNA, 542 bp, Homo sapiens
ccgggccccccctcggaagtcttctagaattaattaacgcgggtgtatgattatttttattatttttcttctttctatctttgtgataggatgtgatcaacctctgccatgctccgttgcttagtagcagacagtcagagttttaattatatactaaaataagctaaagaacagaaaactgccttatgtctaatacgtatatatcaagaaaggcatgtgacagcatctaaattgctttagtgcctgataaagagtgtctccggtagggttgtcatcaaaagatcacgactggagtaggaaagtattattaataaagctgctactctctttatatgtcctccattgtttgtgattccttgttagaagctagaaatgaatttttatctaccactaatttcatcaggttttttttttttttgagtctgggagaaaaaaaaacttttgtcaattccactgccaaccctagttctccaaatagaattcttttcactcctccagatctgcaattccccaaatattatatctcgcaaaaaaaaaaaaaa

SEQ ID NO: 52829 - DNA, 603 bp, Homo sapiens
  misc_feature 25, 584: n = A,T,C or G
ggccccccctcggggtacttctagnattaattaacgcgggcaccatatgatgcttcattcaaaattctaagaatacactcagtagaagacacctcaaaggcagtggtaggttggaaagaagaaaagacttgtattaaggagttccaggctgtgcccttacttacatgatcttaaatcaatcactacacctctcccagcctcagttccctcatccattaagcagctctgtcttatatctgttgcataaactgtgaaggattgttaaaggtcaaatagggaagattctcacttttaataacacagagctagattatttggaccaatcttcctaatgaaaacaatcaaagatagcagccgggcgtggtgactaacgtctgtaatcctagtactttgggaggccgaggcaggcagatcacttgaggtcaggagttcaagaccagcctggccaacatggtgaaacctagtctctattaaaatacagaaattagctggaaattgcttgaacccaggacatgaaggttgcagtgagctgagatcatgctattgcactccagcctgggcaacagagtgagactccatctcanaaaaaaaaaaaagcggccg

SEQ ID NO: 52830 - DNA, 555 bp, Homo sapiens
  misc_feature 21: n = A,T,C or G
cccctgcgggagtacttctanaattaattaacgcgggcctatagaaataagaattgtacataaacatttattgaccagaatgttcactgcagcattactaatgaaaatggacacaatctaatttaccaagatgaaataaattatataataaaatactttgtaatcattaaaaatcttaatttcaaatattttacatgaaaaggtccttaaaatacattaagtacaaagaaagcagattataaactattaatatgtaatttccctgtatatattctaccttacaggaaagataattatcaaaatgttaattttgttatttctaggtggcaggatagatttataggtgattttaagtttttttctttgtaggagagagaatcattatttctaatgtctgaaagaataaaaaatgggctgggtgctgtctcgcgcctgtaatcccagcactttgggaggccaaggtgggcggatcacttgaggccaggagttcgagaccagcctggccaaaatggtgaaaaccgtgtctctactaaaaatacaaaaattaaccaggtg

SEQ ID NO: 52831 - DNA, 469 bp, Homo sapiens
gggccccccctcggaagtcttctagaattaattaacgcggggagtggttaagtattaataacttgcccaagctctcacagctaattgatgggaaccataagaaacaatgagaactggtttgctgaggcatcctgtttgagtttgtagtaaacagaaactagaagatgcaccctgagcctcataaaaggcaacttgagcctgaacctctgctttatggcttctttaagatcttactttctaatcccaaccaaatccttggctctcagcctgcctctgtgagagctttgtcaagtaatttggttcatataattaggatttaaaggagaatgagaggtcgggtgccgtggctcatgcctgtaatcccaatactttgggagaccaaagtggcaggatcacttgagaccaggagttcaagaccagcctagacaacatatggagaccctgtctctacagaaaaaaaaaaaaaaag

SEQ ID NO: 52832 - DNA, 619 bp, Homo sapiens
ccccccttcgaaatacttctagaattaattaacgcgggtctatgtttcctgaaatttaattactgggaattagagtgtgattgcattcaaatctgaatttttttgcaagtccatttatgcattgtattgtgttcttccatgggttttgtaagtttatatgtagtgtgggctgagataaatggttttcaaagttgtgttatttattttataatttagttactttctgtaatagtcacattaattattagatatttaatgttaaaattaaatatttatcactaaatattgtggttttgcttctaaataacagaagcaaacactctaaattcagtttggaaatactagtggtatcaatctttgtgccattctaggatgttaaggctatcatattagaaaataaacaatttaaagatattggctgggtatggtggctcacgcctgtaatcccagcactttgggaggctgaggcagggggaatccttgaggtcaggaattcaagaccagcctggccaacatggtgaaaccccacctctactaaaaatacaaaaattagctgggcatggtggtgtgtgcctataatcccagctactgaggaggctgaggcaggagaatcgcttga

SEQ ID NO: 52833 - DNA, 435 bp, Homo sapiens
  misc_feature 11: n = A,T,C or G
ccccccctcgnaaatactttctaaaattaattaacgcgggatgctcactaaatatagtcataaatgtttataaacctttcaaaagttttctcacttaatagcaaaagacaaaaagtaacataccatttaaaaattacttcttcttcataccatggaaatgtggatgaaatactggtgaaacaatttagggggaaaaagaccctgacgcatctttttgtcaggaagtactattggatgacaagtagaaaacactgctgacaatctgaagaagtaagtacaggaagaaatttttcaaggcgtgaggctgagtagaaagagagatgtttccaacatgtctcctcttacggtaccactgcaggaagaaagacattaaagtagcgatgaagtggtgaggatatatttctcaaattaatctaccttaaaaaaaaaaaaaaa

SEQ ID NO: 52834 - DNA, 615 bp, Homo sapiens
  misc_feature 28: n = A,T,C or G
cgggcccccccctcggggtacttctagnattaattaacgcgggatctaacttaccaatcagttgtccttagttaaatgttgaacttgattcatgtcaatttgtcaaaagcacttacaatatgaaatgatcttttcccaaagatattttccataatgtgacaattttagcacactaagatgttctaagtgaaaaataggcacatatatatgacttaaaagcatagcatggagaagcattatttgaaatcataaaaaaggcaaagctttatttttattagataatatataattgatatacaataagttggaaaatttatttggccattatagttttccattggcacctaaataaagaaaaaaacataatatgtatggttatttaaatcatacctaacttgtctttaaaggaagtaggcactaatctcttttcacagattatttttctgcctttttacttaaatcagttacttagagatgttcgatttatgcttattacatgtttaagaaattgttcatatttctaaaggggtgcattttaatgaaaaatgcatttgctagagaaatcacgtagaaaatctgaaggatttttaaaaatacttaaaaagttagaacttg

SEQ ID NO: 52835 - DNA, 590 bp, Homo sapiens
  misc_feature 25, 38: n = A,T,C or G
ctgggttaccgggcccccccctcgnggatacttctagnattaattaacgcggggaggtggtagcagcttccagctcacccaagtgtgagtcttttcctgaaaagtagagtctatggtttattgattaatttttattttgtttttttttcatttttctatttttagttcatagattgcaatgctagtgtcatttattttaaaatataatctctcctttaattcaaaatgcatgcttatcgcatcgtgagtacttatctgtaagtgaatttgttttggtgggtgtttcttcttttccatgaatgtctttgcaaatcctggctctgcctccatcctgcttaaaccatagtcactctgtattttatcatcaaatggtaaaagtttctccacattattttgttttgtaaaatatctccttggctattcattcttttggataaaatttaccatttcaaggttcaagaaagcttcattgggttacttggaatgatctcaaagttaaacattaatttgagagaaattttttgatttgaatgttatttaatattaaacttaatatttgatgccattaagaatagaatatgatattattc

SEQ ID NO: 52836 - DNA, 507 bp, Homo sapiens
aacgcgggggatcatatttgtgtcatcttgcctttataggttacctttactagtatattaacatcttctctctccataaaaaggttgtttagaaacttagtctaaagttatccatatagatggattttcatatgttttacagttgagtaaactcttccagatccagttcaaacgtggctactttgactgtcagacagaatgagtgattccgtcattgtgttcccagagcattctgttcatttctcagtagctatcatattgtcctgtaatatttctgtttaaatatctgtctcctctataggactgtgagttcgtcagggcaaagattgccttaatccatcttgtataccccagcagattgcacaaaatacacccttactaaaagtttttatgaatgaatgcgttgctgaattaatcaattactagatatcacttggaccgctctctgagctcaaagagataggactatcatcatattgctctcatacacaaacccacagccaacat

SEQ ID NO: 52837 - DNA, 582 bp, Homo sapiens
  misc_feature 512: n = A,T,C or G
cgggccccccctcggagtacttctagaattaattaacgcggggggtctagtattggtcaaacaattccttaactgcagttaaccctttgacaatgacagtatctttattataagatgtacaaatttaagtgacctgtattgcaattatttttctttctctcttatttttgagaactctggaatttaaacttatataaatatataactgactccaaactcaatttaagtactcacttaaaaactacattttactctgcttttgtttagcaaaacaatttcattcagcaaacatttttgaataaaataatgtgccatgccaacagtctatttctgggatctaaaaaaatcacatttgctatttttctcacaattaaaataattttagacacagaaaccactgtaaccttttcttagaatacgtaaatgtgttcctacttaataactggccattgtttcatacctgtttttattaagtgcctatgagtttgaaaatgacatataaagttacattnttttaaagatgaaaaatgttccaagtgtcttaagtttaagaagctgagctactgatagttacgattccct

SEQ ID NO: 52838 - DNA, 636 bp, Homo sapiens
  misc_feature 14, 27: n = A,T,C or G
gggccccccctcgngggtacttctagnattaattaacgcgggcatattataaaaagttatgctgtccttatgagttaagattgaaaaatcaaataaattgttttaagtgcaaaatttaagtcagcgctataaattaaaagctaatgttccttttttagaaataaattttgcccataaaatcaagcatattggtttataaaaatacatttctctcttaatattgaagtaggagtaatcaaaatgttctttatttctcaatttgtccttaaaggagagctttatatgttacccttcttaaacattatcactagttaacataccttcttcagagacgaagcttcatagataattggattttgtcttgtaaaataaatggaagataaatgttacctatcgtcttttatctctgaaccttcctaactagttgaacattccctggcttgattttgatgcaaacaagcccaacttctatttcttcttaatctccagggttataaggaatgttatccttttctgatattttctaaggtgtaagttattagcaaacctagtcagccgtgatatgttattcagtgattagaaaagcaaacccattacagtgttaaactattttggtggctgagactggtttacttg

SEQ ID NO: 52839 - DNA, 341 bp, Homo sapiens
  misc_feature 24, 327: n = A,T,C or G
gccccccctcggaagtcttctagnaattaattaacgcgggatactgtttttgtgtaattactcattttctaactgttttctgggctagtcaatcttaaatttggtcatttttgtctctaaacacagaaacaacactacagattcattctttctttcctcatctattaattatttgttcagcaacatgtatccaatgtctacttacgtagagtatgtgtgaccctgaccaacatttgtatccccggtattcagcatctgttaataccagcacacagcaagtgctttaaaaatgtagtattacattcaaatatgtactgacacagactntcatttaaaagtct

SEQ ID NO: 52840 - DNA, 604 bp, Homo sapiens
  misc_feature 27, 48: n = A,T,C or G
cgggccccccctcgaaatacttctagnaattaattaacgcggcctggngcctctcaaagtgctagaattatgggtgttagcaactgtgctctgtcctatttttatttctacaggtaatatttataaaatttatactatacctgtaatttgatgttagctctgtgtaaacactaggtagagtgtaaataaaatgaggtaaataagtcattgatttttttcaaatgtttgttttccatatatgcacacatagacatataattttagtacatagagtatttcaaagtaatgttttacattttgttaaaaaatcagagtttttccaaaatgttgtaattttaatagcttagttttttcttaatgtaattacattaaagcgttgactttatgtttataacatttattaggaatctggatcagctctcttaatgaagacaaaaaggctggaagatattttgaaaaatattctttaatgtcttaaagaactgacgatatagtaagaacctataaataaaaaaaaaatgttagatcgagagtttcttcacctatcttcatcagaaatattggcctgcagtgtaaaatggttaacatacaaaatcaatagatg

SEQ ID NO: 52841 - DNA, 609 bp, Homo sapiens
cgggccccccctcggaagtcttctagaattaattaacgcgggcctctacttataggcctttacttcattctttcacaatagtacttccagagacacacaccatttaactgattatgtttactttcctagtaaccttccaaataacgactcatttctcaaaatataaagaacaagaaaattaggtaattaaagatgactttagagctgtgtcattaatgcaatggtagtgatgaaaatacattatgttaatatacaaaagacctgatttcccaccctttaaatatttctcagtacacttttttttctgctgaaggtgaaagtcggacctatgcccttgtcagttctaaaactgacaattttaatgtaattcagcttttctagataaatatgttttcactcatactatagtatgctctattcatattctaggaaatatttaaaatgtaggaaacactaatgatgactctaaagtttctctataccaaaattcaagaagctactacttagctctaaaaaccacttggaagggctttccttggtttgtggagggaagaatcagggaggggtcaataggtcagaagtctggttattagaagacaagacagtgtg

SEQ ID NO: 52842 - DNA, 224 bp, Homo sapiens
  misc_feature 204: n = A,T,C or G
cgggccccccctcggaatacttctagaattaattaacgcgggatcttagatatatctgcttctctccatttcttcggccattaattttgtgaagactctcatcgtagcttacctggattattcaaatacttcataactgccttttctaccttcacactcatgctttgctttcatccattcttcacactccacaatcatccttgntaaaatgggtcaatcctata

SEQ ID NO: 52843 - DNA, 644 bp, Homo sapiens
  misc_feature 32: n = A,T,C or G
gtaccgggcccccccctcggggtacttctagnattaattaacgcgggctggccagcatcatagatgattgtagatgattaaattgaagaccacaacaaattggagatgggaacctcatagaaggtgaatttgagtgtggaaggtatgtaagtcttagcctatggaggacacctacttgctcagagaccatggaaatgagccccacatcattggcatttgagcttagtgcaaagctttctttccccctcagaatgacagcaggagagctcggttatataacggatgtatctggagactagtaaccatgcacacacagtctgaccctgcctggaatgagatccccaaagagacaactaggtaatgtgttaaacctttaacatgagccaagggctgagtcagcactgaggtagccactctccttggcgctgttagatacacatggcaagacttcattctcatcatgtttatggctccagcattgcctaagggagttataaaagctagtagcggcctgtgtaattttttctggcatggctaagagaaaagccttgaacttggagactgatctctgggtataaagtggtaatgggcgatcattcacacctttccttcccagctgcattaaataacactttggtattcag

SEQ ID NO: 52844 - DNA, 614 bp, Homo sapiens
ccgggccccccctcggaagtcttctagaattaattaagaatatactactatctttccccatggcacttatgtctagatgatttaaagtattgtcttcaggattttttaacccaaaacatattaagcattataaaacaagctcctaatctttacttcacatctttttctgtgttcaacattatgatctctaaaacaaaaagcctttcagctattcttgccttaaggagactctcttagatggaacacctgtgaaatagaggaaattatagatatcataaaaaaggcaaaaagcaaaattaaagtgtgaatagaattcagttttactttatctggcatatttctttttataaccactagaaattttggatatccataatgtgtaatatagaaatccataaagaaaaggggtagatatattccccattaagactgctacctcaaaggattgctaaaactgtttgtttttggcagaaaaacaaaaataattaaatattaccattgactttaagaagctttctttctcttttcagtctaactttcttgctgttggttcttgaaatttcagtaaaagcaacaatgaggctataagcaagtatcattataaacaatgacat

SEQ ID NO: 52845 - DNA, 439 bp, Homo sapiens
cgggccccccctcggaagtcttctagaattaattaaaaagaaaactggaactaaaagtaaatcttattaataacacagaaagatgagagattaaaccctttttaattttataaataaatcttttgagctttactttactttcatattagttaagatgcagttaatattctccattagatacagtcagtatttccacaatttgacctatcattgagaaccaaagaagattgctaatatatactgtaaatgttaagagccatatatatttatatcatttagctaagaaattccacttagaaaacttttttcccgatgtagaaaataaggtatgtacataaaataagttatggcagagttatattgggaaaaaatccaatgaccttcatcaagagaagactgactgattaaagaaattacacccaaggaaatacatattaca

SEQ ID NO: 52846 - DNA, 522 bp, Homo sapiens
cgggccccccctcgaaagtcttctagaattaattaacgcgggttgcctctcttagcatgatcttgtacatatattgacaactgaagttcatcagtgaaaatctcatttttgctagccctttgcatgtctcaaataaatgaaatgaggcttatggctacttgataacagttataatacagggtacactgctaaggagctgtcatagggccttgctgtccctgaggtgctcctgagccatctagagaatgaaatagatgtaaaaataaataaataaataaataaaattaaattaaaaaacccctctctgctctttgcctatctcagtgcaatccttcacttatttattccctcattcatagttgttcattcatttaagaaatatacactgagaactaaagaaaatctactgggctctacacaacgatttttaaaaagcacacacaggatattgcctaaatacttccacattaaataccttctctgagtgttttaccggactgtcaaccccaaaaaaaaaaaaaa

SEQ ID NO: 52847 - DNA, 567 bp, Homo sapiens
cgggccccccctcggaagtcttctagaattaattaacgcgggtcagtcagttgatttatgacaaaagcaatactgccatgcaattggaataggacagataatgtttgcataaatgttgcagggtcagttggatcttcatacttaaaaaaaatgaatcttgactctacctcacaccacacacacaaatcaatcagatagaatgtagatctaaaagtgaaaggcaaaataataaaacttctaaaagataacataagagaataatttatgaccttggagtaaaatcttttcaaatgtaatacaaaatatactaagcacaaaggaaaagactgattgatgaattggacttcattaaaactaagaacttctgcccgggtgcgatggctcacacctgtattccaagcgcttggggaggccaggaagggaagatccctacaaaatatttaaaaaattagccaggtgtggtggcatacccttgtggtcccagctactcaagaggctgaggtgcaagaattgcttgagtccaggagtttgaggctgcagtgagccctgtttgcacaactgcactcc

SEQ ID NO: 52848 - DNA, 619 bp, Homo sapiens
  misc_feature 605: n = A,T,C or G
ccgggccccccctcggaagtcttctagaattaattaacgcgggaggatgtcttgagcccaggagttcaaaaccagcctgggcaacacagggagaccctgtccctgtattttttaaaattaaaacaaaaaaccaaaaaacccaccattttaaccacaaagttttctctgccaagttttctctgggcacgtcactcacagcccctgctgaagtgatgaacctccaggcagccctgcccccccaccagggcttatcaaatcaggctggctcaagcctgattaagcccaggctcaatcacctggctcaagcccagccaatcagattctctctctagatgaatggtgttggacagtagagttccatggtcatgctgggctggaagctggaatggccattcttcactatgtgctaaagcagagaaaaccagagtttggacagagagggaatgaccctgactcaggtacagaaggaaatgagagattgtagcttggttgttaccgaaagtgactttgtctatcacataattcccagttcaggtctctcgtgaggctgctatacttttagcacttggcttcagtgagatatccctgtatcctttacatatatntctattcttcctta

SEQ ID NO: 52849 - DNA, 464 bp, Homo sapiens
  misc_feature 53: n = A,T,C or G
gggccccccctcgaaatacttctagaattaattaacgcgggggagagagaganaagggaaactttaaaagtttgatctaatgtacttactaccaaataaagattttacctatagattgaaactaaattgtaaatgtcccaaatacttttcccgatgaaattcaaacaaaattagacttttatacacacaaagcaaaacaaaacacaacctatatataatttcaagattaagaaaaacaaaacaaataaaagcattctctcaagaccttgcttcagttgtgtaaaataattaaatgtgctattccaagttgattttagtttttaaatacagaatttgataaaagataagtaaaagaaggccttgggttcaaggtggcagatatttagtgcaccctttatctagttcaagaaacacttgaaagatttatcaagtttccttatgtaatgaaagacttaactagttca

SEQ ID NO: 52850 - DNA, 607 bp, Homo sapiens
cccccctcgaaagtcttctagaattaattaattatttttaaaaatgagatagggtctttctatattgcccaagctggccttgaactcctgggctcaagagatcttcctgcctcatcctcccgcctcagcctcctgagtagctgggactacaggcaggtgccactgtgcctggctacttggcttcaattactgatggccgttgggtacagcaaatcacccagatgaaggtcgggagtcattatcatcatcaaaaagcagggttcctactattgacatttcccactgtccctatgacaaacatgtaatttgtctcctgaaacataaaatacattatcatggaaaagcaatttcaggttcagttacatcaacacacacaagaatgctcagaactcccagagacaggagctgacactacacaaatataacatccctgatgctacagatctctgtttggaacctcatatatcctttactagaagcatttggtaaatagaatcaatcctcagagtaaaagaagaaacactaaaatgagaattcctacgttttaaatgcctgggatatgctctctgcaatagtatgcattagttacactttatttattttggat

SEQ ID NO: 52851 - DNA, 602 bp, Homo sapiens
  misc_feature 556, 563: n = A,T,C or G
cgggccccccctcgaaagtcttctagaattaattaacgcgggaatgtggtctcagtcttgtaacattttagagaagaacagtcattaaaactattatcactagaaacctagaacagaacaaaaattaaaggaaggggatttttttttaaaaaagggggtgacataaatttaaagggtggtctgtaaaaagagaaaagtattaatggcaggtcatgagacccaggccttccagattacttcataatctcattgatagtgaggactttttatctttcagtatttctcaaatctttaggcacctctattcattgttacggccttctctttccttgtaccgtttctcttgccatggagtggcttagatctataacaggattgggtccagggtaacctcctcaactaggcacaattctggttatgtgtctggttttatattcccaatagtttcaggataaagtttaatttttagcaatgcttctgtgaaaaaaagtgactaacacttttagagtcagtttcatgaagcttgaagagtgagccactgccattcttatggtangaaacangataacattttaaaagtgagagtttaggactgaatcctt

SEQ ID NO: 52852 - DNA, 615 bp, Homo sapiens
  misc_feature 28: n = A,T,C or G
cgggcccccccctcgaggatcttctagnaattaattaacgcgggatccaattagtgtgccattaaacacttgtcacacatggcaacaatactaatcaaactcattatcctagagaaaatataaaaactaagaggtaattaaaatgtcccattacatagtagggaaaatctaccacattaaattctctgtaatgccaaataaatgaccctgaaaaagtcagacaaagtaatacaattcttcatggtgcttttggtacaatttttcaaagttgctatgttttctgttcaaaccatatttaatcctgagtttgtggaactcttttccctatctttctttatctgtccaagcgcatgaaagaattctctgtaaatagattttaactgcaattaacagcaaattaatccttccctctagataatccaccttgcctcatcaaaccagaaaacaattcaaacctggcctccttctaactggaagccacattttaagaacttattgtgaagaactggaaagcctccaataggtgagtgtaactaaggtaatttgaatatgggtgaatacaggaacaattcccaggctctgttactctctttgttgaaacccattcttttggaa

SEQ ID NO: 52853 - DNA, 412 bp, Homo sapiens
  misc_feature 348: n = A,T,C or G
cgggccccccctcggaagtcttctagaattaattaaagctctcttactccttgcttcccacaaaatcccatttctgactatatccttctactccctactatagtatttgtactccctttattttaccccccaaccatttattgcttttgctatagttcttaactccttcccttcctttgctttcagcatagtggccctccttacttgatatgcttgtttaataagcatagaatttttagtatattattttaaatttattacttacaagcaacttaaacacccttgcccatttacaatttcctggatctccctgcactaaaccacacacttagaccaatacaaaaaatntgctttattccaacatttacttgggtatctataaaaaaagcaataaaaacaccagaacataacc

SEQ ID NO: 52854 - DNA, 611 bp, Homo sapiens
  misc_feature 24, 602: n = A,T,C or G
gccccccctcggaatacttctagnaattaattaacgcgggtcccaacttaattggcacgtataaaattcttcactcagcaattgtgtaagataaattactttcaagtacccacagaacatttatttatcaaatattgaccacatgctgggtaatacagtaagtctcaacaaatgtgtaaagattaaaattgtgcataatatattctccagtcacagtgaagtcaagctagaaataaatgcaaaatgataactagaaaaccctcaaatgtttggaaattaagcaatacactttcaagtaaatctatgggtcaaagaagaaatcacaataaaaattaaatacactttttttcactgaatgataatgaaaacacaacatagcaaaacttctgggataaagctaaacaagtgatttgagggaaatatatggctttaaatgaacatgtataaaagaggaaaggctgaaaatcaaaggcgttatcttacatttcaggaagttaaaaacagaagagaaaattaaaagctaggaaaatggaaggaaatgataaagataaaaaacaatgagctacaaaacaaaaatacaataaagagaatcaacaaaccanaagttgttt

SEQ ID NO: 52855 - DNA, 644 bp, Homo sapiens
  misc_feature 32, 586: n = A,T,C or G
taccgggcccccccctcggaggtacttctagnattaattaacgcggggttgcctcataaagtagtccttagagagggagctattgatttgaaatctttaaaaatgaaccctgtttctccaagaacagttgcatcgtcctacctctagttagtaccagctcgggaaaagaggaggcagaggtgaaaggatgttggcagggcagcgtctggaccttgcttttctcttgatgcatctttctctccctgaccctttcctctggtaagctgttgattatgacatgcagaatgctaatgtctctagtgagcctccagggcctatttcagtgacctagttttcttagttaacacttggaaaagaaaacaaaaacagaaccttgttgagcaaaacactcacatcagatcacatagctttcccctccagttaggacaccgtaagccattcttatggtcctcttttttcttaagcttctgacacgcggaagtagacatttccccaaattctatcaagattctcccaggtgtagcccctgatggatcacaggaatctctgttcattgtgatttgtggcaatttacaaggttcactangcctagaaacttgatgttttccagtgtgatttggcacctaccctttacaagacgctgt

SEQ ID NO: 52856 - DNA, 574 bp, Homo sapiens
  misc_feature 461, 501: n = A,T,C or G
accgggcccccccctcggaatacttctagaattaattaacgcgggcctttgaaagaaagaggctatttctcctttagagatggatttccaaccttaaaagattcagcatgctatgcttctttaggaactttttaatacagtgcatgtgctaagggtaaatattagcatcaaagtatttaataacattttatttatcacttaaagggataaagactgcgttattttagaaacgcaaaaatctaggcagtattggctgagagatgatctctaaattttttttgtgactctgaatttccttgtctataagcctcttctaaatcaacaatcctgacagttttcagtgtcagagatgtgggaaggttagtcgtttactataagctttaatgaacagtgctggtagatgtattcagttttatgtctctaaaaatgtcttccaaagagagaaagctatcacagttaanagttgtgaattaatctatattcctgttactgaggattatntattttccaaagtccaatggctggcatactgtgttaggaaactagtatagaaatgtgcccatacattaaaact

SEQ ID NO: 52857 - DNA, 609 bp, Homo sapiens
cgggcccccccctcggggtacttctagaattaattaacgcggggggcagtaatcagattaatcaattggagcaatattgttccagaaattgtagctctgatttaaactacctgaaaatacaattttttatttaaaaaagtaaaatttatctgtttcccagtgtctcacagttaaattacataacgtggtaaacatttcttttatggccagaaggaatatctttgacaatgtgctgattgtcattaggcagtatttttcaaattttagaaagccatctattattggttcacaaaatacactggagtagaacatgatatttttgaaatgaaaaataacagaatagaaactaagaaattaaatcacagatagtagtggtaaggattgttttgctaaaattttgtttcaatgtatatgtatgagaaagatataaaatttgtttgtttttgtagatcacagttgaaaaggtttgaaaacccctgtcaaagggaccaccaccatggaaaatgtcatactctctcctctttgggggttgacctagtcacaattcagtgtaaaagagcagatctaaatcagagaagatcttgggccagataaaatcgttggtattac

SEQ ID NO: 52858 - DNA, 517 bp, Homo sapiens
cgggccccccctcgaaatacttctagaattaattaacgcgggctgcctaacaactataggttgacatttctcctacttatcgacttacactattgttcggaaactactcccacaatacttgttgaatgaaggaacaaaggataaagtgtcaccctgggtaaacctccatcttataatacaaacagcttatgactattttatattaacagtattatggcagtgcttatctatgcatctttactgaatcatggcaaataatttggggattttaaatagaacttagaggttataccttctataaaatatgttaagaaaaaatataccaaagatatgttaaaaccataaaggcctgaacaatcacatgtgttatccttatcatttatttaaacaatattaaagagtctaaaattattaaaactctaactctatttatgatgaaaatagtcatcagtttttttcatgaaaaagtacttattttaaggagtcatattttaaatatatggtgggaggtgcctgt

SEQ ID NO: 52859 - DNA, 393 bp, Homo sapiens
cccccctcgaaatacttctagaattaattaacgcgggaaggtttataaattagtactctccaataggatttttcaggggaggagcgacatttgtgacattggtaggatagggtacatggtatgctttattaaattgtataaacttaggttttaaaggcataagccaacagctttgcaaatatgtatttttttttaatggcaaaagttaacacctgaagtgaagagtgaagtcaggctatatggataatggaatttgatatgatgttacattttacgactaagtgtggctatttgtttagtattcttcatttatgttgctagttcttatagggcttatggttacctccttagcactacattgagattctgttgtttgaaagcttattttttaaa

SEQ ID NO: 52860 - DNA, 602 bp, Homo sapiens
cgggccccccctcggaagtcttctagaattaattaacgcggggtctcagtatctgtatctgtctgtgtcccagggtctcagacccgatatatatgacatgatgggctttcttggataagtagttggatagtataaaaaactataagtgtagagaaaaagtagctgctgctcaatttgaaataattctctcagccacccagcccctaatccttcagtcaaaatttaccgagccactagcataaagcacccaactaatataagccagatagattctatcaggacctcaaaatgtgaatacagttacagagatgctaatggttgctggaactgaattaccttggaaagtctatgaggccttaccattgtgctttctagtgcttccctagtccctctccttccagaagctgggttgtgcagcccttccagctgatctgtgaactacataataatctttcctagaaagccctttcatttcttgtagccagagtttgtttctgttgcttgctccttaagtaagcacattaaatatgtacaactgtaaataaaggatactatttactaggccactattttatagacattgatacctgttacagaatgtg

SEQ ID NO: 52861 - DNA, 429 bp, Homo sapiens
  misc_feature 33, 361: n = A,T,C or G
ggtaccggggccccccctcggggtacttctagnattaattaacgcgggcaccaacagaacaacgcttacatctttacagacactttacacgaaaaacatgggtgctgccctggaaaattggtgaggaatacaaattaaataaaattgactaaagcatattcaagtagaagcagctacagacatcaaacagctactcctaaaacagactctattactatacttaagaatttaatgcacaaaaaaaatttaaaataaatgctaaattaaaattatgttttaaattttgctagaataattgattatcaatttggagacagaatactaaaaacaatttagatctccaaaactgattccatagaanagccagaacagaattgtttgacatctggtagcagacagcagcaaaagttttcccacatagaataaata

SEQ ID NO: 52862 - DNA, 640 bp, Homo sapiens
  misc_feature 24: n = A,T,C or G
gccccccctcggggatcttctagnattaattaacgcggggagtatgaaagtaattaaaaaattactaatactaaagaaatcaaatttgacctgaacaagtgaaaactagactttacattttcattttgaacttttttttctttctcagatgtaattaaacacataggatttcttttagctccttaatattgattaatacagattttccttccctttcctcaaatttgcatagtcacttacttgaagcaaaaacgttatttagaaacaatatttcttttcctgcaatttggtcacatatgcctatgcatggagaaacacattataagcattttcagtaaattgggtcatctaaaatcaagaaatctttaaaacttcaaaagaaatttcacatcaaataacattgacctccattgtttctgatttacttatttcttcctgatttatgctgattatatgaatataggattctggctttttatgagcccagaaagtcaatagaaaatgagcataaacttttatctgtcttgttaaatttctgaaatagcaggaattatcatcaatctaacattatcatcactatgattatttgtaagttcaaataaaattattggaaaatatacacaggataataatatgtagc

SEQ ID NO: 52863 - DNA, 599 bp, Homo sapiens
  misc_feature 28: n = A,T,C or G
cgggcccccccctcgaaagtcttctagnaattaattaacgcggggtcctaaaatatatattagcatagatttcaactttagtgtatatgaacagcattctttaagtaactgtattgggaaataatttcaaaatgtgtgtaggaaggcctatatcttagaaagcagtaaatttttaagtatatatttactctatattactaatgatacgaataataatattactaactcaaaatgtatatcaggttaaatatctacagacccaacattctgtttcatttttaaaaaattttataattgaattatgtagtacttttcacactattccatgctctattttgaatagttttaatgcctgagctgtattgacttctactagcaagacagtgattgttattctaaggcaacacatcagtccttcttcagtagactgatgttaaatgtagatatgatattaatatactttatttgaccaaataattcctgctgcatcatctcatgaagcaagctacatagatttgtcacaactagataatgctcaaaatttgaagtgattttgtttcacctagtcccatccactacatcccttcatagaccttgga

SEQ ID NO: 52864 - DNA, 588 bp, Homo sapiens
gggccccccctcgaaagtcttctagaattaattaacgcgggaatacctttctgttaatgaacatggggtaggataattttcaaagtaaatatacagacaaaattatacacatcaatggcatttaaaagttttcatacaatatttcaatggaatgtattttgtaataatttatttcttcctgtttcagcacttaacaaatttcttgtaaaaaacatttatgttttactgaattaacgttggaaaatcaacaacctttccaaaaatttgaggataaaagtttttgagtagctttttcatcggcttgtgattactttgtcaaaaattgtccatcaataagaaaatctatgatacctgcagtgtgcctttgtcaaaatccatattacgactataagtttctacaaaacagtttaactagtttcctctctgtttttttttatcttctttaattcaaatagactttagagataatgtaaagcactcctccaattttataaataaatgaattaaagcttttctaattgagggtcatgcacattgtcacacagccagataaaagcagtagaatgcctcaactttaaaaagctgtag

SEQ ID NO: 52865 - DNA, 315 bp, Homo sapiens
  misc_feature 22: n = A,T,C or G
cccccctcggaatacttctagnattaattaacgcgggggcaaaaaaaaactaaaaaaaaataaaaaaaaaaacaaaaaaaaaaaaaaaaaaaaaaaaaaaaaaaaaaaaaaaaaaaaaagaaaaaaaaataaaaaaaaagtaaaaaaataaataaagcgggcccccccggggggggattcccatgcccccttaatagaaatttttttaccccccccctgggcccctctattaaaaacttcgtaacgggaaaaacccagagttaacgcaactaattctcttaagagaaaaccccctttacttaaggggggataaaa

SEQ ID NO: 52866 - DNA, 487 bp, Homo sapiens
cccccctcgagtagtcttctagaattaattaacgcgggatgtaacacataatcactgattacaaaaatattttgtgacctttggttacagtgttctaaggactaattactagaaaatccatcatgacaaagtgaatattcaatccatttaagcaaatttaccataatatcaagcctcatgtctcataaattaatattactcttagcactctgaaaactagtatcttatattcaaaaaccctgaatattagcttatttttataagactcttgagataaaaagaaaactagtacatactagttttaacatcaggtgattacaactgcttttactagcttttataaataatttcatttctttgttactggaaagtattcaggctgttaatgaaaaataaatgtctcttttccaaaagatattccattcttccagtatttattttggtgacacaagtctgcatggcgtgtctggggtttaaaaaataaaaa

SEQ ID NO: 52867 - DNA, 387 bp, Homo sapiens
ccccccctcggggtacttctagaattaattaacgcggggggttagctatctggagtcctagaaagctcagcagttaactaactctctgactttcagccattgctgaacccctcgaaaccttagtttattcactttttaatgcaagagacaaagaaagaataaatgggttgaactatgatctctccagaggatcttccagccataaaccttaaaggaattacttgagaacataaaaaaactacacagtaagtaactgaggtttatattctgtatttctagatttctgagttactatgtgagggcagagttcttctccccaaatagaaaaaaaattaaaaagaagaaagaaacaggttctaaagtaaataacaggtttgaaagtgaaag

SEQ ID NO: 52868 - DNA, 546 bp, Homo sapiens
cgggcccccccctcgaaagtcttctagaattaattaacgcgggaagtggccagaggaaaggaagatggtacaagaaaatcatcgcaggatttttgaaagttccagatgtgagaatgtaaaaagtcataaatactcatcaattcttttataactgtgcagtgccatttatgtgataagtttgttaggttctggctaaagaatgttaatcagcataaagaaattccttactctcataaagcacagtgtttatcaggaaagcataaaatcttgcaatacgttacaaatgttcaagcaatcaaaatttcacaataactctagcttagaatataagataatgatggaaaaaagtaagttagacaaaatttaaatcctgaaatgattggtaagctctttttaggtggttgttctatggatctgatattcataaaacaattactggcaataaatacagtcaataactcaatcaggagcagaaaataagcctactgactcccagttttgtttcctttccataacaccattcacaaacatattagaattaataag

SEQ ID NO: 52869 - DNA, 504 bp, Homo sapiens
  misc_feature 28, 449, 482: n = A,T,C or G
ccgggccccccctcgaaagtcttctagnattaattaacgcgggggtataagtgttcccgtggctccacatcctcaccaatgcttggtgttgacaatctatttattcccattacagcaagtgtgtaatgttatctaattgtggtttgaaactgaatttgccaaacgactaataaggtggaacattttttcatacagtgattggccatttgtatatcttctttggtgtagtgtctgttcagatttcttgcctacttgtgtagttcatctttttatcattgagttgtaaggtctggattctctatttccttccgttgatctgtctatctttatatcagtgctatcctgtcttgattattgtagttttagaataagtctcaaagtcaaatggtataaatcttccagctttgttccttttcaatttgttttggctatcttaggccctgcgtatnttcacagaaaattttaaatcagctggctaaatntctaccaaaaaaaaaaaaaagc

SEQ ID NO: 52870 - DNA, 544 bp, Homo sapiens
  misc_feature 9: n = A,T,C or G
acttctagnattaattaacgcgggtctggaaaattttccttaaagctttgtaaattaatgtttttttcttaaaatattattggaaagaatattgaaagaaatttgaaatattgaaagaatactgaaatattgaaagaagtctttgtggaaaaattagatttttttttctcctgctgaatactttataattctttttttctccatgaaattaaggcctgctaacttctttttagattcttttttgttatgttgttttgagatatggtctcactttgttgctcgggctggagtgcagtggcgcaatcatagcccacagcaacctcaaactcctgatctcaagtgatttctgctgtctcagcctcccaaggagctgggactacaagcatgcagcctgtactagcctgtactagacacctggctaactcacgcctgtaatcccagcactttgggaggccaaggcgggtggatcacctgaggtcgggagtttgagaccagcctgaccaacatggagaaaccccatctctactaaaaaaaaaaaaaaagc

SEQ ID NO: 52871 - DNA, 560 bp, Homo sapiens
  misc_feature 26: n = A,T,C or G
gggccccccctcggggtacttctagnattaattaacgcggggatattatggcatcatagagaaataagaaatatccagaaatcttatgctatattatgctgcatattgatatttataccacatagccaagtttttcctttttaaggaattcccccatcctagaagatatttgtagttattcatatatgaagattcctcacttttgaaactttaggtctgtattccatttggatttatttcattttctttacctccacaactggtaggatttctgtctaccatccatttaggttctcattttgactatccaacttcttgaaagattcagcacttttcagcctctgagctctgctctgttccaaataaactttgattcaccttcgcagttctgatttctcccatccctgggacttctttttcttgcatgaagtcctgggagcaagcttctcacgtggttttgttccttcgttgtggggtggtcgggggagtgtggtcggttctagataatttcctaaacaaaaacattaaattgcttttccaggtgccaaaaaaaaaaaaaa

SEQ ID NO: 52872 - DNA, 594 bp, Homo sapiens
  misc_feature 546: n = A,T,C or G
ccgggccccccctcgaaagtcttctagaattaattaacgcgggcctccctgaccttgcttcccacagactccaggccagctgcaggcccgggacaagcaggttttcaataggtctaccaatctgcttcattctgtctaaatgaatatttatatacatatcattaaaaaggccctaatttaatctttactaatattttctctttgactgactttactctgaagttaagattccagagtatggatgatctgtaaataaaaagaattttttgttgttggccattcttatctttatggttgactgcaaactttagtgactgacaattgctatttagaaccatatttctggccacagataattgaccgaaattatacctagaattatgattgtaagagctgaatatgagttgtgtctccatgatatcagagaaacagagttgaaaaagggtcttgagtctctttacttggaacaggatattattttatagagggtaacatttatttttaaaacctcagcccttgactctgtactcttgtacttctatactntttccttttttgtagaagtttccatgacctaccccctgccttttgcac

SEQ ID NO: 52873 - DNA, 600 bp, Homo sapiens
  misc_feature 16: n = A,T,C or G
cgggcccccccctcgnaggtacttctagaattaattaacgcgggttagctataatgttttagaaaattgttttagaaaacaatttttaaagctttgagtatttttacagagtaaatatccacaccaggaacaattcccaaaatatttatttttaaaatagtgctaattttgaaaaattacaaaatatagaaaaatgctaagggtgtacccattctactgcttactgtagattgtgtccccctacttttaaatgcctttttacaatgctggaaacacactattgtgtatgcttggtgggtttttttcacgttaatattatatcatgagcacgttcccatctttataagcataattccaactattaatacatttactgaactgtagcttacttttggacattcagtgtgctttcagttttcctgcattataaataatatcacaatgagtagtttttactaaaggcgtttctctattttgaaatatttctttagatggagtcatgggactaagatatttattgctaaattgtgctccaagacaggttgaaatgattttcatcccatatcagttctcaattttcattgacacccagcattaatt

SEQ ID NO: 52874 - DNA, 581 bp, Homo sapiens
  misc_feature 13, 26: n = A,T,C or G
ggccccccctcgngggtacttctagnattaattaacgcgggatattgactatgttaatagttatggattcagactattatatatttcagagtacaagattttttagaattgtttttattttctagattcaacttggtaatatttattagttatttatatttaatttcataagtttatttggttttaaaactcattgtaaattcatttatgttcctacattttaacgcctaaggtcttagtttctatttcctgtttttaaattattttaaattatttactggtagtaatgtaaaaaatttacaacttttttgtctataattggtttttgaataatgtttgagatgagtacttgtagggtatattttgagtatctttgaatatttaaaagtatctactgccatttctcataaaaggtaaaccaattgggacaagaatttctgggtcacttatttttccacaaatagttgccaggctctaggttttggcatgttactttctgtctctagtactcatgtgtttatttatgaaatgataatgatagccccttccgcaattctttcatacaattctgtgaggttaaa

SEQ ID NO: 52875 - DNA, 616 bp, Homo sapiens
  misc_feature 19, 32: n = A,T,C or G
taccgggcccccccctcgngaatacttctagnattaattaacgcggggatgctagttttgtaaaagagttgtggccttaatggaatttttttaatgctactcaataaaaggtatatcaatacaactatttgaggcaattacgtggtattatgtattaaaacctgtgaatgttgggccaggcacagtggctcatgcttgtaatcctagcactttgggaggctgaggcagaaagatcccttaagctcaagggttcaagtatctgcatggtcccattttgctcccatctctacaaaaacaaaacaaaacctgtgaatgttcatagcctttgactaagtgatcttgggtctaaaaatatagcctaaggaaataatatgaatcgcatatgaagatttataaatgtttattaccatcttatctgtaatacaaaaaatggaaacaaagccccaataacaaaatatttaaataaattagtgtagtttatatatctatattgataaaactcagttacaaaagttttttaaaaatttaatgacttggaaatatacttgcaatgtattccgtaaaaaagtgaaatttaatatattatcttatgtgtaaaatataattttgaaataaa

SEQ ID NO: 52876 - DNA, 475 bp, Homo sapiens
  misc_feature 26, 102: n = A,T,C or G
ggccccccctcggaaatacttctagnattaattaacgcgggcacattgctttgcagacatgagtctctctataaatgcaggataaagaatagatgatacatnaaaaaaaaaaaaggaaaaaagaaagaaaaaaattataggagaaccactcaaagaaacctcactaaccaaagtgatattcctgtatttttaaatgatttttaaaccagagaaacctctaatattcacacaaataaatttgtgcaactgcaagattgaccagtttattatcaagtggcatgatcccatatatatgaaagttacttcaagttttcatttaaaaaaaaaaaagagaaaaataggccaggtgcaatggctcacgcctgtaatcccagcagtttgggaggccaaggctggtggattacctgaggtcaggagtttgagaccagcctggccaacatggtgaaaccatgtctctactaaaaaaaaaaaaaaa

SEQ ID NO: 52877 - DNA, 608 bp, Homo sapiens
ccgggccccccctcggaagtcttctagaattaattaacgcgggatggccctttaaaataagtcgcaaagattactggccttttgatacacatgggcactgatttcatgactcttttcagccaccagagggtgccccaaagatctatctttgaattggcttttgcttgttactgttagacatctaagaaagagaatgtgagttgtcacctgattctgggtgagtttttttccaaaatacttttcctctctgagtaattgcaaatagcaatggagaataaaaactagaaactgtttttttgtgcacattgaaaggtttttttttaggcttttaagagagagatttttttaaaatataataaaaagggaaaatacagacgatttaagaaactggtgaagagttcttaaattatggcaatccagcatgacagatatcaattaaccaaaatattaaggtgtttttgctaatcttttgcatatttacataactaagtcaatcctttgagggagaagggaaatggaaacatatttttaaattaagttacccaaatccagtatctgcatagctagaattaactggataaaaattcagtatgacaactgaatttatc

SEQ ID NO: 52878 - DNA, 480 bp, Homo sapiens
gggccccccctcgaaagtcttctagaattaattaacgcgggtatccctgtataatagtttaccaaacccatatgctattttcattgaaataatgattttaaatatcaggaagttttacatggaaaatggctacaagtgtgattactacaaatatttaaatagctagagatgtgtaaataaaaggatgtaataagtgatttctattatatagcattgtagagaatgatttcactgttggtattaaaggaaagtatttttttaaattaaagtttattttttatctacttgtgaaatacatactttaatcaaattgacaagtgaaagttaaatttctagacagtgcataaaaagaaactgtacagtatcctaaagaagaagtaaaaatataagtatgaaaaagaaccaattcaatgatgtataaagactagatcaaatccatgtctgagaggcattagaagtccttagaaaaaaaaaaaaaaa

SEQ ID NO: 52879 - DNA, 624 bp, Homo sapiens
  misc_feature 40, 156, 568: n = A,T,C or G
agactggggtaccgggcccccccctcggggtacttctagnattaattaaccgggacggagtgagagcctagttagccatgcagaagaaagctttgcccaagacttttgctttgtggcactttatccagaattgaagtagtttttggaatcataatncatgaaaagatataatttcaacagctgaaaacgttatctttttataatgatcaggaaaggaaaatgttaatgaaaacaccaatgttacaaaattagaaatggattttttatcatctctgatttggggtttcttgtgcttctgaaacaattagggttctctgaaagtaacagttatagtgtggagcttactctgaaatatttgcaaattcaacctcaaagcttacattgtggataattcaacattaactttcagattttggcaggggaagcagaaggctctgccgtgaaatttctgatatttaattgaatccaggaagtatgccattttagaactaattaaatatgaaatctcttgggttttaatctttaatctaaatctttactgggatatctagactttggaatgtcctgnggttttattttgctttttactttgaggacctccaccactctgattccagtttctgt

SEQ ID NO: 52880 - DNA, 494 bp, Homo sapiens
  misc_feature 27, 51: n = A,T,C or G
cgggccccccctcgaaagtcttctagnaattaattaacgccgggcaccagnaagaaggacatagaaagaatttgcaacaatctttttaatttaaggagtcagtaatctacttaacttagctgccaaaagctgaatgcctctttggttttcctggacaggatcctactattctttccttatcatctttcattttgatccactgagggttattggtagttagagggttcatctccctgggacttgcccctcactgccagtgcacaggccagccaccgacaattgtcagcctacatgacatatgaatagaacttgagccacatctctctccatactcctcctttctttctggctatgcatcaggtttctgagcttgcaattgcaggggtactaatccacagaactgagtgaaactcctttgtctacctcggatgccttggcaaatacaaagaggaatcaccaacatttttcatattgtttcctaaaaaaaaaaaaaa

SEQ ID NO: 52881 - DNA, 422 bp, Homo sapiens
gggccccccctcgaggtacttctagaattaattaacgcgggcacacacacacacgacaaaagcaacagacttgaaagtagtactctgcaagcactctccaaacacttctatcataatctttctgtgacatttacactttagctgctttgtattctgttatttaaattgattgaatttagaaagcagaaaaacattaaacaaactatatcaaaaattactgtcttaacaaaacatctctaaagaaaactgctgttactctgttttaatcacccatttttacctgtggctctcagaaatctccaagatattttcttcttgagcatttagtaacatttcagatacctgatactgagcctctaacaggagaagagtgtccagatcacagcatatcacacttaataacctatataaaaaaaaaaaaa

SEQ ID NO: 52882 - DNA, 473 bp, Homo sapiens
  misc_feature 18, 31: n = A,T,C or G
accgggcccccccctcgngggtacttctagnattaattaacgcggggtgcatctaaagaactgtgtaaaatgcagtatgtttcagctattaatagaaatcttgaacctgaaggtcaagaacgagtgataatacattctaagtgtaagcatagaacaagctacaaaggattatcagttactttaaaaattaagcagcattacggtctaataaatctaaatgcccacaagagaaagcaggaaagatccaaaattgacaccctaacatcacaattaaaagaactagaaaagcaagagcaaacacattcaaaagctagcagaaggcaagaaataactaaaatcagagcagaactgaaggaaatagacacacaaaaaaaacccttcaaaaaattaatgaatccaggagctggttttttgaaaggatcaacaaaactgatagaccgctagcaagactaataaagaaaaaaaaaaaaaaa

SEQ ID NO: 52883 - DNA, 602 bp, Homo sapiens
  misc_feature 26: n = A,T,C or G
ggccccccctcggaaatacttctagnattaattaacgcgggaccaaagaaagtcttctcagtcacccatagccagtccctgtgaagctttttcatgtccaacaagcccaaatggatcccactccccctatctaatgacttttttgaaatatttctgtattttcaatgtttacataacctttttttttatactttaagttctagggtacatgtgcacaacatgcagttttgttacatatgcatacatgtgccgtgttggtgtgctgcacccattaactcatcatttacataaggtatttctcctaatgctatccctcccccagccccccaccccacgacaagcttcggtgtgtgatattccctgccctgggtccaagtgttctcattgttcagttcccacctatgagtgagaacatgcggtgtttggttttctatccttgcgatagtttgctcagaatgatggtttccagcttcatccatgtcactacaaaggacatgaactcatccttttttatggctgcatagtattccatgatgtatatgtgccacattttcttaatccagtttaccattgatggacatttgggttggttccaagtcttt

SEQ ID NO: 52884 - DNA, 506 bp, Homo sapiens
ccgggccccccctcgaaagtcttctagaattaattaacgcggggggtgaggaataaaagacaacaaatatggtgcagtgtatactgctcagatgatgggtgcaccaggatctcacaaatcaccactacagaacttactcatgtaaccaaatatcacctgtaccccaataacttatggaaaaataaaataaataaaaaataaaaaataaagcataaatgggtgctataaatacaataaaataaaacaaaactattgaaatttgtttagcctgtgtctcaggggacactgaagttgaatctaaatcttaatatattggaagaaaccccctaaatatccacccactcattcatccattcgttcagccgatattcagttactgtctatgcagtgtgtctaagtcaagtcactgtccaaagtaatgaagagatatccttaactcagagttacactgaaggtgtactttagtagtatcactagacagtcagctttttttttttttttttttg

SEQ ID NO: 52885 - DNA, 625 bp, Homo sapiens
  misc_feature 31: n = A,T,C or G
gtaccgggccccccctcggggatcttctagnaattaattaacgcgggggttaatagaaagaactaaatgcaatgaaggtaaaatgaaaatattataaccaagtgaaagatctgcatttaaatcatttagctcaaaatatctttagttattaagaaactcctaaacattagattatataatatcaattaattactaaaaggaattatggttatatgtcaattctgatcctcttagtaactatgtaggccaacatatcatatgtaaatatgcggttgtgtgtatccagatatttttattcactaacatgtcatttttttctcaagcatttttaataacaacaacattaaatgatgattataccataacttatttaacaagctcctgtggaaaatagtggcggcttctcgatttttaatgttataaacaaggatgcaatgaataattatatgcacatatctttctgtacctttaatttttgccttcttaaagtactcgaagtcaattgatgggccaaggaaattctcaattaaaataaaactagctgattaggactctcttattttgcctagtgacataatggcattttgttcttctgctatctttctttatggagagttcttaataa

SEQ ID NO: 52886 - DNA, 597 bp, Homo sapiens
  misc_feature 25: n = A,T,C or G
ggccccccctcgaaagtcttctagnattaattaacgcgggtattaatgaattagaagcttattctttaaatggcacctcattctaattttttaacaaagttttaaaatgcatgcatgaaagctattttttttaaaaaaaatcatatcttttaacaaatgaatggctttatcaagtattagcttaacaataaaatttttctttggaagaaaaattgagtggggaaagatatatgccaaaacactgagagagctttttaactacactacaaaataggcattattaaaacagcaatcttctgctacaactatgaaattcaaatttttctatcataaaacaatactattttttccaggtagcaattgaaataatacttgtttcaagggaacaaaacatcaatttaagaatataataaagtatgatatcatcattcaattttttaaaagctcacttagaattgcaattttattaagctcaacaatgattttgaaatatttgtccatttgtccttgaataagctaacttcttctgccttagttcattagcgtggaattaaaaatgaaaggaatttttgtggcatgaatatttcacagcaaaga

SEQ ID NO: 52887 - DNA, 633 bp, Homo sapiens
  misc_feature 39: n = A,T,C or G
actgggttaccgggcccccccctcggagatacttctagnattaattaacgcgggttcctattaaatgtcagtgctgtacctttcaatggttgcaggatagaaagacagccttacttggttcagtcttagatgaataatgtcagttttatataaaaattggttttaaagggaagactgcaccacttataataatagttgcttctctttaaaaatcttcaggacagaaaacaatgtcaaatattaattcaaatttataactaaattgtggtatcttatcaaaaatctcaaataatgacaatatgacctaactgacttctgctttcagaatattatgcttgaaaacatctagtttctagataaattataaaaaatattataattttaaatgtcttgccaaacacaatattaagaaaactaagaaacaaaagaaatttaaaaatcaacatactgttaggacaaaaaaaaaacccttttttaaaaaaacataagaataagtgtttaatctcttacaaataattcattagattaaataatgaaggattgtttcttcaaagaaagattgcgtgtaaaggaatgaaaatgcaactgtgagcagaaaaccccaaaataaaaattgtgtatctatgttttagc

SEQ ID NO: 52888 - DNA, 377 bp, Homo sapiens
  misc_feature 35: n = A,T,C or G
tgggtaccgggcccccccctcggggtacttctagnattaattaacgcgggtgctcatttaaatgtaaactcttcaaatatagttactgtcacatactgggcactcaaaacatatggactggttaataatcaaaatttaactataaaataaagtaaacatagtttatagctattcctaagagtatattaatttttagcatgtattccttttaggaataatgttactaagtgtaaaaatccacttctacttgaacaggtgaaatgtgttcatctaagtatcttcactacatcaactatcaatatttaaaaccttagacaatcttaaaattgcaaaaccagaaacagaaatcatattctactctgcaaaaaaaaaaaaaa

SEQ ID NO: 52889 - DNA, 628 bp, Homo sapiens
  misc_feature 27, 44, 46, 64, 75, 76, 83, 84, 91, 95, 96, 117, 118: n = A,T,C or G
gggccccccctcggaaatacttctagnattaattaacgcggggnanaaggaatttagaactggntttacttaagnncttaatnntggcaanaagnntaattatttattgaatgtgcnnactgtatggaaaagaatagtttatttaatgacaagtgcaccctgctaaatttgataaaaactcctatatattttttttaacgtacgaggcagtgtatctatatatgtgtcattaaaggacaatccacacagacgcacatagaggtggtaactatgaacaactcagggaaagaaaacattcttagttgttatttttcccagagatgagcctgttggaggttttcatacttaaaacgtttgttaatcaaaaggagactgaagcgcggttccagttctcctgtggaatgcgtgctcctgatcagagacaatctgaatgttgtcctcagccaagaacaaagtgactgtcagaaactctgtgtgtggagctttgtccttccatgacttactcattctgactccttccgcctctccctgcccccagtcttaaaaatgaaatgatagggggttttgtttgcttttaaaaccacatgccctaaatttaactgttgaaaattaactactggtttagaga

SEQ ID NO: 52890 - DNA, 292 bp, Homo sapiens
cccccctcgagagtcttctagaattaattaacgcgggtccccttatttacatttaaagaccttcccatttgattgtacaatcttacttgtttttaaaataaattttcttaacatatgcatcatcttgagtgggtttataattcagtaacaccccaaatttgggctggacatggttgctcatgcctataatcccagcattttgagaggccgaggtggaaggattacttgagcccaggagttcgagtccagccttggcaacatagttagcccccatctcaaaaaaaaaaaaaaa

SEQ ID NO: 52891 - DNA, 615 bp, Homo sapiens
  misc_feature 26: n = A,T,C or G
gggccccccctcggggatcttctagnattaattaacgcgggggggtgatagaaataaaacaacaaataaaatctttaagtagagaaatcacggcacagctgttgttccactaatcaaagacataactgaagcagtgaacattcagagaaagtcagctaaatgatcaaaacagttcatggtaatttgagataagaatatgtttgtctaaaaagttgaagaaaaaaaaagtctaacatatttgaatatatgcaatagaaaagaaaaggaaaatgatgatattttcctaaattcctgattatgtcacttagcagataccctctgatacttaaaaaatgctgtgtttatgtataacacatacacacactcacacactcaatttaatcacttaaaagcctttcaaacgtgtaaccatacattgatccaaccatcatctcaccctccctcacacaatatcttcactgcttttttacccaatttaggtcaatgatgactcgtcacaatcagtcttttgccttggttttcaaactttctggcctctttgctctttagcatgtccactgaaaaaaaaatcaattctagttatataaaattctgcatattttgccccagcatctg

SEQ ID NO: 52892 - DNA, 595 bp, Homo sapiens
ggccccccctcgaggtacttctagaattaattaacgcgggctcattgcaatctccacctacttggcttaagcgatcctcccacctcagcctcctgagtaatacattttgccttttgctctggggatgaatgaaagattagaaaagtgaattcttgaattgtctagtcaactgtacattttgtaggccatttctgcatgatacagaattgctgagggctatacaaaaacactattaataatattcattattacagattaaaaactggcatagaagcctttaaaatacctttttttctgctgggcgtggtggctcacgcctgtaatcccagcatttacagaggcagaagcaggaggatagcttaagccagacccacctggggaatatagcaagactttgttctgcacaaaaaggaaaaaaaaagatatcttttttcttatgataaatgtatataataaataaaatatatctattattaaaaattcattaaatgtaggaaagcattttttaaatgtttaagcaacacatactcccactaggctaaaattatattcataaacaatatggtatatttccatctggccttttctctttgca

SEQ ID NO: 52893 - DNA, 584 bp, Homo sapiens
cgggccccccctcgaaagtcttctagaattaattaacgcgggatccctccaactttaatgaacttcaacaaggtaaatactcatcccattgttgtaaaaagcctcaacttcttgtaacttatttcaggattttaaaaagcataaaaaacaagagacctggttatgttttattttggtaaatcttaatcactatcacatgtatcttttcatacatactcatatatgagagagtggaacttatcaagagtaactgaagaaacaaagaaatcaacagggaaaaagaatgaaaatgatagaagatactgaaaacaaacactctatattcaattcttgggcgtttttgacatctgtcgatggaaatataactgccaactattttctccattggtaaatttaatgtcttcaaagacacattctttaaaatagtatccaaaagtctgttaaagcaaattgtatttcctgcatgaatgtttagatgctaagtaacttaaataattaagacggaattgcattagagctttgaaaaatccacattaaatatgaaaaaataggccaggcgcggtgtctcacgcctgtaatcccag

SEQ ID NO: 52894 - DNA, 614 bp, Homo sapiens
  misc_feature 25: n = A,T,C or G
gccccccctcggaaatacttctagnattaattaacgcggggaaggaaggagagaaaacagtaagaaataaaagagcaagtcaggaatggtagaatgttaggtctacctcatgtcaatcctgctctacgtatgggctacaccgcaaagggagggagcagaagacacaggaagcccggagtccaagccccggcaaagcagttctataaaacactcaaggatccaaaagtagtcactccctcagagctgctaagaaacgcacgagtactacttaaccttggcataagtacttgggatttccgatacagggatggttttcagacaaggtgtaaatcctgctacagaaccagttcttaattacatttaacaaatgtgcaaagaggctctgagcccataaagcaccaactgaaagcagtttcaactacactgtgctttacaaacgtccttagtgctttctgtaggacaaataaaactactgagtttaaagtaaacaggattgagtagcagggacagtaatttactaccagagaaagtctgtcacacaatgctgaatagtggcgtgagtggcctgcgcctgcgcttgatcttgccttacccaaacatttacctaacagctg

SEQ ID NO: 52895 - DNA, 403 bp, Homo sapiens
cgggcccccccctcgaaatacttctagaattaattaacgcgggtctgtaattgttttaatctacatttcccaaacctccatatcctagatacatggatatcttaaactgtaaaagctaccagtgggcctaaataatggcatacacaaagtgtagggagaaaaatacactaaaataagaaagaaagaaaaaaaagacaaacaacaaaacaaaacagtgaagtaaactgggatgagaaaagtatagagataacccaattagtatgtgaccttgtgcaaagatagcataaactatctcagtttctccagttatttcaaggaaaacttccatagttttaaatggtttagatttgtttgtcaatattgctgttttcatagggaggaactggggaaaaaaaaaaaaaaa

SEQ ID NO: 52896 - DNA, 572 bp, Homo sapiens
  misc_feature 9, 561: n = A,T,C or G
acttctagnattaattaacgcggtcccttgtttttgatatattatctccatagcggcagaaagatcgtgaatgtgcatgctgttaatgctgccattaatcacttggctatatactgattttaatgtatttttaaggcagacttagactaccagatacttaagtggttttctctcacaggccatgggtaacctcctgtcatatgactcaaaatccctcatagaaaataaacttttagcttgaatccaaaaggttagctttcataagagttcatctttgaacccccagcaataagctcctttcactaaatgttgatataatatccggcctatcacatgaaatcagtgtttgatgtttatgaaactcgtaggactgtacaaacgtgctgttttataaggcattaatccagaggtccaataatatgtatagtgaagtttatcttgacaggtaaatcaactcattgctaagtaaaatagccggacaatactatcgttgttactgagctgcaggtgtttaaagagcttagtgaactaagggggaaacttcccagaatcacatggcangaatgcatggt

SEQ ID NO: 52897 - DNA, 414 bp, Homo sapiens
  misc_feature 13, 26: n = A,T,C or G
ggccccccctcgngggtacttctagnattaattaacgcgggggagaggaaagagatatttatcaaagtcgagaacttgaggtcagcagtagggagctccactggggtggagaggctaggtggaagaggaaccaggctgggcgtggtggctcacacctgtaatcccagcactttgggaagacaaggcaggagaatcgcttgaggctaggagttcgagaccagcccgggcaacatagggagaccctgtctctacaaaaaatacaaaaattagcccggtgtggtggtgcacacctgtagtcctagctacttgggacgttgaggtgggaggatcacctgaacccagcaggttcatgatcaggccactggactccagcctggacaacatagtgagaccctatctcaaaaagaaaaaaaa

SEQ ID NO: 52898 - DNA, 319 bp, Homo sapiens
  misc_feature 22, 35: n = A,T,C or G
gggtaccgggcccccccctcgngggtacttctagnattaattaacgcgggccctgttttggatacctgagagctagggctgagcatggacacgggaatgtctcagagtcagaatcctcaacactgctgacccccaaagcagcccagctaatggctctagcctggggaaaagaaagtatgaaatttgaaataggattaattcaggctgaggcaggagaatggcatgagcccgggaggcggaggttgcagtgagccaagactgccccactgcactccagcctgggtgacaaagcgagactacatctcaaaaaaaaaaaaaa

SEQ ID NO: 52899 - DNA, 561 bp, Homo sapiens
  misc_feature 32: n = A,T,C or G
taccgggcccccccctcggaaatacttctagnattaattaacgcgggtccttccagttctatttgtatatggttttagactcagctgtaaatatattaatttatgcagcaatggatattataaatcctacactttatatagatgtaggctctttcttttcataaacaaaacttgaaacaatactaaatttttaaaaagatagacataattgataatttcactttgagaaagcaaagtaacccagattgtaaatgttatggacaaaggctgggcgcagtggctcatgcctgtaattctagcacttcgggaggccgaggttggtagattgcctgagctcgggagtttgagaccagcctgggcaacatggtgaaaccccgtctctactaaaaatacaaaaaaaattagctgggcgtggtggtgtgtgcctgtaaagccagctatttggggggctaaggcacgagaattgcttgaacctgggagacggaggttgcagtgagccaagatcaagccactgcactccagcctgggcgacagagtgagattctgtcaaaaaaaaaaaaa

SEQ ID NO: 52900 - DNA, 618 bp, Homo sapiens
cccccctcgagagtcttctagaattaattaacgcgggtcctgagtagctgggattacaggcatgtgccaccacacctggctaattatgtatttttaatagagatggggtttctccatgttggtcaggcttgtctcgaactcccgacctcaggtgatccgccccactcggcctcccaaagtgctgggattacaggcgtgagctactgcgcccggcctgaatatttttaaaaatccatgtttaaagtgatggaaaatagacagatggaaatttaggaagtcgtgtgtaagaatgcattttttttcaaattgcagttttgggatttatttcagtaatataatctattggtggatggaaagtctgattcttgagaatcttttaaaactttcaaggcattttgaaatgtctttggaatttgcatgacactgtttcccagggcatacctgtgttgtggcctcctgtccctctatcccacttgcctccatgctatgtttactgtaatcgatgaactgagctactttagatattgtttatatcagagatcccaagaaacccacctgcccatgaagctcccatggcttcatggtagacttgcatctgaaaggaagaaggttacttgc

SEQ ID NO: 52901 - DNA, 208 bp, Homo sapiens
  misc_feature 13: n = A,T,C or G
ccgggcccccccntcggaagtcttctagaattaattaacgcgggtcctctcccccaacccctttatttatttatttttacctttttttctcttctttttttttaattcaaagaagaaacgctgagatttcccctcctccctccttagatcagatttctccaccgcatgccattgaagcttctcggggttaagaattgtgcctgtcatt

SEQ ID NO: 52902 - DNA, 608 bp, Homo sapiens
cgggcccccccctcgaggtacttctagaattaattaacgcgggcagatgcattacctattaataaggcaagaatttttactatgtgtgaataaaacttcaataacagtggttgaaacaagagagtggggtgtttcttgctcaggtaaaactcagatataggaattcaaggacatctcatggctccacagccctctgggactcaagccacctccagctttgcattctgtcatccctaagatagtgccttgcgtttaggggtcagaattgaatttcaatcatcacatcaataatccaagccacaacatggaggaagggaagaggaattgacatgtgcccttcattttaggacatgttccagaaattgtggatactatttctatttatgtctctgtggtccacacttagtcacatggttgcttgtgtaaagcaaattggaaatttagccttaattctgggagaccatattcccagctaaaattctacgattcttttactaataaagaatgaaaaatagatattaagaattaactagcaggttttgttccagcaggctgactttcattattgaattgagctaattagatattctttaagcttctttcttgaa

SEQ ID NO: 52903 - DNA, 615 bp, Homo sapiens
  misc_feature 28: n = A,T,C or G
cgggcccccccctcggggtacttctagnattaattaacgcgggggaatacaactgtgttttaagaattgccaggaatatttcttacgatgatgatgatcagtattctccatagtttcttcagagattaatctttcaaattatgagatataagaacatatttgtgaaatatttatcttccatttttaagttaaagccttctttgtatcttagaatttaaagtaaacttaaagtaaaacctagcaatgtcctagcaatataatgtcttcctctgctaagccctgagcagatccaaccacgttgtaattcaaacttacaacaattttccacttgtaccataccttccctccccattttgtcctttggataacctcataatgacttttactgtatttatgcaagatctttccaattagcccactggaactctcaaacagaagagaaacagaaaagaatgaaaagaggaaagaagaaaaacgatgatctggggtagcgtttaactagcaggagcttttcacactgtcgggccacagaaacatagaaagtcagaaggtcctagagttctcgtaatccagtcccataatatttacagatgtgtttactttggcatatgcaaa

SEQ ID NO: 52904 - DNA, 536 bp, Homo sapiens
acttctagaattaattaacgcgggggaacttcatattgaaatgtaattatataataaatgcagataatgtgtagaaaaatatgtatctgtgtactgccctcttacatatctaaatatccagaacaacactgtcttaattgtgctctcacaactatatggtcttagagagtcaagttaaataaatttgagaaaactgcattcttaaagattcactattcatttttccataagagctatgagatgtttgtaccaaatatagcaataatttgtttaaagcataatatctttgttcataataaacttttattatgtaggcctaaaaagtttattgtttcctagaagactatgttaagatgtctctgcaacaaaggtctgtaacggattagtgtttctgacttttcttctaccataatatacattaatttaattttcatgatccttagaaaaatctattttatgcaactgttattttaaattatgtgtgggatatatttaataaatgataagattgtgttcatttaaaaatttatataaaa

SEQ ID NO: 52905 - DNA, 573 bp, Homo sapiens
acttctagaattaattaacgcgggggggcagggagggtggcaggcaacaattgcgtttccaaaatgatgtgggttgggagactacccatggtccttcccctcatcagtttcattgagattggtcacacccctggatatcagccacttaatttctctggccagtctgaatttaaatggctaaacatttcttccctagcctgcggggtcagtagttagtaatcacggcaggtatgcatgactctcaccaattatgagtataattaaatgggaagatccttgcaagcattgagcactgggcctcgcgcagccagggctgttagctgctgctcttatgattgaggccagctgccacccggtccgtgaaaatacttttgatctgggctgattcaagagacctggattccaatccttgagttaatttgaaaaataattcccctgcctcctgctggtttcagtttccccctgtgtcaagttgagggggagagacttcctggtatctaaggtcacagccaggcggtgccccagagcgcagtggttaccgatccagactccagtccaccacttcctggctgt

SEQ ID NO: 52906 - DNA, 626 bp, Homo sapiens
cgggccccccctcgaaatacttctagaattaattaacgccgggttgctagggaaatgaagtattgaacagccacacataaagatgcttgttcatactgcaaccagtgggaagtactggaaatttttcaagttctaaaagttagaaaggaacccattaatccatatactagccatctctaagtgcaatctaagaatgcttgaaaaaaatactgtgtagtttaagttctgtttgggaagtaaggcagaataaactatattaagattatttttctgaaataaacagaagaaagactactcatttgacttcagggaagagcattcttatgtgcttaagttttgttataacaagaatagagtagtagcttaagcaaaaataaagtacctagatttaatggttagaattcttttttttttttaaggataaaaattttatgattatctcaatagattcaaaaaaatcattcaacaaaattcaacattcttttatgatttaaaattctcaataaattactaacataaggcatataccttaatatagtaaaggccatatacaacaaatcgatagctaacattataatcaacggtgaaaagcctaaaacattccatcaaagaccaccaacaaaaca

SEQ ID NO: 52907 - DNA, 382 bp, Homo sapiens
ccgggccccccctcgaaagtcttctagaattaattaacgcgggctactcctgtctacccagcagatcacattaaaaaactgggggtcatccttcagtcttgtattttttctaccctcaatattgaatccctcaaaaagcattttggccttctgacctctcctaaccattgccacatctaccaccaccacatcagtagacattgtgaacttctccctgaattaaagaaatatattctccctcatgtcactgtttcaaaacccatgtctctaaccagtctccttattcaataggcaacagcaaaactcttcttctaaagtcatgctatatcactcccatgccttttatcttccaatgacttctcatcccaaaaaaaaaaaaaaa

SEQ ID NO: 52908 - DNA, 604 bp, Homo sapiens
  misc_feature 16, 33, 560: n = A,T,C or G
gtaccgggcccccccnctcggggtacttctagnattaattaaccgggacggagtgagagcctagttagccatgcagaagaaagctttgcccaagacttttgctttgtggcactttatccagaattgaagtagtttttggaatcataatcatgaaaagatataatttcaacagctgaaaacgttatctttttataatgatcaggaaaggaaaatgttaatgaaaacaccaatgttacaaaattagaaatggattttttatcatctctgatttggggtttcttgtgcttctgaaacaattagggttctctgaaagtaacagttatagtgtggagcttactctgaaatatttgcaaattcaacctcaaagcttacattgtggataattcaacattaactttcagattttggcaggggaagcagaaggctctgccgtgaaatttctgatatttaattgaatccaggaagtatgccattttagaactaattaaatatgaaatctcttgggttttaatctttaatctaaatctttactgggatatctagactttggaatgtcctgnggtgttattttgctttttactttgaggacctgcaccactctgat

SEQ ID NO: 52909 - DNA, 607 bp, Homo sapiens
  misc_feature 89, 551, 573: n = A,T,C or G
gggtaccgggcccccccctcgaaagtcttctagaattaattaacgcggggtgatatgtgataatataaagatgttaaaacatgttggtntgaaaaaaattacacaaaggacgtacgtatcttattaaatattccgttcatttatttctccaaatttcccagtaaacaaaggcaatataaaaagcctactatttttggccaggcgcggtggctcacgcctgtaatcccagcaccttgggggggccaaggcagacagatcaccaggtcaggaattcgagaccagtctggcaaatatggtgaaaccccgtctctgctacaaatagataaatcagctgagcatactggtgcgcgcctgtaaatcccaggtactcaggaggctgaggcgggagaatcgcttgaacctgggagacagaggtttcagcgagctgagttcgagccactgaactccaggctggcgacagagcaagactctgtctcaaaaaataaataaataaaaaaataaataaaaataaataaataaaaagcatactatttttatataaacaaacctangaaatatattagtaagccattntattttaaatgtaaaagctaataactgattattg

SEQ ID NO: 52910 - DNA, 556 bp, Homo sapiens
  misc_feature 37: n = A,T,C or G
ctgggtaccgggcccccccctcggagatacttctagnattaattaacgcgggggtaagcttttttacaagtaaataaaaaaattttggacatgtttaggaaaaaaaaacactgtaattctacagaattgttttcctttagtgcaaaatgtttcctttagtgcaagaagtttcaagaatctccttgctttcctttaagctaattcacataagccgtgagttcatgttaagaagtataaagtcatttcccctagccagttgtggtggctcacgtctgtaatctcggcactttgggaggccaagataggagaatggcttgaactcaggagttcaagaccagcctgggcaacatggcaaaaccctgtctctacaaaaaatacaaaacttagccaggtgtagtggcgcacacctgtagtcccagctactccgggggtctgaggtgggaggataacttgagcctgggacagagagtctgcagtgagccattattgttcatgccactgcactccagcctgggtgacacagcgagaccctgtcgcaaaaaaaaaaaaaaaaaaa

SEQ ID NO: 52911 - DNA, 378 bp, Homo sapiens
ccccccctcggaatacttctagaattaattaacgcggggtggcgcagatttaagaagaaatgattatagggtttagggttatgtgaaacagaacctcctctaccttccttatgaatctaagataaaccctacttggctttatgcttttcaagcaaatggatttttcctgatggagctgaaacatccccaaatctattcctcttctagtctcctatattttcttcaaaatttgaaaagaagaaaacactagatccgctgcatacaaatatcacttctgaataattttcctaatacaaaagtatgttacatgcatttctttcaagacttcgtttttgaacaatgtttcttaaaaaaaataagaatccctactgaaaaaac

SEQ ID NO: 52912 - DNA, 617 bp, Homo sapiens
cgggccccccctcgaaagtcttctagaattaattaacgcgggtctggactatgttttctcccacacttgggcaggtgagataatcttaatgcagttttatcagccttaactcttgaattcttggctgctaaacttaaaaaaacaaaacaaaacaaaacaaaacaaaaacctcaaagaagcataaaccccaaattttccataccaaagagcagcaggctcttattggaaacctttatctcttttgtggtggtgcttgtctcatattctgtaacagaatggtgagaaaatcaggtatatgaggagaaaatgctgcgaagacagaaatttaaaactaactggctgataacaatgaagcaatacacatatgttcttttcatcctctttctttagcaaatatgttgagaaggaaaaatgtcttacttaaaacaacctttcacatcttcatccttggaaactcaaattgactttacaatattggatacagaactggttttgtttttagtttttgattaagttcttaagaaatgcctctcaagatggactaaaatacaaaacaaggaaaattaaaaggtacatctaggaaagtggaacacaaaccagggttcatctccaactag

SEQ ID NO: 52913 - DNA, 514 bp, Homo sapiens
  misc_feature 27, 40, 56: n = A,T,C or G
agactgggtaccgcggccccccctcgngggtacttctagnattaattaacgcgggnggagagagagaggcagcaggcatacagacatgatttcattttcataagcaaaagagacttaagtaagaatcattactctttttactgaagtaaaaagtcttttagattttgattcaacaaattgattcctggtctaggctccactactatataatagctcatacagagcatgtatgtatgtatgtgtggacctcagtttccctcaactgaccagagtacattgcttgtctccaaatgttcattaaatatcctgcaaagccttgaactcatcaattctgctaacattttattgtatcctggctaaagttaactcaactctggcagcaaggaaaccaactcagatgggagcagatggctttcatatacgttatttgctctgttgtcagtttgaattcttgctgtttgtatttgtttagttctaaagccttccccaaccccacctgaaaaaaaaaaaaaaa

SEQ ID NO: 52914 - DNA, 622 bp, Homo sapiens
cgggcccccccctcgaaatacttctagaattaattaacgcgggctacataaaatacttcttattctttgaaggagacaaagataattgaatctagatttggctagaacttaaagaaaaatgttcataaaattgttaacaatggcaattcttgtgttgtgcttgaccaaaacttcagaaatgattaaaagggccagatgactaacatgccagaaataaaaataatccaaaatcatgcttgctttagcacaattttgtggcagcaatgtgtccaaaagagacattagtgagcatggcaatagtagctgtcaagtaggaaagattttctttgggtcttctactgtcctgatttgtccaagaaaggcaggtgcatactataagtggttggtgctttgctatacaaacaaaataaaacaaaaaaaatagccctattttgtccttcttataccacaggccctactgtaattcaaagaacaatactaagtaaatcatagtatggatagatatattcaagcctcaaaatgaacctaagaaacatttaaaaaaccaatggcctagaatacttcatgaaccttttgccacttctcttcaaggaagacaggtgatttaaaaaaaaaaaaaaaa

SEQ ID NO: 52915 - DNA, 564 bp, Homo sapiens
  misc_feature 32, 544: n = A,T,C or G
taccgggcccccccctcggaaatacttctagnattaattaacgcgggataccttcctctcatatatatgtgagtcaatcacgaatgaaaatactccagttgattttcaatggcagcccttgcttttagaagctgaatcaagggaatctcagagcttgtgaataacttacaggtgatctacattttttaaaaaaaatatttcctatccaattccacacaaatagttgtcaatgtgacagcctagccctcctatcatatttctctttgctttttgtgagagatggattctgctcttgagccaataagttattaaacaaatatggaaaaaaaaacatagtcacaaagtgttctccaaatacaaaatgcatgattgatttatacagtgcctctcactatcacaagtctatgagaagtaacacattgaaatatgacacagaataaaattcactctttgtgaaaaaattttggtgattgtaaaaaatgtgtgaaatagccacacttgaaaaacagcacatgtcaaaataatggttatcactgcatcctgnggaaaaaaaaaaaaaagcgg

SEQ ID NO: 52916 - DNA, 460 bp, Homo sapiens
ccgggccccccctcggaagtcttctagaattaattaacgcggggtgggggggcattaaaagtttatcttcagattatcagtaagatgattcataaaataaagagtaattacacatttttggccttgtaaatggaaagaagatagcattcccactcatttgttaaaataatttccaaacatgatgaaaatgctctttgcttctataaaaagccattctctaaacaaaatacctgagcaattttacaaatttcaagttatgtttcttttgattccaagccactatcaaataagatgttttctatcctactgcttttttttttttttttttgagacagagtctcgctctgtcacccaggctggagtgcggtggcgcgatctcggctcactgcaagctctgcctcccgggttcactccattcttctgcctcagcctccccggcagctgggactacaggcgcata

SEQ ID NO: 52917 - DNA, 606 bp, Homo sapiens
  misc_feature 7, 23, 40, 545: n = A,T,C or G
gactggngtaccgggcccccccnctcggggtacttctagnattaattaacgcgggttaccttacttgtgcttataccttctttgtaaaatgcctatctctcagggatgctttgtaaattagtgaactcaatatgagcaaagcactaggacatttcaaatactgtaagtgtgatagtttattttcttcttacatattaatcataacaaagaagggaaaaatatagcactcatgagcactttattgaaaaatttcacaggaagtttcctctttatatttattttttagaccaatattttcaatactatttctaaattgctattctacatcctttaaatattacagtgtataatgttggttaatctgataaactgattcatgtcaaaatggcatagctgctacttgtctcaggtagcatatttgcattttaactagaaccttcacaatatgcagtcatcaatattacagaaaaacctgccagcgtgtggcttacggctgtaataccagcactttgggaggccgaggcaggtggatcacctgaggtcangagttcgagaccagcctggccaacatggagaaatcccatctctaccaaaaaaaaaaaaaag

SEQ ID NO: 52918 - DNA, 586 bp, Homo sapiens
cgggcccccccctcggaagtcttctagaattaattaacgcgggagacgtgtgaattttagtgtggacggttgtctgagctgttggtgggccagccttctgatatttggcctggagcttcaaagaatgatagggttagtgatagatgctatttaaagctttgcaactcactatggaagatggattgtgtgaggcccttgccagagggttgtaaattacgtatgccagagagtgaggagggcctcagcctccagagcagtagaaatggactggagggagaggatggggaaagagtcaaggcatgttttaggtaaaagtggcaagtcaggtgggaggtgtgaggaagaaggaagagtcagggttactcagaagacactggtgccatgggctaagacggggctacaagagagcaggtttggaggggaaagtgagcttaattcagtacatctggagtttttgaggaatctgaaatatccaagtggatatgaagcatcagaatattttgtcatgcctgaaggaaccttacttgagtggatttgtctaagtaagcaagaaattgtctagtgaatggttaatctgtaactggga

SEQ ID NO: 52919 - DNA, 571 bp, Homo sapiens
cccccctcggaagtcttctagaattaattaacgcgggggtactttaagcttcaaaagacatttttataattaagtgtttgaaccaacttttataatataactctgaaatgcccaattattttactgacactttggaccagttatcataaagattgccaggatgtgtcctgtctgctctagatctctgcttttatttgatcttcatttagttataatatataattatcctacttttctatcttaaataagcaagatttgcagtaaaagctctttttaaaagatttcttggcaggctgaaaattcagagtcagctcatcactattaatatatagagttttacatttaataacgttaatgttcttctctgtgctcaactatgataagagccgattaaaatgtgcttaacaatacacacgctttatgtttcccgtcttagttatctaggtctactggaaacccagctaaaggaatttatccaaattgtagatataatttatataaagaaataagtatttgaaagctagtttagggaacttaaactaagaaagggaagttagatgccacattttac

SEQ ID NO: 52920 - DNA, 477 bp, Homo sapiens
  misc_feature 15, 28, 447: n = A,T,C or G
cgggcccccccctcnaggtacttctagnattaattaacgcgggatctttcagtactctaatttttaagggtttagttcatatttaccctgagaaaaaaatgtagacacatcagctatattaataaaatgtaagtgttagcaaaccaaaaggattacagcagactaaaaattcctgctgcttaattataaagatgcaatacaattagctctggtttcttccaagtttaatttagtttatccccttaggagtgatccattcactgtttaatttagttgtaacttattgtaataaatattttccaaaaatcaaattgtgatacgctgaagacatgcatcagaaattttagatttctctataaaaatgctttgttttattgtattaataatactgagaaaaatttaacttcctaaagcaattctacttaagaatgtcattaaaaatacttncaggtttggatgccaacaaaccaaattgag

SEQ ID NO: 52921 - DNA, 571 bp, Homo sapiens
cccccctcggaagtcttctagaattaattaacgcgggctgttcatatcattcacccactttttgatggggttgaattttcttgtaaatttgtttaagttatttgtagattctggatattagccctttgtcagataggtagattgtaaaaattttctcccattctgtagtttgcctgttcactctgatggtagtttcttttgctgtgcagaggctctttagtttaattagatctcatttgtcaatttcgaaaggcttctcttcttttagcacagatcttattttcatgaacatggtaaataattaaatatcatgtaaatatactattccatcatttgctttggaaattctgtttaaatgaattccaaattcttcagagagagtgtactttaatctttattgtttcaaatcagttgttcctattgctgttttgttcttataatgcaacctagaaagatccaatctttgcacaagtcattttattcgttggataaaaggtgagtacctagcatatcgatgcaaaatatattttgtacctagcatatcagtacaaaatatgttcaatagagtgtc

SEQ ID NO: 52922 - DNA, 540 bp, Homo sapiens
ccgggccccccctcgaaagtcttctagaattaattaacgcgggacactgacatacatctagtatgcatacattcactatattgggctttttaaaattgcttctttagacaatatatttttctaattaatttaaccttcctacctatatatttcacagggatcttctgggtttgttgctgttctttccaaagtatttccttcaagaatattttcacagaagatttcttttcagtctcgtgtgcatgaatatcttggataggccatgttatttacatgatattttgaccaatatgtacatttttgatgcttaatacatgcattagattggttaaaattaaaatataggtgaccacatggttttagctatttcctaaattgatggtgaggccatggggcaactggaaatctactgcattgctagtggaaatgcaaaatggtaaaaacactttagaaaaaatttggaagctcttaaaaaattaaacatccccatgccatattactcagacatcccattcctacttacccaaaaaaaaaaaaaaa

SEQ ID NO: 52923 - DNA, 560 bp, Homo sapiens
  misc_feature 12: n = A,T,C or G
cgggcccccccntcggggtacttctagaattaattaacgcggggagccattatgttttcatatgtagtttccacctcctttttttctctcacatcaaatcaattaattgaactactgactacattagtttttcaaaatgttcttaattcatatatggcagctgagttagtttgcagtttctttaactaccatcttgaataatggtggttgatttgaaccacatattatatctaatagaatagcattagaagtggatgagattcgaagcatttttactttctctcccttctgtgaacgcttactataggtagtaggacttataggaagggatgtagggaggacttatcctatagtataccctttatatatagattttaattttcatctttttctcactggcttaaacattttgctaggtattatttaatttttgagagataaatgctagatattaggtgtgaatgaaagattctactaaatggttttatttaatttgctgttcaaagaatgtaatgtttttcagtatcttatccctctcattttgccaaaaaaaaaaaaaa

SEQ ID NO: 52924 - DNA, 431 bp, Homo sapiens
  misc_feature 26, 39: n = A,T,C or G
actggggtaccgggcccccccctcgnaaatacttctagnattaattaacgcgggtctataattatatatttgcaaaactgctaacctgatatatttgtcattaaaacaaggaaagagtatctattttctcatacctttttatccagaaaactgtctttataattttgtcagtgaagggaactacactgtaatctatctgaatttaaccttgtctattcaaagctacaaaacaagagacatcacaaaaataacaaatcaatttgatgtgtccgttgatcctatctcttttcctatggtaataaagcagactcatgagtcaggaagcccagaggaaaagtccacacttcaaactgtttagcatgttggttttactttgtaaagatagacaaaaggtggccattttacctcttcacatgccaaaaaaaaaaaaa

SEQ ID NO: 52925 - DNA, 606 bp, Homo sapiens
cgggcccccccctcggaatacttctagaattaattaacgcgggattttgtttcacatagattatattatttaaaatcttacaaaatgtattagttatctaaacataaaaaacattaaaaatcaatttaatgccatcttgctaactaataaagaaaaatcaatctgtaagggagtaaatcgctaagaaaatgccctctttgacatgatttgtgattgaggaagtgtatagaggatatgtggtatttctcgtttataatgatttcaattaattcaaataacttttgaaaggaaattattagtgtaattttgggattatacatcaaattccatacttggaagtgttggaagtattatttttattacaaagttagtttttatattttttaaaaaacacctcctttcattatcaaatgtatctgaagaaaaaaataggatgctgaaatcttaaaattagaaaaagcattttatttgagtcagtttacttatttttcttgccgttttctctatgtatgtataatataaccatactcataggtgtgtatagatgaggctaatgctaagacaggagctaaaataacaagactcaaaccgcagttattggcccat

SEQ ID NO: 52926 - DNA, 510 bp, Homo sapiens
  misc_feature 17, 490: n = A,T,C or G
cgggcccccccctcggnagtcttctagaattaattaacgcgggaagtctttgaagattataggagataatgagttaaaattgccccaggaggaaagctgaagttttcttctgaattctcagggatgatatttaatagttaatattcagtttctagtgaatatttccctgtatcattaaactgccttctgatttagtaaaagtcagataacaaagaaccattacactaaatctggagaattatatactgaattaatattatcctttacaagaaaatgtggaaatgcctatattgaaagtaagacttttgggttttatttttaaatttgtgggtaagattttcaatctgtgaatacatacttgatattccctttgttactagctatttctaccactaaaaataattccttcttcaaaatatgtaatttggcttatggaagaatgttgctcatcttctctaggaagatggctcgattccccatccttcctctngtctccattctactcacatt

SEQ ID NO: 52927 - DNA, 505 bp, Homo sapiens
gggccccccctcggaagtcttctagaattaattaacgcgggatggtatatgtattatagtaaaatactttttaaaatgtataaatggtttatttttagaagttgtagaaatagcaatgtaaatggaatatgatttgtttcccctcttatctgcttgaaaatataatctgtgtcctttgtaatatcatcaaaagtcttgttctaggtcaatttgctaaaaatatatatgttctatgatcagttcactaaatgtctagatgacaaaaaaaagtagacaaaaatctatacctagatttaacagagttaaccacaggaattttgctataaaagaggaatgggatacagacaaattcagacacagaaatgtaaaaatagagaaaatagtaaaatatttttaagagaaaccattgggagatatacctaatgctagatgatgagttagtgggtgcagcgcaccagcacggcacatgtatacatatgtaactaacctgcacaatgtgcacatg

SEQ ID NO: 52928 - DNA, 413 bp, Homo sapiens
cgggccccccctcgaaagtcttctagaattaattaacgcgggaccataagaagaaaatactgatccatttaacttaataaacgtaagcatatttgaaaaaaaaaaaaaaaaaggacttgcgaaagtaaaaagcaagtcagagactggggaaatttatctgtaacacatataaccaaactagattggcatttagaatagattgaagcttcccagagaaagacatcccaagagaaaattggaaagaaaagaataggcatttcatataagtgatagttcattcaaatggctacaagaatgtaatgcagcagagccctcaggaaatgttggtgagtaagtaattttgtgtaactaatttggagggtagtttagcaatgtacagtaaagcagttttactccttgatattgatatttta

SEQ ID NO: 52929 - DNA, 556 bp, Homo sapiens
ggccccccctcgaaatacttctagaattaattaacgcggggtgtcacaataaactgtatttttaatccaaatgcaaatattacaattttcaatattcttttatattttctctgccttcctttggacttaccagagtgtacaatacatagcaaactctactaaatagctcaaatgatagaaacatcaatgttcaaatgttttttgtttgaaagaaaattacagagatcatctaatgcaactcccttaattttcacatgattgtctaaaggtctggaaagtagaaataacttgtagagagccatacagtcagttaatagaagagctccgtcttacagctagaatgtggtatcctgatcttaaagcaagtgttagctgatgtataatgttttccttcatcacaacacaaatgctctcatatgatgtgtttattttaccatagttgtttaacagagaaaatgagacatttcaaatcaaaagactttaatttgcctcttcaatgataatatccttttatacaagtctctgaatatgtcagaggaaagtttctgctagtaaa

SEQ ID NO: 52930 - DNA, 523 bp, Homo sapiens
  misc_feature 28: n = A,T,C or G
cgggcccccccctcggggtacttctagnattaattaacgcggggtatcaaatttctttctgattttgtgttgcttgaagaacaagacaggattaaaaaacaggcaagaaaataggagatggctaaacattaactctatgtaagccattctgtcctcatttttaatcagtgaatgctcttaagcttgatcatatattgcagaaaatgttttttaaagggactatgactgttttctaggtagaggcatcatactaggtattttatgtgttatttaaatatctccatgactcatttaggcaaaaactatcatgtttcctattttacaaatgaattcataggctaaaaatgtttattggtggtttccaaaattggactgctagcaactcatggaaaaaaatggacattcctggacccccctctggagggtaagattttgaagttctggggtatagatctgattatctttagagttaagtagtttccccatttgattctaataaacaccttgatttggaggtcacact

SEQ ID NO: 52931 - DNA, 630 bp, Homo sapiens
  misc_feature 38, 376: n = A,T,C or G
actggggtaccgggcccccccctcggaatacttctagnattaattaacgcgggagaaaaaactaaaatataattagaagtgcattgttaggccgggcgcagtagctcacacctgtaatcccagcactttgggaggccaagacgggcaggtcacaaggtcaggagatcgagaccatcctggctatcacggtgaaaccccatctctactaaaaaaatacaaaaaaaattagctgcgtgtggtggcgggtgcctgtaatcccagctactcgggaggctgaggcaggagaatggcatgaacctgggcggtggaggttgcagtgagccgagattgtgccactgcattccagcctgggtgacagagcaagactccatctcanaaaaaaaaaaaaaaaaaaaaaggaaagaaaagaagtgaattgttaaattaataaatatatcaaacatataaaataactttccttacactctttacaattatgatagtaagaatgaactaacactttatactttcacctgagaaatgacagagcttcagaatttgatttctttaactgtagagtattaatgaaatccaagatggtattttgaatgaaagaaccaacaggaagaaaaagccattttggtgacagtc

SEQ ID NO: 52932 - DNA, 400 bp, Homo sapiens
taacgcgggggaaaaaaaaaaaaaaaaagaaaaaaaaaaaaaaaaaaaaaaaaaaaaaaaaaaaaaaaaaaaaaaaaaaaaaaaaaaaaaccaggggggggccccccccggccctttccggtattgttttttctcgccctttttgttccgccgttttcctatcgccgggtttgggaaatcccttggggttggccccccctccctcgcctggggccttttcccccttccccctttggccttttttcccccggggcccgccccgatccccctccccccctggggcccaccccgatgggggaagggaatttgtagggggggggttttggtccccatttgcccctattttttgttaataaaattcttttttaaccccttggccctaatccggggggcccccttt

SEQ ID NO: 52933 - DNA, 567 bp, Homo sapiens
  misc_feature 23, 497, 520: n = A,T,C or G
ccccccctcggggtacttctagnattaattaacgcgggcttagccaagcatattaggaatatagaaaatttatcagtaatggttcttccctcagcatttatagaagaaattcttgaaaaggcaaaattcaactgttagagacaattatagcacaatagagaggctttagagcatatcttaaaataatttaaatatatgcattaaaagctactctttccgaaaaaagtgattacacttatcttgcacgtagatgtatgggtatgaaaactaggttgccccttgtttattgggctgaacttgctccttttgataattactaaagtatgtcatttatttatattcattttctctaatgatgtacagcatattctctgtgttagtatatctcgcacctaaacaaattaagcatgggtgggcacggtggctcgcgtctgttagctctttgggaggctaaggtgggcagatcacttgagcccacgagtttgagaccagcctgngcaacatggcaaaaccttgtctncacaaaaaatataaaaattagacagctgtggtggtgcacacctatag

SEQ ID NO: 52934 - DNA, 547 bp, Homo sapiens
  misc_feature 24: n = A,T,C or G
gccccccctcggaatacttctagnattaattaacgcgggattgccatttctgatggctagcaaaaacaaggatatgtgagtcttcttttctgtgttccagtgtccaactaccagactcttgtgtgccaagaggtagatgcatcaacaacagaggcaacagcagcttctcaattcctggttccttatcactgggttacaattgtcagtaacttctccagctttccagatttcaagaagaagtggcagggtggcagcatactgatttcactttcttcaattcatagttctacaacagatccaaaagaaatagctagactgggcacagtggctcatgcctgtaatccttcctagcacttcaggaagcaaaggcaggaggatcacttgaggccaggcattcgagaccagcctgggcaacataacgagatcccatctctactttttttaataaaaagagcttatctggcggttgattctgtatagttctcagattcatttctggcggccaaacctagaactcactccttcagcttctcaattattttgtaag

SEQ ID NO: 52935 - DNA, 581 bp, Homo sapiens
  misc_feature 521: n = A,T,C or G
cccccctcggaagtcttctagaattaattaacgcgggctatgttcacaagtgatatgaaatttgagaatattggcagaggtatttttcagtcactgtcatataccctattccttatctccagtcaacattgcacctgcttactggacaaagagcactgagtaatgaggaaggaaaactagatatcgcttctcgtcaatgtggtgctatgcaattcacaaagatccttcacatccatgatcttatttagaccccaccataaaccatgtgttggaaattttgttctcgctttacaaataaggaagctaaagtttaatgaagttaaacgaccaactcatttggtgtgatatttccatcacaccaaaaagaaatcattgaaatcattctacagtggtgagtaaatagctattggcctcagactcccaaagaacctcctatccatagcctctcaatcgcccctgcaacctggaattccccatggtctgactaaagatacccagcccactcagcagagacttttcangaccccacaccagtaataagcagcctcgttctgaatgggtggcacctttgccacacctga

SEQ ID NO: 52936 - DNA, 298 bp, Homo sapiens
  misc_feature 28: n = A,T,C or G
cgggcccccccctcggaagtcttctagnattaattaacgcgggatcacctaatatacatatgtagtattatatatggtttctggttatttcacattattcatgagtttatatcaatttaaaacagttctggaatttaaaatccaaagataatcagaagtcagattttatcttaaggctaatgcattttattacacttttaaaatataattggtgtatcaataatgaggcatttccttttctctcattaccatgattttctggggtctgtatttccaaagccctaaaaaaaaaaaaaaa

SEQ ID NO: 52937 - DNA, 592 bp, Homo sapiens
cgggcccccccctcgaaatacttctagaattaattaacgcgggactagctgtgtgacctaagggaaatttctgacccctttgtggctcattttatcatctctcaaatgggaagggttactataattactgccacactgcatagctgtgaggaataagtgattgaatacatatataacccttactgcttaataaatattagccattaatgttgggttaaacaaaatgaaattgtcattttgaaagtcagaaactcaaatattgaaatttcatatgattcaatttcagatctgtcagtgcataaatcttgtggcattttcctgtttcccaaattcagcctcacctgtagtaactccatctgctctaccttggttgatataaacaggtgccacaagtcatctgagagtatggattggctaaaaattactatatggtaattcttgaaataaaatttcaaacttctgtttggctttcctcataacctctgacatcctttcaattgtggaagtggaatgatcttatttattttcattgcaaaatgacaaaaataccctggtaatttttccagaaatatgcgctttgtttaaacagagt

SEQ ID NO: 52938 - DNA, 557 bp, Homo sapiens
  misc_feature 43: n = A,T,C or G
gggccccccctcgaaagtcttctagaattaattaacgcggggnaagtataatatatccatagaaatataaaaaaattaatgcacatagaactgtatgtactaacagggatctcattttcttagcaccattgcttcatttcatctcctttcttcaaaatgattatcatatataatattattgactctatttctgacttgaaactttgtccattctttttccttattgtccctttctgacaaatatactctttaagtatggaagctttatgttttgatattcagtggtgccattcaccactattatcctctatttttctaaatgtactgaaatattttcagttgtttctttattattataaattttaaagttgatttgccaagctttaacacttaaaatagggtttttagtttgtttttaataaatttataaattggtttttggtgaattagcatggttatactattaaatgtttccatataaaaaatatgtcggccaggcacagtggctcacccctataatcccagcactttgagaagccgagttgggcagattcctg

SEQ ID NO: 52939 - DNA, 479 bp, Homo sapiens
  misc_feature 28: n = A,T,C or G
cgggcccccccctcggggatcttctagnattaattaacgcgggaggtatgcagaactgcaaatagttttaggaatatggattccttaatttttatgtgattttaaaaaattattgagtaaaaacatccaagcaatttgtaatggctttaatagttacagaataaaacagtgttggacattgcagttaatcattttctttgctatcaaagttacttgcagtacttttcctgactttcgatttttaattatttttcttttaacatttcatccatatcccaatgcatatccttctttatatgcatgtaaatgtacatgtgtttctttcaacaaccccaggtaatgtgaactttatactgaatgtaatagtctagagggaaataatctctgcttaattgacagcgagagacttagggaggatgagaaataggaaaaggagaaggatgaggaaagagggaaagaggcaagaggaagagagagaa

SEQ ID NO: 52940 - DNA, 541 bp, Homo sapiens
  misc_feature 18, 31: n = A,T,C or G
taccgggccccccctcgngaatacttctagnattaattaacgcgggctggaaacaactctaaaacttatcttaaaaaaacaagtaaactgttataaattggcaagctgaaagattaccagaatttaaaatgaatgagatataactacaaactatacgatgcatcttaataatagattgacttaaatcaaaagtaaacaaaactaaaagtgggaatcttaagaaatagaaatgacaaataacataatttaagacaattattgggccaggcctgtaatcccagcactttgggagcccaaggcaggcagatcacaaggtcaagagattgagaccatcctggctgacatggtgaaaccctgtctctactgaaaatacaaaaattagctgggcgtggtggcgtgcgcctgtagtcccagctactctggaggctgaggcaggagaatggctggaacctaggaagcagaggttgcagtgagccgagatcactccactgcattccagcctggcgaaagagcgatactctgtctcaaaaaaaaaaaaaaa

SEQ ID NO: 52941 - DNA, 493 bp, Homo sapiens
ccgggccccccctcggaagtcttctagaattaattaacgccgggccctcacaatgacaagaagcaggccgctgccatcagttctggttattaaacttttctgtctgaaccttaaatgtagccattaatactgcgctttgtgattttggggactgggaccctgcaaatggcattgttcctttctcagccagctttcccatgggattttccagtgtgaggttctggaaagacatcgtggtgctagagagacacatgacctgcaatttcttttaagcttcctgttttgtagtctttgtcaccccaaaatttccttcattctttcagcataataatattctttcataaataccaagccacctaggcagaattttctcagtaatctgggtcccaccaacatggagctcttcctccaactctaccttaggagaatggattaaaaattgtagtaaatatgtacagcagaacactgctcagcaaccaaaaaaaaaaaaaaa

SEQ ID NO: 52942 - DNA, 486 bp, Homo sapiens
ccgggccccccctcggaagtcttctagaattaattaacgcgggaccagcatatttctccatgctcttattacactccattatagctgcatgcttactagcatgtgttccctcctataattccaagtgcataacatgtttcaaaggcaccaggagttaaccaggtgttgggaaacttgttttggaacctatccagcaattattttggctctaaagagtaatggtctacaaatttaaacatgaactcatgtttatttttttataacccttagtaatacactacttagggtctgccagtataggacacaactgtccatattataagaggcttgctatatattcataacttttgaatgtgtggcaggttatatttagtaacaaatgaccataacttaaagttaggaacaataccaggaagcacacggagaaaatctattaattatgcatttgtctaatataagcaatataccagaagaacttaaaaaaat

SEQ ID NO: 52943 - DNA, 306 bp, Homo sapiens
  misc_feature 36: n = A,T,C or G
tgggtaccgggcccccccctcggaggtacttctagnattaattaacgcgggtgagtgaatatgacagggcaagaccactgtgcattttgttttcgtgtctctagcccctttgttgtaaatgtcatcatgagattatcatattgtattctgataaagccattgacggcatgtcacagtttatgctttctgtgataaatgtaatggctgtttcctacctaacatattttctgttaagcaaagtggtaaaattgttccatattctgctttctcttagaatataagaaagcccgccaaaaaaaaaaaaaa

SEQ ID NO: 52944 - DNA, 580 bp, Homo sapiens
  misc_feature 18, 34: n = A,T,C or G
cctcggggtacttctagnattaattaacgcgggngagctttacaaagatagcttttaacaaaatataaattgaattattttcccaagggttaaggtactagttttaaaaagcatacaagtgagcagactaaatagaatgtaacagtatgtaaaaaggataagacatcatgaccaagtgaggtttattgtgggaacgcaaggttggtttcaactttgaaaatcaatcaatataattcatcataataagagaataaaggagcaaaaacataaggtcatttcaataggtgcagagtaacacttgaaaaaatttaacacttattcatgatttaaaaaaataactttcagcaaatttaaatagaaggaagcttcctcaatctgattaaaagtatatttgaaacacctacagctaatatcataatcaataatagtgaaaggatccttgctttctacctaagatcagacaaaataggcaataatgtctactctcaccacttctaatcaatattgtactggatttcctcatcagtccaataagcaaagggaaataaataaaatgcacacagtgtggaaagaagtgaca

SEQ ID NO: 52945 - DNA, 610 bp, Homo sapiens
ggccccccctcggaatacttctagaattaattaacgcgggccactgcactataaaccaccggaactaatgcctgctatctaattgtgattttgtacccattgacttactactaattatttctattactttagggcaaaaaaaaaatctatgtaggcatgattccaagattcatatatctctacttcccagggttaaaactgcttttagttcctactactacgttgaaaatgtttcaatgtaatgttatggggaaatttctcagaacaattacatttcatttacaccccaactagaagagtcaacccatttgaaaagtgtatattaaaaggttaaggaaaatattaaattaaaaaatatatttggcctcagacagattgtccctaaataaattacttaatattctgtaggaaagcctacttccaagcaagttatcccgaaagtcatggttcttggtaactccccaatcataagctgccatcctcacctgttctggattcacttccggtactgctcctgtctcctgtgagagttgtggcctctgaggaaagaaagagaagaatcaagaggtctaggaaatttaagatgctggtaaaaagtactgagttgcta

SEQ ID NO: 52946 - DNA, 609 bp, Homo sapiens
  misc_feature 26: n = A,T,C or G
gggccccccctcggaagtcttctagnattaattaacgcgggaagtttaaagaatgtatttctaagtagaatcttttgaaacagtaccactcataaaaagagcagatgctgtaacactacgaaaaaaccaaagtcacatttttgaactgcctcagtgaaatgatattttaatatgagagcaacaataaaattaaacagcattcaggtttagctcttttagtcgcggggacttgctgccaagtgaatcagtatagaaaaccacagaaggcatatctttcactggcagtatatctcacacaggattattttggaaaccaaatggaataattcctctgaaagaaccttgcaaactgtgaaattgtacaaatgtatttataattatttttgacattttctgggtagttttgtaaagagaatctaagtgtagttatacttctcatttagaaacatgataaatggcggtacttttttttcaagttactgttcacaggctggagtagcatctttaaatctcccaagcacagctctcagctcaatttctgcttcaattttgcctgattgaatttatttcttatagatgcacttactaccagatttctaacctgttttt

SEQ ID NO: 52947 - DNA, 493 bp, Homo sapiens
  misc_feature 19, 32: n = A,T,C or G
taccgggcccccccctcgngaatacttctagnattaattaacgcgggctgagaaagtcggtgtaatgtttctgttctctgttgcattcttaatcacattttatctgctaccttaggttttgataaaaagataccaatcacaattatttcaagaaataattcccctgttacctgctagtgtatgggtaactcgcatatggtaactctctagaaaatatttgtcttcctattctgcttgcagttaagtttaaaaaatacatttaataatagaatcagataaataatactttgtgggttatccaaaattcatggtcatattttgtcaaatcttcaagattattttcacaagttgctaaatagctcttgtgttcaaaatgtactcaaaaatatcttttctttctttacaccttgcacaatctggtgaataaaggtgccctaacattagtaggcttgtagggcttctctctagcgctttattcctttgtgatgctctg

SEQ ID NO: 52948 - DNA, 322 bp, Homo sapiens
  misc_feature 27, 40: n = A,T,C or G
gactggggtaccgggcccccccctcgngggtacttctagnattaattaacgcggggtttattgttgttttgctttaagtagattatttacataatgtatgcagaggtggaaagttttgaatctatagggatattactattaaaatgaattaacagtcttacacaatggttatgagtttagccagtgttagcagaaaggctagagataaatccagtataattagtttagaagctaaagttaaagctaaactcagccccctctccatatgttttgggtttgtttttttagacggagtctcaaaaaaaaaaaaaaaaaaaaaaaa

SEQ ID NO: 52949 - DNA, 413 bp, Homo sapiens
  misc_feature 27, 390, 391: n = A,T,C or G
cgggccccccctcgaaagtcttctagnattaattaaagctaattcaaatatactttataaaataatcagaggttaaaacttatatttaaatttagtaattaattgatacatggctagtgttcctatataaatctttctgggttttaacttcagacagatacataaatatgtcagttatttgcacactgactgttccaaatctcaagtcctgaaaagtattaacctttgattcatcttgatttctgcaaagaatgtaaataactttagaaagaagacataccacactgatcaaaagttaataaattaactaaaattttttctaaccttaaagtaactgaattattacctattaaagataggaatcatgataaaaaaaataaatgaatgctnntctgcatccaaaaaaaaaaaaa

SEQ ID NO: 52950 - DNA, 395 bp, Homo sapiens
  misc_feature 16: n = A,T,C or G
ccgggccccccctcgngggtacttctagaattaattaacgcgggagcctcagttttttaaaactatactttttattatactttttatattataaaatgagatttattttatagttcatctccctcggaacttatctaaagggattcagttcttgagtacaaaaataataattacatgtactttttgtgctgtaagagatcccacacaatataccttaaggcaggataataataagactccagtgttaggaagtttgaccgcattatcctagtaatgagagatattaactagatcaatgtaatggattaaaaattaaacaggctaaagatatatttgtatgaaatgaccacattgttcaagctatgtatattttgcatgttgattagctgaatgat

SEQ ID NO: 52951 - DNA, 293 bp, Homo sapiens
  misc_feature 281, 282: n = A,T,C or G
cgggccccccctcggaagtcttctagaattaattaacgcgggctacctgaatctttgggaatgattcctaccagagactagaaactatgctgtaagaaactcaacccatgagaataaaccaagtacaggcactttgttagacagccctcgctgaactccaagacaacagccagccttaaccaacagtcatgcaacaagtcatcttgaacactcatttaggtcagccaagccttttagtaactccaggtgcagccaacaactgacttcaactgtatgagaannatccaataaaa

SEQ ID NO: 52952 - DNA, 576 bp, Homo sapiens
  misc_feature 28: n = A,T,C or G
cgggcccccccctcgaaagtcttctagnattaattaacgcgggccattggttaaaccattgaaattgggtttctgccacttgcagtcaaatgaatcctaaatgacacatacttcagaaggttgttttgaacataaaatgaacttactacagtgcccagcacaaaacatatagtgaatggtttgctattatcactatcataattattatcattgctactcattgccatagaccttagagagaggggcaagaacatgtagctatagcaatccttccaacctctgatagcatcagtacaaaaatatctgtgatctcttaagcacacacaaaaaagtcagttgctgatgttttgacaagtgcatctctgttagtggctaatgaagccagttcttcaaagcaccagatcccgagagcacaaagaaatgaaattccacctggctggcaggtcagggagcaagttctttcctgtagtgaagggtgcgcctggtttcctctctggacaggggatccatccatattgtatagtgcatttcctggaagtgctgtcttctctgaacgacaagcaaagcacaacacct

SEQ ID NO: 52953 - DNA, 358 bp, Homo sapiens
  misc_feature 309: n = A,T,C or G
attaattaacgcgggtattcactgacttcttaagtatgcattataaagctgagtgccttaagtgtcctctcttcaactttccctggggaaatcaatgtagaaaagctggagaagaaagctgactgataagtcctggacttgaagtttatcagcagttctccttacccatccgttatctctagtaggctattagatgttagctttgagaggattttattttattttcaagattttggatcatcttccctccaaacccctctgactttgcaaacaaaaagtaatagatctgggctatttctcaaaagcctntctattttaaacctgactccttttctgctgtttgacaccactaacccca

SEQ ID NO: 52954 - DNA, 610 bp, Homo sapiens
  misc_feature 17: n = A,T,C or G
cgggcccccccctcganagtcttctagaattaattaacgcgggactcctcctctccttggataaatgggcttcttagcctacaagaagaaagccatttacaagacaaaatactgagctgctttttctcattttcccttatctcttctattcctaactttctaaattaattcttctcttaaatcttattgttccttacagtgtaactcacagtaccattagagagagcagagagaaacagaagcaaagaaatgggtctatagagtataagttaattagggatctaagtgactggtgatgagatttgatgacacggagccccaaagtgaatttagaagcttatcttcttaaaatatttgagaataaaatacaaataatagaactccaagaaatattcagtatatcaagcaatctacgcaagcttaataactaaaccccatttcctgtttaactacatagtgcagcaccactgattgtatccatgtacggaatttgctaacctttatcttcagtgattttgcaggtaatttcatttttatagatgtgtgtacacacaaatactcagagagaaaggttagtgctttcctatggtttaccaagaacagatagatg

SEQ ID NO: 52955 - DNA, 627 bp, Homo sapiens
  misc_feature 23, 36: n = A,T,C or G
tgggtacccgggccttccctcgngggtacttctagnattaattaacgcgggtccagggtgtactctgaagctgataataaaatgccatacctttcactcagtatgtcataatcagaaagctctgtaaaaatacagatcttaaaatattatgtttatgaccactggggtatagaagccagggcataggcatgtagatagatattgtattggtcccttgaaagactactgtagttcttctcttatatattcacatcttgcacaagtggagtcaggttttattctgttttagattatgtaatttatgttccattgtgtaatgttatttccttacattattagtaaatccagtattttgaccaacctgtctttttgtcttttttaagttggttgtctgcctatctataaagccattcttccatctttagttcttatcaaatcagtcttttctatttgatgctgtttttaaatgattctttcctaattttctctagcttttctctgagccaataagtatctgatctaaaactcaatgaatgttccaatataaattggtgatattcttagatacacttaattttctggaagttaattcaatagttaactctttatttacagatattatctcag

SEQ ID NO: 52956 - DNA, 611 bp, Homo sapiens
cgggcccccccctcgaaagtcttctagaattaattaacgcgggggatttctgaatttcctttgcttcctttggcatttgttgacattcatgttagtttccctcagtttctcttttaaattccaggcttttctaaagtagctgaagatctttggctacctcttcatgtttaaggagggagtaataaaaaggctggtatatgtgctgcctaagtgaatgctaaaaaggctgatttaaatctctttatccatagtggaaactgtcaaccagagggcttcatatttaagtgaaagggtgggaagccagcttttatattatggggattttccacatgccagaaaaaggcaggctttactctcaggtataaatacctacatgccctttagagaactgtttgagttttttgcctggagagtaaaacacctggctataagcagatgagcataggggagaagggcatttggtcgataggaagatcttcaattattacaaatagccccacttcttaacttcttcctcagtttaccagcaatctctgagtcctctctggagttgtgctccatgaggctagataggacatttcagaaccaaatggaagttttaggactgataa

SEQ ID NO: 52957 - DNA, 632 bp, Homo sapiens
  misc_feature 36, 66: n = A,T,C or G
tgggtaccgggcccccccctcggaaatacttctagnattaattaacgcgggccaatcatacatgtngatccttctttcctgaaaaaaaatcacatattggtgacataatgcagcgacaccttccttatgtcatggtgttgataatccaatctttacttggtatcaaataatcccccctttatgtcaattttctgggtgatctgaatatttttgtagtttatataatacaactttccatcatttgtttagagctcaccgattagagtgctggttttctgagagatctcctatctcaatatataccaataaatcaattttttttgctatttgaaggattacctaaattaatttatatctagattcattgatctttctgctccagaaatttcctaaaaacctgtgaggtcagataatacctatttcaaaggctgttttaaatgttttattttatgcgataaggtgcaatcctagatactctaatcatttaaacaaatatatcaagtaatcattcattctgtgccagagcttggaaagtattggaagagttgataaaatagggaaatataaaggtgataaaaatgacagtgtcatatatagaataaaccattacttggccgggtgcagtggctcat

SEQ ID NO: 52958 - DNA, 602 bp, Homo sapiens
cccccctcggggtacttctagaattaattaacgcggggatgtctggacagtctttctctacttctaataaaagttttcctagctgattaatatagtattcccaagaaagcgtccctagaggttttgaaaataagaccttagaatagcatattaaatcttaaagaaaaaaaaagacaggaaaaaaggcagttcctttagtagatgttttaccatgggaatattattaataagaaatcaattaattttttaaaatgttgcttttgtaaggaaacagtttctatgcaaaattctgtatattttctagctgtttagttttatatgtagactacctaattttgcaaatattgtgctgagactgaactgttccactgtttacccaccagtcttgttaattttctagcatctttaaagacaaaataaaacataccaagaatgtcttcatttctctttctgttaaagcatcatcatttacttttttctgcttgactatcctaccatactgtacttcatatctttatttttctaacaataagatgtgaactttgtttcacatactagtttctagttttcattcattgttattagcacatgcaaatggaaat

SEQ ID NO: 52959 - DNA, 494 bp, Homo sapiens
  misc_feature 456: n = A,T,C or G
cccccctcgagggtacttctagaattaattaacgcgggtcgggaggttgaggaaggagagtcactcgaacccaggaggtggaggttgcagtgagctgagatcccaccactacactccagcctgggcaacagagcgagactctatctcaaaaagaaaaaaaaggaaaagaaaaagaagtaatttgacaatgctggtctagaggcttgattacattccagtttacgttgggttttttccccgaacatgtttggtaggcagtccagcatccctcctagcatatcagttctggcacagtatctatttgtcactgtcagtgatgtcaagattgataactggggtcaattttatgttgtgtatatttaccacaataataaaatgatggtcatataaagggctggtcatttggttcagctgctgcagcatgtcccatctgctgggaaagctcccatcagcctncacctgatcattttagcagccacagatgaaatgtccct

SEQ ID NO: 52960 - DNA, 337 bp, Homo sapiens
cgggccccccctcggaagtcttctagaattaattaacgcgggagatactctgttaaccacttctacaggtttataaggttcagaatattattccaatctctctgaactaactttggaccttaactaattgctagaaaattcttaggtcttcaaatatactattgctcattatgtacaacgttccacacttgtagaaatagtcagaaggcggctgggcggggtggctcacccctgtaatcccagcactttgggaggccgaggcgggtggatcacctgagtctgagacaagcctgacgaacattgaaaaaccgtatctctactaaaaatacaaaaatag

SEQ ID NO: 52961 - DNA, 605 bp, Homo sapiens
  misc_feature 32: n = A,T,C or G
gtaccgggcccccccctcggaatacttctagnattaattaacgcggggtaggctgagtatcttaacagtggcaacagcagaggtgtacagggtgtccccacactcacttccagaacttggtcatctcaatttaccagcggttcttatttaggttctcatagcccagaaaattctgccagggtactacacatagtgggctatttttagcactgggcctgcctcaggaaactggagaacttgaacactcattgacaaggaagtagaagacagcaaagacttaagagagaaagatgagatgctttatattttcctcctgtgattttatttggcagctcatcatccagttaggaaggtctaagagataacgaagatataaagtgctgagtagagagatacacacttgggaacaggaaagatagctggcagtgggaaggagtgtgaaacattttttacatggagaggaggaaaagctgtggaattgggttacttaaacatagagagggagttaagagcaaagaggctctttctggagaagttgatcaagacctgaagtgaaaatctgtaaaagtactgaaagagtggctaaaaaataattgggaatgact

SEQ ID NO: 52962 - DNA, 443 bp, Homo sapiens
  misc_feature 23: n = A,T,C or G
ccccccctcggaatacttctagnattaattaacgcgggggctgcattcgtttacataattattatttcttcttagtatttttatgtactaattaaaactagagtacttggcttgagaatgtgtaaaaattctatgtgtagagtataaaagcaaggttgctgggcacggtggctcacgtctgtaatcccagcactttgggaggatgaggtgggcagatcacttgaggttcaagaccagcctgaccaacatggagaaaccccgtctctactaaaaatacaaaattaactgggtgtcgtggggggtgcctataatcccagctacttgggaggctgaggtagaaaaatagcttgaacctgggaggtggaggttgcggtgagccaagaccacgccattgccctccagcctgggcaacaagagtgaaactccgtctcaaaaaaaaaaaa

SEQ ID NO: 52963 - DNA, 567 bp, Homo sapiens
  misc_feature 28: n = A,T,C or G
ccgggccccccctcgaaagtcttctagnattaattaacgcggggtaaatgtggactacccatgtcagcttcagcaatatttacccaagagtaaataagatttttgaaattatagtcaaatgtttggaataccactttacaaatctgggtaggctaagtgccattgtgttatactagtctagccttctgtgcaatatgatgtttttaattccgttttttaacttctatttttttttaatctggcagagatggtttaaagaaaaagtaaagagctagcggctggcttattattttttttttccagtaggaggagtacctctttaaggaggaaacaggtgttaaagtacttctcttctttatccttaacctactccctattttttttccctatcttcctcactggcaagagagtctggcttttatacatacgatttacaggaaatgtttcttcctcggcagaagaaatatttagacagcagcagtgacagacttgaatatcccacccacggtagaccttctggttccatgaagtctttcatatgagagaactgaaggatgaaaggtgttt

SEQ ID NO: 52964 - DNA, 623 bp, Homo sapiens
cgggcccccccctcggaagtcttctagaattaattaacgcgggctcctgcctcagcctctcaaagtgctaggattacaggcatgagccacagggtctggccttagtgtgcctattttaaaaggaaatactcacaaagtaatgagttagtaaaatccattattgaacattttagttgcaaaattaacagttactgatgctcactgtacaaaaaattggtctataatattttctttttgcagcaaagtttagcatagatagcagtaattttagcacttataaaaagtattcaaagctgtgtgaagggtacatgaaggatcattacattattatctacttctgtacctgtttgaaattctctttgatatgaaggttttcttttaaaaaaactgaaatataaaacctgcttaatgtaccaataactctacataaggtaatttaattgctatcagattatgttattatagtcatagaaaaatattctgtattctatagcaccatcatctgaaaacatagcatagtatttaaggatctgagttcaggaatcagactgccaaggtgcattccacatacttcacttcttagctgttataaccttggaaaaagtattttgcttaagctccaa

SEQ ID NO: 52965 - DNA, 607 bp, Homo sapiens
cggggccccccctcggaatacttctagaattaattaagcgggctgcctcatattttctattcatcttaggcctggccctaagaaatagagctatttatttcagtttttaatataacttagaaaagttgcatttttttaatcattgtgctattaaattgaaagaatgaagcaatagttgctaagacaggtaattgtgaataatttgccttctgtagttaagagatccaacgaaaatataaaacctggttcaattggctaatgaggaattacttcacttttggttcttttcattttgtttgaataatattgcaacagattctaagtttaaaatgagaattcttttagtacaaggagttggtagagttaatatcagttttgtctctgatgggaagcttcactcttcccggaatctacttctaggtcttatttgatgccattattttattttatttttttttattttattttttggctaaatactgcattgcatgtctaatttgccgttgacctgaatgctccagcctctccctaaggccctgagttccagagctctcagttagaaacggccaacactgtgtgacattctttagtccttaacatatatatc

SEQ ID NO: 52966 - DNA, 493 bp, Homo sapiens
  misc_feature 481: n = A,T,C or G
cgggccccccctcgaaagtcttctagaattaattaacgcggggtattgcattacacctgtcaaagaagacaaataaccaatatctccctgcaaaacaaaaccaactaaaaagtagtcgtagatcaaatttcttacacatttaccccaattgaaactgttccatgtagcaactgtgctctttttaagctatataggctgggcatggtggttcacacctgtaatcccagcactttgggaggccgaggcaggcggatcacctgaggtcaggagtttgagactagcctggccaacatggtgaaaccgcaactctactaaaaataaaaaaaaaattacccaggcatagtggcaggtgcctgtaatcccagctacttgggatgctgaagcaggagaatcacttgtacccatgagatggaggttgcagtgagccgagattgtgccactgcactccagcctaggcaataagagcaaaactctgtctcanaaaaaaaaaaaa

SEQ ID NO: 52967 - DNA, 617 bp, Homo sapiens
  misc_feature 595: n = A,T,C or G
ccgggccccccctcggggtacttctagaattaattaacgcgggggggaatagtcaagggatatttgggggttaaatatcctactcatatgacttaacctcagccactttggttttgtcatttgaaaaaagaggattctaacactaagaaagaactggattgctgtatggatgatatgaggcagtgcatataaagtgcttagcccaattgtggggactcagtaaattattataataaattaaattgttattacaatacaccacaggtttctggaaggtccaaggccctagcagtcttttccagacatctcaatgtcaattcagaatgactagttcacggtgcatagttccttctgtacagagttggttgtgtgggcaagcctgcataaatgtgaaaatcatggagcaaatgaggaaacacatctcttcacatctcctttagcactttatcgctctgatatcatggctcactttctgtcttgtaataaggtatttctatatttgtcttagaaacaggcttcatgtccgattcatttttgtgtcttatgcagttccagcaaggtgcgaatggtatatagcatcatttgttctatggtngtcacattactattacagtgca

SEQ ID NO: 52968 - DNA, 459 bp, Homo sapiens
  misc_feature 17: n = A,T,C or G
cgggtccccccctcggnagtcttctagaattaattaacgcgggtagcttaggtgataaaagaagttagtcttctgcttacctttttggatttcaacttctttttatttttgtttccttctttgatgtttaaagattgatgttagggtttctgattaaaacatacaccttgatgtccgggcgtggtggctcgcgcctgtaatcccagcactttgggaggcggaggtgggcgggtcacgaggtcaggagatcgagaccacagtgaaacccccccgtctctactgaaagtgcaaaaaattggccgggcgcggtggcgggcgcctgtagtcagtcccagctactcgggaggctgaggcaggagaatggtgtgaacccaggaggcggacttgctgtgagccgagatcgcgccactgcacttgcacctggttgacagggcgagacttcctctccaaaaaaaaaaa

SEQ ID NO: 52969 - DNA, 445 bp, Homo sapiens
acttctagcattaattaacgcgggcatgaagaatcacaagtcagaatagtaaaacaaaaagaataatcaggattttactgaagcacagtctgactggaacaggtaagtatgttgaaaaggagtttgaaaaaacattgaaaaaatcatccaaagaagggcatgagaatgcttggctaaaagaataatgattacctgtagctactatttcaaacaatccataatcgtgaacattactgctatcacaaactgcttttcaggctaagtgcggtggctcatgcctgtaatcccagtactttcagaggctgaggcgggtgatcgcccgagcccaagagttcaagaccagcctggccaacatggcaaaaccctgtctgcactaaaaatacaaaaattagccgggcatggtggtgcacatttatagtcccagctactcaggaggctgaggcac

SEQ ID NO: 52970 - DNA, 604 bp, Homo sapiens
  misc_feature 38, 582: n = A,T,C or G
cccccctcggaatacttctagaattaattaacgcgggnaaaaatggtgttcataaaagccctctaagggaaacagtagaaatctttttttcaaaacccttctgtgaaagcttgctgttaccacaaattataataaaagaccaaaacacataccagttatcatctatagactaccgtccctgagcaaattacttgactcaaactgttcatttggattaggaacatttctgttattatttgaaaagaatattctgttgtatatctattagaggcagtagaattagacgatctgcttgtgttaatgctttctataaaatcccacataatgaataaaaaggatagcttatccattttaccttggattataaaaatcttgaccaggtgcggtggctcacacttgtaatcccagcactttgggaggctgaggcaggcaggtcatttgaggtcaggagcttgagaccagcctgaccaacctggtgaagcctgtctctactaaaaatacaaaaaaagttagctgggcctggtggcacatgcctgtgccagctacttgggaggctgaggcaggaaaatcacttgaacctgngaggcagaggttgcagtgagcc

SEQ ID NO: 52971 - DNA, 600 bp, Homo sapiens
  misc_feature 546, 551: n = A,T,C or G
cgggccccccctcggaagtcttctagaattaattaacgcgggggcttaataatagatctgtctcataggtttgtactaaagatggaatgaaaatacctataagtgaattaaaaaggttagagtcttaaaaagttcaatttgagtctcagggacccctttagtacacactgccttaaattggagtgggttcttcagcagcaaacagttggtaagtatttctctggagacatttactgtatgctaccccagaattccagaagaccctgtacttaactatattaatcagcatttttattattgcctgaatgaaaatagaagtaacgttaatgaaatctctaaatctgataggagagttaatatttggtgtcagaatttagttgtaaaatctttaaacagattaaaatatgccataatctaatagaaataattattttttaaaagcaagcaaacaaaaattcactggacttacagggtcttgctacacttaaaaaaatattgtaaggaaaaaattggttgattatagcattacaaccctaagtacagaanaaaantatatctgtaactggttatagcattatatattcatattttaacatagta

SEQ ID NO: 52972 - DNA, 570 bp, Homo sapiens
  misc_feature 38: n = A,T,C or G
ctgggttaccgggcccccccctcggaaatacttctagnattaattaatactgaattttagctcagaattccttaaacaattgacatttttccttgttttgatatttttattattttttaatattgtaactttccttctacaaaaatgttaaaattttaatctcagcattcaccacccatgcagctgctaatgtactcaattctttcatgtttcatgtctttacaactggacctacaattatagggcaatatgaattattaaatatggcaaaattaccctcagccaagaaaaactgttttaaaaaatgtgctaattgatgactaactctggaaaataaattagtacataagaaaaatgaatttgcacatagaaaatagatgccctgacattactgagaatgttgaaaataatagtttttatgcaataatgtattggcatttatgctatataaaagaaataaattaacaagttgatgtattttctcttccataagcattctgtcattcaaatttttctctcactccaaaacaatgtctactctaaatgacatagatgctggcataacatata

SEQ ID NO: 52973 - DNA, 592 bp, Homo sapiens
  misc_feature 28: n = A,T,C or G
cgggcccccccctcggggtacttctagnaattaattaacgcgggaatatttgaaaaatattttgcaaactgagtgctatgttcaaagagaatctggattatcagctggttttgttgcatagcagtataaatataagttgattcttaatactataaggataatgaagcttatagaataagatagtttagatgggaggaaattgttttgtagtttattcattttcacgttgattttctaagtaggtgcgttaaatggttttaaaacttcatgattttgaatatatttctgttttaaaaatcctagcacgatgttctgctcttagcaggtacctaggctgtatctgaataaattaagataaattcaagatgtgactgaaggctgctatcattagtaataatttttaagcatttcaaaaccaagagcatgttttactacttctaggaaacagatcttagccattctcattcattgtgtttgcaattaggatttttagtaatgcccagcaacaattgcttcccaaaggtgtatttctaaggttttgtcttttcttttttatttaagagactctgttgaatttaagctttatgggaat

SEQ ID NO: 52974 - DNA, 636 bp, Homo sapiens
  misc_feature 22, 35, 71: n = A,T,C or G
tgggtaccgcggccccccctcnaggatcttctagnattaattaacgcggggtataaataaatcatactggngaaattttatttggagtcaaaattgaatttaaaatttcaagatatcactaagcagtccatgggattcatgcaaatataagtcaccaaatgcttggggaagacaaatttctggaataatggaagaaattagattctagtagtgtattccaaagccttgaggctctctgaaggacctcagagtttgctgatgggtgttgggagagggtggaaggctggaattgatgttcaacatgagttttctgagtatccccatgggattcatgcaaatataagtcaccaaatgcttggggaaaataaactcctggaataatggaagaattttgattctagtagtgtattccagagccttgaggctctctgaaggaccttagagtttgctgatgggtgttgggagagggtagaagactggaattgattttcaacatgagttttctgagtatcatctgctgcagaataatattttatttgacaaaagggtcactacttattagaaaacttgaagacaaaaaaagttttagggggtttcctaagaaataaaatccaatttgagcgtcaaaaacatcac

SEQ ID NO: 52975 - DNA, 504 bp, Homo sapiens
  misc_feature 30: n = A,T,C or G
accgggcccccccctcggagtacttctagnattaattaacgcgggtatatgttatatattaatatgtaattttcagaacagaatcttatttgaccatcgagccttcttttgcagaatactcagaataaagcttttaaaactatgttccacatcaccttgatactctagaaactaagggacacaagatgatagaaattcttggatataataattgcaagaactataaaaaccaatttaacctgcctgtttactaaccacattttaatctcaggttaacacattgctttcttcttgtccttttggttttaatgtttttgtttttttcttttattataatttcttctattgggttttttaaaatcttttttctgaccaggcacaatggctcacgcctataatcccagcactttgggagatataagtgggcaaatcacttgaggtaaggagtttgagacgagcctggccaacatggcaaaaccccatttctaccaaaaaaaaaaaaaa

SEQ ID NO: 52976 - DNA, 524 bp, Homo sapiens
  misc_feature 488: n = A,T,C or G
cgggccccccctcggaagtcttctagaattaattaacgcgggggagagaggaatgaggagttcctgtttcatagatacagagtttcagtttggtaaaaatgaaaaaagttctgaaaatgaatggtggtaatggttgtacaataatgtgaatgtacttaaaatagattaaagtccctattattcaaaatgagaacacagatactaattaactttggactttgataggtctatcaagtatattataatttatagaaaactatttaaaaatagaaagagtctaaatcttctagaacgtaaagcaaaccaccgccccccccccacacacacacacaaaacaaaacataactaatttttaaaatacaagaatgggtggggcacagtggtgcacacctatagtgtgctacttcgaaggctgacttgaggccaggagttcaaggctgtagtgcactataatcatgcctgtaaatagccactgcactccagcctgngcaacatagcaagacctatctctaaaaaaaaaaaaa

SEQ ID NO: 52977 - DNA, 542 bp, Homo sapiens
cgggccccccctcgaaagtcttctagaattaattaacgcggggaggacaagggtcaccttgcagaagctggaaccacagccaacccatcctgcaggaggtgctactggaggagggggtggggcaaagggaataccacccacccaccacctctagtctcctggcagcgcctgctgttggctaaacccaacttgaggccatccatcaagagaattgcagccagcaaagttccactacaatttgaacacagcagaagtggaacaaggaatccacctgaaggcagacagttctaggatctgcacccagggagactgttctgaagcaaaaccagctttacagaagctttggtccatctgcttgtttgctgaataattttgctttagcaagtagaatacatatacaaatatattttaaggcatttttgtgggaaataccaatttgcacattgtctcttaatttttcaagctaccttcttggcctctttctcttttgtctagtttactgatctgaaaagagcaaaattacttctcagggaatgtttata

SEQ ID NO: 52978 - DNA, 522 bp, Homo sapiens
  misc_feature 13, 26, 42, 50: n = A,T,C or G
ggccccccctcgnaaatacttctagnattaattaacgcgggnaaatatanttcctcaacataaacttccaacaacgtcactgcattgaagcaacttccaatgtcattctccagatgtcatcatcagcacataatgcatcctactctcagagcctcaggtgtaaaactaaggtttcagatgtataaaataacaaaagtatcttgtcaagaaatgttttatctttcaggcaaccaacacttctgactctaaattcttgacctagaatgtaacacccagagtattgctatctgtgtttttcaacaggtgtgctattaccctttgggacaggaaaaatgtttctttgtctggaacttctctgcaaattgcaagatgtttagcatcccttgacccttcattctaatgcccatagcacctcctgccctagtcattgtaagcaacaaaaaaagtgtccttgaaatcaaaggaaacttctagcagaagacaacagcttgctgagaaaaaaatactaaaaaaaaaaaaaaa

SEQ ID NO: 52979 - DNA, 331 bp, Homo sapiens
gtgcacacggtgttgtgtgcttaacaggcattggaaacagattgctgaatgaatggatgaacaaatatgatgctgcaagaaggatgtttaattattagtattacaaaataactttacatacagcaagttgataattttggcattcagtcttgtggtacagactacaagatatatatatatacaccatatatatatatatacatatatattccatatatatacatatatatacacacatatgtatatgcacatatatatataccagtgtatacgctacgtgcactatacatatgttgtacactagaatggaatatatgatcattaataacac

SEQ ID NO: 52980 - DNA, 574 bp, Homo sapiens
cccccctcgaaagtcttctagaattaattaacgcggggggggagggggaagggatagcattaggagatatacctaatgctaaatgacgagttaatgggtgcagcacaccaacatggcacatgtatacacatgtaacaaacctacacattgtgcacaggtaccctaaaacttaaagtataataataataaaataaaataaaaaggtgggagagtagaaagagtttaggtaattaatagctaatgctaatgcactctatttaacaatgaagatagcaagataataggaagtgtagtagtaagggtttatggatattgattcaggactaaaatgatgctaagaagaaaaagaaagcttgaaaatgcagaaaatctaaagagttttctgcagaatgttggtatctttctctacaaataatttttcatggctcagtatacctgaggaaagaaagtttttaggactgatcccagagtggctatttgagggcagaaaatgcaacataacaagagtgtaatggcccttagatagctggaaagaggaagattatgtggttgatcataaaatacaaatgaaata

SEQ ID NO: 52981 - DNA, 580 bp, Homo sapiens
  misc_feature 21, 549: n = A,T,C or G
ccccctcggaatacttctagnattaattaacgcggggagcttcccctgttcccacttaataatagtatctaatatagtatgttttacatagttgaacttgtttgttttctaagacagcactttttggaattatttactagttgtaactttttttctgaggtttctggattgttaaacttttaatttcatttttaataatacctttttctatatgacttgttgattagctttattgtcatttgacttacattcatatgtaaaatgtcaaaactttgataagttttaacacgtatgtgtccatgaaattgtttcttcattcacttaactatatcttctgaagagcagaaacttttttgttatataagcttttatttgatatataaactttgatgaaatttaattatcatcttttttatagactttggagttgcatcttagaaatcttcacataatccagtgcagcaatagtattcttctcatctgtgttttcttctaaaagtgttaaactactaggttttatgtgatctattttattcagaatttttgcanatttgttgtattgatacttgattttcctggc

SEQ ID NO: 52982 - DNA, 497 bp, Homo sapiens
ccccccctcgtacgtacttatagaattaattaaccgggccttgtcacaaagctgggtaaaagttaaaaataaataaataaatttttagcccgttagaggttcctgaattctaatcatgtgatgttggggttctcatttaaaatttctgaaaagagagtggggatacataatatacccttttctcccttggcttatattccatcccaataaaaatgcacagtccatttgggaaggccggggcggccggccggatcacaaggtcaggaaattgaaaccttcctggctaacagggggaacccccttctttactaaaaatacaaaaaatcacccaggcgggggggcaggcccctgtattcccatttactcgggagcagggaaatggcgtaaccctgcggggcttgcagtgacctgaaataatacccccactgaactccagcctgggaaacaaagcaagactccccctaaaaaaaaaaaaaaaaagcggccgccaccggggg

SEQ ID NO: 52983 - DNA, 399 bp, Homo sapiens
  misc_feature 28: n = A,T,C or G
cgggcccccccctcgaaagtcttctagnaattaattaacgcggggatgccctctttactaggcactgacatttatatctttacatcttctaatcgctgatcttaatgggaaggaaaagaagactatcttttctctgggccttgtcttctcacaggtctttaacttgaggcttgatataattccagttagctacatctgtagtctataaatggaacatgtttctgtgtatcaatgggatgttcattcccagaggattcactgtacctttgtcaatagggtccttgtagggatgccatgcttatgtaaagctgttctcttcttgtaataaatgcagttgctccacatactaaaccgtgttatagcaagtagtgttttactgatgctaacttaaagcatgtt

SEQ ID NO: 52984 - DNA, 531 bp, Homo sapiens
cccccctcgaaagtcttctagaattaattaacgcgggttctgtaggaaaaatatatactcggggaacatggaaagagtttgatgtgggatttgtagtaaaagtaaagtaccaccatagaggtgttgtttgacaggcttttcatttacctacagtcacttagcaagattatggaattcatctcctataggactttctcttttaattctagagattaaaaagctagtaacaaaaacagtcttttgtctaaagcatttgatctcttccaattaatttgatcacaatcacagaagtgccactataggctgtcagttgattggcacaatattgtactaaacatcttggtcctgtagtcatttacacaatctctttgtgggaggtaccttttcattatatctttgtttagaaactgggttttctcactaagtcaatatgtgttctgtgttttggggtatcgggttgatgtgatgagtcatagctttctttcaggtctctgtaaatattgagcccattgaagtgatgaaaatttcttt

SEQ ID NO: 52985 - DNA, 570 bp, Homo sapiens
  misc_feature 28: n = A,T,C or G
cggggccccccctcgaaatacttctagnattaattaacgcggggtccaagcatggccagagcagttacggtgccctctggaacagctgtccaggaagctgactatggctcatcagcataaagtcaaggcccatggcagcaagaaaggcaaatcatgggaacagaggctcaagagagaatgtcaggggcctgccccctccccaccatcttttcataaaatgatacactcctccccctatattttcctggttcatcgcctatgcccatggaggaggaggtggagacacagcagtgccattcatcttaatgatccattccattaagtaacaaacataggctaggtgtgatggctcacacctgtaactttgagtttgagaccagcatctgcaacataatgagacctcctttctacaaaaaataaaattagccaggcatggtggctcacgcctatagtcccagctactagggaggctgaggtaggaggatcacttgagcccaggaggtcacagttgcagtgagccgagatcacactactacactccagcatgggcaacaaagggagaccctgtct

SEQ ID NO: 52986 - DNA, 393 bp, Homo sapiens
cccccctcgagagtcttctagaattaattaacgcgggccagggatggatgggcaaggatgttgccagaggtcagcaccttccttctcaggtccccatggggttggtcgggggcctaccggattctcacagtaatgacacaagtcgttgaccccaatgaagagtgtgaccagcttccagtctttctccaggttgatgtcctgaggggacagaagatcctgagtttaggccttggtgggaggcacatacaaatgttgctactgggccagcccgcccgccctccaagtgccttttgtcttatttatactgtaacagagaaaagcagcaaattgggccaggcacggtggctcacacctgtaatcccagcactttgggaggccaaaaaaaaaaaaaaa

SEQ ID NO: 52987 - DNA, 459 bp, Homo sapiens
ggggtccttaatgaggactgggccaaaaaaagttttcctgaaaataggactgtaaaaaacaaaactctgggccctacccttgcttcaaccaaagaagctccgatttaaatttattttttatttcacacataaaaataatttttttagtgtgaaaaaaatgttctgataaattttctttggaacaaaaattcccacagctaaaccttgcctaaaacttttttgggaaaaggctaaaaccccttgccttatatttctgacaaaggtttgaacccagtccctgaacagtaaagtggcaaagatagccttttttcaaaaaaccaaatttcctagtttaaaaagttcttggggtaaaggttggttttattttccttccatgcaaaaccttagcctttaaatctaataaaaaaaacccaaccttcctcccaaggttttaagcttaagtaaattttatttctaaac

SEQ ID NO: 52988 - DNA, 642 bp, Homo sapiens
  misc_feature 23, 36: n = A,T,C or G
tgggtacccgggccccccctcgngaatacttctagnaattaattaacgcgggtgctgtgaaattctaatttggttctttatgtctatttcttaactaagtctaacagcatacacagcaaaactgtacattattttgcaacagattaaggtgaaaaaagctacatacaggaaaccatgtaagattaatatatatcacactttctagaaacttttatatctattattttcactttcacaagaaccgtatgaagtaggcaagacaggaattatttacccattttgcaaatgcagagagtcatagaaaagggaggtgacttgccctgggccactgagctggttggggcctagattgtgttctttctacactaggctacctccatctgtaaaaaggaacatcggatccagacacttcctggcagatagaaccaaaagagtgctgactagaggctgtgccatgccaggctgtggtcagagagtttccctgtataaatagcaacctatgctaggggttgctagcaccagccatttcccctactcacacctgtgcagtgtgataaagatagtagaattagcctgcagttgtggtccaaccagataaaacttttaggcgggaagtcaagtgacaggcaaacttgtgtgtgt

SEQ ID NO: 52989 - DNA, 545 bp, Homo sapiens
  misc_feature 16: n = A,T,C or G
cggggccccccctcgnaaatacttctagaattaattaacgcggggggatcacaaagtaaaattcaattataggatgtatgcaggtgcacatcaaaaacacagagactcaaaatgcttaaagtaaaatagacaaagatataccaagaaagttcaaagaaaaagaatgtaagggttgcaatagtcatcaggaaaggtattaaagtaattaaactctataatgaaaaatattacatctaaagattcaacatctatgaatatttctacaacaaaaaatacaatatcaccattcatgtaaagtcactagagtaaaagaaatccaccacagtaataaaaaaatttatcctatctcaatctatgacaaatcaagtagccatatatataaacattacatgtatataactaaatgtagctatatatatatataaaacatttattactaaacagaccaagatagagtatacctaaataacatgatagtagatctccgtaccacttatgaaactctatatgtagaactctatatatatgatatactaatctcacta

SEQ ID NO: 52990 - DNA, 473 bp, Homo sapiens
cgggcccccccctcgaaatacttctagaattaattaacgcgggtgctcagttatttaaccaacattctaagtacagagaaaaggatgaagtaacaaagaaaaagagattataaagagagactacaaacatacataatttaggaaaacaaaacttttgcagacatccccataaaatatttgaatagattggtaaaattatattacttggccatctctaaatgcaaagttgactagggaatattacttttactgggacacattcctttcctcaagataatttaatcaggcaactagctgtttacgtggagaactatgtgatggataactcccatttgatcactcgcttcagaatgaataagactttgagagaaaatacaagggtaaagactgttctccatctgtgttcctggaatacaaaaacctgtcctcaaaagcttttctttatctgagctctgtctaaaaaaaaaaaaaaa

SEQ ID NO: 52991 - DNA, 575 bp, Homo sapiens
  misc_feature 16, 29: n = A,T,C or G
cgggcccccccctcgngaatacttctagnattaattaacgcgggatatattcaaggtatgtgtgttcatgtggacatagtttaagatgggctgcctggaaggcaagggttctaggcattcattctaaaactaccaccaggtcatcatacaaaattaagctctctgtttaaataataatgggcttttatgtcagtaacattggctaattctcttatcatcaatctaggtatccagtagttccagaataattgcatcatccacttataattctttctcttttcctctagtataaactatttatctatgagcctgtgtgagtagatcaagatacgttttatttcataaggtagtgatgagcaatttataatccaagttttgtgtcaagaagttgaaaagtaggtttaggggaatattggcaattgaccagcaatgtctgttctgcgtgcaagagatgggaaacattggctcatattctagattcttgtgatcccattcacaaacaaacccacaacacactcacattatagatatttactctacagcataagactttgttgttactgggtatcagcaga

SEQ ID NO: 52992 - DNA, 557 bp, Homo sapiens
cgggccccccctcgaaagtcttctagaattaattaacgcgggcttttgagttacaagctgcgtgaacttgagaaagtcacttaatttctgcaagctcataaatttcggctccagttgagctttctaattctagagcccaaaccttactgattgtatttaaacataactcctgttgtttttctttagaaccatctaccatctagaaaaactgtgaaaaccattttcacttcaaaaaaattttgttgacacacaataaaaaattgtactgaaagtagaaatcagtactaagaatatgttgcaagaagtctacctcaatttttattcagacattcttaaaatatttaatacacattgtaagagtctattagagctatgactctcaaactttaaagtgtattcaagtcacccaggaataaatgcagattctgatttgcaatatttcctctgtaacctgtaattctacagtgcgaacaagtttcccggtgatgcccatactgctggttcctgctactgctggttcttgcatcttatttgaatggcaagactaaaaaaaaaga

SEQ ID NO: 52993 - DNA, 611 bp, Homo sapiens
  misc_feature 24: n = A,T,C or G
gccccccctcgaaagtcttctagnattaattaacgcgggtagtgcatagtaatttactagtaaataacttgatagaatctctatttagcaaaggtgtagggatactagagaaaggatgttgtccatggagctggcatgcatcatctgactctcttatgtctcaaggggtaaaagaagacatccccactaagccagaaagaaaagggagccaagtggtagaagctctggctttgggtggtgtaacaaagtgccatcaagaacactgtggagaagaagtgaagggaatgatagctgaatatcagtcttccatcacttgatatcatgctagtgttcatcactagtctaacccagtgagaaaataatgggcaaactgcctactgaggtgggttagctattccaaactcttgacaggatgaagtatgggaaattgatttgaagtggcaaggaaaatcagtccatacattcccatatatacaattagtcatattacatttggcctaattgtttttcccatagagcaggaaaaaatcaccccattacaataaaggcagtatattccagaagtaatgctaaaatgttaactaaaaaataaatcaatagatgttttctat

SEQ ID NO: 52994 - DNA, 411 bp, Homo sapiens
cgggccccccctcggaagtcttctagaattaattaacgcgggcttgggttaatggactccaatccacttattttctgggagatttatccgaagccaacaactataaatggttaagtctcttttcaccattcattttattacagaagcacccatgtgaagccctctaataatagattttccaaagtcctttctgctatcatgatactcccaatactacaaatattaaggtcaatactgacaagccaaaaataaaaaaatttttaaatatattgacaagtggccaggcgtggtggctcacatctgtaatcccagtactttgggaggccaaggcaggtggataacgaggtcaggagtttgacaccagcctggccaatacagtaaaaccctatctctactaaaaaaaaaaaaaaa

SEQ ID NO: 52995 - DNA, 576 bp, Homo sapiens
cgggccccccctcggaagtcttctagaattaattaacgcgggtcctatttcattgttaatataatctccccagccatgaagataatgatattttatacttaacaatttttagctcttagtgttcatcttcctaaacctaaatattttctacatagagtttactttactacccctctctgtatttcattaacatgttaaggctggaactgccatatccccgtgtatctgtattaacctgttttatttcctatgttttgatatgttaatatcagggactttgctgactgaggccttgcttgtttctcccacggttagagatggtggccaaatctcctgagagtgtgtcttccatgcgtaaactaactaatctggaacccatatcccaactgccttctgcatcaggttcttacatgggctcctacattcaggccactatccacctgtcctacaaaaaaaattagcttggtgtggtggggtgcaactgtagttgcagctacttggggggctggggtgggtagatcccttgagcccaggaggctgaggctgcagtgagccatgtttgtgccactgctcccc

SEQ ID NO: 52996 - DNA, 483 bp, Homo sapiens
gggccccccctcgaaagtcttctagaattaattaacgcgggaaggcaatgattcccaatccaatgatttcagtggctcttattcctttaaacaccacactttctcaaatgtagcttaaagtttacaaattttaccatgtgtaatttttttttaacctaacaggaactatcaggctgtatattcttttcagtttatagatgtggaaactattagccagatagatgaagtgatttgctaaaaggcataaacgactttatggggacagacctgcgacatgtattccaatctctagcctcattttattaaatattactgccttggctcaaatcttgagactttttttacttcactgacaaaatgatttctttgtcaaacataataaattagataagaacaaggaaacaaatcagagtaagccaagaagaaggaattagtacagataaaagctagaatcaaggaaagtataaacaaaaaaaaaaaaaa

SEQ ID NO: 52997 - DNA, 575 bp, Homo sapiens
cgggccccccctcggaagtcttctagaattaattaacgcggggcagtttctgtaaataataacatctttcagagttgtagtaattgtgcagcttttaatataagctgtacttcttggaatgaaatgctgaagacatttttgataggcagttatgtttacctatgaggcttaaacaagatattcaaatctggcctctgatcatctctatgataaaatccttggcctgtttgctttttattgaccatttcacccactggcctttgttccacttaattttgcttagatcagggtgactttaagaaggaaggtatttgtcacttttttgccactttctagaaaaatgtgcctgacaaccaaggtacgtattctcatgatggtctgctgcctttataataataacataatgataatattaacagaaaaaaatttaggatttttttgaattcatagtatatgtcaggctagctttgggctaagtgcttgagaatcattatcctattaatccttaagctggacacatggctcatgcctatagtcccagaactttgggaggtggaggcaggaggattgcttga

SEQ ID NO: 52998 - DNA, 562 bp, Homo sapiens
  misc_feature 11, 23, 36: n = A,T,C or G
tgggtaccggngccccccctcgngggtacttctagnattaattaacgcggggagtaattcattttcagtaaaataaataaattttatgccatcaaattgatgtaacctctaacttagatttttaaaaaattatttgtgtaaagctttgggaagcatctgctttgatagtcattagctgtacatctggtaaaaaaaatactgtccacatatttgttgctggaaagaaaattcacaaaactataacccgtgactcaatggaatattagcaaagtgttttagttatccattgccatttaaaatgtccatatgggtttgtcagtacagcttttgaaatgtaacaaattaatatctttacttcattctaatttgtggacagatggcatgaacaggactgagtgatgcattgggttatccctcagcttgtcaagacttatttacagtgtaggagccattctccaatggctgattatctgcttcatttagtaggaaggaaattaacctctgatttccatgctgatgactcagcaggtaatgtaccactaatgctaaaaaaaaaaaaaaa

SEQ ID NO: 52999 - DNA, 637 bp, Homo sapiens
  misc_feature 40: n = A,T,C or G
agactgggataccgcggccctccctcgaaatacttctagnaattaattaaccgggctgccagtggacatttaggtcatttctataccttggctgttgtaaataatgccgcagtgaacacggcaatgctgatatctcttcaacatactgatttaatttcctctttgacaaactgattgcattttctttgaatatatacttacaagtgggattgctgaatcatatggtagttctattttagaattttcctaaaataaagcaaaacaaaacacaatgaaacaaatactgaactatgttagcacgtgggatagacttctgatgctgcacccagctaaatttagactcaaaattttttaaaggaaggaagcaaaagactgaatttagcctgaccagttgttgaaagaaatgaattaaatcctctgttgtttgcaaaccagattatgtgtccattctgagaaactcatcctgctctgtttctactttgccacgtaacatgtagctaaatatgtaacaccctcgtgaccaaaggaattatgatgccttggaaaatacctgaactagtcctaaaagacagcttaatcatctgacaaaataacagtatctgcttcgctgtttgtaaaactcgggctctaagtactg

SEQ ID NO: 53000 - DNA, 580 bp, Homo sapiens
  misc_feature 31: n = A,T,C or G
accgggcccccccctcggaaatacttctagnattaattaaaatatgccacataaattacacagcaaaaaaaccatcatcatctataaatgttagccactatgattattatttttagacctacagtttagaaagggacaaaaaagcaaaatataaagagtagaaaagataaaaggaaaagtggtgttaacttctggggaaaagcagcgtccagcaatagttccaattaccaacggacgcaactatttattccaatctccagaaaaataaaatactgaaaatatctgtcaaaacgttcaagtaaatctgtccttgaagaactgctgtacgcaaagttgacaaatgttatagactattcacagattaaagttaattgctaaaaactctgatctctggagtaatctttatcctaacactactgcttagattaacaatatcagtaatggcaatttagaagaaaacaaggctggacgcagtggctcagggcctgtatcccagcactttgggaagtggaggcaggtgaatcatctgaggtcaggagttcaaagccagcctgacaacacggtaaaaccctgtccctac

SEQ ID NO: 53001 - DNA, 600 bp, Homo sapiens
  misc_feature 28: n = A,T,C or G
cgggcccccccctcgaaagtcttctagnaattaattaacgcgggcaataattaataaaataacagattgaaagcaactagcatagatcactgcacttgatatacactccataattgacatattttattgttatttattccataaaatgtgcggtccttttcctgaagcagtaagaataactagggcatagctgagagtgcaaatcacacacccacacccacatagccctaccccacaacacactgaaatgtaagtcccataaagccaatgacgtatttgtcttgtccttgacatctctgtatccctagtgcctggaataaagctgacacgcagctacggctcaaaacagatttgctgaatgaaacacagcttaattagaagatgcaaacatctttaccacagtccatgtttaaagcaaatttatgttgttcttggaggtaagttgttaaggcaatgaattgattagtgatcattaagatttttattctggctgagatgggtggatcacctgtggtcaggagttcgagaccagcctgaccaacatagtaaaaccctgtatctactaaaaaaaacaaaaattagctggacatggtggcgtat

SEQ ID NO: 53002 - DNA, 579 bp, Homo sapiens
  misc_feature 48, 488: n = A,T,C or G
cgggcccccccctcgaaatacttctagaattaattaacgcgggggggngaaaaaaaggaaaaaaaaatcacacttttttggaaaatgatataatttccatactagattttccctattttataattatcagctcttctttaatggcaaaacttgcatagctcatatagcttttttggcgtatattaaatagagtgccattatcatagccacacaatttttctctacacacctcagcacaaacatctatgcatataaatgtgtaaaaggttaaacaaatcttctaatgcttttcgagtgttaatgacacagttttccaaataacagaataagcttcttaaatacatggaatttagaatgctagaagtgggggtgggtagatgtgaggataggaggagtttattataaactcttttgaaaatggaaacacaaatctcaacgcccaaatgttaaaatcgatagatttcaaatatactttagaataatggctntcagtttcattttaaaagtctcataaataagcataattgccaaacaatctacaaagatattttcttagggtactttataagagtaaacact

SEQ ID NO: 53003 - DNA, 113 bp, Homo sapiens
attgcactgaatggtcaaacttgtgagtatatcagtggataatttgatggaacagagctctctttgctataaaactttagttaggaaaactgtaataattaacttgtaatatt

SEQ ID NO: 53004 - DNA, 628 bp, Homo sapiens
  misc_feature 19, 32, 142: n = A,T,C or G
taccgggcccccccctcgngggtacttctagnaattaattaacgcgggctcccaattttaacacattattggacaccaacgaacatcccatcaataatcaccatcacgtaatcaatcaaaaagttacactggattcatatgntgaaaaaatcaagcttaaacgtcattagatttaagtattattatataatcttactcagaaataaatctgttattaggtcagaaatacctaacaagctattgtagctctcttggtccagatgggtatttaatcaaattaataagaaacaggcagttcagtttgtgtcaatagaaggacattgttcccattactcctttattaattcataagaggttaataaataacttactttgaataaaataaatcgctgtagataaaaactgtgtccctggcacatataaaagttaataggtgcataaagatgcatggaaaccgcatggtgtgaaggttactgggtccacccaaaccctagattcttgtatctgtgtgcatactggagcctgattggcccaactccagttgaaaataattttcttgaggtgacattccatctcttgtgccaattgaaagtcttagctcctccagaggagcaaaaaatatcaacaa

SEQ ID NO: 53005 - DNA, 558 bp, Homo sapiens
cccccctcggaagtcttctagaattaattaacgcgggattttgtttcacatagattatattatttaaaatcttacaaaatgtattagttatctaaacataaaaaacattaaaaatcaatttaatgccatcttgctaactaataaagaaaaatcaatctgtaagggagtaaatcgctaagaaaatgccctctttgacatgatttgtgattgaggaagtgtatagaggatatgtggtatttctcgtttataatgatttcaattaattcaaataacttttgaaaggaaattattagtgtaattttgggattatacatcaaattccatacttggaagtgttggaagtattatttttattacaaagttagtttttatattttttaaaaaacacctcctttcattatcaaatgtatctgaagaaaaaaataggatgctgaaatcttaaaattagaaaaagcattttatttgagtcagtttacttatttttcttgccgttttctctatgtatgtataatataaccatactcataggtgtgtatagatgaggctaatgctaagaca

SEQ ID NO: 53006 - DNA, 408 bp, Homo sapiens
  misc_feature 339, 375, 398: n = A,T,C or G
cccccctcgagaagtcttctagaattaattaacgcgggtcatgggccaacactggcagcacaacatgagaaagatccaaagactggttaagccagtgctctgaaaacaatgtacaaaatgatccatcacagtataaacgttattagcagttctatttctattttaaaacattatgtttgctaatatttaacatatagagttgacattaatgccctgagtctctgttagatggctgcatgtcactgacaggcatacatgggaggctaactcagacagcattgacaatgtgatgggtatttgtgatgattaagtgaatttgctgataatataatctagttntaaccaaacaagccctcatcaaatgggcaaagcaantttaaagattcttgcaaaagaanattacactga

SEQ ID NO: 53007 - DNA, 519 bp, Homo sapiens
  misc_feature 441, 454: n = A,T,C or G
cgggccccccctcggggtacttctagaattaattaacgccgggatccaccactgcactccagcttgggtaacagagcaaggttttgtctcaaaagaaaaaaaaaagaaaccaattagggtggaaacacttagaacagggtgttcataagttgtcaccctcttgaagcaattgttggacactattttaaaaatgttttacttctgagtgaaatgttgcattttattttactagaagattcttatgtagtttaagtacattttacggtattgtcaaagagcatgagcaaaatatttaggaaagatgagaccatatttcttttatttatgacattgccacaaaaaaatcaggtagatgaatttgtattaagtttttgtaccaatttcatatctaaaatttcaaagaattttattgcaacaaactctttcttaccattaactcanaaaaattctgttntaaattgacttcattccataagtctctacactactaatttggccagaagttattttcaatcctaa

SEQ ID NO: 53008 - DNA, 601 bp, Homo sapiens
  misc_feature 545, 554, 577: n = A,T,C or G
cgggccccccctcgaaagtcttctagaattaattaacgcgggtcctttatgctatcttcttgagcatctaaccttccctaagaaaaaataaatcactttgacataaacttcttcactgatctaatttcattctatgatacatttctcttttaaatttctccgtatgtcagtgaatctactatcaaatgaaattcaagattttaataagtaaatatttatttgtataaatttaaggggtacaagtacagttttgttacatagatatattacatagtggtgaagtctgggctttcagtcataccattacccaaatagtgtagattaagtactactttgacattatgcactacttttcctttaagaattttcagccaggtgtggtggctcacgcctgtaatcccagcactttgggaggccgaggcgggtggatcacctgaggttaggagttcgagaccagcctgaccaatatggtgaaaccctgtctctactaacaatacaaaattagccaagcgtggtggtgcatgcctgtaatttcagctacttgngaggctgangcaggagaatcgcttgaacctgngaggcagaggttgcagtgagctga

SEQ ID NO: 53009 - DNA, 399 bp, Homo sapiens
  misc_feature 38, 54, 140: n = A,T,C or G
actggggtaccgggcccccccctcggagtacttctagnattaattaacgcgggnaaaccacacagaacttgacattgacattacagaattactgaattaatgtcagggtttgatatctttcagacctcctattacctggngaaaaatactttactatatatagatttgcattatttatgtagatttcccttatccacagtaaatacaaagtctaactgaacatggatactatcctactatatattgagatataacttcaaaaccattttcattaaaataattatggtcctgggatagaaacaggttaaatacaccaaaggacaatgggaaggcaaatacacctattaatacattaaaaacctgatagacagtaacgagaccatcaaaaaaaaaaaaaaa

SEQ ID NO: 53010 - DNA, 607 bp, Homo sapiens
cgggccccccctcggaagtcttctagaattaattaacgcgggcatacatatagtatataaacattattgaatgtactagacattaagtaaaaacataaaaagaaaggaaaagaagatattcacttctgtatctgtttcgttgacaattcactctccaaccagcattttctgtgaatgtctatgagagactatattaaaataaattggattctaaaaccaagtattctatttattactttatgtgtgttttataggttttgcatattggttggaaagaaaataataataaattcaagtttctcttcttattttgttgtgattgaatagttgttgataagatgttgttcttcttgaggctagaggaaattagaacaggattatattgtgccttaccctttaaaagttgccagtatgttttattttaattataggatttgtagaaaaacaaatcagaaaagtatcataaactctttgaagcttgctgacaggtcttttgtgctttgacaattaatttctgtttgttactttctgtaaaatgtattcatttctctaccctgcaagacaaatagtagctaattacatagagtgtaccgaaaaaaaaaaaaaa

SEQ ID NO: 53011 - DNA, 580 bp, Homo sapiens
  misc_feature 25: n = A,T,C or G
ggccccccctcggaagtcttctagnattaattaacgcgggaccataagaagaaatactgatccatttaacttaataaacgtaagcatatttgaaaaaaaaaaaaaaaaggacttgcgaaagtaaaaagcaagtcagagactggggaaatttatctgtaacacatataaccaaactagattggcatttagaatagattgaagcttcccagagaaagacatcccaagagaaaattggaaagaaaagaataggcatttcatataagtgatagttcattcaaatggctacaagaatgtaatgcagcagagccctcaggaaatgttggtgagtaagtaattttgtgtaactaatttggagggtagtttagcaatgtacagtaaagcagttttactccttgatattgatattttaatggcaacattataataattttataataatgaaagccagaaacaactcaaatgacactggaaaagaagataggtaaactgtggcgccttattactgtggaatcctgttcgctgtgacaccaacttggataaatgtatctcccaaaagcatttagtaaaaataagtaaatac

SEQ ID NO: 53012 - DNA, 604 bp, Homo sapiens
ccgggccccccctcggaagtcttctagaattaattaacgcgggattgtagctatttgatgcaaactccatcatctttccaccacatatattacagcttacctgaaccttcactcactttctccttctacactttgctttcaatgaaggaactgtccctgctcctgttcaagcgctccactttccccttcaaactaattagttccatctcctttgccatcactttattattccatctagatcattctcatagtctttcaaatgtgtccttaaaaagaaaacaaatcaaactctttcctaggagccaaggcacctccagctaccaccacatttctctgcatgctactcttcagtcaattataataatgggttcattgtctcatgttttatttgctcagagattatatttcataacatttatcttgaaatatttacttttacaagttacaacagagcaaaatattacagaaaaactttctcactaccacctcatctctctagttctactcttttcctcgaaggtcaacagagttttcttttaatataaattcttcaataatgtttgtgtatagattacttatttatttacatattacacccttgatc

SEQ ID NO: 53013 - DNA, 598 bp, Homo sapiens
  misc_feature 463, 525: n = A,T,C or G
cgggccccccctcggaagtcttctagaattaattaaagcgggcatagtcctctcaatttacagcatatgcatacacattcttattcaagttttattgaaagatatcaaaactagtgttctctgacacctatttagtttctaccgcattcagaaatttctgcatctgaaaatttgccttaagttttgaaaatgctgttcacttatatactgaattctctatgatttttagatgatggtgacctttttagtattggcagtgaaagtgtcagctaatattattgtcccaactgcccccttccctggtcccatgtaagatcactttcacttcattctctctttgggccacatagacctatgaggtactaaaaatctttgaaaaatccccacttccctcggtttctgaagaagagctcttggatatcttggtggaggcagcatggtgtagcagtaaaagcttcaactntgagagcaggcaggatgcgttttgaactgcagttgagtgctttattagaagtgtcatcttanacaagtagttttcctctttaagccttaaatgatctatctggaatgagggaagagtatctatcaagtagggttg

SEQ ID NO: 53014 - DNA, 623 bp, Homo sapiens
  misc_feature 601: n = A,T,C or G
cccccctcgagagtcttctagaattaattaacgcggggtatataaactactgactactaactttgtggaagttttaaattccctaaacttcagattccccttatgtaaaaggaagagataatgaaaagtgcttaacatattagcagattgaaagtgcattatttgctactattattaggtgtgcagtaatctaattgcttaatttgtcatataaccagtgagttttatctgaaggactcctgtgtaatttacaagatgaaatgaagaaactgaagcaactttaaggcttttatgtcttttactctgtatgttcctcttccctgatgtatctgtccacagttttcagtttcattcaaaaattgggcaactgggtaaaagagctggcccatgtatgcaagttccatcagtgtggccaggtaaaattattctccaaattgaaaaatgagtaatagaaatggtaagaaaaataattattaattattttttaaaaattaactctatgcaaggcacagcctctagaaccaccacaggaagagagtgaatctctgccttttagaagcttccaatttcgggataaacaaaaagataaacagcaatgtanagtcatatgcattaaatgctga

SEQ ID NO: 53015 - DNA, 372 bp, Homo sapiens
cggggccccccctcggagtacttctaggaataattaacgcggggtactggagtgtaacaatgactgctgaacttcttttaacagtgttaagtaatccctaagagaagactgaagaaagaaccaaaccgaggcaggcagatcacttgagggcaagaactcgagaccagcctggccaacataaaaaaaccctgtctttactgaaaataaaaaaattacctgggtgtagtggggggtgcattccaactagtcaagaagctgaagcaagaaaattgcttgaacccaagaaggggaaggtgcaatgaaccaagatcacaccactggacttcagcctgggcaacagaacgagacttcatcttaaaaaaaaaaaaaaaa

SEQ ID NO: 53016 - DNA, 616 bp, Homo sapiens
  misc_feature 525, 570: n = A,T,C or G
ccgggccccccctcgagggtacttctagaattaattaacgcggggggaatttaaaaagcattttttaacctgggtatagaacttaaaaaattagataatactcaacttgttttcaaaatatttcaagcatagtatggtaaaatgccttcaagtgattattgaaagagtacagtaatttctctaggctaagtttagatacttttgatattatatgatttataatatctttctttaaaaagaaaaaaaatgatttgtagtttcctcatttcttataatttatattttcagtttactgttttgttattccagcaatattagttactgaagaaaagcacatgtcacctcttaagcatgtgattgtgtatatgctaagaaaaaggggcatttagtcaaagtttttatgcatgtttttattgagtaaatgtctaacttacataatggtattttttttttataagtagtaaccattacagcatcctaagtagtccagaaactttaggaacattgttcacagtataaaatgantaactgaatgttttaagctaaatcacttctatataattgcaatangacttaaactgcaccaggtgctgtctctaatatacccatccccttg

SEQ ID NO: 53017 - DNA, 569 bp, Homo sapiens
  misc_feature 26, 525: n = A,T,C or G
gggccccccctcggggtacttctagnattaattaacgcgggggcggggggggcttcccgggctgggcttctggttgggttccggagtctcagtctctgtagtgactttttcccaacccagcccggcagagcgctgagcacatggtcagtgcctgtctgcgtctccttgcacccttcttccccaaatcaccacggctgagcagagtcatcgtgagatgtggctccatcctgcacggggcagtcactcacttcattggcagaaatggtgacagtccaggagattttccaacttccgttggcatgcaagcatggggcagccccatgcatgaggaagatggctcacactcgacaccacagtgactcctggggtttgaggaattcttgggttgtctggatcctggctctcaaagcctggaccctggagcagcctgatttttcacaatcctcccatgatccctgtgtacacgcaagtgtaagaaccatgggttgaagttctcaagcttgcctgcatgtctgaatcacctgngaagcattgtcatcatttttaatgaacttaatttctaaaacata

SEQ ID NO: 53018 - DNA, 622 bp, Homo sapiens
  misc_feature 25, 40, 49, 50: n = A,T,C or G
ctgggataccgcggccccccctcgngaagtaccttctagnaaattaatnntaacgccgggggacggtcacactcaaatgatctcgtatgctggtcgtgtgctacgcataggcagtacgaaacacaagagacagacaagcagttatttcttatcatatattcccagcacatggctggcccatttcctccaactcaagagtcctgtctgcaaaggacaaaactgtgaaaataattccttgtaaaatcattggcactcctcatcttcccaactccactctccagcaaacttcactatgatcttatttaacatgccacgcattgaggtttctaaaacttctggcaggtatacaaataaatcaaaaaactgaagaaacaaaaatatgtctttctctctgctcctcaaataaatcatcagcttgggtgcttggctcccaggagaccaaaacatgtggaaaactgaatgaacttgttgattgttatccagatgcctaaacactttgagaaatagtggtaatatcttttggagcacacgataaaaccagcgactgatttaaaagaaacaaaacatatgaataatcagctctatgtcctttttaacaagtgatctagaattatgattccta

SEQ ID NO: 53019 - DNA, 627 bp, Homo sapiens; identical to SEQ ID NO: 52669
  misc_feature 31, 577: n = A,T,C or G

SEQ ID NO: 53020 - DNA, 602 bp, Homo sapiens; identical to SEQ ID NO: 45035
  misc_feature 23: n = A,T,C or G

SEQ ID NO: 53021 - DNA, 434 bp, Homo sapiens
cgggccccccctcggaagtcttctagaattaattaaatgcctgtaataaccggttactttggacaaattcaacatttctcctttcttaaggatgatctcaaaagggttcataaccaagaagtttgaatgcaaaacgaacaaaataaacaaatcctgaacaggcaggaatagaagaggaaggaaggctggtgatagtctaagagaagacttgtagcaggagctcctgtagagcagatgaagaccaaggaaaaagccatgtgtttgggaagataagtgcatgctttcaagccctggctgctcaaaagaaatgtcagacactagcttatgttctggtgggtggagaaaaaaacagacagttttcaagccatgagtgcctttgtcaggacatacaatgtaataatgctgctcacccatcctgcaaaaaaaaaaaaaaa

SEQ ID NO: 53022 - DNA, 621 bp, Homo sapiens
  misc_feature 33: n = A,T,C or G
ggtaccgggcccccccctcgaaatacttctagnaattaattaacgcgggcctataggagagacttacaggactaagtttgctgttcttttacattaggttatcctgatacactcaaaacaaccatctaacctgtggtctcagcttgtctcctttctttcaaattgcttatggtgccagctactgggtcccccaatacccttttcccagtttctagttgaccacaagaaattcatttattgctgttttgctactttttagcaagcattcctaatttcatatctccaaatatagagtagattactgccttccttcacttccacctcaataaaatgacccattacatttttcttgaaggtctagaattcacagcatactctctagaaacaattcataaattatttatttttcctcttatttgaaaacattagatactgactctagttggttttggcaaaaaataatgaggcgaggacatttattgaaaaaaatataggctaggcacagtggcttacacctgtaatcccagcactttgagatgccaaggcaggaggatcacttgaggccaggtgtttgagaccagactgggtaacatagcaagaccctgtctctacaaaaaaaaa

SEQ ID NO: 53023 - DNA, 614 bp, Homo sapiens
  misc_feature 32: n = A,T,C or G
taccgggcccccccctcggaaatacttctagnattaattaacgcgggtcaacctgtatggataatttagggacgaaatccagggggcaagtcttcagaaacagatttacttgaagtgcactacagcactcaacaacttaggcaatatgaaaacacaacctctcaactaggacaatccctcaacttaaaatgaccaagttttgtcttagtcatacaattatttgtgaatttgtatattctgtaaatccacaaataattcaacattagatttcaacagaatgtgtcactaagcaaacgttcaagtactataaagcgactgatattctggagaggttgggggtaaactagccaggttatatattctttcataatagtaattttaacttacatgttataacataaaagcggagtaacaatatgtatgcacaaatttagagtattcatatattggttgaaaactgtccacaatgcccatttctgtgattaggaaataagaacattgtaaattagtttttactttcttatgaagactttcactaaaccatgttgcactattttggggtggtaacaaattgcttgaatcagtaagaaccctaattgatactttttgtttca

SEQ ID NO: 53024 - DNA, 464 bp, Homo sapiens
ccccctcggggtacttctagaattaattaacgcgggccctttattggtgccaattctgtcaatgggatcttagtcatctcaacaaatatgtagttctctttaaaatgttcattgctagaagaatgtatagcacagtaacctgcaattatttattcagaaacaacaaaatcctgagagctcattttacctccacatgaaataaaccaatattacattgttaaaatatgtttctctattcaaaagaaattcagtagtcttttaactttcaacttctttttttttaattttacaaattgcatctttttttcacaaattgcatctttttttctatgttaggacaaagagaaagggaaaaattaattttgttgacataaataaaatcatatattaactttttataatttttagtttactaagagcaaaagataatgaggtgtattgagaacataagctatcaaagagac

SEQ ID NO: 53025 - DNA, 590 bp, Homo sapiens
  misc_feature 13: n = A,T,C or G
ccgggcccccccntcggggtacttctagaattaattaagcagctctcaggaatgatattgaaaggtaactgattaattgaacattgaagccatctaatcaaatagtgaaacaataaatatgtttcttcagagataaattatgcattcattagcatattcatttatacagttgagttaactctttgtgtgcttttcgttttgcctagttggaaatatccacctgctatagattctctttctcttctttctaaaaatgcctggagaacgtgcctgtatttcttcaagatttgaataacttacttattaaatatgcaagctttttgttcacaaaactgtgaaaaaattcactaaatcaatgctttgtcatcttatacaacctgcagccaagcagaccatacaatagcactgaagataaatcagtaagatactattttatgctgaacccagagtttaataagaacatacagttgtagaatcattaatgccaaggatccatcaatatattcatatgtaaatatgcaaacatgccttttaccatgtagaaacatgtttgttttttttccatgtgagccttcagagaagatggtcac

SEQ ID NO: 53026 - DNA, 357 bp, Homo sapiens
cccccctcggggtacttctagaattaattaacgcgggattctctgatattttgctgcagagacctctgcagtgacctttgattggctgaacccactcgaaacatttggcatgggagcctgagtaaagtggtccactggccagagagaaaggacaaatatggcccatgaagatagagaatgactagcatgatgttttgagggtatttttggttttgaaatcaattagcctgggcgccgtggctcacacctgtagccccagcactttgggaggctggggcaagaggatttcttgatctcaggagttgaagaccagcctgggcaacatggtaagaccctgtctctaaaaaaaaaaaaaaa

SEQ ID NO: 53027 - DNA, 591 bp, Homo sapiens
ggccccccctcgaaagtcttctagaattaattaacgcgggccttcatttatttttctgagaacaaaagggatgcttctgacataaagaatgtattaaattatatgcctagcccccgtaattaaaatataacaagtctattaatatatccactaaatccttcatgaagggaccaaaagctaaaattgggaaatgaaaatctatctagagaggcttttttccctatatctgggttagtatctgacttagtcaaataatcatgttgactatctgctgttttacctatgaaaatcaacactatattgttactaaatgtgtatctcagatattggttccacaagtgtggtccctgcactggtggcatcacctgaggtattataaatgaaattgaggcctcatcctatacctactgaaccagaaattctgatgtttaaacccgacaatatgggtctcaatgtgatcactgggtaattctgagtcatgctccaggcagagaaacacaagtatatatcttaaactctaagtactaaaatgtgagatgttattcatttcactacttataaacttacaaatgaaacacacccaaatagtac

SEQ ID NO: 53028 - DNA, 611 bp, Homo sapiens
cgggccccccctcggaagtcttctagaattaattaacgcgggactgatacactccttatcatttctcttaatggttacctgacaactcttcataatttgcaagctgaatactattcacagaatttcaggaaaacagttcccttaagaatgaatcatactttcctgatctcattttaaatgaggcctactatatttttaaaagcagaaacacatatcaagacaaaaatgataaatatcaccctgtctccaattttatcaaatacacattattcaccctatttatatgtaaatcacataactaccatgaaatgtataatctaggcatcacatcagtgtacaatatttctaactattcaagctttagcagtgctcagtattcagagttccgtgacccagagcaaaaggaaaaaagccagaaatcacaatctctactgcaatggaagcctgaatttcaatgatgaaagattaatgagggcttactttgataggtttagttcttgagtaggaaactcggtttggtaaatcattatcaaagtacccactcttttacttgatgaatctagcttgtattgttgttagaggcatagaaagttacctcaataattaaaggt

SEQ ID NO: 53029 - DNA, 430 bp, Homo sapiens
cgggcccccccctcgaaagtcttctagaattaattaacgcgggcatatgtaaagaatgtacaataaagctatttattcttctatcagaaccattcacaaattctacgcataagcctgatccacttaattatataggaaactaaatgtggtctgtattcaaaagtcgtcagataatcaaaaatatatttaaaccaaagaatgaatacgtaactgatcacaggtacaattaaaagatataggcagctttagcagactttaatatgatttaagaatatttgttcatatttgtgtggccacactctgaatatacactgacttggagaaagcttttttttaaatctagttaaagcaatggtctgaactcccttagcattagatgagataaatacaaatcaaaattatctttacatttaaaattcccttcatatta

SEQ ID NO: 53030 - DNA, 541 bp, Homo sapiens
  misc_feature 41: n = A,T,C or G
aagactggggtaccgggcccccccctcaaaatacttctagnattaattaacgccgggccagttagtattggttcttacacatgtcatccagaaaacataatttgttgcgtagccaacactgtcctcttatttccaatgatactatacaaagagattcaatgaaacctcaaaataaatcaaacattgaatctacagaaggaatacagaaacaggattctctgaaaaaaatccatatgatataatgcccctggttcctgaggatttagagaatatctctaccccagcagcacccagcccaaactctcagcaatgaatcctgctttcaatatcatggtgctaacccctaatccttgtcagagtcctcatttcatgacatagtcttgttgaaattggcataggtataccgtataccatctgtcatgggatgaagagaaaaaaaaagcctctggcttcttccccatagtactaccattgtttcttcctccatttttattcttccagttctagaagctcttttctaaacctcaaaaaaaaaaaaaaa

SEQ ID NO: 53031 - DNA, 597 bp, Homo sapiens
  misc_feature 16: n = A,T,C or G
cgggcccccccctcgngggtacttctagaattaattaacgcggggagttaatgataaaccctttcaataaacttattcaatctaatacatgtaactataaaaaacccacaggcaacactggacttaatactgaaataaaaatgttttccctgtatcactgggaacaagacagagacgcccactcttaccacttctgtttaacactgtaagaaaaggtcctaggcagtgcagtaaggcaagagaaagaaaagcatacaaatccaaaagggaaaagtaaaatgcactgtacttgcagatgacatgattgtttaggaagtaaatattaaaggatttacaaaaatagcttttagaattaagtagtgaatttagtaaggtcttatgacataacattaatatataaaaatcaaccgtatgtatatatattagcagcaaaaatttgaaaaaatgaaatttatggccgggcgtggtggctcacgcctgtaatcccagcactttgggaggccgaagtgggcggatcacctgaggccgggagtttgagaccagcctggccaacatggtgaaaccccatctctactaaaaatacaaaaattagccagg

SEQ ID NO: 53032 - DNA, 490 bp, Homo sapiens
  misc_feature 57, 58, 81: n = A,T,C or G
gggccccccctcgaaagtcttctagaattaattaacgcgggcctttaaaaactcatnnttgacttgtgagccccgaaacanccttctatttggaaattcacacttttacaagtagataatcatatatattgattacagcgtgtttcctattttccatactattgtttataatagggaaaatggaaaatgttaagtattaaatacacaatggagcattttttaatgaaataaattttggatattatgaataagttatatctgtatgtttagatgggaaaaatgcttcaattacaatatgagaaaaaatatagaaaagcatatatgctatgatattcccttttgcttatttatgttttgtattctttgcataaaggacatggattattcatgttaaagtaaataaaaacatcccatgataagatgatttaaatgttaagcatcattagatatttagcttctttttttttcaaggaaagcaaaaaaaaaaaaa

SEQ ID NO: 53033 - DNA, 455 bp, Homo sapiens
gccccccctcgaggtacttctagaattaattaacgcgggacctaataaaagcaaatttagttttcttcatttatgaatccaataaacatcatagactcaacttcctgatatttatgctctatgagggtttctccaccacacaaatttatgtccactgagagcatcttatctctggctctgacacttttggcctcgaactaatcactgccattgaccattgcatctgggatgcattagactctgtccctaggtgcttcaagattttattgtacaacaccatttaacaaattattttattaataacccaaaccctgtgaatcaaggtacattttaaagcctaataaaattatggtttgggaggccaaggtgggaggatcacttgaagccaggagtttgagaccaatctgagcagcacagtgagactccatctctgcaaaaataaaaaaaaaaaaaaa

SEQ ID NO: 53034 - DNA, 595 bp, Homo sapiens
  misc_feature 541, 556, 568: n = A,T,C or G
ccgggccccccctcgaggtacttctagaattaattaacgcgggcctatttggatactgacttaatggccatagactaccacatgacaaaggtagattcagtgctgatcaaagtaagagaaattgcaaagggatgatcaaagagttctagaatctccaaatttgtgcaagtttcctgatctggtagagttatattctagaacactgacaaaataaaatattaaattgataaatatagtggtctctgaagaattgcagtgaatgagatgacagggaagtaagaaattgtcatgttttgattcttcagaaagagagagagagagaccagaaagagaatgagaactgtttccaccaatatcacagcagtgccttaattttggtttcttcataagtaattatgtgattgtttattagtaacagtttatgaataccataagaaaaaatagaatccatttagcctatcatggcttccctaaaaataagatgtcttgttttcttgtttgagtgggcttctaaaccatgaaataagaaagtgtggtaaanaagtacaagtaaatntcagacatctanttttatctcttcctatgaatatgacta

SEQ ID NO: 53035 - DNA, 565 bp, Homo sapiens
  misc_feature 108, 488: n = A,T,C or G
ccgggccccccctcgaaagtcttctagaattaattaacgcgggcagtgaatgattattactcatctgcttttatctagtgcttctgtcatctaatataggaattgggngaaaaaattaacaactcctttcctgtggagtcaagaagcacaaatgaacttaccctgaaaagttctgttacctgaaggaaaataatcaagcgaaattgggggagggtgttaatcgacagaacttgaaatttgtttttctgagtatgtgattttatttattagagattctagaagtttgtcttgaagttgagacaaattcacataagattttgagttaatccaccagtgccttttaattataacatttataaacatctgtcataaaaactgatttctgcttatcctatgtcagatgaaacagtatttgcaggttatcaaaagtgctgcccctaagcctcatcagttcctgctaatagctgataaaattatatataactctntaaatttctagtattcctttttatagcttcccttcccctagctcttacttgcttaattatatactttatgggtaaag

SEQ ID NO: 53036 - DNA, 588 bp, Homo sapiens
  misc_feature 39: n = A,T,C or G
gactggggtaccggcgccccccctcggggtacttctagnattaattaacgcgggcatgttatcttggcatattgtgactttcagtgaggcttgtttgctttttaaagcctttgcaccaagaattggcagttggactgaaaaagacaaaaacaaataaataaatgacaagataatcagtcttattactactcagcttttctaattggtgattctgttaacattaaaggagtttttagtaatccaaattacttataactcatttactcatgttttatatagatgtcattaataattaattgagtatgggctgtattcttttctgtatctgaaagcagagtggaaattgtttactgcatttgagatgactatttcacatttaatacacttaaataacttttccacagtgcaagatgtaagttaccttggcaggaaatttaccttttggggaaaatatattttaaatacttaaggttcttagcaatcagtatgtcttagttcaatgtatagagaaacaaaaagtcagatatactaggaaatgccttattaaactctttcagatgggtataattctttaaaaaaaaaaaaaaa

SEQ ID NO: 53037 - DNA, 597 bp, Homo sapiens
  misc_feature 509, 583: n = A,T,C or G
ccccctcggaaatacttctaggaattaattaacgcgggtacagaatgagccaattaatgttgccatggttaacaaattgtaattttgacatatctctaggatagctttatcagtaatatcagtattatgcttttaaatgttgagttttatgggtaatgggttaatgtatcattacttcctttcttggggtaaatcagaagctctcccttactttggtcattgtttcggaaaaacttactaagaatggacgttatgagtaggatgaataaattaatgcctttacagtataaagctttacttttggccaggagcggtggctcacggctgtaatcccagaactttgggaggccaaggcgggtggatcacaaggtcaagagattgagaccatcctggccaacattgcaaaaccctgtttctactaaaaatacaaaaattagccaggcgtggtggcgggtgcctgtaatcccagctacttgggagacagaggcaggcgaatctcttgaacctgngaggcagaggttgcagtgagccgagatcataccactgcactccagtctggcaacagagtgagactccatctcanaaaaaaaaaaagcg

SEQ ID NO: 53038 - DNA, 492 bp, Homo sapiens
  misc_feature 21, 32, 445: n = A,T,C or G
gtaccgggcccccccctcgangatcttctagnattaattaacgcgggggttttatttatttatgtacactcaatcaaactatgactattacaaatggttttaccgctacaataaagatagttaattcataactcaataaaaatgaagagtgaaagattaaaaaaggaaagcaacaattctaaactataaaatctacttcagaaagctacatacagcaaagctcaataaataaattatgaaaaaaagaataatatgggataagttttatggtttaggagataccttcctataagccaaaaacctaaaaaaaaaatgctaaaggtatagcttgctatagtacgtggtaggagaaattaacatgtataaaatcaataacactcacattatgtgatagtctacagccaaagaataatagaaagcaagtgaaatgcttagcatagctatntagtctactaaattaggtttgtgaaaatgggaatgccaaatgcctta

SEQ ID NO: 53039 - DNA, 565 bp, Homo sapiens
gggccccccctcggaagtcttctagaattaattaacgcggggaacatgtcttcaggacagataggggttttcattgctctatgaattctctctagattaggacatcacgccaaattctgccatatagcagagtgcctctgatttgtcatttaagtcctctgggattcaggctttttctctacattaaaatgagaagcctaaaacagcatgatctccaaggtcctgtgctgtccaaaatgctataaagtctatggatatcaactgaaaatgtttgctaaatatgtgtgtgtgtgtgtttggcagaatagtgatttttagaaatattaccagggaaaaattcttagtcaatattttaaaaatgcatgtaaattccacaaaaattaaaaattaaaatgcatatgtctcctatataatttcactgaaagaagcacaaaaataaacattaagagaaattgtagtcttttaataaaagaaagaggtttcctaaatagaaagcattttccatggaccttcacataattatgatgtctattttaagttattcctaaaataattgtttgtatga

SEQ ID NO: 53040 - DNA, 592 bp, Homo sapiens
  misc_feature 27, 511, 557: n = A,T,C or G
cgggccccccctcgaaagtcttctagnattaattaacgcgggggagagagagagaaactttaaaagtttgatctaatgtacttactaccaaataaagattttacctatagattgaaactaaattgtaaatgtcccaaatacttttcccgatgaaattcaaacaaaattagacttttatacacacaaagcaaaacaaaacacaacctatatataatttcaagattaagaaaaacaaaacaaataaaagcattctctcaagaccttgcttcagttgtgtaaaataattaaatgtgctattccaagttgattttagtttttaaatacagaatttgataaaagataagtaaaagaaggccttgggttcagggtggcagatatttagtgcaccctttatctagttcaggaaacacttgaaagatttatcaagtttccttatgtaatgaaagacttaactagttcaaataagcaatacccacagaacataattagagcagcatattggagcacaatntttttttcataaagactaaaactgaacagcagcagattgaaacacnaattttttttctaaagactaaaactgaacagcagt

SEQ ID NO: 53041 - DNA, 477 bp, Homo sapiens
ccccctcggagatacttctagaattaattaacgcgggccgcttggatgctccctggtgaaagggccctagttgagagacatagtacaccagtgacttgcaactgttcatggaattacactcaacagagatcgagagaaaaccatataaaaaacattcccaataaggcaatggttcccatttattaatcgctggccacaaaccgatgctttaactcatattcgcatggtgtcgggaaatgagggccaactctaaattctatgtgtcaaaatagactgccatttaaaatattacacattacggcatagtgttatctacggaagtgtacaaggctgtaaagccactactgagtgactgaaagtatatcaataatacaacattgaaaacaataagctagagtacattattagacagtgatttcatgttgctgactatagcaatcaaaactatgtgaattgggcactgaggctcatgcctac

SEQ ID NO: 53042 - DNA, 259 bp, Homo sapiens
  misc_feature 41: n = A,T,C or G
gccccccctcggggtacttctagaattaattaacgcggggnaaccttctttaataaactcattttaaaactcttgaaaaaaaaaaaaaaaaaaaaaaaaaaaaaaaaaaaaaaaaaaaaaaaaaaaaaaaaaaaaaaaaaaataaaaaagggggcccccactgggggggagctccatttccccctggattaatattttttcggcgccccccccggggggggtttcccattcccctttttgggggttctttttccccccc

SEQ ID NO: 53043 - DNA, 566 bp, Homo sapiens
  misc_feature 22: n = A,T,C or G
cccccctcggaagtcttctagnattaattaacgcgggtcttactaaaaggaaattagaactcataaaatgaggccaatatttaggggatccaaatctatgccctaagaatcaattatagcattctccagcaaagcagtgaaaccataaaagttgattcctctcgctacacactctagagatgctcaggactccactccttaccacacctattaagctgtcccacaaaacccgctctgcggaaaagatgtgcaagggagaattttcctcctgaaatagcagggcttggacaattcctcagtccatctaagaaagtacagaggacagagagcagtggtgactctagttgatggagcttgataaatgttatttcagcatccacagatcttaggtgtgtatgcgttcatgagggatggaatattttgtattcagatatggggtacttcttttattaaaaatgtgtcttagtcacccccacaatgaattggtttttaatcagagaaggtttttttttaaatattatgttaacttcaacattccttaagaagaaaattaagactgttcactc

SEQ ID NO: 53044 - DNA, 598 bp, Homo sapiens
cgggccccccctcggaagtcttctagaattaattaacgcggggacagccacagtaataaacagacctgacagctaattcagattcctgctctgcaaatttagcattatgaggctgagagcagtgatgaatagaagcaataaaaccgtcttgtatttgaagaacactttaaaatttgtctaagtcttttcaaatagttacctcaaacaaataaactgaaaatttaaataacccatccaaggtcacaaaattaatgcatgaaagtctggcctagaaacctgagtcccaattgctagccattgttccttgcaataacaatgctgcttttgcaagaaagactttaatcaagaattatacacttcaacatttcaacatctggatgtctaactcataatggtattctgtagtctaagaaaacttcatatgttatttagccagtatatcctaaataaccttttaaaaaatgtaaaaatatttttccagcttccacatgacttcaattggacttttggatcctggtgattgtggaagtatataaagcatacaaattcaagtcccccttgcattatttcaaggttcataatttggaaactactgatt

SEQ ID NO: 53045 - DNA, 589 bp, Homo sapiens
  misc_feature 31: n = A,T,C or G
taccgggcccccccctcggaagtcttctagnattaattaacgcgggagctaggttgaacactataggtaaatatatgtaacttatatagagttactttgtttttgtagtgtaagacaaatgtccagaaaaagaaaagaaaaaaatgtatgtgtgattatgtattgtacatacacatgtatataaacacatgtgcatataaaagcttctgttatgtgtattataatgcctctaaaatatataattctgctgaaattgtaaggagacaagttttatttcaataagacacaaaaataagaggaattggcatgtgtagttttctttacttaagattgcattcaggttttgtattaggattgtactgatcaagtaaaatgagataaaatatgctttcttcttttaattttgagaatatttgtgaaaattcatatttttcctgaaatgcttaaatgcttgtagaattcatcaatgagaacttactggttggtgttcctttgagggagattttaaattatggatctaatttattaaatagatataacattatgcatatttggtatttcgatactgcccggacgcaggggctcacac

SEQ ID NO: 53046 - DNA, 534 bp, Homo sapiens
cgggccccccctcgaaagtcttctagaattaattaacgcggggaagtatgtaagaaaatattctaattttctctagagtttaatttcagtataaagaccaaagacatttttagtaacatcttgatgagatttcagtgaaactgtctgcctgcatcattaaagcatctgtcttaaactgtgacaaaaacaggtaatatgtttcaactaagatgtgtcatacttggaagtattactagtccacattcaatttctgacatcatatgaaaagatgctttgagtttaaatatagattctattgaattgtagccacttacatttctaatatcatactgaactatacagtgaggtaatagagtgatgctgtatttttacttataccatgaaaggcaatacattgcttagtcattctcatattcacaagacaatatcataatggcataagaaacagattgatgatttcaaaagtctctctaaaaccattcatttatttttagatgaatgagattatttcataaggcaagagtgtttaatatt

SEQ ID NO: 53047 - DNA, 290 bp, Homo sapiens
ccgggccccccctcggaagtcttctagaattaattaacgcgggggggggaagcctgataatggaccgtttcgttgtcgctgtgatttatatttaacgtggtactccatttatctataattctagctttagaccattgacactttttagctcacaattgaggactatgatgcatattctgagtgctcagtgaataaaacactctggtcattgatgtttatattggtataaagtcatgtggagtctatactgggagcctatctacttttacttcatgaataatgttaacaca

SEQ ID NO: 53048 - DNA, 590 bp, Homo sapiens
  misc_feature 579: n = A,T,C or G
cccccctcgagagtcttctagaattaattaacgcgggggtctaataagggaattagcaccctaatctttatgtgaaatactccttgatcgtaatcttaaaatctgatttacagttgccatgcaactgcagaccactagttgtatagttgattaatcaagatgtaggcacttaatccaaattgaacctgtcataatattccacatccttgacaaaagtaattgtgttttcaggtagaacctgcccactgaaaaacttaaagctctttgctaaagttattatttatattttttaaaaatttggattagaaactgtacattctggggcaatcctattgcatactattattatttctaatgtatgatgaggatgttgaagcagataaaggcaaaatgtcatgttcatggatcacatacctaataagtactagaactgaaatccaaacaaacatgttttggctccagagtctgacaattaactgccatagtctgctggcgtttggtgtattgtggtcctactatacgtgtagtctatatatacaagagaatagcagagaaatcttatcaatccttttcctaggntgaaatgataa

SEQ ID NO: 53049 - DNA, 533 bp, Homo sapiens
  misc_feature 9: n = A,T,C or G
ccccctcgngggtacttctagaattaattaacgccgggtgtggtggcgtgcacctgtaatcccagcctggatgacagactgagactccatctcaaaataaaataaaataaacataaaaaactggagatcacctacatttcccatcaacagaacagatagatatgttgtgatatagtcacacaatggaatagaaatcttaaaattatatactttttttttttcactaaaggaagccagatataggccaggcatggtggctcatgcctataatcccagcactttggggagatcaaggtgggtggattgcttgagcccaggaggtcaagaccagcctgggcaacatgacaaagtcccatctgtaaacaaattagccaggtgtggtggtgcgtacctatagtcccaactattcaggaggctgaggtgggaggatcacctgaaccccggggaggttgaggctgcagtgaactgtgactgcaccactgcactccagcctgggtgacagtgagagcctatcaccaaaaaaaaaaaaaaaa

SEQ ID NO: 53050 - DNA, 535 bp, Homo sapiens
  misc_feature 24, 424, 464: n = A,T,C or G
gccccccctcggaagtcttctagnaattaattaaccggggaggtaagtgttcttatcatgcccattttacaggtaaacagttaccttgcttttgatcacatggatggtaggtggcccaaccaggatgaccaccctcagggtgaccacctccagagtctgtgcttttaactatcaagtaattctacctccgtatactagttataccgatgtagtgactatagaatctaaagaaaaaatgataggccgggcgcggtgactcacgcctgtaattccagcactttgggaggccgaggcgagcagatcatgaggtcaggagatcgagaccatcctggctaacacggtgaaaccccgtctctctaaaaatacaaaaaattagccaggcgtggtggcatgacctgtagtcccagttactcgggagactgangcaggaaaatcacttgaacctgggagggcggagagtgcantgagctgaaatcgcgccactgcactccagcctgagtgacagagcaagactctgtctcgaaaaaaaaaaaaa

SEQ ID NO: 53051 - DNA, 615 bp, Homo sapiens
  misc_feature 563: n = A,T,C or G
ccgggccccccctcgaaagtcttctagaattaattaacgcgggcctctcttcagaaagtctaagaagggtcctggtcacggatatatttaaaagctttactagtaattatgatgtgaatcctgataaagaaatactgccctaaaaaaggtttagacctctaattaatatactttttaaaaggttttttgatggctaaattttgaaaataaaaaataacaatgttggcaaggatatagagatactccttgtatactgttggtgtaaacgtgaaattgtataactgttatggaaaacaatttggtggctgctcaataaattaaacatagaatgacccaactatttcctcctgaatgtatacctcaaagaaataataaagacaggtattcaaacaaaactttgtacataaatgttcatagtggcattatatagccaaaaaacagaaataacccaaatattcatcaatgaatgaataaactaaatgtggtatattcatacaatggaataattttcagccataaaaaagaaatactgatatatgctataacatggatggaaacactangctaagtgaaagaagctagacaccaaaggccacatactatatgatttcctgt

SEQ ID NO: 53052 - DNA, 495 bp, Homo sapiens
  misc_feature 27: n = A,T,C or G
cgggccccccctcggaagtcttctagnattaattaacgcgggttcatactaatctactagccacactcaaacataccttgcccttttgtgcctctttgacattgctcatgtcattcttttggcttgaaatgtgacctctaacccgtttctccattgttcaggctatagactattcttcaaacccaagtttaagtatcattttctctgtgacgcttttcccaatcttccagtcagttttaatgattcctcttctgcaaagctcttgcttatatcaagtaacgcatgtgaaagatgttttgtgcactactgagagccatacaaaggtaagttacttttagtattactgaatacttatattgtttttttttcttacagttatgtcatatgtgtatctttttcactaaactgggaacaatttgagggcagggatcatctttatttttctcacagcctagtaaattgtcttggcaaaataaatactacatagttgatgca

SEQ ID NO: 53053 - DNA, 573 bp, Homo sapiens
  misc_feature 38, 44, 51, 507, 514: n = A,T,C or G
cgggccccccctcggaagtcttctagaattaattaacngcgggnacagggnaagacaaaagccaaacatggaatcacagtaacatgtggtaaagactatcagtgaggtaaatgcaaaatggagtacgatatgctaccaggaggaggtgcctctttctgtctgaggactggagaagacatccccaaaaagtattcttctcatacccatgtccaatgcccacagcatcttcaccaagtttttccactgggagtcgcccctgtcgctgctactcatatcacaacttagtgacctagccacccttaaaggcaagagctcaggaaaatgtgatctctggcaggggcatggtggtgtcatgtgctcacataaagtccgagaggttcttgtgtacacagaaagaaagaaaaatgaataacgggtcaaaaagcattctctgccaaaaccttcatatattttaaaaatgagttgggctttgcaaaactttgggtttgggcagtcatttctcagctntaagganggtcactaaatctgaatttctatgatcctcatcttctactgaaactttttaatgatgtg

SEQ ID NO: 53054 - DNA, 608 bp, Homo sapiens
  misc_feature 167: n = A,T,C or G
cgggccccccctcgaaagtcttctagaattaattaacgcgggtatgtacccaatgattattatctattaaagtgatagaggaggagatttaaattattaggataaatacagtataaaatattggctttattaggcactctcttaaagtattgtcagatttaacatgngaaaaaaataaaatggcttgtatatgtaccttctgttttttttgtattcttattccagaatcataatcattagtctataatatcatatgttggaaagatttgttttttctaaaagaaatttattatagtatagtttgtctagaataaaaatgaactattataagtatataattccaagatttttagtaagtttacagagttgtgcagtcatcatcacaatcccattttaggacatttttgtcaccccaaaaaagtctctcatgcctgtttgcagtcaaaggaacttttatatttgcagagtattggggtatgatttttactcctggacctttcttactctgtactttgatcaagtatattagggcataaggtctaggatgaagctgagaagattttgaggttggaaggaatcaggagaccaggtttgggtattatctccat

SEQ ID NO: 53055 - DNA, 615 bp, Homo sapiens
  misc_feature 189: n = A,T,C or G
cgggccccccctcgaaagtcttctagaattaattaacgcgggtccttcctggttaatggaaactacattcattaatttatactctaagaaatgtgaatgagacgcataaccattatgagctgaaaatgtcattatgtttgaaagataggaggataacatatatctggaaggtttaaaaaagcttcatgngaaaaaataaattgtagatgcctttttgtgaatggtagtggtcaaataaacaaaaggcttggagatttgaaagtagttttgatcaaaattataaagcacaagccatattctgaatataattagttaacagtattgctagaggtgagggcaaattcaaaagtatcaaggtagcacacccctttctgtatatgatagactaacatgtatcaaaccaatgagagcaagcgtacaatggagaataaaatattttcttaaatttgtttgaagccatcagagacttatcaaaactattaaatcaaaggagcaaattccaggagaaaagaaaatctttcatcacaataatctgtaaaaagaaacaaaaatatctgagtagaatgctgtgcactataagtaagcttagaaacataagttggtgttcaggggctg

SEQ ID NO: 53056 - DNA, 581 bp, Homo sapiens
cccccctcggaagtcttctagaattaattaacgcgggggagtcagtgcttcctttatatgacattcttgggaaagaagggcagagtcagagaggcacagtttttcttaaatgaattctgaacaccttaaaggcaggaactgtgacattcatctctgaatctataatacctagccactggtatgaagaacaccattcagattgggttgaataggtagctttcatggattcccttttactgtgctctagctaggtagtgtaattttgagcagaatctccatcctcagtgaaaataatcagaaattacccctgtctcacaacacaacccaagagatccaaccctacccctaaatgcatagttgctattctcaactctgaagctccaggtgagggctctctttggaagtggcttgtttgggatggaatcttgttcttgggtgcaacccttactcccacttcatttttttagatgaggaatctcattgtctaaagaaggtaatttagttagctagtggcatgctgggatttgaaaccaggattcctgatttcccaatccatgtttatgttcagtctacaacctttg

SEQ ID NO: 53057 - DNA, 440 bp, Homo sapiens
  misc_feature 27: n = A,T,C or G
cgggccccccctcgaaagtcttctagnattaattaacgcggggggccgtgtcgaatgtgctgtgtttatcttgtctgtggagacgaagggccgaagtgtgaatgcacagcgccaccttaaccagacgttcaaatcattctttttaaaagctgcataaaactccgtggcatccagtgctccccaggcggtgggtgtttttgtttcatggtttgatgggttttttttgcccgatgaataacactgctgtgcaccagggtgcatacagccttaaatacctgtatgcagctttcaaagctgttctataatgtctcactttattctttccacatttgcagctttttatctttggatcttatcttttttctgagtttcttttggtatattttgttggtctttttccagtttcttaaaatgaagagctgttactcaaaaaaaaaaaa

SEQ ID NO: 53058 - DNA, 420 bp, Homo sapiens
  misc_feature 28, 334, 341: n = A,T,C or G
cgggcccccccctcgaggtacttctagnaattaattaacgcggggtggggcgggggagagcattaggacaaatagctaatgtatgcagggcttaaaacctagatgatgggttgagaggtgcagcaaaccatcatggcacatgtatacctaggataacaaacctacacattctgcaattgtatcccagaacttaaagcaaaaaaagaaagaaaaaagaaatatttaatgaaaatatgattttgaaaaaataataatgataatgaaaacattattgcatgtgtcgtcacctcagttttcatcatctcacagtttaattggaatattaactatactntgtatanttttgaaatatttgcttataagaatatcttatattagaacatattacaatagtatgtaatacaaacgtattcttaacta

SEQ ID NO: 53059 - DNA, 497 bp, Homo sapiens
  misc_feature 23, 430: n = A,T,C or G
ccccccctcggaatacttctagnattaattaacgcggggtggggacacagcaaaaccatatcactctgaaaactataaaacattgttgaaagaaattaaagaagacctaaataaatggaaagatactatatgttgatggattcaaagactttatgttgttaagatgacagtactcccaaacttatctacaaattcaacatgatacttatccaaatactaggtagtttatttgtagaaattgacaagtagatcctaaaatccacagggagaggcaaagggccctaaacagcaaaaacattcttgaaaaagaacaaagcttacacttcataaattcaaacttactatgcaagtatagtaatcaagatggtgtgatatggacataagactggacatttggatccatagaatgtaactgagaatctagaaatanactcttacatttatagttgattgatttttgcaggggtacccaagacattaaatggaagaaagattca

SEQ ID NO: 53060 - DNA, 590 bp, Homo sapiens
  misc_feature 486, 576: n = A,T,C or G
ccgggccccccctcggaagtcttctagaattaattaacgcgggttgtcaataatacaaaccagcgtttttttcctctttctttactgtagacgcttttctgcttcatgtattggaggtaaattgcctattatgaaagaacaccaccctctgtcgatatactgaagatgtgaaatccattattgaattattctctcatagttttattcatgcttaatgatttttagaattatgccagcagagattctttttcaaggttttatgttcaagatagaaagatttcatagtatggaaataaaatgtcattatttaaaattactagctagcttgcatgacagctactgggagttagtctataatacgtcttcatgaactggttacatatttttgaatttatatttttttcccaaggttgaatatttttaaaaagttgtaacgacttattttaaatttataatgtttcaaggtacatttaaagaatatcttanaagagaatgctccaaattcacttcttaaactacagttttcctacttggtaagcacgcttcattctggtgcatatataactgacttctcanaaaaaaaaaaaaag

SEQ ID NO: 53061 - DNA, 627 bp, Homo sapiens
ggccccccctcgaaatacttctagaattaattaacgcgggggaggactattttaacaattattgtatatttattacatgaaataatgaaatattgttaagaaccctactaaaataattctgtgaaatttgtatagaaactgcttatgttacactgttaagagaaaaaaagaatgcaaagttaaacatttactaaaatcattctgtctataagattagtgagttggtattaaatagctgggtcataaaatgcctggtatactgtgacccgagtgtgcttattgtaatcgcacaaagtatatcttattacccaggttgacaaacaatgccagaattcagttttacttgggatgcaatttggaagttagccttttcatccatggaaaagcaaagtgaactccctcctgccttacagttggagaagaacagaaacaagacagatactcaggcaatgaatatctctagggctggaccaagaaagagaaaccatttctggtaataagcaactaggggcagggattttccaatgtaaataagacctctttagaaacattcttgatgaacgaatacctgtactttaaaagaactttgtgtaattgcagaacgagaccgtcctgtctacacagtga

SEQ ID NO: 53062 - DNA, 589 bp, Homo sapiens
  misc_feature 17, 28: n = A,T,C or G
ccgggccccccctcggnagtcttctagnattaattaacgcgggtaatacaaatatataccctcaaattgatagatgtatcctgtaaacactgctttaagtatacctgacaagtgttgatatatctttattggcctttatgtaaaatatttttctagttgtcattgtgatttattctgtgtcccaggtgtttcttcaaagaatattccttaatgattatggacatctctatatctacctcaactttgtcaattaaacttatttgaagtcatgttattgtatgtctgcatatttaaattttgaaatatttctgccaaaaggaatcgtataaagcaactgtttgagtgatgtgaggacttcagcattaaaatctgctatatcaaatattagtatatctatactagcttgcttttggttagactttatgtagaacaactttttctaacctttcatatccaactatcctttcatgagtttctcatgtacagcaaaaactatggctttggtattttgttcactctgatcatttcaatctttaatttgaatacttgtattttgtataattatttacatacttaattttatatctga

SEQ ID NO: 53063 - DNA, 430 bp, Homo sapiens
  misc_feature 27: n = A,T,C or G
cgggccccccctcgaaagtcttctagnattaattaacgcggggggggttctttcctttctgtgtgtcaaacattgtttttttgaagtctaacaacaatttacacaaattttctaatgactaatattctcttttcttataaacttgttaaaaattctttataaagggaaacaattttctaatagacctgtgttctatctgaagaaacctttcaaatgtacattgtttaagggaaaaagttttaaagtttgaagagatttaaagatgagaattttaagccaccttatcacagagaccctaaccaaatggcattaaaaaaaaaaaagtagagcattacctcatacactcaattaacatctgaattaagggaaacattcacttgtaggtggggaaatttttattagcaaaacttcactgacaaaaaaaaaaaaa

SEQ ID NO: 53064 - DNA, 255 bp, Homo sapiens
gggccccccctcgaaagtcttctagaattaattaacgcgggggtatacaaaaaacaaaaaaaaaaaaaaaaaaaaaaaaaaaaaaaaaaaaaaaaaaaaaaaaaaaaaaaaaaaaaaaaaaaaaaaaagggacaaaaaccaaagggggaacccccattagaccatatatagaattagattaaaacacacttaatttggccgccccctcccggggggtggcttgaaaaccccttgggtggacgaacttaacccccc

SEQ ID NO: 53065 - DNA, 584 bp, Homo sapiens
cccccctcgaaagtcttctagaattaattaacgcgggaacaataaaaaccaaaaaaaccaaagtgatggttataaaagcaatatataaatgtgaaaaatgcttctgatgtaatgtcaaagaaatcagaattttacaatgagtctgactgtagctatataaaaattcatacacataagaaaaacaaaataaatactaataattttcttttctctactttctatactgtcataatgcaataatacgcttatttttattttaaaagaatgaaagtgaattttaaaaaaagtctgactctgagatctgtgttcagattatccctttggtaagaccatactgggccaggcctgacggctcacacctgtaatcccaggggcggattacctgaggtcaggagttcgagaccagcctgaccaacatggagcaaccctgtctctaccaaaaatacaaaattagccaggtgtggtggcacacgcccgtaatcccagctactcaggaggctgaggcaggataatagcttgaacccaggaggcggaggctgtggtgagccgagaatcatgccactgcactcagcctcggcaacaag

SEQ ID NO: 53066 - DNA, 326 bp, Homo sapiens
cgggccccccctggagatacttctaggaattaattaacgcggggtgggtattgatctccatttgagtgattgctttgtactaaggatttaagattataaccttataaggccctatgcgatgtaaaagccaaaaacatatagggatatgcactctagacatagacataaaaagtgactaacattgtaacgcagaaggttaggagatgaaatcaaaatttgtactgcgattatgatattactgatcatctagatatatctacagtaaaggattggaagggatggtggtgaataatagttgtttttagtggtcttaatgggggatgcat

SEQ ID NO: 53067 - DNA, 588 bp, Homo sapiens
gggcccccccttcgaaatacttctagaattaattaacgcgggtacacaaaacaaccgaatgaaggagcagaaagagaactttgagcctcagctgcatttttgctgagctgtaatactggtaaagcctgtttcaagatccaagagtccaccctcaaaattaaagaatgtaaacagagggctgtcatgtacatttcatcacatttaccagagtggtgtttcataaaaagtatacatattcattatcaaactccaaacagcgttaccatcattactgtggttctacccaaaagaaacctcctagtcaacaatattatccagtttgttaaaataggttttcaaaaagaaatcaatcattaagatgtctctatagaattatggaattcataatttcaaataatgtgcataatgcctaagaaaaagagaacgaatccaataaatgtcagctattaccattactattatcatggtaatgttttcaaactaaggaacagaaacttattcatagagaggccttaataagaagttactttgtcagaatccaagttggcctatcacaacctgcaatagttagatattaaaaggactttg

SEQ ID NO: 53068 - DNA, 325 bp, Homo sapiens
cccccctcgagagtcttctagaattaattaacgcgggccattatgctttgcgagcctaggcattaagagtgagtgggatacccaaggcactgttctctcagttgctttcattttcacctcctgtggtgtgagcctctcactgtacggggtatgactcttgggtttaaagataggcatttaaggctgggcgtggtggctcacacctgtaatcctaacactttgggaggccaaggtgggcagatcacttgaggtcaggagttcgacatgagcctagccaacatggtgaaaccccatctctactaaaaaatacaaaaaaaaaaaaaaa

SEQ ID NO: 53069 - DNA, 574 bp, Homo sapiens
  misc_feature 495, 532: n = A,T,C or G
cgggccccccctcgaaagtcttctagaattaattaacgcgggatataccaattctacctacatatgtgatagcattatgactttgtaaaataatgcatctggtaataggcaaaggcaataataacagaaaaacaatgacaacaaaaataataataatgtcacttcaaacaggtacttgaatgcttatgagaggcctttgacttatttttattagtgaatgcatctggcaataaaattatcaaaatatcaaagaataatgctgcagaaatctctgagacaatgactaccagaggacaattaggaaataaaaagaacttaacgtaagactaatcccagtttgatctatagaataactcccgagtcacgagaaagtttgctttaatgtagattgagataagtgtaatattgatatatggcatttgctgtgagtgcatttaaatgtagtttgtaatcacagaaacatataagatacggtcctcaatatttacctctcanaacgataatattattgatataaaataaagatctgttntccttccactgtgcctcgtaggtaaaaaaaaaaaaaaagcgg

SEQ ID NO: 53070 - DNA, 470 bp, Homo sapiens
  misc_feature 87: n = A,T,C or G
cgggccccccctcgaaagtcttctagaattaattaacgcgggtactgctaaagattaagttactctaaaaatatacaagatcagggnaagaatatgatatgatctactgatttagttgagataaaagttttcccattcataaataaccctcaagttgcaaaccaatttacttccgcttatttctaggactcttcttggtgctctaatcattattctgcctggattttctgactttgaaaaaagagaaggatctggtgggtaagacttgcgtaatcactatcctgcccctcaatgccccattctctttcctgatttcaaaattcaggaatcaggttaaaaacaaacaaataggacatccatatcctaataaatcacctaaacaatggcagaagagagttaaatttatttctttcaaaaatagccaagtaggctgggtgcagtggctcatacctataatcccagcattttag

SEQ ID NO: 53071 - DNA, 372 bp, Homo sapiens
cccccctcgaaagtcttctagaattaattaacgcggggaaatactgaaattggatacgacacatcaaaaatatttaaatatgaaactacagagactctggctgagttgcagcctctccagttcacatgctctctaacagaactcagtcctgatgagtgtttgcagaaaattgtcttcattgtcaaccacactccacaaaatgatggctaatttgacttttacagatttaaaaatttggaaagcatttgagattgcctgccaactccacagaactcttttcattaatcagtaaataaagttttatttaattttttcacaaagagaactttgtggtcatgaacgcctgctgtctgctccaaaaaaaaaaaaaaa

SEQ ID NO: 53072 - DNA, 343 bp, Homo sapiens
aaagggaaaaaaatggcaccttcctaataattggggagtactaaaataatataccttgggcacctaccatactgtagtaaggctttgtatccacaacccttatcccactcttttccttgctactgcccactttggatatattttccatattctatctagtatccctctagtaacaaccttcttaaaattgcacagtttctttccttctgtaaaaacaaacaaaatcttaacctcgtaaaaaaatggttcctgctcttaggttgactttccctttcttttctaagtccctccacctggccctgtctccccctcacccaaacattaagctaatgccctccatttt

SEQ ID NO: 53073 - DNA, 581 bp, Homo sapiens
  misc_feature 24: n = A,T,C or G
gccccccctcggaagtcttctagnattaattaacgcgggagtcagacacaaaaaataaagcatgttctttacagaatgaattggtagcctctggagttctatcagtcttctcactgtgctgttcttatctttggtaaaaatgtaggtcaagcccttatagaacacagaaggaaaatatacccagatacagaattgtactctcccctatcttactattatagttactataataagttaactttagtcatttagtgccaaatataatatgaaagtataaatacattgacttgtgtctgggacatcaaggtgtaaatctcagcctttcttatgaggatccattatacaccattttgtcattccgtacatcagtttgctcatttattagatgaagaagataacaactgtaactgagtcatgctacaaaacactatatatattatattattacatataaaatggtaaatactgattaataaaaatctttatcatcattctcattatggctgatatcagatagaaggaaaatagttataccagaatttggggatcaaatgtttactgtaattgaataatcagctctg

SEQ ID NO: 53074 - DNA, 566 bp, Homo sapiens
  misc_feature 11, 74: n = A,T,C or G
ccccccctcgnaaatacttctagaattaattaacgcgggggtccaagcatggccagagcagttacggtgccctnctggacagctgtccaggaagctgactatggctcatcagcataaagtcaaggcccatggcagcaagaaaggcaaatcatgggaacagaggctcaagagagaatgtcaggggcctgccccctccccaccatcttttcataaaatgatacactcctccccctatattttcctggttcatcgcctatgcccatggaggaggaggtggagacacagcagtgccattcatcttaatgatccattccattaagtaacaaacataggctaggtgtgatggctcacacctgtaactttgagtttgagaccagcatctgcaacataatgagacctcctttctacaaaaaataaaattagccaggcatggtggctcacgcctatagtcccagctactagggaggctgaggtaggaggatcacttgagcccaggaggtcacagttgcagtgagccgagatcacactactacactccagcatgggcaacaaagggagaccctgtc

SEQ ID NO: 53075 - DNA, 511 bp, Homo sapiens
  misc_feature 16: n = A,T,C or G
cgggccccccctcggnagtcttctagaattaattaacgcgggcttcctcctgacaccgcccttcgctggccctccacctcccccacagccgcgagtgtctccatgccagaaggtgaagcttacttgtcccttgatggttccagagattgggtgctcagtttaagtcatttatctcctcaaggttttttcttttgggtttcccagcagccgaagtaggggtgggggagcatcaattgcctaatatttattgtaaagagaaaataactcccagcaaagcttctctttaacacttatttctgaaataaaaattcatgcagagcttcatctgggtaccctaaatcacatagaggaccaagtctccacaatagccctacaagaacggaatgcaggatatgcggagctatttcttgggctgcctctggatgaaggctaaggggtaaagatcgaccaacacaaggccagagtgcaatccaatatgatgcagcagtcacatccgactctgtgtggctct

SEQ ID NO: 53076 - DNA, 604 bp, Homo sapiens
  misc_feature 552, 560, 575, 582: n = A,T,C or G
ccgggccccccctcgaaatacttctagaattaattaacgcggggaggtgtaaaaactaaagggctagaggaagaaatttttttttgcatatcagacaattacatatgcagtaaaaatcacacaaatgtatcttggtcaacatacattttatgtaagaaacacaactattacaaattattatatattactcaaagtaatgctatataaaattggtttcttacagcattatgatttgctatcactacaatgtggaatctaggccagtaatttgcaagtgccaagtgacagcccctcccctccaagatacctggaaatgggggggaagaggcaggttttggtggccagaacatagcatttagtcagcagagtctgaggatgttcaatgtcttccaagtcaaagcacaatccagtcaaaaataaccaagatgcccctgatgagaaacactaaacaaaggaggatgcttcttgtatattaacaacagggttaatatttaagttcaattattgtgacaaattaatttgattctgataaaggtttgcgttctaccttanactacccnctcagtttaattcanaacttanagcagacctatagttataataa

SEQ ID NO: 53077 - DNA, 612 bp, Homo sapiens
ggtaccgggcccccccctcggaatacttctagaattaattaacgcgggcaattgacagtcattcttccctttctcaagttttgtgggtatttaccatgtcactacagaattgtaacaaataaaatgtatcttgtacaacttactctgaacaagtaatactaaataggttagtttcattcttactagtagtttccttgtataaatttcagaattcatagaaaaatatctgtaatactaagctaagtagcctttagttgccagagaataccaaacatacttatttaaaataacttcctattttaatgcacttttacttagaaaaaaatttttaacagctaattttaggatatttaagttgcttttgtggttatatctaaaagtggcaaaggctattataggaatcaaatttaaaattttagaaagacattttaaatgtgaacattctcagtttctattattttttgagaagctatgtcaatgaaattatgaggaaattgtgagttaataaattactttgcagtgaataatgttattggacctatggaatatagaggagtgtaagtattttataacaaattggtgaaaatgataacatgttttttcttgatggaa

SEQ ID NO: 53078 - DNA, 460 bp, Homo sapiens
cgggccccccctcggaagtcttctagaattaattaacgcgggatctcatttctgactagctatattttaattgctcagttgcttcaggtggttagtggctactctaatgaatagcacagttttatacattacaaaatagagtatttagccaggcacagtggtgcatgcctgaaatcccagctacaggaggctaaggaaggatgatgacttgccagtttgaggcggtagtgcactatgatcacacctgtgaaaagccactgcactctaatctgggcaacatagtgagatcccaactcttaaaaaaaaatagcacatttatatttctctgaatacctaaatttcaggagcgatgatatagatagaataaaaaattcctgtcttcatgttgattagaaacataaaatcatagtaggctgataataaccagcctcctccccaaacccccaaaaaaaaaaaaaaa

SEQ ID NO: 53079 - DNA, 440 bp, Homo sapiens
ccgggccccccctcggaagtcttctagaattaattaacgcggggtggcgcttataaagaatttaacagatagtaatttaaatgcaggttgtttgctttagagtctcttagtatgggtgtgtaagtggtggacatggaggaaccaattagacgattagttgggtctctcgtgatgaaacgttcatgagatactaatctttttagcaaatttgctttgcattttgccttttaattataatgcccaataaaaggagtacaggttcaaaagttttaagaacatcgtctataaacaactcagctaacttctcgctgaatattatgaagtacggagacttttactaaaggaagtattattattaggtactgaaaattactgctggggaaaatacatatttaatttttccttattcaaaatgtgtgtgtatctaaaaaaaaaaaaaa

SEQ ID NO: 53080 - DNA, 391 bp, Homo sapiens
gggccccccctcgaaagtcttctagaattaattaacgcggggaatcagcttgcttagctaggtgtcaattctggctctcctactctctgcggtatgactttaagcaagtcacccaaccctctctgagcctcagtttcctgtctgtaaacaaggataatatgctactggctacttcacaagactgatgcaatgattgagtcaacataaggaaatggttgaagagagtggctaggaattatcccctctgatacactcacccacatacaaaatgacctacgttcaaggtgatggtgacattttgagacaaaagactgaaaacaaattaaatgcacaatggtaagagatacccacacaatggcttaccatgcaactgttaaaaaaaaaaaaaaaa

SEQ ID NO: 53081 - DNA, 333 bp, Homo sapiens
atgaaacctgaacaactagagcacagggattctctcatacgctgacgatgtggcagggaaggaacactgcagctcctcatttgattttatgacaatgcactctatagaaattcatgacttcttagagttccatcctcaaatttagcacatcatggacagttggccacacatgcactatgagaagtttcctcctcagggttacatgtcagaaccatacaggtaagaataggaaatccttaaagtcagaagtcacttaacagtaggtttcttacaaacctctgtcttcccattgagttctttctgccttacaggggtggacatgaacatcctatg

SEQ ID NO: 53082 - DNA, 558 bp, Homo sapiens
  misc_feature 36, 508, 516: n = A,T,C or G
tgggtaccgggcccccccctcggaggtacttctagnattaattaacgcgggcacttttctgaagagaaggtttgcggcccttgcttccacttcctgacctctgacatactcctcagcctcctgctgcctagtttctgactctgttcttcagggtcctcagtgatctcattattgctaaatccagtagatgctttatagtccttattttgcctgaccccttggtaggtaacacttgatcctgttgttaacctcctgcttgaaatgcttcccctccacttcctgttttaaggtgtgcacacgggccaggcatggtggctcacgcttgtaatcctagcactttgggaggccgaggcaggcagatcacaaggtcaagagatcaagaccatcctggccaacatggcgaaaccctgtctctactaaaaatacaaaaagttagctgggcatggtggcgcacacctgtagtcccagctacttgggaggctgaggcaggagaatcgcttgaaccggngaggtggnagttgcagtgagctgagattgcgccactgcactctagcctgg

SEQ ID NO: 53083 - DNA, 621 bp, Homo sapiens
  misc_feature 10, 55: n = A,T,C or G
cccccctcgngggtacttctagaattaattaacgcgggaccaagttgaatttaancccaggaaagaaaaattagtcccaaattcaaagagctaataatgtcattcatcacatttacagattaaaggaaaaataaccttatgagtatctgaaaagctgccaggaaagcattaggtaggtcgaattcaatgttcattcataacaaaaacctacagcaaatgtggaatcatggaactgcctcagcctggtacagaatattgagcaaccaccttacttcatgttaaaacattcctttctaaatcagaaacaagacaaggatggctaccatcagcatttctattcgacactgtcttggagatcttgactaatgaaataagataaagaaggaaaagatataaggattggaaaggaagaaataaaaccctcatagtttgcagatgacgtgtacgaacagaaccccaaataatggacaaccaattcagtaagagccaggggcatttagcaagttttctggacagaagactaattcatcaagagcaaccacagtccatgtatcagcagaaaataaaacccacacgatttataaaagcaacaaaaatctaaagttcctgggatgaaatcta

SEQ ID NO: 53084 - DNA, 606 bp, Homo sapiens
  misc_feature 573: n = A,T,C or G
cgggcccccccctcgggagtcttctagaattaattaacgcgggaacctgggcgacataagaagaccctgtctctataaataataaaacaattttttaaaagattataatgtaacctcagaaagagattttaatattctagagtcaccagaatttaaaaattacctgccacttaaactattaatatccagatgcttcccattagtgacaattatactattgtgttgatttgctctattattgaagaaaaacttcaaatttttaaaaatgtgtaccgaatctttccctctactttaaatttctcaccccttgcctatattcctctatgctagcagtttctctgcaaaaaaccaaaacactgcattatccttacaaaataaacaataggaaaagaaacaaaaaatctctaccatatactctaattttaatgccttttccttattaatcaaattatggaggacaggatgttgttcaggaaaaaaatcatgaatgtgccacctactgattacatataataaccaagataattacttccaggtcagatttaaattccacttatgtctgtgggcagtctntaagagcatattattcttaaaaaaaaaaaaaaa

SEQ ID NO: 53085 - DNA, 588 bp, Homo sapiens
cccccctcggaagtcttctagaattaattaacgcgggccattactgttctgacatcacaatgactacagactgctgtggacatttgctttgacaaatttatgcttcatccattattttattttggtttctgtacatgcaatagaagcctttttcatagaagagagaaaagtaagaaaaaatgtctcccataaaattaatgagattctgtatacatacatatacatatattctatgagaaaatatattttctatatgagaatatattctccatatagtccatgataattttgttctactttttcccaatcttatatttctatacatgtaaatatagacatcaattaccttttcctcttacaatggtaagtctttttaaattattgcataaaactttatacaatggctgtattatgatatatttaaataattttctatccttaaacatattttttctatttttattgttatgaatgttactatttaaaaattatgcacagacatctcattgtatagagtttgtgttgacaattattccatagtatcaaatttcagagctggaattactgtattaaagttaaaaaaatgtg

SEQ ID NO: 53086 - DNA, 624 bp, Homo sapiens
cgggccccccctcggaagtcttctagaattaattaacgcgggctctacttctgttatgcttatttctatcaagacttaaaaaaataaagtgtgtttcttccttcttaaatcaaaataagtgagacgacagttttgtgacataaagggcatctcttcacagcactgatttacctaataatattggttgggaaggataacggaggatcatcatttaacaaccaccatacccacaagcatgattgggatggaaactatattttactgccctgattcaacattagcacttattcaaccttagttgaaatctattgggtgttaataccattgacactgggtccttcatccttgagtgacatctcttttactgactagctatctgattttcaacacattaaccaattttcccaaggcttaatttcttcaatgaaaaatcgggtaaagtatctgaaagtgttgttttaaaggctagatgtgcccattaacatatgtgaatactattagcagagggcgtgactcctcataggtttttaataatagtttatttccattctttgctagtccagtgaatttccttctcttctgctgaataagggagacaacattagggatagtctgttggttctt

SEQ ID NO: 53087 - DNA, 526 bp, Homo sapiens
  misc_feature 25, 38: n = A,T,C or G
ctggggtaccgggcccccccctcgngggtacttctagnattaattaacgcgggctacctttcaggtactatgctcattacctgggtgacgaaatagtcagtataccaaacccccacgatacataatttacccacgtaacaaacttgcacatgtattccctgaacctaaaataaaagagagagaaaaagatcttatgcctccaaattttcagacctagttgaacaatattatggaaattttctactaaacattgaagaaagactgtaggtaatttggcattctagaatctaaagcaagagaaaagtttagaagcaacactgtccatttaacaagcctagtagaatgcttatatcaaagcccatccaaacgaatgtgttaagaaatgtacatgccaacttcatttataaatattgattttaagattgtaaataaattataataagataaaaccaagctgtgggttaaaacaaatgggcaaagtcaaaggtatattaaggaaatctgtgtgtacttgagtgccctaata

SEQ ID NO: 53088 - DNA, 405 bp, Homo sapiens
  misc_feature 9: n = A,T,C or G
acttctagnattaattaacgcgggacagagactaaatatatatttttttattatgtcacagtaacaatagttacccttttatgaaataaatcaatcatgttcttaaacttatggtttatcccctagaacaatactaggcacatagtcaattttcaataattgtttgagtaaataaataaatgaatagctcagattttttgtgatgattgtcactcttttctcatttccataaaaagctagctgaatttagtttgagattaaggttgttgtatcaaactgggtgcttactttttagcagaacctttattagattcaggaaggcagctgcttatttatttattggtggctcaattgtttttatcttacctaggggaaaaagtaacagtatctcaaaaaaaaaaaaaa

SEQ ID NO: 53089 - DNA, 595 bp, Homo sapiens
  misc_feature 24: n = A,T,C or G
ccccccctcggaggtacttctagnattaattaacgcgggggggggggcaggcaatactgagtggccatctttttcaccttaactttgcagagataaacactaaaatcagatgtattccttgagaacacccacaaaagacatgaaacacacagatgtgtaaacagcgtaacagcttcatcaaaaactactcaattaattcacgatccaactgagttacaaatgagactataaagcccaaccataatacccaagcaattaaaaacagttacctcatgttaacaaagttgccccaaacagctgcaagagaaaggagaaaaaatatacatgtcagtattaaatctacaatattcagggattccaactcatcaaattttaatttttaaatgctattcaaagttcactgaaaaaaattagcattcacaaagacaataaaacatatactctgttttcagaaaaatgaagactataaaaagtagaaaataagacttccatgtattcttgtagctctggcatttggaattcaaggaagtgctttgaaaaatattttgtcctcaacattctgtttaagaaagattcattcctttaaaaaaaaggg

SEQ ID NO: 53090 - DNA, 632 bp, Homo sapiens
  misc_feature 41: n = A,T,C or G
aagactggggtaccgggcccccccctcggggatcttctagnattaattaacgcgggtcactggaaaaataatgctctttctaaagtgcccagttccctctatagatgatataattattgggcatcaggaaatcttcacggcttccctcacagtgactaaggcagatttgaaaacctaaatttatgtgtgcatttgtcaactaaatatcttaatataaataatatccaatgctattactttgctgcatatctgatgttaataatgaaaaaccgaaagtgattaattctaaaacactatgtgttaatatttctgtgttaagttcactgaaaagtttccttacatgccttccttttagaaatggataagacgtgggaattttatttaaaataaggggaagaaaggcatatctttaacttcacctttgtttgttaaattcagtgaacacataactgaaggtacgagatcagaacatacaccacaccacggttgttgagttaatcctccattgcctttgggggaattttatgaaaattaaaggtatccttgtattttgacaatttgaaggcctagggaaatagcattcaaaggacttctttaatgtgtagccttcactgagagcttattttaatata

SEQ ID NO: 53091 - DNA, 377 bp, Homo sapiens
cccccctcgaaagtcttctagaattaattaacgccgggtaggaaaattacagataaagaaacttcagaactatatcaaatcttttaatgtagaatttcaaggaaaggggcctttcttttaaatcttcccaccctgtcaacaacccatgctggttaaagtaaatgctgaagaactcctgccaaatgtcacatccacaaacagtgcgaaatgaaagcaatatctgtttctcttaagtgtgtgtatgttatcataaaatacaaaagatgaatatttcatatttcaaattgtggattcaagctattaccctagctgtaaataaaattttatacctgggactactggcataatacattagttttactaaaaaaaaaaaaaaa

SEQ ID NO: 53092 - DNA, 446 bp, Homo sapiens
ccgggccccccctcgaaatacttctagaattaattaacgcgggacattagtgaataagcagactgaatcagactgggtacaagaaccctgctaactctgatgatctaaagttccaacgtggaaaatcaggaatagaaaatatgattaggctgggcatggtggctcacacctataatcccagcactttgggaggctgaggcgggtggatcgcttgaggttaggagttcaagaccagcctggtcaacatgatgaaaccccgtctttacttagaaaacacaaaaattagctgggcatggtggtgcatgcctgtagtcccagctacttgggaggctgaggcaggagaatggcttgaacccgggaggtggaggttgcagtgatccgagattgtgccactgcactccagcctgggtgacagggcaaggctctgtctcaaaaaaaaaaaaaaa

SEQ ID NO: 53093 - DNA, 313 bp, Homo sapiens
  misc_feature 9: n = A,T,C or G
acttctagnattaattaacgcggggtcctacctactcaggaggttgaggcaagaggatcacttgagcccaggagctcaaatttacatgagctatgatgatgccactgcattctagcctgaacaacagaacaaaactctgtctttaaaaaataaaactgtgcatttgtgtagaatcacatttttctaaggatattcattgtagtgaagctttttgtagtaaaagaatagtctacattttatgtatatgagactggttcaaaaactctggtagccacacaaagaagtattgcacagctgtaaaaaaaaaaaaaaa

SEQ ID NO: 53094 - DNA, 543 bp, Homo sapiens
  misc_feature 23, 39, 51: n = A,T,C or G
ccccccctcggggtacttctagnattaattaacgcgggnagatagatttgngaaaaatacttaacacattaaagaaaatttaagagagacaaaaattccaaaagcttctcaagaattaagacatacaagcaagaaaacaaacataaaaagaaatccccatatgccattcattaggaacaagtatcatactgatattagttttttcaatagcaatgcctgatacaagaaaaagaactttagaactagaatttttatatccagctaaactataattctggtacaaaactagaaagaaagatgttctcaagctttcaagttctcagaagatttactacctaaagaccctctttgaaaaacactttcgggctgggtatggtggctcacgcctataatcccagcaccttgggaggctgaagtgggtggatctcttgaggccaggagttcaagagcagcctggccaacatagtgaaaccctgtctctactaaaaatacgggtgtggtggtgtgcacctgtaatcccagctactcaggaggctgaagcac

SEQ ID NO: 53095 - DNA, 481 bp, Homo sapiens
  misc_feature 28: n = A,T,C or G
cgggcccccccctcgaaatacttctagnattaattaacgcggggacaggtagatagtgtgaataagtgaggcagacattgtgataagaactggaaatcaagagtctcatcaaaatctgctattttatactcacatttttgcctgacaaaataatgaaccccagattggcagattttccatatttttaaggaaagcttcaaataaatatgtttaaatttgaacttctttagtttttaaaagttgccaatgaattttactaaaattaaataaaatatttgtaaaaatcagtatcttgtgtgagacaatcctggtggcctgatcaaataaataaaacctgtgactgtttcacatcatctcatcatctgaatgtattcaaattttatgccccccattatattatattacttatgccttaagccaattctattagtttctacaaggtggcacataagagagaatgtagagaaaatagaggagagag

SEQ ID NO: 53096 - DNA, 571 bp, Homo sapiens
  misc_feature 27: n = A,T,C or G
cgggcccccccctcgaggtacttctanaattaattaacgcgggtataaaagaaacatgatgactccagtgtctttggtttgagcaattggagaaattcaggtggcattaagcaaggtggggaaactgttaggagcaaactaaagaatttcatttggatgtattatgtttgaagtaactattaaataccaacaaaagatgtcatttaagtagtgcatataggagtttggagtccaagggagagttacaggctagaactgtacagttgtaaatagtcatcatatagatgatatttaaagccatgagatgggatgagactaccaatagatagttcaggtacagaatggaagtccaaagacagagccacagggggaaaaaaaaggaaagttgatcaaggcaggaaccagaaaagtagaagctcttggtttaaagattactgtgactataacttgatatacagtcagtcgaataataaacattaaccccttacaacatgccatgcactattccgtaaaaagtgtgaaagtcttataacactaaattgggttaataatgaagatgacattcgataaa

SEQ ID NO: 53097 - DNA, 592 bp, Homo sapiens
cgggccccccctcggggtacttctagaattaattaacgcggggagagccagctgaccattttataaggtagtcagttccatatttggagagctgtcaactctaatggccaaaattattcagagcacagagtgttatttatagcaattcaagaacagctgccctaagtttgtaagaattcttttatttttgacaaatcttatattccaaaatatcaaagcatactattccttatactcaaaaatatacaaattaacctgtgtacttagtgcctgtgatacattaactggcctgacctgtaccaagatgggttagtattacacgcaaggattttacatctgaaaagcaaaagctgaatctggtaaaggcacatttaatacagtaacgagtaagtttgccattggtccattagttcgtggaacatgtccttactttgtgatttctcattcccttgttgctggtgaacacctagagcacactttctccatggccccagtgagggtgaggagtgttttaccctaaaattgccctgaaaatcaggaaagcgttctgtggctctgaaaactcagctgtactgaatatatgtaaaccaag

SEQ ID NO: 53098 - DNA, 303 bp, Homo sapiens
cccccctcgagatacttctagaattaattaacgccgggtggacggaaatcaaatgagctaatttcaaaccagtgcacttgcattccgcattagacattagagacaatttcttgaaaaaaagatctttaaactgttagcttgatattaatttaaaactactaaatcatcaatacattgagccaggttccctgcttccctgcaggacatctacaatgatctgcactcctcatggctgctgactaaacaaactgtcagactgcactgggttattgaattggagtggaagaagcgcaggctgagact

SEQ ID NO: 53099 - DNA, 481 bp, Homo sapiens
cgggccccccctcgagggtacttctagaattaattaacgcgggtacctagagatgttttccatttctttcacagaacttgactgatatatttccttgactccctgagtatccaaccgtcttcaatacatggaaagggaaaggaaaactctttcagacaagaacatccaccctactttaaggggctgagatttggttcagaagcccactcagttgattgctttggctcattgatttctacaaagttatagacttcttgttcacaaatgaaaatgctctgtttcatgaatgtgttggttgattttgttagtaagaatcctgttcagtatcagggaagcttcagacacttagataggtattccttctcctactgggcagttctgagctctagaaggctttctgtgggagcagggtgttcccagggaaagtctcaagtcctgctttccagccctgaagataacagtgtgttgcttctccccactg

SEQ ID NO: 53100 - DNA, 589 bp, Homo sapiens
ccgggccccccctcgaaatacttctagaattaattaacgcgggggggggaggtggcctatagcaccatagtctcaaattttaaaagctattaatttagaaagggatgaaataatatatgtaaaatgcttagtaaaatttaacttactgtatacattataaaggattggcctttaatgataatattgaaattaggcagattaggttaacatgaaccaactgtacagactttatccatgttataaggacatgattattatagacagacactagaaagaaggtaatctcctgtgtccatagtagtttcatttctgttgtcctagttgtctaggaagaaaggtttttactttttaaatgttaaatcagtattcattcatttatgtaataaacattagctatttgcaatgtgttagacactggacatatgaaatatagaagtcatttctcctcattttttctctttctcttgcccatatgtgaattagcagcaatcatgtcagctgtgtcaacaaaatccatcctgaaccatctacttcagtaaacttctactcctgctgtattcccataatcaattctctaccaagcaaaaat

SEQ ID NO: 53101 - DNA, 275 bp, Homo sapiens
cgggcccccccctcggggtacttctagaattaattaacgcggggtcctcccggtaacttgaaaagtttagcccttgaagcaattggcttaatttaggatctcaaatccttgaagcaattggcttaatttaggatctcaaatcctgggaatagtttcaactatctgggaaactaaggtgggagagttgcttgagctcagagttcaaggctacatgagctatgattgcactccagcttgggcaacagagtgagactctgcctcaaaaaaaaaaaaaa

SEQ ID NO: 53102 - DNA, 409 bp, Homo sapiens
cccccctcgagagtcttctagaattaattaacgcggctcctcaagctaagtattgaaagataataaaccagtgtgattagattttaaattataatttggcagttagtagacataatctaagtaatatttgctggattgggaacattatttctgggaacaatttagtttctgcagatgtagcagtagtcaattactccacaccaaaaatatgcactaccttccataaatcaaaaaccaacatcagcaaagcatattataatagcatggtttcaaccattatgtttaaaaaatgtaaaataaaagatggaaatcaagaagatctacaattaaatatcccatgcaatatttaaagaaatttttaaattgattagagattcacaggaaagtttaaaaatagaatagtctcatg

SEQ ID NO: 53103 - DNA, 577 bp, Homo sapiens
ccgggccccccctcggaagtcttctagaattaattaacgcgggtccttcctcatctagagactaaaagctagactaagccatccaataaaactcagagctgttcctttaattttctcatgagtcccttcagatgacttaaacaaatggatgtatttgcacatgattatgtaaagttagatagaacctacattaggccagttacagtggctcacacctatcctttcaacattttgggagaccaaggtgggaggattacttgagcacaggagttcaagagcagcctgggcaacatagtgagaccccatctctgcaaaaaataaaaattagctgggcatggtggcacatgtctgcaacttcagttactccagaggctgagatgggagcattgcttgagcccaggaggtcgaggctgcagtgagttgtattcctaccactgcactccagccacagagcaagaatctgtctcaaaacaaaaaacgaacaaatagaaaaaccctacattaattagtacctattctaaagcaattttcaatttcacatactgttattatataccttaagttgcattatatttat

SEQ ID NO: 53104 - DNA, 381 bp, Homo sapiens
  misc_feature 29: n = A,T,C or G
ccgggccccccctcgagggtacttctagnaattaattaacgcggggtctgatgttttagtgtgaaatcaaaattctaaaacttaaatcataaggacactgtgtgtttgattattcttaatgtttgtgaagccctgaaatcgtttagggaattttattatgcatttcaaactgcatgtttaatatttccacccatgaaattgtaatagaaagtttattcccaaacttacaaatgaaactcaagaaggttcagggaaggcggcactctggaggatggtatttgaattcaaatgacattgttaaattggaaaggtaatcagaaatcaacaaaatgaaactttccagggaccaatagaagtcattttgagtaaaaaaaaaaaaaa

SEQ ID NO: 53105 - DNA, 208 bp, Homo sapiens
cgggcccccccctcggaagtcttctagaattaattaacgcggggtccacttcttctgttttattctccaccttaaatgctaatcttagcttattataccactataattctcattgagacttattgtaatattccaaacaatagatccaaacatgagaaggaaaataaggagaaattgcaggtgatgatttaacaaaaaaaaaaaaaaa

SEQ ID NO: 53106 - DNA, 561 bp, Homo sapiens
  misc_feature 32: n = A,T,C or G
taccgggcccccccctcggaaatacttctagnattaattaacgcggggaatgccaattgaataaagggcctattaaattctgtggttattagacagtgtctaatctttaggcaccacaaattaacaagattgttctttatgcattgatccatttataaatattcactgagtacctaccatgtatcaggcacacaagcactttgtatgtaaagtgctgggatttgaggagttcttcctgtttggaatagagtggtattttaaacataatagtaattcaataaatgtgtgttgagtcactgattaaatttagtatagaaaatactattatttgagctcttttgaaatctatacaagaatgctgtcagaaaaagttgcattgttagaaccagtaagtatcaggaaatcccctttgtagtggtggcactttagtgatatcaaccataaaaacatattcagggatcataaggtaaagttgaacaatatgctgaatcctcttaaaacacaaaaagcaaaattaaagggactatagaacacacacttaaactaaaaatgtacttttta

SEQ ID NO: 53107 - DNA, 241 bp, Homo sapiens
  misc_feature 27: n = A,T,C or G
gggccccccctcggaggtacttctagnattaattaataaatgaataaatgaaattgcatataatataattatattggattaaattgaattaaatatagtagcatgataacagaataggcacaaccaggttctgcagtctggatcagagccacaaactcaaatgcctacaagactagggagagaatataaataaccgaagtttctagtattagaaaagtgagatgctaaaaaaaaaaaaaaa

SEQ ID NO: 53108 - DNA, 633 bp, Homo sapiens
ccgggccccccctcggaagtcttctagaattaattaacgcgggcccttgatcatgatatagagaacctaaattgacaaaagcagaaacaattttattcccaggctttgtaataagtcctcttaatatttaactcattttagtttgagtgttttagtatttgcagccaaaaccagcttcatttatatacataccttggtgagaaacatatctgtatggacctcagattttaccctgtagattctgactttacagatggcattagcagcagtggctttgggatcatcaagactgtgtgaattggttagaacccctgtctctgggaattacatggctttctgaccagcgagtcccagtggcaagaagaacattattgttgaatggcagtgacatgtaggggatcaacgaattttatttgaatgttcattatccctattcttttctgtttcttcattctgagagattgggaactgattctctgctttaaagaacctcattgacatttcttgttcaggcaggcttaaaagtggtagcatctgcaggtagtaggcagcatatgtatggagaaaactaacattaactgaaatgttcaggaatccaacaccctttagggtcactttggaatttttttctcc

SEQ ID NO: 53109 - DNA, 429 bp, Homo sapiens
cgggccccccctcggggtacttctagaattaattaacgcgggacatctttactttataaattacccaggcttttgtatgtctttattagcagcatgagaatggactaatacagaaattaaagacacaaatatgtaggaagatatttcatgttaatggattagaagaattaatatttctaaaacatttatactacaaagcagatctacaaattcaatgcaatacctatcaaaatttaaatgtcatttttcatagaaatataaaaaaatcctaacatttatatggagccacaaaaaaaataaacaaaatacagatagccaaggcaatcatgagaaaaaaataaacaaagctggaggtatcacactacctgatttcaaaccatactacaggctatggtaattaaagcatcattactgggaaaaaaaaaaaaa

SEQ ID NO: 53110 - DNA, 471 bp, Homo sapiens
ccccccctcggggtacttctagaattaattaacgcggggtgagtagcaggggataaaaatacaaagtatcatataggagttaataaagaaaacaatcatgataattatctttctaaacagtaaagagaaaccaagtatttcttcatattagaaatataatacaattttacagccaggcatgacgactcacacctgtaatcccaacacttcgggagatggaggcagaaggactacttgagcccaagaattcaagaccagcctgggtaacatgtccaaaccccttctctacaaaaaatacaaaaatgagacaggtgtggtggtgtgagcccgtagtcccagctatttgagaggctgaggtgggaggatcactggagcccagcaagtagaggctgcaggagccatgatcataccactccactccagcctgggtgacaaagggagaccctgtctcaaggaaaaaaaaaaaaaaaa

SEQ ID NO: 53111 - DNA, 618 bp, Homo sapiens
  misc_feature 13, 26, 554: n = A,T,C or G
ggccccccctcgngggtacttctagnattaattaaccgggaggatagtgagaaaatagagatttcttggatgggaatcaccctgggaaataagtcaacttgccaatggtgatactgtacacagctggacgttgaagaataccacccttaaaatacaagaaactggaatattgcagattctaggcaggggataagaggcttactctccataatcaacttgtatttttaaactttataatatgcgcaagcattccacagctcctataactttttgcagtagtgccctcaaatacataaattatatgcatacatatggatgtgttaactactgttataaatatgagccacttattacagaaaatatgtcaatttgccttcattgtttctggtcacaatctgtatcttgggataatacaggatatgaaccaaatgtttcaaagtcaaatctaaatcttatttatccaggccaggtgcagtggctcatgcctataaccccagcaccttgggaggtagaggtgggcagatcacgaggtcaggagatcgagaccatcctgngcaacatggtgaaacctcgtctctactaaaaatacaaaaattagctggggcgtggtggcgcatg

SEQ ID NO: 53112 - DNA, 521 bp, Homo sapiens
aaagaaaaagttgcctattattactacaaaacattattcatcaacacacccaaaatccaatgatatcacaatatttaaaaaaatgtatattagaattcaagaaataatttttattattttttttaagcagccccttttctactcttaacaactattcatggtatcagcaaaaataaagtcaaaattttgtagccctctatatacctctccttaatcaacatttaattatgagtgtgcatctttttaaaattaaatttgaaatactcattttgatatcatgtgatctggacagttaggcagttcaataggaagttactcttttgaattgaatgcatctgacacagcatctcaactaacacaaaagtaaaatatctttgagtatctactagagttatcactattggtgcctgaatgtctgtaaacatttccatcatactgattatcaaaatttcttagatgaaataaaaatctcacaatgtttgtaacagatgataggcatgtgatatctgcccttcacttta

SEQ ID NO: 53113 - DNA, 602 bp, Homo sapiens
ccgggccccccctcggaatacttctagaattaattaacgcggggacatactaaaaagatcagagttgaatcccatagaaggttaagtgtggatatgagtgaactattaacaataactgccaaggtaaaaacagacttattcaacaaactctaagctagaagaacaaggaatacttcaaaaacaaacaaacaaaaaaagacaatgaaaagaagtatagtatagcccattaggtagtaaatttctattgattcattactcaaatactacaaactaaaatatggattaaaaaataaaatttaagtacccacaataggttacacaaaaaaagagtaagaaattttgagatcacatcctactttttgaggctgagattaaaactgttaacattgtagataagactcattataattatattattaatgatttgagagtagtagattcaggctgggtgaggtggctcatgcctgtaatcctagcactttgggaggctgaataaagcgggtggatcacttgaggtcaggagttagagaccagcctgaccaacatggtgaaacaccatctctactaaaaatacaaaaattaaccagatgtggtgttgtctg

SEQ ID NO: 53114 - DNA, 556 bp, Homo sapiens
cgggcccccccctcggaagtcttctagaattaattaacgcgggcatctaattattttttattctagatgtgaaatgccaatttacagaatattgttttagatttctgtataaatgttaatccctcttaaggcctacttaatgtagattaataaaacaattattatagtctcttagaggttcacattacaattccaaattgtaagtgattctatgctttcatgattgtctaagcctgatataacagtcatgttcagttttttaatattcttgatgttagtttttgtttttgctataaatacactgccctggaatttaacatatctcttctttttgatgaaacttaaacagtaatagacaaaattaggctagtttttattttttcatacaacttttaggattaaaagttgccttctcaaaaacatgacaatacttagagatacttatttcattttctgtgtctgcctcaaattttccatttaatataaaaatagatatatttaattgtttataagtataattgattggcatatgcacatgccatcttagttttacaca

SEQ ID NO: 53115 - DNA, 420 bp, Homo sapiens
ccccccctcgaggtacttctagaattaattaacgcgggcatccacttctgtatattagcggcattatgcagcattagcaatccttgtgaatagagtcaaatgaatctagagtccatggtttattacactgctcagatgccttaacagctctatactatgaagtgcacagaataagaatgctaatgcttactccaaattgtttttgtgaagagtttatgagatctcttatgccaagtagctgacacaaaacacacttaattgatatttttaatattaaacccaaattctctttgacatttagggaagtcataaaagctgaaattcaaaattatcttgctcatataattttatatttatacttttgctgctgaatatcataatactacccatacagaattcaatgctaaaaaaaaaaaaaaa

SEQ ID NO: 53116 - DNA, 603 bp, Homo sapiens
  misc_feature 27: n = A,T,C or G
cgggcccccccctcgaaatacttctanaattaattaacgcgggcatctacgaaacttctttcatgccaactccattccagagttaactataattcagttttctaacataagataagtaaaatttgcctacttttgaatgttacataaaataaatcataaagtttcttgtgtgtctagcttattttgccaatttatcaataaaactttttttaattgttaagtgattcaaataatggtttgtctccattatcaagctgattttcattatatgaatataataggaattatttatacattcagctatgatggactatttttttctagtttagatatataatgaattaagcatcaacactctggtcaatgtcctttaatgaacacatgtaagcatttctatttaagactaaaaggtctgggtcatagaaatgcatagtccagatttagaagatactgcaaaacgttcttctaatattttttttctaacttccccttccaccaataggacttgaaaagttcaagttgctccatatgtatgcaatgcttgattattatagtactttaaaaaagataaaagtcatagtagatatgccgctgctatatgtc

SEQ ID NO: 53117 - DNA, 608 bp, Homo sapiens
  misc_feature 28, 560, 567, 568: n = A,T,C or G
cgggcccccccctcggggtacttctagnattaattaacgcggggtgggggagaagagatttgattaaaatacaaaatacagttagaaggaataagatctagtgtttgatagtacagtagactgactaaagttaccaatattgtatagttcaaaatagctagaagagaggaattgtgatgttcccaacacaaaaaaaagataaacctttgaggtaatggataccccaattatcctgatttagtcattacacattgtatgcatatataaaaatattacatgcatccccaaaatatatacaactattatgtatcaataaaaatactaagttggtactacactatattaactgctcttctaatttagatattatatatgaaatttaaattgttctaatgagcctggatgaaaatggcctatttagttcatattactttggatatatatggatatatcataagaatgattaatcataatttgctgattaatactttattctacttataacttagtaaaactgacagatacttatttgatcagggatacaactttatatttcacanatatgtnntaacactagaaatctgagctcaaccaattcattagctggt

SEQ ID NO: 53118 - DNA, 562 bp, Homo sapiens
ccgggccccccctcgaaagtcttctagaattaattaacgcggggcaccttgactgatagaccctccaaaagagtgttcagaggattaaataatatagtggacataagctcctttgtacaccgtttgatagacagctgttttcttttcctattcccaccttttcttcctttcccctacaatttaaacttgatggggcagtaaggtgtcttttcaaaataagaaggtatgattaaaatcttcccacatgcagcacaatatctagctttctgtgcacatatagttttacatatacatacataaataagaccagtctttctttcttctctgagtgtctctatgcataaaactcaatgagtgggcattttccctatacttcacatgacttagtgtggctcttaacttgcaaaaccaccacctacgggagtataacaagaagggacaaggccaggcatggtggctcacacctgtaatcccagcactttgggaggccaaggcaggcggatcacttgaggccaggagttctagaccagcttggccaacatggcgaaaccacgtctctact

SEQ ID NO: 53119 - DNA, 621 bp, Homo sapiens
  misc_feature 23, 36: n = A,T,C or G
tgggtaccgggcccccccctcgngaatacttctagnaattaattaacgcggggaactggcttgttttggcaagttcatgggaataccagttttgaaacatgatttcttataattagtcaacgctgcttcaccacaaaggaatggaattggccttttaaaaacaaaaccaaaccaaacaaaaccctaccgtctttgcagaaaacaagtctgaggtttgagatgaagctagggatggcatacctggaagtagctgacctagtagctaaaggccatgatcacagcattactgcttatgcctctgctctttttctcttttctcttaagcagtgatgctggagattatggcctttagtctccaggtggactggaaatccagcttcatggatatattgaaatcatatttctctcattgcttctccaactgcagtaaataaagtcttttgtttggttattgtgctgtatcgatctcaaaattatttttaaaaaaaccctgatatccactaagactgtacctttatttttttctattttttgaattggggttttgctctgtcacccaggctggagtgcagtggctcgatcacggctcactgcagccttggcctcctgggctcatgtgat

SEQ ID NO: 53120 - DNA, 560 bp, Homo sapiens
  misc_feature 19, 32, 550: n = A,T,C or G
taccgggcccccccctcgngggtacttctagnattaattaattgctgcttggcatcgatattaaggtattggctatgtgggaataatttaagcgatcactggaaatcctcaaatgtgataaagaaaaattgtcaaaaactattacttatgtaatcattagtataattaagttctccaggcttatcaagtgatttacacttggtagacatactaagcacaattgttctctctttttcagtatgtacatggagattcagatcacttattagactcatagctggggatggtggctcactcctgtaatcctagaactttgggagggtgagcgggtggatcctttgagcctaggagttcaagaccaatctggacaacatgacaagaccctgtctctacaaaaaatacaaaaagtatttagccggactatgtggctcctgcctgtagtcccacaggaggtggaaggatcacttgaacctgagaggtgtaggctgcagtgagccctgattgcaccactgcactccagcctggatgacacagagagaccctgactcanaaaaaaaaaa

SEQ ID NO: 53121 - DNA, 426 bp, Homo sapiens
ttctagaattaattaacgcgggaagactctttaatgaaccattatagcaccaaaatttcacattcatcatggagttctatatttcctgtaaagatcaaagcatggctttggaaattgtgtgctttggccctttttgacagatcctgaaggcaagaagaatttcagtggtaagcatgatgatgaatttcctcttgtgatctagattctatccccaaattgttgttacaaaaattcatggtttgcgggtagagtcctaagaaagcatgtcaaagggcatagatagcatgttgaagaaatatcaaaccctgtaaatgtcatttatttacttatttaagtataagcaattatttttaactcctaaggacttttcatcacctaaaaagtttaactcctaaggacttttcatcacctaaaaaaaaaaaaaaa

SEQ ID NO: 53122 - DNA, 566 bp, Homo sapiens
  misc_feature 41: n = A,T,C or G
aagactggggtacccgggccccccctcggggtacttctagnattaattaacgccgggtctttaccaacacagtatattagtgaactaatacattgtttagcaaattgttcttttaaatttgagtcatttttcataggcttaggtgtcaaattttttctgatcacagcttttgcctattcttttgggtttttggtctcgtgtatgtagattcacttaatctgcattgtaaggaaactagccttttgtcatatgtcttgaaaactttttattgatttgttatttgtattttgaccatatggtatgtttttctgtttagaaatttttatgtagtcagatttatcattttcttttatgactttgagtcataaaagtgaaaaaagtcattgagttttatgtaatccttagaaaatccttcttgaggatcataaaaattttcccccatgtttactcctagtaagtactttttatactttttatgatttcattttaacatttaattatttgatttatttgcagtttgttttgttctagagagtgaagtagtgaaataatttatatttcaagat

SEQ ID NO: 53123 - DNA, 604 bp, Homo sapiens; identical to SEQ ID NO: 39869
  misc_feature 9: n = A,T,C or G

SEQ ID NO: 53124 - DNA, 623 bp, Homo sapiens
  misc_feature 14, 27, 583: n = A,T,C or G
gggccccccctcgngggtacttctagnattaattaacgcggggttggaaaaatagtgagagccatgtgagcaacaatcttagaaaaactgtaataacaaagagaattaagccctcctgaggtcatagttcacacatgttaaaatgcttttttttttagcttatccacaattagatggaattaacacattttcatggtgtttaatgaaaaatggctaaagcatacctcctttatttttaagtggattaaaaacatttctgcaaagtcttgtcttccaaaatatggagaaaaaataagaaaggaaatatctcctcagggaaagctaactactgttttagttaatagtttgctttaacttagaaaaacttaattcggaaaaatatggtgtgaattttgcatttggatgaaattgaattcttttgagggttttaggtaatagaactataaggtatctactagtttctctccttttcataaatgtatattataaaagtacacttgaaggaaactaatcaaatctgacagaaaaaacattttaaatggtaatgtgatttttttccttcaatgcaaatgaaaaatggctntaagtgaagaaattcaactgaatgggcatatggcaaaaaa

SEQ ID NO: 53125 - DNA, 573 bp, Homo sapiens
  misc_feature 515, 530, 548: n = A,T,C or G
cgggcccccccctcgaaagtcttctagaattaattaacgcgggtccttattaggtttgggaagtgtgcaactttcaaagatgttatttttcatatcaaacttaactgttacaaatatttggggaaccataaatattaggattaaaaacattcaaaagctcttctttcaaagacaaatcctattcacattttggactgtatcctattttttgttatatctaacagaaattaatcttgttaaagcaacattccataaaaaaaacttacctgttttgtcccactgttcttgttttcacggatgcaacatgttcttgttcttgttttcacggatcccattttggtccagcaagaaagtaactttctaaactaacatgaaaggctactttaacatggactttaaaaacagcaaatgaatttattgcaaataactgaacacagacccggggatgattccatgtatgaacagatcccatattattatgaagattacattggtacaacacaccttataaactntgaagaatacataanagagtctgctataaactnttagttctcactattcccaatatag

SEQ ID NO: 53126 - DNA, 490 bp, Homo sapiens
tgggtaccgggccccccctcggagatctttaattaataacgcgggaagtttacagcttataagaaatattcttgcccttctgttaacagtgcatctgcccagtagactggaagcccaggactcctgcccctgccaagcaagttttctcatttgccaagctggaagtttaggctctctttagtgatatcaatacaaatgtttctgtcattatttacttgtttcatggacttgattcaactaacatctatttattaccctttatatgccaggccatcttcacgatactgaatattaaaagataaacaaaatgagggctatttttgcaataaatttgaagtctatatcaaaatcatgtggaaaatatattaacagagaattaagtctaggttaagaacaagaaaatcctaaaaactaatttaatatattgggaggctgaagtgggaagatcacttgaggccaggagctcaagaccaatcagtctgggcaacat

SEQ ID NO: 53127 - DNA, 394 bp, Homo sapiens; identical to SEQ ID NO: 52067

SEQ ID NO: 53128 - DNA, 356 bp, Homo sapiens
cgggccccccctcggaagtcttctagaattaattaagatcacatgttaatacttgaacaaacaactttgattctattagactaagcctagactactataatttggaacatttttcttaaagatatacctgggtgctttaatgagaacaatgataaatgttgaggagaattacatgcatctttaacttgctaggtaaagtaaaattcctctgtgttgcttgcactaatatatcacagtagtaaattaatttgtgaaaattgttgaatacatttttatgagtatatttggttaaatagccttagaaaaaatatacattttatttatagaattcttaattttccataaaaaaaaaaaaa

SEQ ID NO: 53129 - DNA, 338 bp, Homo sapiens
cgggcccccccctcggaagtcttctagaattaattaacgcgggaacccgaaattattattttctagttgtttagagctgtggggttctatttcctgtaagcaacttgtggtctacatttggttcatggggtaatatattatcctttttgattggaaaattgcttagaagacgagtaaagcatccattgaacagaaagtggatgaattgtccttctatagccagtagcaaacactatcggctatagcaagttaagatttttatagtctagctgctgcatgctcatcatgtaagatattttttcaaggattttctacatacaagaaaaaaaaaaaaaaaa

SEQ ID NO: 53130 - DNA, 561 bp, Homo sapiens
  misc_feature 514: n = A,T,C or G
cgggcccccccctcggaagtcttctagaattaattaacgcgggggagaggaattactgaagtaccaaatgtatgtcagttttctaagtgagcatacatcactgaaccctcactcattttcttgagagaatcttataaggctaagggaaagcagaacacatttgccaacaataattaggggagcggaggttggatgtgccctagatgttggaacatgggctggagtttgcggttgatcatgttgagaaaggacattccaggaagcagcaacagaatgaacaaaggcccacaggaaggagggaaaggagaacgggaggggaaacaagaatgccaggatgagacctgagaccaggtggttatttggccaggtttaattattcaaaactaagtgcctggaacatggaacactggatatttgaagctgaaaatatattttgcaaaagtgaatgtgaaccttgaattgactagaaatgtttcatttctccctttagctttgaatgggtatgtaccagttnttatttaatagaataatttttaaatcacaggatctgcctcttgggga

SEQ ID NO: 53131 - DNA, 614 bp, Homo sapiens
cgggcccccccctcggggtacttctagaattaattaaccggggagggaagtgtgaaacagtgttcagggaatcataagcggttggaactctaaacagtcctcaccttacctggctcacagcaggagagagccacgggcaacttttcatgatttatttttgatttgcagtgcatgggacacactgtcccaaattcccccttgccattattcagtgagtctacttttagctagttttgatccttgttcaaaaacagatacatattttaggttgttgctatttgtttatacttgaatggggataaattctatgtgctttatcaagagctttagatatttaaagagcaagacagtctgagtgcccagcgagaaagcctggttatgttcagctcctcggtctctcgctctggttagcgccaaaccttggctcaataaggccagctactaatcacatacttgaaaatttacaaatatcctgtttttaatgatgctaactttgctgtatttgttgtcaactacatcttatttttctaggatcattagtaagaacttaaggcaaatatcaagatgaattggctagtcttagtattagccagaagttggtctttatctataat

SEQ ID NO: 53132 - DNA, 573 bp, Homo sapiens
  misc_feature 109, 537: n = A,T,C or G
taattaacgcgggtatttgtgggggtttcaaaactcttcattttatgagaaatctgtaatgtttttctgggtttttgttttgaaagagaataggataattggtgcacangaaaaaataaaaataagtgagtgaaagattatataagtagtaatgaaaactagagagaggaactgtttttaaacaaacttttaaaatttgagtggttaaaatgtttgttttcaattttgaaaccaaaagagaaaaatatgattaaaatatggtcaattacatgacgacattttcaaaaaggaggaagtaacttcatcctttaagaaagaccaaacttttctaaacaccaaagtttaaaggaatactttaattcctaatttttttcagtaatactacaagggtcaatatactcgacactcattcctttaataaaaaaggtgaagtatttcatctggatcttcttacaatattctatttcatatgcttattcttatgatacagataaaagtcaaggacataatataaaatgcaacatactcaaataattntctgtaaaactgaaatattatactggaaatacttga

SEQ ID NO: 53133 - DNA, 503 bp, Homo sapiens
cgggccccccctcggaagtcttctagaattaattaacgcgggcaaggccaatagaggaggactgttaaacttaagttgttaaaacgacatttagtctattttatgacaaaggctctcagaaaggcagactatcatgtgggaagaataaatattataccttaagtattatctttgactaataaatatcaagaaaatataagaggctttaataagttcctttgcttacaaataaagttatatttttgcaagtaatacatttcatagacaacttttctcataattgcatctgataagcatgtctcaaacaatggggtatatttaaatattctgtgtaagatttactttggtcaaaaattaacaagtgttacctattattttttcttaacatttgtatttaccatatggataattttacataaagtaaatatttaaaatatgtttggtcactaagtgggattgccaaagaaatcaaatttgttgtttatctgaaatttcaattaaac

SEQ ID NO: 53134 - DNA, 447 bp, Homo sapiens
cgggcccccccctcgaaatacttctagaattaattaacgcgggaagactctttaatgaaccattatagcaccaaaatttcacattcatcatggagttctatatttcctgtaaagatcaaagcatggctttggaaattgtgtgctttggccctttttgacagatcctgaaggcaagaagaatttcagtggtaagcatgatgatgaatttcctcttgtgatctagattttatccccaaattgttgttacaaaaattcatggtttgcgggtagagtcctaagaaagcatgtcaaagggcatagatagcatgttgaagaaatatcaaaccctgtaaatgtcatttatttacttatttaagtataagcaattatttttaactcctaaggacttttcatcacctaaaaagtttaactcctaaggacttttcatcacctaaaaaaaaaaaaaaa

SEQ ID NO: 53135 - DNA, 364 bp, Homo sapiens
ccgggccccccctcgaaagtcttctagaattaattaacgcgggtatatctccagtatctgatagagaattaggaatgagatctctatcactgatagatatgaaaatttactgctattgcaaaatttgttaataatttcattcatattgagatatgcatgaaatatgtgcttgtaattaataaagccaaatatgtaaaagacatatttctgtgcaatacactctactataatttgatgagattttaagagttaacacaacatgacactgcatatgcgccttaattttacaagtgtgtatttcctctacactacatcaaaattatatgaacctactttattcaacacttgtgtaataatgactata

SEQ ID NO: 53136 - DNA, 608 bp, Homo sapiens
  misc_feature 28: n = A,T,C or G
cgggcccccccctcgaaagtcttctagnattaattaacgcgggtaggttaacactataaattatgtacttcctaaggcaaaaaaaaatgccattttaggaaaaggaaacagtggcacattaactgtgtttatggatgatacactctggtttcacatggtatccttttaaaaataccttaaaacagaaaatggctgggcgtggtggctcacacctgtaatcccagcactttgggaggctgaggctagcggatcactggatgtcgggagtttgagaccagcctggccaacatggtgaaaccccgtctctactaaatatacaaaaattagctggatgtggtagagaatgcctgtaatcctagctacttgggaggctgaggcagaagaatcacttgaacccgggaggcaggggttgcagtgagctgagactgtgccactgcacttcaccctgggcaaaaagagtgagatttcatatcaaaaaaaaaaaaaaaaaaaaaaaagtaacctgagaaaatggaaaacgtgtttaaatttaagtggggaaaaaaagctaatgcaagtcacatatccagtctattacgatttatagctactaaaggtggctatttttt

SEQ ID NO: 53137 - DNA, 616 bp, Homo sapiens
cgggccccccctcgaaagtcttctagaattaattaacgcgggctatgatcaaccttctcagacctgacctccacggagaactggaatagctggaccgggtgagcaagagctgaagtgctatgtgtatgtggtagaggagggagttgggctaggggtggaggacaaggatgaaacctgagcaacagagcaagggattctctcaaacgctgaggatgtggaggaaggagcctgcagccttcatttcatttcatgacaattcactcatagaaattcataacttcttaaattccatcttcaaatttagcacatcatggacagttggccacacatgcactatgagaagtttcctcctcagggttacatgtcagaaccatacaggtaagaataggaaatccttaaagtcagaagtcacttaacagtaggtttcttacaaacctctgtcttcccattgggttctttctgcctttcaggggtggacatgaacatcctatgtcccaaaccctcatcctgtcctctgctcttccttcactctgggctggatcacctcattaggaaaatgacttacagctcagtgatgcattactggttttctcttatttatttgattctcaaacac

SEQ ID NO: 53138 - DNA, 614 bp, Homo sapiens
  misc_feature 13, 26, 546: n = A,T,C or G
ggccccccctcgngggtacttctagnattaattaacgcgggcttccctactgcttaagggttagccaattagctgatttcccttgcctgtttctttgggaacaaagaaaacaattgtgtcatgtacatgaacagacacatgaacaagtaggtggaagccattttgaatggtagaatttcagtttgccaaaaccataaaagtgactcacaacaccactttcaggcagcctagttcaggggccatagctgcatatgttatttatcatcagacccaacctccaaattctctttcttggctataatgcaaagtcagatgcttaggcctttgatgaatgtgcagcaataataagaagggagtgctggccgggtgtagtcgctcttgcctgtaatcccaacactttgggaggccaaggtgggaggatcacttgagcctaggagtttcagaccagcctgggcaacatggcaagaccctgtctctacataaaatacaaaaaaaaaaaaaaattagccaggcgtggtcgtgcatgcctgtagtcccagctactanggaggctgaggtgggagaatcacttgagcccaggaggtcgaggctgcatgagccatcagcatgccact

SEQ ID NO: 53139 - DNA, 506 bp, Homo sapiens
cgggccccccctcggaagtcttctagaattaattaacgcgggatcttcagttactggatatagaaatgttaatttattatagtatttctcaaccttatttttactactgcccctcattcccccatagccatttcatactttttaaatcacttttcccaaaatattttaatatcacagacatgctgcatagttgtctgtgtatgagatgcctgccatttgagtgagactcaatgacatgtgtgagattttttcaccaacacctaagaacttgttgagaatgtgagatttatgaggtactccatactcagagacgttaagtaacttgcttcaagtcaaacaaaatgagcagagaaacagatgaatttattctagctaacttcaaaagctaagtgtttaactattataatataccattgctgctttttatacatgtaacaaaatggaaacagatttagtttttaggttttaagttaataattataaaattatggcaaaaaaaaaaaaaa

SEQ ID NO: 53140 - DNA, 580 bp, Homo sapiens
acttctagaattaattaacgcgggaatgctattcccattaaactaccattaacattcttcacagaattagaaaaaactatttcaaaattcatatggaaccaaaaaagagcctgaatagccaagacaatcctgagcaaaaagaaaaaggctggaggcctcatgctacccaacttcaaactatactacaaggctacagtaaccaaaacagcatggtactggtacaagaacagacacatagaccaatcgaacagaatagagaactcagaaatatgaccacccacctacaaccatctgatcttcaacaaacctgacaaaaacacccaagtgaggaaggattccctacaaaataaattatgctgggagaattggctagccatatgcagaaaattgaaactggacaccttccttacaccatgaagtcagtcttgaattagaattctggtctattgacttcctagttatatgaacaagaaccagtactttaattttcatgagccttagtttttctcatttataaatggagttatagtatctctcaagattgtttgtggattaagagggataatatttgagaagtgct

SEQ ID NO: 53141 - DNA, 223 bp, Homo sapiens
cgggccccccctcggagtacttctagaattaattaacgcgggatggtgcaatgtttttcaagtgctaaaagcatagtcaactatgtattttagaatcagtgaaactattctccagaaacaaagaagaaataaagaaattcccatagaaagataaactaatttgctgatagtacacattcccttaaagaacagctaaaagaaattcctcaaaaaaaaaaaaaaa

SEQ ID NO: 53142 - DNA, 376 bp, Homo sapiens
  misc_feature 126, 317: n = A,T,C or G
attaattaacgcgggagtgtaactcattttatctcttattggggaaagttttaaattgcggcccttgaagtctgactgaaagaaataccaatttagctgttttgtatgctttgtaatgaaaaagtntgtggactttgtagagaaaaaaaatagcacatggtttagctcacctaaggagatagttaacttggaccttgggtaacaatggtaataaggcactaatatattaataattgtaaaactttaagacatgtgcacacccatgtgtaaaggaaacaatgacaaaaacctacgaaaaagaatgggaaactatgggnatactgctctgcagagggcacagagaaaaatagaatagaaatggaaaatggactatggg

SEQ ID NO: 53143 - DNA, 591 bp, Homo sapiens
cgggccccccctcgaaatacttctagaattaattaacgcgggagtcactatcacctttaagtgaaaagatttggcttcaaatgttctaggatttttttcttctttgtgaacagtagattattattctttgtactaaattaatgtctgagcaaagtgaatgtcagaaatttggcccatgcaaaattccattttcttgtcagtatataccaggtctttttggcagaaactgaaaggaatagcaagccactttgaataaaatgtgctgtaacaaccaaagggaaacaccaacacattaattttgctgctcaattgttaagttatagccatagcaaaatatggacttaaaaccctgctttataacaacgtcttaatagaatcagtgctttaccaaaatgttacacctctcatgtttgtaattaagcagcatacttgtattgagttactctaaattatttttaatttataagcagtgaagacttttaagtacttctattgagtttccccatagaaaataactaaaacatatacaggcagatggtaaagcatattttgaacccagaatgagacagtattgaatctcccacattttct

SEQ ID NO: 53144 - DNA, 523 bp, Homo sapiens
cgggccccccctcgaaagtcttctagaattaattaacgcgggtactctgattataattagcacagatgttatttacttttcctttattctcatcaaatgtagattaaaaataaaactgaatttctgccatcaagataattaacattttataatatagttccatgtcattgatatccaacctgttctttatttaaataaaaatttatttcattttttaaaaattgtattttaaagttttcatgcctatcaaacgcccattcttaggcactatccaattattttccatatctaggtatacatacaacctgcccatcccttctctgcttgagttccaattaactcagaaattcagcaggctccttatgactgcaatgtcagtatccttcaaagtcttctgctccacgttgaagtaacatattagtgatctcaaaatagttcttaaaattttctttctattatgcccctttacaagcataagttaattggcccaagggccatatttaaaaaaaaaaaaaagcggccg

SEQ ID NO: 53145 - DNA, 556 bp, Homo sapiens
  misc_feature 23: n = A,T,C or G
ccccccctcggggtacttctagnaattaattaacgcggggtgtgttcatttcaccacagactactttaatttttctgaaattcatttttgagttgtatattcattttgcatattgtatatattacatttttccaatgtttggccatttgtatgtccatcctaatttgaaatgaaagtaacgagttttagtatatctattcatatatacttgcctttttttccttatttcttattgtgttttaatgatctccttttgttttcacatatcaagatattattccgtcattgtaactttatgcaattgagtaaagtaaataattgttatgtattttaatttcttgtattttctatatttgttggcattataaataggaattttatttatattgaagattcagggttttttgatttaccattgtttacatatgcataataaaattgtcataatgaaattgtcattttctttcaaaaagtttgtaatatttttatcttgttcaggtagaatatcttattatataaaaatattgattataggctgggcgcggaggctcacgcc

SEQ ID NO: 53146 - DNA, 579 bp, Homo sapiens
  misc_feature 28: n = A,T,C or G
cgggcccccccctcggaatacttctagnattaattaacgcgggaagtctcatggagagaagcttgaaaccgggaggcagaggttgcagtgagctgagattgcgccactgcactccagcctgggcaacagagcaagactccatctcacacaaaaaaataaaaaataaagagtgtaaagggccccgagacaaaaaagtttgagaactactgctctaaaacacctataattctaattaatgctcacattaccatttcattttatattgtgtagcctcaattctttcattttcaccctccaaagaaagacactgtgacctaaaactagttggtttgatataactaaaatttctttttggtggaggttgggggtaggaaggtggccctggtttaaatagaggatttaggccaggcatggtggttcatgcccctaatcccagcacttagggaggccaaggtgggcagattacttgagttcaggaatttgagaccagcttgggcaacaaagagagacccctgcctctacacaaaatacaaaaattagctgggtggggtggcacacacctatagtcccagctactca

SEQ ID NO: 53147 - DNA, 513 bp, Homo sapiens
  misc_feature 41: n = A,T,C or G
aagactggggtaccgggcccccccctcggggatacttctanaattaattaacgcggggggggatgtggtggctcacgcctgtaatcccagcactttggtgggtagatcacctgaggtcaggagttcgagaccagcctgaccaatatggtgaaaccctatctctactaaaaatacagaaattagccaggcgtggtggtgggcgcctgtagtcccagctactcgggaggctgagacaggagaattgcttgaacccaggaggcagagattgcggtgagccaagatcatgttactgcactccagcctgggtgacacagcaagactctgtctccaaaagaaaaaggaggaattttgaattaccaggaataaagaaacagtaaaagatgggtaaatacatttttttctcctctttattttttatagtaggcagttgaagcagaattatattgtctaatatgattctctgtgtatgagaaaaaatattttagacattataaacagagagtaatgggtcat

SEQ ID NO: 53148 - DNA, 520 bp, Homo sapiens
  misc_feature 485: n = A,T,C or G
ccgggccccccctcgaaagtcttctagaattaattaacgcggggaatactagatattaaaaaaatccttctggtgcaaagcacctaaaaaagaaagtaaagttggaaaaaattatatattttaaaaaatgcatagttttattggcaagaaaggaaaatttttagaggccaaaaatgacaagaaagcacaaatacagagaaagccatatttgggagagaggagacaaatctcaggttctaagcaaggtgggaaataggattaaagactgaaagctggctctcctaaaaggtgacatcttctgtgaaaaaaggaaataggaactaaagtgcccctcaagagcagtccagtaaatacaattacccttgggatggtgggaaggataaatttctcctgaaagattcataacagtgagttactcccactggatttaagtctagaattcccattgcttatataagctgagaaatcctaagctgataattcanaatattctggggtacactgtgtctccaggtgcctg

SEQ ID NO: 53149 - DNA, 434 bp, Homo sapiens
tccgggccccccctcgagtctttgaattaattaacgcgggctactccacttccagggttctctcgaactccattccccacccccaatcccaacactcaggtttcttgcataatccaattttttaaatccagagataggggaacagcattaataatttctgaaagtctctgccaagtctgtgattttcagaatgacccctattcctgcttgggtcataatttaactctaattaaatctaaggttggtgctgtatttttctgtgcaagagaaaagcacagaatatgagaaattcttttttctttccagtaaacactttcatacttaaagaaaaagagaacactattgatgggactttggacacggacagctagaaattccattgaagttagtttgaacttgttgagcatgtttcatttgcaaaaaaaaaaaaaaaa

SEQ ID NO: 53150 - DNA, 468 bp, Homo sapiens
gccccccctcgaaatacttctagaattaattaacgcggggaagctcctttgtatactttctctatcatttatatatattttttgtttcattctgtctgtctagcctttccctcatgtcttaacctgctttctatcatactttcctatttttggttgttgctaatgtagcattcatttataagatgttttcattttttctttaatttattcctgtaccaatttgctttatcttcttatgttgtatttttaaaatccctgtaatattctttaggatccatttttagagcaatgatttatatctaatacattttattcccctgatcatttatgtgtttgtttatttggtcagttacttttaaataatgcaataaacacttgaaaatccaagatgaaaactaggtccttgtatcttgtatacggtaatctgtatctaatggcacagctccctcattgcatcccagtgtctct

SEQ ID NO: 53151 - DNA, 538 bp, Homo sapiens
  misc_feature 31, 494, 519: n = A,T,C or G
taccgggcccccccctcggggtacttctagnattaattaacgcgggcctgtgcctatgcacagggccagccacataaggctgggctcacagggcgtgtttggattgaccccataccaaccaaggggccaggctgtaccagcgaggcctggggaatgtgggatggaccccttcccactctgtctcaaccctgggcctggacgataggttctggggagataaagaaggtagttggggccaggcatggtggctctcacccacaatcccagcactttgagaggccgagactggaggattacttgagtccaggagtttgagaccggcctgggcaacttagggagaccctgtctctacaaaaaataaaaacaaaattagctggggatgatggcatgcgcctgtagtccagctacttgggaggctgagctgggagaattgcttaagccaaagaggtcaacgctgctgcgtgttgtgattgcaccactgccctctagcctgngtgacagagcaagatcctgtctcanaaagtaaaaaaaaaaaaaa

SEQ ID NO: 53152 - DNA, 585 bp, Homo sapiens
  misc_feature 22, 33: n = A,T,C or G
gtaccgggcccccccctcgganatacttctagnattaattaacgcgggagacctctccccctaaagttcttctttctaatacttatattaaggtatttatccattcactgatttatcaaatatttatttttttcttttttaatattttttaaagttttgtgggttcatagtggatgtatatatttatgggtgtatataagatgtttggatacaggaatgccatgtgaaataagctcatcatggagaatggggtaaccatcccgtcaagcatttatcctttgagttacaaaccatcaaatatttatcaagcagctagtacattacaggcactattctagtgttgggagtaccattatttagattttggttcaattctcacttcttcagagaagcattttcttcccctcaaatataaacaagatctcttcatgattatttccttagcaccatgcttgtgctttttgtacatatttggaataattttatttgcatgtttatttgttttatatctctttccctcatggagaacaaaaaccagaagttggcatggtgctcaacaaatcaaagttatccaatccgtattaa

SEQ ID NO: 53153 - DNA, 619 bp, Homo sapiens
  misc_feature 32: n = A,T,C or G
taccgggcccccccctcggaaatacttctagnattaattaacgcgggtatatttcaattttaaaaagttttaatggtagaggctctacttggtactttatcaaatccttttggtaaatatttatatttttctaatacctctgcatatgtggatattttcatgctggtcttttatttctttaaacatagtaacaccttatccacagatgcatttagccacagggatggtccagatacctggtcaaccatattgaggaaactttaaacctttggtttttttttttgccatattaaatgatttttggcagagcccaaaattgttttctaagggagttccaataaagtagcaggtatctaccttcagaattaaaagaggatgatagtaatagcggttaatgtttgtttattatttattacatgacaggcattgtgcttgaactccttcagttcacagacattgtacgcaaactacctcaattaagccttacatcaactatgtgagataacattattattatttcccatttactgatgcgttaacatgaggaggtttatttgaccccagtacttttaatcattataccagtctacctttaattggatcatggctgttgcattat

SEQ ID NO: 53154 - DNA, 592 bp, Homo sapiens
  misc_feature 35, 532: n = A,T,C or G
gccccccctcgaaatacttctagaattaattaacngcgggtctccatatcaataagaactgagagtctaataccattcctttgcattagaaaaagagatgtttactttaaagagatttaaaggcatgtaccttgtttaaactttaccaaacttataactcgagggtatgtaaagctctggctggctctactaagattcatagagaatgaactgttgattacctctctcggtgaagaatgatagcacaaaacaatgaataatcacagcattgtttatatttatctttgaaaagccatcagtgtctcctagtctatacaaagtgaatataatccgtctcacactcacaaagttgctaccaacacacccaacattgctttagagttagaaagataagacagaaataggtcccaacttattgcagctattttatttataaaagattgacaaatgctcacaatcatacaaaacaactctttaccaatagaatgtagttgggtcgattaacttatatttatttgcacagatcagttcnttacagtttctttctgatgtaaaaggaaaaaaatttatctataaaagtaaaatgccctct

SEQ ID NO: 53155 - DNA, 592 bp, Homo sapiens
  misc_feature 28: n = A,T,C or G
ccgggccccccctcgaaagtcttctagnattaattaacgcgggtgcccatcaacagtggcctggataaagaaaatatgtacatatacaccatggaacactgcacagccataaaaaagaacaaaatcatgtcctttgcagcaacatacatgcagatggaggccataatcctaagcaaattccacaggaacagaaaaccaaataccacatgttctcacgtataagtgagagttaagccttgggtactcatggatataaagatgggaacagtagacaccatggactacttggaggagctgacaaactacctattgggtattatgcccactacctgagcgatggaatctgtaccctaaacctcaatatcctgcaaatatacccatgtaacaaactcgtgcatgtatactccctgtatctaaaattaaagttgaaatttaaaaaatgaaattgccaatattaacagttaatgacataaaaatagcaacttactataatcaaattcaaaaatggcaaagtcatatgttcaactaaatacttcctgagaaataaataatacaaaatacaataaaaagttttaaagtagcttattgtcag

SEQ ID NO: 53156 - DNA, 422 bp, Homo sapiens
ccgggccccccctcgaaagtcttctagaattaattaacgcgggtgggcactgatcacctttctgcctccaaattaaagtttcacctaattccaacaatagatctgcgtaactaagaatttccaaggctctgtcaacagctaacttctaaagtaacatctttttcttgtcatactgtatttcctaacacaagtatctgccaaatatacaaaacacgatgaataagctaaatcacaaactttctgaaatctaaagcaaaaataaataaaatctaatataattgcctgtgaatagttgtcaaaattttccatctaggtccatctgtttcagggcttcatattttccacctcttcctaccaactggagataattttttctacttataattattctattctatactaaaagcaaaaaaaaaaaaaaa

SEQ ID NO: 53157 - DNA, 594 bp, Homo sapiens
  misc_feature 28: n = A,T,C or G
cgggcccccccctcggggtacttctagnattaattaacgcggggaccttggtttttaaatgccttttctgtaagacataaaccttttttgttagttacatcttcctggagtttttatcagtggtaattgctcagatataattaaatctttataaaacaaagctgacaggtttttaatgccgttttccccctagctgtaattctttaaaatacaacttagattcaggctgcaataagctgacattgtttctccaggccacctctccttaggtaaatctagtctaatttgtgcatactgcattcttcttttctaacctctttcagtagataaatttcagcttgagaggcggtgggaactctagattctcctcgacatttctagtgactttcgaaaagacaatagggctcatttttttagtggaggttagtgaacggggaacttcagtcctttttttcttagagtgctggaatcttttcagtcaaccttgaagcaggtttctgccaccttactttgtgttttaatcccctcctgcccaaaagggatgttctaaagtaatgtagatttgttctaattgatggggggaggggtgagagc

SEQ ID NO: 53158 - DNA, 576 bp, Homo sapiens
cccccctcgagagtcttctagaattaattaacgcggggcaggataaatataatagcttctcttccacttggaaaagcacaagttttggagccttgagttggctgcactggaaattagaaatgtctttgatgaggcacagctgtcttcatttcttagtcacaaatgtctaaagcattccaggaggctgactcatatacctggagagggaccatggtttctcatttttttctcctgaagcccttgactggtcaggaagagaccagtttctcctttgttctacagctaggaacttaactacaggatgatcttaagtaagataaaacctgacatttcttcaccaccatttgcttttcattctcttacatttgtctcaaacataatgtgcagcacttagtgatctttctgccatggagactcactgaagacaagatcccaacatggcaaaacttaagagttttctcaccaatagctgctatctgcagcaaaggaaagagagcaccttgtgttgtagcctaccgtccactgaaagagatcagtatggacatccaggagtttctgagttccccagatagtctc

SEQ ID NO: 53159 - DNA, 620 bp, Homo sapiens
  misc_feature 486, 577, 609: n = A,T,C or G
taattaacgcgggcctggaggattgtggcattccaactgaaggatagataataagatattggattctcaaaggctgctaggtagtaaaaattgactagccagaggggaaaaatgacctatccagaagacacagtcagatatcctctgaaggagaatctccaaagaaacaaaagtagcatgccggaagaggaagaaccaacaattgagcattggtcatcgagtgcacagatgccagcaggacctgttttcttttccactgttcttttattctgggcgaatggctatagaatcacaaaccatatttagtgagtggagggtatgggaagaagacaagaattttcctcatcccactccagaattccaaaactaaagtaggaccccaggtggagagtgaatggaatatggagacattctaaagtatgtaatgattaaaccaggctggacacttcattatataaaggtgactaaaaatactgcctgagattntatgtgagaaaaggaaatattaggtgcaaggagaaatagtaggtgtaaaaagcaaaactcatcaggagcaaattgaacactgcaaacactntctaagaattagattgttttttattaatactngtactctatta

SEQ ID NO: 53160 - DNA, 500 bp, Homo sapiens
  misc_feature 17, 28: n = A,T,C or G
cgggcccccccctcggngtacttctagnaattaattaacgcggggaccttgctagattcaaacataagcatccatggtaaagaacagttaactcactcaagattacatggctgtcaccttggactatttcttgtctcattccctatcagggtgctattccactccttatctgtttctgattagaattgactgacaactgcctctaactcagctcaaatgattctgagattctttgtctccattttgtacagttttattacaggtgtttatgatcacctgtaataaattacagctatatgcatggctgagtccagtttaacctcttagtttctctgcttgaaatttaatattaacctggttttataaaggaaagaaattgaatgtgataattaaatcatcacaattaaacaactagaaagcaactagaaaaaaatcccttctgatatccatatttacttgcctttctgcgcactcaattagtcctgggtctaatttatcac

SEQ ID NO: 53161 - DNA, 599 bp, Homo sapiens
  misc_feature 580: n = A,T,C or G
ccgggccccccctcgaaagtcttctagaattaattaacgcgggatatacttttataaaagaaattttacgtatgtaggtgtgattttcttgtaggcaaggaaataacttgcttgtagtacttacaggaaggtcttttcattgtatgtatgttttgtataaattgtgacttaatctcatatttatcccaacctgtaggtttataattacacatacatataatactagatgtaaagtattacaatatgggaaaagctatataaattatctgttaaaacttggtaggaaggtttgtgcttaatagatggcttctctttgttaataaacatttagtgggtttttttaaaaaacgcaaatgatacaagcttatttttagaaaatttgcaaaatacacataagaataaagaaaacaaaaaggacctataatcttaaaattaaatcactgattaaaattttgctattttaatgtgtttttgcagatgtttatccatatatgtatgtttttataaacatcttcctcctccttctacaaaatggattatgctgtatatattttgttttgatattatttatgatagactnttggatattgttatataag

SEQ ID NO: 53162 - DNA, 594 bp, Homo sapiens
  misc_feature 22, 33, 43: n = A,T,C or G
cccccctcgaaagtcttctagnattaattaacngcggcctggngcctctcaaagtgctagaattatgggtgttagcaactgtgctctgtcctatttttatttctacaggtaatatttataaaatttatactatacctgtaatttgatgttagctctgtgtaaacactaggtagagtgtaaataaaatgaggtaaataagtcattgatttttttcaaatgtttgttttccatatatgcacacatagacatataattttagtacatagagtatttcaaagtaatgttttacattttgttaaaaaatcagagtttttccaaaatgttgtaattttaatagcttagttttttcttaatgtaattacattaaagcgttgactttatgtttataacatttattaggaatctggatcagctctcttaatgaagacaaaaaggctggaagatattttgaaaaatattctttaatgtcttaaagaactgacgatatagtaagaacctataaataaaaaaaaaatgttagatcgagagtttcttcacctatcttcatcagaaatattggcctgcagtgtaaaaatggttcaacatacaaaaatc

SEQ ID NO: 53163 - DNA, 513 bp, Homo sapiens
  misc_feature 34: n = A,T,C or G
gggtaccgggcccccccctcggggtacttctagnaattaattaacgcgggggacatggatgagatcactcacagaaagttttgaataatttgagaggagaagatataagacagactcctaggggacaccataaacctttaagttattagaaatggattgctagtttaatcagtggggtaaacacattttaagaaagaaatattagctgggcacagtggcccatgcctgtaatcccagtactttgggaggctgaggcgatgagatcacttgaggccaggagtttgagaccagcctggccaacatggcacaaccccatctctagtaaaaagtacataaattagttgggtgtggtggcatgtgcctgtagtcctagctacttgaaaggctgaggcaggagaatcacttgaacctgggaggcagaggttgcagtgagctaagtgagctgagattgcaccactgcattccaccctgggtgacagtaaaactctgactcaaaaaagaaaaaaaaaaaaa

SEQ ID NO: 53164 - DNA, 599 bp, Homo sapiens
cccccctcgagagtcttctagaattaattaacgcggggactcatttgatataatttcttttacaacaataatacaagaaattcctttaagacaagaaatatttatgtgggttctcatagctgaggaccacatactagctgtaggtgcagggaaaatactgtcttcaaggctcagtttctttatttataaaataaaaagattaatatctatttcatatggttattaggaaaactaaatggaaaatacataaaaggagttatcacattccctggcttgtagtaaccactaaataactattggctaaattattgtgtgtggtttattatttattaataaatagaaattttattgtgcagtcaatgaagaaatgtgcatttgggttctattaatatccctacaatagattttatacctgcaccttggaacatcccattttaatgatgataattacacttaaaaatatgctctataaccaaaaatatgcccttattattttgttcataattctccagtaattcagatgaaataggcagaagtagcaatttgaaagatgcagaagattctgaattggtattatcataatacgatcaggagtctga

SEQ ID NO: 53165 - DNA, 400 bp, Homo sapiens
  misc_feature 31, 56, 57, 73: n = A,T,C or G
accgggcccccccctcggaggtacttctagnattaattaacgcgggcctttaccannattctgtgtttccctngaaaaaaaaaaaaaagaaaaaagaaatggggaaaagttatgttagttggtttcaagcttcattaagcatagtgctatagaataaagcagtatttaccagttttgagtaatgtatggattttttcttttttgagacagggtctcattttgttacccaggttggagtgcagtggtgccattatagctcattgcagccttcatctcccaggctcaagtgatcctcccgcctcagcctcccaaatagctgggactacaggcgagtgctaccatacccagctaattattttattttttgtatagacaggatctcactttgtgcgcaaggctg

SEQ ID NO: 53166 - DNA, 592 bp, Homo sapiens
  misc_feature 28, 564: n = A,T,C or G
ccgggccccccctcgaaatacttctagnattaattaacgcgggaggtgaccatttttgtttaagactttagccattcagaatttagctctgaatacatcatatttcattcatctgagaatagatcctaggatccatgccatgcaatttgtacatggcattcatagaaaaccttatcaggcttcatctctcacttaatgtatatttgtgcatatttgacacataactttctcccgtttccttattttatttttaagtccacagaaatctataaaaagccaattagaaggaaggtcagaggttgctacaggtagcagaatggcatagtgtttaagagctcatattctgtgcttcaatctcttcatgtgtaaaatggtaacacaatggtgcccatataatgagttcgttgtgaacattacaagaagtaatattgtaaagtgcttaaatagtgcttgaaacatagcaagcgctcaataattgtaaactcttggcagccgggcgcagtggctcatgcttgtaagcccagcacgttgggaggcggaggtgggcggatcacttgaggtcangagtttgagaccaacctggccaacatgg

SEQ ID NO: 53167 - DNA, 475 bp, Homo sapiens
  misc_feature 27: n = A,T,C or G
gggccccccctcggaaatacttctagnattaattaacgcgggctatgctggagattgaccagaatggtttgaaatggcgtttgattgcacttgtctatgataataaaaatgaaaataagttgttccaacaaaaagatgattgtacctgacaagcaaagctggtggcttattaataattaaaaaatatttttgtgttctgccactgatggaatatttaatcgcttgttcagtcaataccaatgtaccatttattatacattaaagataaatgtagtgtaatggctatgaattgcaatgtgttacattgagattataaagggcatgaaaagttgatttattatttagaaattgattaaactcttctactgatctcaatgactgggataacccatcagatttccacaattaaacagagttttaacaataaaaaaaaaaggttggtggcaatatttaactagctaagggtaggatgatc

SEQ ID NO: 53168 - DNA, 508 bp, Homo sapiens
ggccccccctcggatagtacttgctccaattaattaacgcgggccgcttggatgctctctacgtgaaagggcccaagttgagagtactagtacaccagtacttcaactgggcattgaattagacttaccacgagatctgagagagtaaccatataaaaaacattcccaatggggcaatgggtccgatttattaatcgctggccaaaagccgatgcttcaactcatatttgcatggtgtcgggaaatgatggccaactctaagttgtatgtgtcaaaatagaatgccaattacaatattacacattctggcagagagtaatctacggatgtgtaccaggctgtaataagcactactgagtgactgaaagtatattaataatgcacctctgaaaacaataagcttgagtacattattcgacagtgatgtcatgttacagcctatagcgatcaaaactatgtgaatagggcactgtggctcatgcctacaatcccaggactctgagaggct

SEQ ID NO: 53169 - DNA, 624 bp, Homo sapiens
cgggccccccctcggaagtcttctagaattaattaacgcggggcgggtgggagattttcttgggtggaaggatagggattagaaagaagaaagtgaaggtggtgaggaaataaacttccatgaatatgacaaaggcaggtaaaggatctaagaagtacgattctgattaataacattacataacaattctgcttgactttcacactgctggcagctcttatctcaccatatgatcgtgtggagtttggttaagaacttttcatgaaagccaaaagaaaagacagattaaaaaccactaaagaaatactaacaggcttagctaatacttttatgtgaatatatagatgctatatttaaatataaagtcggagattaaacaagtcataatattgaaaagtaaagactggagttgactgccagggcttgacttgagctctgctactcgtatctgtgaccttgcagatatttttaaatttacctgagtctcaattttgtcagttgggcttcaattataaaatggggctgttaaaagtcctgtctgtaagccgtgaggatagagaagaagctccagtgagcgatgctgaaacaatcaatggttttagtgaggtcaccaggattttattt

SEQ ID NO: 53170 - DNA, 368 bp, Homo sapiens
cccccctcgagagtcttctagaattaattaacgcgggactgcacttcagcctgagtgacagagtgagactccatctcttaaaaaaaaaaaaagtttattctctcctgtagggtaagcagaactgaagttttagaaagacagtggtggatcttcattagggaactgggcaattggcttctcatgttaacaatgttgacaacaacagccaaaaggaaaaatgtaaaaaccaaaaaagaagctggcgcagtggctcacgcctgtagtctggcactttggatggctgaggcggggattgcttgaggccagaagttccagaccagcccagccaacatggcagaaacctcgtctctagtaaaaaaaaaaaaaaa

SEQ ID NO: 53171 - DNA, 512 bp, Homo sapiens
  misc_feature 27: n = A,T,C or G
cgggccccccctcggaagtcttctagnaattaattaacgcgggtatatgagaaagccctatttctgaatcctttactcttgaatgtgagaaagtttttaaagaacttgatgttagccagctctaaggagtaacttcatcactgattgagatactaagaattctctaagaaactttaaaataaaagaactcagtggattcttttgaaagttccaccagttttacaactctagagtggtaccattcaaatgacaggcctgcatgtacttgaaatcaggaaatccatcttttgttttagcagctaaacgtgtctttgtctaaatctctataattaaaaccaagcatagagtaaatatgatggaagattactatctgattcctacctccatatgaaattgtgtgaagttatgtaattaatgttttcaaagtgtgggaattctttcttttcattggttagctatatataattatataatcataatacatcatttttgaaaaaatatgatgtggggaa

SEQ ID NO: 53172 - DNA, 587 bp, Homo sapiens
  misc_feature 23: n = A,T,C or G
ccccccctcggaagtcttctagnattaattaacgcgggggtagacaaaagttgatatgacttattctgtcaccttttctggagatattatttacagttcattagtagatttgtagatgacacaagtttgacatactaagatataaattcccagtagtagtattatagacatttgattgagtagtgtttaggttactttcctcaaaatcattatctctgatgttttctcaaaatcacacttcaaagaggatgatttacttctggggcaacactgcaggtagttctgccctatctcaacaataaatacaaaaaagaaacaacaacaacagactccaaaattaccaatattgcatcatcagtaaaagtcactgtttgtggagttaaactgcctttgttaaattctagcttctacaaaatggaaaaattatccaggtgtggtgatgtgtgcctgtagtctcagctacttgggaggctgaggtgggaggattgcttgagccagagagactgaggctgcagtgaaccatgatcgtgccatacactccagcctgagtgatagaggagacccccatctcaaaaaaaaaaaaaaag

SEQ ID NO: 53173 - DNA, 426 bp, Homo sapiens
  misc_feature 27: n = A,T,C or G
cgggccccccctcggaagtcttctagnattaattaacgcgggttcccatttaaaatgcaagactaatctttaagatatttgtactggtttcacaagtctagaggctggagtattaaatcttaaaagtgatctgtctgaaagaaaagacttcttctgcaaatagttaatttttaataaaagggtaagcgttcagcactaaagcttagaaggcagttttaaactacacttaaaaaaatcaaagcaatattttccatgtaaaaaaaatcaatacaggccgggcatggtggcttatgtctataatcccagcactttgggaggcagaggcgggcagatcacgaggtcaggagttagagaccaccccggccaatatggtgaaactccatctcaactaaaaatacaaaaattagctaggcatggtgatgcgtg

SEQ ID NO: 53174 - DNA, 557 bp, Homo sapiens
  misc_feature 531: n = A,T,C or G
cgggccccccctcggggtacttctagaattaattaacgcgggggggttgtttagaaagaggcctactctgagtgatggtaatgttttatatcttgactgaggtttttgaaaacacaggggtattcagtgtatcagaatctacaaaactgtgcacctcaaatccatatattttattaaattaaattatacttaattttttaagctaacaaggaaatttaaagcttggcaggagatgaaaattaatgatcaaaattcataatagtaagcctacctaaaaatgaacttgaggtttgaatttgtattacctgtgtgatcttggaaactgcaagccaagaatctaattttgcaaatcctccattgaagaatttactcatttacatctctcaaaatttccacagactggccaggcgtggtggctcatgcctgtaatcccaccactttgggaggccaaggcgggtggatcacctgagatcaggagtttgagaccagcctagccaacatggtgaaactccatctctactaaaaatacanaacattagccaggcgtgatggcgtgc

SEQ ID NO: 53175 - DNA, 558 bp, Homo sapiens
  misc_feature 25, 38: n = A,T,C or G
ctgggatacccgggccccccctcgngaatacttctagnattaattaacgcgggggggtgttcacatgataacaaaaaaaaaccttgcggcaaatgcgatagaaactctgctgaacactgtgtatcaatgcggaaagaatttacatctgatggtgagtcagctaataaatatgtaactacaataatccactacctctcgatgtctttcatcagtgctgtgaagtgaacagcataaaagctcctatgtcttgttatatttacatctagtacttcaatattatgacaaaggtattagatcttcaaaaccagtttttatgtgtgcattgaccatacatagaaatataagtgccagctgttttcactcccccctttccacttgataaacaagcaaacagactaatatgttactgccacgatttttaccagtaacaactggatttcgaatgtgagaatgagataattcctggggccgtggagaactaagaaaaatacaacgaataaaccaaaaacaactctgaacagatggcatgggaatcatacctccacatgtgtgacaccc

SEQ ID NO: 53176 - DNA, 576 bp, Homo sapiens
  misc_feature 39: n = A,T,C or G
gactggggtaccggggccccccctcggggtacttctagnaattaattaacgcgggcttatatgcatgctagtgaggctttctgataaattatataactatgaaaagacttaccagtctcgctgtcttaattccaaatttcctttaagcaagttaacttctttcattaacaatttcagtatatgttattttattcatataatcaaggttaagtctaatttggtatcactagagtttttagaaatgagtctcttagttattttatcctacgcatggagaaggtgggatggtcttgttcttatggacatgtttacatagcacagaaacgagtttaagcccaacaaataacaccattgtttataaaagtttaattctagatcatttgagagtacatgctgaataaaatacttttaaaaacagatataataattcttgtacaaacataatgcttccaatcagatttcaaattccaaaaccttttcaaaacattaacgtcattttgtctactgccctacttcagtgactctgtctctacactccctgtccccatttaccaacccccctcccaaaaaaaaaaa

SEQ ID NO: 53177 - DNA, 539 bp, Homo sapiens
  misc_feature 38: n = A,T,C or G
ctggggtaccgggcccccccctcggaaatacttctagnattaattaacgcgggaactctcctacagatgatacataattctgttgtaaggggaaaagaaattacatgcattattgagagagactgcctgtctcctgtagacctggagtcattcaaaatcacattctttaacaatggtttcaaataatgtaactatgccagagaggggttttattgtttttactgcactgaccctacagtgtagcaaattaccctcaggtcctgggagacaacacaatgactttcaggagcagtttccacatgttcaacatttagtaagtaatatggaccccatgggacataattccaaggaaagaaatggagcacaacttgaacttcccaaatttccccataattttcgaaaggctaagtgttaattacctcaggatctctgggtaatagctaagatagtttcatctctactctccttttgttgtgtacttgacggcatggaaaggagaaaagatcccttcccctttccaaaaaaaaaaaaaaaagcgg

SEQ ID NO: 53178 - DNA, 511 bp, Homo sapiens
  misc_feature 28, 397: n = A,T,C or G
cgggcccccccctcggggtacttctagnaattaattaacgcgggtgatgaatgtggtaacagatgctacaatcacattgcttgcatagccaagacagaagatgggaccacattaaaatcaaaatgtacttccaaatctatgtatctatccatatctattagtcgtccccacttctcttaaaaacaacatattttccttcaatttgtacagtggttgattaaccagcttttccctattacaactaaaaaggatcaagagatgtgattgccaggctacaaatgcaattctcacatagaagatatttttaaaatgcttgaatatatattctcacaatgggacagaatttttgaaaccagaattatactggccaacagtgctatgtctctgcttttcattntctcctatctattccttccactatcttgaatccagctctgatactatatgggtaattttgaagagttatttaaacgccacaactttaagtctcttagtgtatatcttgcttgat

SEQ ID NO: 53179 - DNA, 530 bp, Homo sapiens
  misc_feature 10: n = A,T,C or G
cccccctcgngaatacttctagaattaattaacgcgggccacagagaaaatcacagagagctggagtctctgcaaatatgctcacagctatttattctgtacaaaatcttccttttaaaaaaatctaatcactttctactcaactcttatctaaagtggatgtgaactagaaaacacaaatgtacatgaacacaatctcacccacatactgctatttttaaaaactatttatattgaagtataatttacataccataaaattcacctgatttaagtgcacaaatccatgatttttagtagatttattgcgttttacaaccaccatcataacctagtttttgaacattctcatcaccccagttagattccttgggcccatttagttaatagctattcctgggccgggcacggtggctcacacctgtaatcccagcactttgggaggctgaggtgggtggatcacgaggtcaggagatcgagagcatcctggctaacacagtgaaaccctgtctctactaaaaaaaaaaaaa

SEQ ID NO: 53180 - DNA, 568 bp, Homo sapiens
  misc_feature 11, 24, 48, 548: n = A,T,C or G
ccccccctcgngggtacttctagnattaattaacgcgggaggctacantctctaatacaacaacatatgatatatgtttaaataaaatttgattttggcatatttttagatttacaacagttttccatatagtctttactattttccctgatgttgacatcttatattaccatgatacattttcaaactaagaaaagcaatattgatatattgcaattcaataagcttgagatatcatttcaattccactaccttttctacttatccccaagatctattccagaacaatgatatttttgatgtagcaatgcggagtgatagttttctgaattaccctaatagtttccagaataagactgtaatacttatagggaaaataaatacatatacttcttgtctacactattttatatacatatataaacttaaaatgtaaatatatcatttcgtagcgctccattatgacttttttttgattaattacccagtattatatttttttctttatttcctaacttggtgtttcttcatttgtttacagaaagaanagaaatttacgtaagtagtt

SEQ ID NO: 53181 - DNA, 594 bp, Homo sapiens
  misc_feature 27: n = A,T,C or G
cgggccccccctcgaaagtcttctagnattaattaacgcgggatttctataaactcatacctaagctcattgtgtgtcggtctgtgtgcatcatattttattcctcaatcagtgtcacttattagaagtcattgtaaatgcacagcattacaataaaatgggctcatcatcaaagacaattttgtcttcagctgtgtgtacaaataagttttggtcagagcaattatataaatttatgtagttaatttgttatattaagtgatttagtcatcgaaacactcatttttattatcacaatataaatataatattaattacaaatcaagataaagctatttgcaattgaaatgtaattgagagatgagaaaattaatgttgaaatacttgagactaaaacactttaagttgtgattgcattattttaaatttcattttgatttaagaaatttaaagaagcaaaaagatgatccataagatatgtgattttgatattttgtgatatttctacaattttaaataaactttgtctctaatcaacttccttttaagacacatatcaatgtctcaattggcaaaaaaaaaaaaaaaagcgga

SEQ ID NO: 53182 - DNA, 463 bp, Homo sapiens
ccgggccccccctcggggtacttctagaattaattaacgcgggttctatgtataagaaataggctttaaatatcaaggctcagataggataaaagtaaatggatggaagaatgagtaacatgcacatactaatcataagaaacttgaagttactatattactatcaaagtagattacagagcaagaatcatcatttcagggataaaaagagttatttcatcagacaaagggtcaagacataaaattgctaaatgcccattttaaaactcaaagaaaaaaagagctttaaaatacatgaggcaaaaacctgattgaactaaaaggagaaatagacaaatccacaattatagctgaagattttaaccctcctttctcagtaattgatagtagtccgaaaaataatagagaaatagaagactctagcacattgatattattaagacatgcccaaaaaaaaaaaaaa

SEQ ID NO: 53183 - DNA, 313 bp, Homo sapiens
  misc_feature 27: n = A,T,C or G
cgggcccccccctcggggtacttctanaattaattaacgcgggtatatatatatatatacaatatatgtatgccacaataaaagcagaatagctatagtcatatttcatatttttattattttcacctcaattttgacttaatgtgctgtttgaaatatattcctcttaagtacacagacttctaatataaatatgacctttaaaatggtggaatttgaatcatggtgtaaaacaatcatagtattatagttaacagtgccttatgacttttattaactgatattttcctagcttcctcaaaaaaaaaaaaaa

SEQ ID NO: 53184 - DNA, 587 bp, Homo sapiens
  misc_feature 13, 26: n = A,T,C or G
ggccccccctcgnaaagtcttctagnattaattaatactgaattttagctcagaattccttaaacaattgacatttttccttgttttgatatttttattattttttaatattgtaactttccttctacaaaaatgttaaaattttaatctcagcattcaccacccatgcagctgctaatgtactcaattctttcatgtttcatgtctttacaactggacctacaattatagggcaatatgaattattaaatatggcaaaattaccctcagccaagaaaaactgttttaaaaaatgtgctaattgatgactaactctggaaaataaattagtacataagaaaaatgaatttgcacatagaaaatagatgccctgacattactgagaatgttgaaaataatagtttttatgcaataatgtattggcatttatgctatataaaagaaataaattaacaagttgatgtattttctcttccataagcattctgtcattcaaatttttctctcactccaaaacaatgtctactctaaatgacatagatgctggcataacatatacctttttttatttttttgaagacaaaaag

SEQ ID NO: 53185 - DNA, 361 bp, Homo sapiens
ccccccttcgaaatacttctagaattaattaacgcgggatttgaccaagaataacaagtacataacaagacactgcatttatcatgttatttatttaagcataattatttagaaattaataataagcaataggttttggatgtaacttttcaataccataaacattggcagtccttatgcaggtttttctaaggaatgtttctggctgatctatcaggaccaaaatatctttgtatcatcttctttgttctattctgttactctgggtatcatcattatttatgctagtctgtgttgagatgttatttccatgcatttggtttaaattattaattgcataaatatctatctgcaactataa

SEQ ID NO: 53186 - DNA, 436 bp, Homo sapiens
cgggccccccctcgaaagtcttctagaattaattaacgcggggcagccttcgcgacagagcgagactctgtctcaataaaaagaaaaaaaagtttatttttgttgtaacattcttttattatttctagaggcatgtaacaatgtgctatgtaacaattcaagactgtggcccagatgaaataatgatagcagcacatatctggaacttctttggtcacatgaatgtataataaatatatgaagtggaaactcaattctacgtagtatgactacagcagactaaagacaataatcaggccgggtgtggtggctcacacctgtaatcccagcacttcagcactttaggaggccaagaccagcagattgcttgagctcaggagttccagaccagcctgggcaacatggcaaaaccctatctctacaaaaaaaaaaaaaa

SEQ ID NO: 53187 - DNA, 489 bp, Homo sapiens
cccccctcgagaatacttctagaattaattaacgcgggactcatttcatcctcataacaaccctttgagggtgggtccttttgttaaagagatacaataccttgctcacagttacgcaaccagtgagtaggacttaatttaagcataatttggcctttattttagcttattttcaggaatgtatatgggctttgtcattttatttctatggtaaaattgtttagcctgtcagaatattcatactttgaaataaactcatgtttttgcttaattccatttaatctaaactatgtatattccagttcatagcagtttctatacattgatggttgataggctaagagaccttttgctttgaggtcaggaagttatacttcagaggaggaacatatatagaacttaactgaaccagaattttctgttagtcttacccattcagatgtaatgattcactagccagccatctcttttggtaaaaaaaaaaaaaaa

SEQ ID NO: 53188 - DNA, 585 bp, Homo sapiens
  misc_feature 28: n = A,T,C or G
ccgggccccccctcgagatacttctagnattaattaacgcggggggaacttaatttcatcatctgcaaaataaaagtcatggtaatattatctaagtcatgataatatatagagctcaattatgaaacaggctaagcaaggtacccagcatgttagtaagtatcaaaaatgttatcgtttattaatatacaacatcgctgataaattgagaataataaaaaaaactgtaggaatgaaagctagaaatggaaatgtaaagaacaattgaaacacttactaacagagcaaacctcttaaagttggaaactgtggcttgttctttttgttttggcattatctgagcatatgcaacattctaaaaaaaggggggcacttaaaatatgagaagacattatttaaggtaaactttaagataatataaaaatataaactattataaaatttgccattaattctacttaataaaataccccaagatttgaaaagaaaatatgacaagtataagacaataaaaagctaaaatgtcatgagtgaaattatgtgaagtaaaaattaagtaagcgtaagaaaatacattaagaaaat

SEQ ID NO: 53189 - DNA, 544 bp, Homo sapiens
ccgggccccccctcggaagtcttctagaattaattaacgcgggtggctcaagtctgtaatcccaacactttgggagactgagacagaaggattgctttagatggaagggttgagaccagcctggacaacacagtgagatcctgtctctacaaaaaaaattaaaaattatctgggcgtggtggcgcgtgcctgtggttccagctacttgagaggctgaggcaggaggattgcttgagccttggagtttgagcttacagggagctatgattgtgccactgcactggagcctgggtgacagagcaagacactgtctcaaaaaaaaagattgaggagggggtagaattaaatgaaaatgatatggaaagtgcttagcagagtgtctggcaccaaaataagggcttaattgatgacaacaatcatcaatagtatatgttctcttaaaagatatattcttaatgggctatagtcagtttgctgtaattgtatcataagaattcgagcatcaagaacctctacgaattctgagcagagagggatttaatac

SEQ ID NO: 53190 - DNA, 623 bp, Homo sapiens
  misc_feature 37: n = A,T,C or G
actgggtaccgggcccccccctcggaatacttctagnattaattaacgcgggcttcttgaatgctttctaggtagaaatgggacccaatgttcgagagacataataccctgtacttcaactgtacattgaattagactcaaaaaaagatctaatttaataacaatataaaaaacattccaaatagggaaatggttcccatttattaagcactggccagaagcagattcttcaactcatattttcatggtgtttggaaatgatggccaactcttaattttatctttcaaaagagaattccaattaaaatattacacagtagggcagagtgttgtctatggaattgtacaaggctgtaaaagcactactgtgttactgtaagtatattaataatacaataatgaaaacaataggcaaaagtacattatttgacagtaatttcatgttactgaatatagcaataaaaaatttgggagttgggcactgtggctcatgcctataatcccagtactttgagaggctgaagtaggtggataacctgaggccaggagtccaagaccaacctggacaacatagtaagactccgtctctacaaaaaataataaaaaaaaaattagctgggcat

SEQ ID NO: 53191 - DNA, 593 bp, Homo sapiens
ccgggccccccctcggggtacttctagaattaattaacgcggggccctggaaacacctttgaccaacagcagcagagttctatagaggcaggtagacgtccttctggagttgccaaataacacaaaacttccccatacatcccactgtatttgttgaaaataaaaattacattgcaagaaatatagtgtccatgagcaaggccagtgaattttttaatgaacaatatgaaatcttaatgacacgattgattaaaatattaactatgagtagccatggcaattgatttcaaagcaaaaaagacatagaaaagtcacagaatttccctccaggttttgtttctcatattggcagacattcaaattctgtaaaatatcttaaactccatgtttaaatttttacagttttcgtattatacataaaaagacaaaatgcaatttgggtacaaaatttctatcatgctggtgcaaaatatgccaggaggaccttataaacaatttgttataattcattaaaaagtttatttagaattttaaaattctaaataaaaaatcttactgaatccaatgaaattaaatcatgggaattatttaat

SEQ ID NO: 53192 - DNA, 614 bp, Homo sapiens
cccccctcgagagtcttctagaattaattaacgcgggagtgagccaagaccacaccactgcattctagcctgggaaagagtgagactccgtctcaaaaagaaaaaaagaaaaaaaaaggtatatattttaattatgttaagttactgtaaatgcctagctgaaagaataaaatttaattacaggtatttctaacgttatgtatttacacaacatcatgtagctgggaaacctcaaataacttttgctaaaataaaattttaagtggtatcaataattaagaaattattaggttagtctttattagtgttgtctacaaattttaaaaggtgatagataaaatctggcaattccatttctataaacccaaatttcaattgttcttaggacaaattctaaaatgatgttacattttgcgacatctttgacaatgtgtaatatttagtaatattcaatttccattataatccagttaggttccagtgagacaacagattataaacacatttcctacaaactaacctcccctgatgaaaattaggtacaataaaaatccctttcaatttagcattattaagacattcaagcaaaaatcacactatcatttacatatgat

SEQ ID NO: 53193 - DNA, 587 bp, Homo sapiens
  misc_feature 29, 46: n = A,T,C or G
cgggcccccccctcggaagtacttctagnaattaattaacgcgggnacccacacaaatgttttcaatatgcccactcccatctgcccacatccctcaccatcaatttcctacatgtcctacttgctgccacacccttcccagacaattgctctaagcactagaacctgctcttggcctctctctgagccctcacctttatcacacatgtgcataacttgcccctgcctatgggcaacatctaatgacttgcccacaacagctaaacttacatttagctcataagaaatttattattgctaaagaataaatcagcaaacaatacacttgaaactgaaacgaacagaaatccaccatttaatacaaggtacgatttgaaattggtagtctagatgtggcttgtgctaaaagaaactgaaatgatccttctggaaagcaatattggaaatgtttcaaaagtcaaaaaactgtaaaaaccttctcaactctttggtggtaaacatgaacacgcatgcaatcacaggcatgcatatatacatacactcacataaaacagaaagaccaaaaggaaatcataaaaaggatattc

SEQ ID NO: 53194 - DNA, 500 bp, Homo sapiens
cgggccccccctcggaagtcttctagaattaattaactgtttgcttattggcctagcaatagacccttagaatttcaacaggttctgcatatagtacaccatcaatacatttaataaataaatagatgacattattacacgtatagctaattgtcaaataacttgtattacaaattgacttgtatcacccatcaaaatttttgagtcctaattccaacactctgatatttcagaaacaacaacaaaagctatctttaaaaaattatacaactcaccagaagaccttttttttaacaattcagtttccccagcatagttattttgaattctttaaaagtttatagtattcttttaattttaattcattctctttcagattatggaacttctaaaaataatcaaaatagttatctttttatatgaataagcaatctgttacattttgtggagattcacctttaatttcaatgatactagtaagaccttcaaaaaaaaaaaaa

SEQ ID NO: 53195 - DNA, 418 bp, Homo sapiens
  misc_feature 44, 52: n = A,T,C or G
cggggccccccctcggaagtcttctagaattaattaacgcgggnactgcatngaaaacaaaatgcaataatctgaatatttaatggttctgcccaaatttattgaactatattagagtgtaaaaatccctatccagtaacagcaggataaattatttggataaagcatttcactgaaagtgcatagaatagctggataaaatattctttaaaaacctgtgtgaaggcaccaaacatctatcaaagcagtaaagtattaaatggccaatatcccggataatgaagaaataaaaagaaatgagcatagaatttggagacatgcttcctctaaaggtatctaccaattccagagagactcctgagaggctgagaccctaaagaagggttgtaaaatcctcccaggctaaaaaaaaaaaaaa

SEQ ID NO: 53196 - DNA, 516 bp, Homo sapiens
cggggccccccctcggaagtcttctagaattaattaacgcgggggagctaaacctccaagcacatttcaaagccactttcaatgaccataatttgtgagattccttcagttatgaataaataacaatagcctcccatttccaaagtcaaatcttgatgtttttaattctgccaccccaccctcccaaaaagacagaaatactgaatcgatgaaatgtgtaaaattttaaaactcagaactttgctacacactctgttttcctctgtgaaatatttattccatacataaaagttttcttgtgagatttaaatatactgaaacaattatttacaaaggaaatacctactaacaataaattaccatccatgaatgcttcctattcttagtgatactacttgtaatatctagaattattgtatttttctagaaatacaatattctgtataatatctagaaatattgtatcagtaaaacatcatacagctctcttatgccaagcttatagaatatacaatt

SEQ ID NO: 53197 - DNA, 514 bp, Homo sapiens
  misc_feature 28: n = A,T,C or G
ccgggccccccctcggaagtcttctagnattaattaacgcgggccatcaacattactatcagtatcattctgataaactatgaaatgcatctcccacttctacttcttctcctttctatatttataatggctatttacttatgcccagattgtgtcagttttaattggaagaacaaatctatgtgctagattgagtgaacctgtgtgaatatcattcttaaaagacaaaacctaaattgtggcttattgacttatactccagatatgttgttattgtcataatgaaaccctatctattcatttcactcagcattcagagtttataaaaaacaagaaagagtgctatgagttttttttctccaaaggttaattcaaaaagtatattaaaaagtgaaacttacaaatgtctctgtatctgggaggttcttgaaaacgaagaactgtcagaattacaaacaggatacaaggccagaagaattcagcaaggaaaaggacctagaaaaaaaaaaaaaaa

SEQ ID NO: 53198 - DNA, 592 bp, Homo sapiens
  misc_feature 28: n = A,T,C or G
cgggcccccccctcggggtacttctagnaattaattaacgcgggatctggaagtgagtgaaaacaggattcataatctgaaccttattttataatgtttaagtaatggaacagaggaagatgctttcacttagttaatttcagacacaagttcttgtgttatacccatcttgatatttttcctgacttaaaaggaagactgacttgcttgcagggatcaaataacatacaggggggttgtggatattttgctttactgagtaataaaaggaattttttattcttagtgctgttttctgaatttacatctttcctgtatttaaggttttcaattaaggtagaaccctagttttgtttcttgggattgagaaagaaacatctaaattagtaagtttatatttgttctcgggaagaggggctgtggggctgtgagccatcagtgtgaatgttgtcattaatacgatatacaattaactgggagaactataatgtgtggtcttgacttttagtgatgttgagttttcaaagtttagtacttcagagaattatcttgtagatatgggtgttcacagtaggctgtacgaaattccacg

SEQ ID NO: 53199 - DNA, 600 bp, Homo sapiens
  misc_feature 28: n = A,T,C or G
cgggcccccccctcgaaagtcttctagnaattaattaacgcgggctgctaatgtttgagtgctttaagcattataggcatagccctttaatgaaagtttaaagtgcacactagctttaaaaacttctcggctgggcgcagcggctcacgcctgtaatcccagcactttgggaggcagaggcaggtggatcacaaggtcaagagattgagaccatcctggccaacatggtaaaaccccatctctactaaaaacacaaaaattagccgggcgtgatggcgcatgcctgtagtcccagctactcgggaggctgaggcagaagaatcgcttgaatccgggaggcagaggttgcagtgagctgaggtcacgccactgcactccagcctggtgacagagcaagacttcgtctcaaaaaaaaacaaaaaaacaaaacaaacaaaaaaacaaacaaaaaacttctctgaggatgttcaggatcttatcttgctgagaacatggcctagttcatgactgtgtgaaaactcattgtttaagaatatgacaattttataggcacataaacattctgttttccaaatttacttcaaaataaaagaaaaagta

SEQ ID NO: 53200 - DNA, 561 bp, Homo sapiens
cgggccccccctcggaagtcttctagaattaattaacgcggggggtttcgtgccttaggctgggtgtgctgagggcattcactagttttcccacgaatgttctttcattccaggatcccatccaggataccatattgcatttagtcatcatgtctccttagtatcttctgaactgtgtccaacacagaaatccaattttgtcaacatttcaccacaagccggggaaggatgctgcccgtttctcagctattttacaatcactattgagttcctactgtgtgagacaaggacaagtttaccagctggggatggttatggagaggtgcagaaatagttactataccttgtgacacctactgtaacaggaaatatacgaggcactataatatccctgaaaataaatggatgattcttgccaggaagatacaacagcccaattcatattttctggtagagggttcattgggatgaacctcgtggtcaaatgaatcaattgaattgggatgtccatttatgtaagagattgtgtttcaacacagttcaaaaaaaaaaaaaagcggc

SEQ ID NO: 53201 - DNA, 621 bp, Homo sapiens
  misc_feature 31, 159, 160, 193, 194, 513, 549, 582: n = A,T,C or G
attaacgcgggagaccctctatctgggctanaggatagacaaaaaaaccaagaaagaaagaaagaaagaaaaaccttttcggtcatctaaaccattcaataagtataaaagaaagggtggaaaattatgcagtgctcctagttgtttacaaggattatnnctatggtttttaaaatattttgtataagatgtnntattgttttgattactaagccaaatacatatgacagcacctagcatagaactttaacaactctttatactatatgttcaatacatatttgttgaattagaatgtacatcttgcttaatcagagccacatgtattctgttctttgaaaaattgtagaaaagactggccaatttggcattttttgttggaatcctattgaataactatcgctcttatacttctagtcattggtctaatggagtgggattttacaaacgtaagttatatagtcatccataagttaaatgtgtaattctattatatttaatgtaacagaaaanaatgtaaatacacaatagtatacatttaaaacctanaggtattggctgggtgtggtggctcacgcctgntatctcaccactgggaggctgaagcgtgtgtattacttg

SEQ ID NO: 53202 - DNA, 549 bp, Homo sapiens
  misc_feature 28, 497, 508, 514, 523: n = A,T,C or G
cgggcccccccctcggggtacttctagnaattaattaacgcggggtgattcaaaactggattagcaactcacacttgtcatcacatgtttttgtttgatgactattcttattttaactaaagaatagttccagtcatgctaacctatgactcaatgaacaacgcaaatgacttaacatgacaattaagtcctataactccctaacactggaattactaaagtgttccccatcacaggaaacaaatgaaaattatcatgctaaaatcatttaagtttaaatgcactgaatatatttttgagttaaaatcgttaagattgggaagagtttaacattttaaatggaaaaacataaaaagaaacatattagttccctttaaaataatctcaacaatgatttttaaattacttcaacatgagttctatatggacttaattggttttagtaactcaatactttccagcctagaatgtcttcagggatctccaattaagtatangtgactcaatntctatntatatgaantatctatagctatgtaataatattac

SEQ ID NO: 53203 - DNA, 629 bp, Homo sapiens
  misc_feature 42: n = A,T,C or G
aagactgggttaccgggcccccccctcggaaatacttctagnattaattaacgcgggcaatcatatttcttacattagtaaaagtaaatacaataaaatattaagaataaaagatactttgattagcaacaaaccccaattctatagtgaatctaagtaaacttttaaaataatgtggctttaaagtaataaaagaaatggataggcaaagacatattgggaagatgctaacaaaaaataaagtaaaatttataacattgatattagagttgaaattgtgaaaaaaagaatattaaaggagttaaagttgacactttaatactttataatgtgtaaagacacattgtatgtgtgtgtatataatacatatataacactctaaagataaaacaaattcaagatttatatattagtaataatagtatagtagtaataataacatcaataatgataacaatagtgaaaataatcaaatgaatatcccaaaagcaaagtctgcatactataatagaaaaataaacaatagtagactgtttttaacttatatttttcaactcgtatggttaaatagaccaaataagtgtgtataataataaaatacatcaaactccatacccaaaacattataa

SEQ ID NO: 53204 - DNA, 530 bp, Homo sapiens
ccgggccccccctcgagggtacttctagaattaattaacgcgggttaaaaagaatacttactcgaaaagttgcagagtcacttgtataaaaatattgtgtcacaagagtcttactgactttcaaaataaaactgggcagaaccctaactcagaaacatttcaataatcagaaatattctcgtcatttaaaagcaataacatggcattcaaaaatatacacagcctgtaatcccagcactttgggaagccgaagtgagaggactgctttaggccaggagtttgaggctagcctgggcaataaagaaaggccctgtctcttaaaaaaaaataataataataataattaataataataatattaaaacttagccaggtgaggtggtgcatccctgtagtcccagttactcaggaagctgaggtgggaggatcccttaagcttaggcgttcaaggctgcagtgagccatgatggcgccactatgctccagcctgggcaacagcaagaccctgtctttaaaaaaaaaaaaaaaaa

SEQ ID NO: 53205 - DNA, 605 bp, Homo sapiens
cgggccccccctcggaagtcttctagaattaattaacgcggggtgttgcagatggtggttgctttatcagtcatggtgtgaagatgagataaaattaaccaaaccttgatggaatgtagtgtgagtaagaagtaaacctttcctttgttgtcctgagctactgagatttttggttgtttgctgctatagcagaaccaagcctgtgttaaagcatacacaattggagttaatatggtctgacactataagctcatgataaactaaacattatggattctgagttctaactatttcttttaccttaaaccaatgaaagcctaatcaatgaatgcccacgtatttatatgactagctgcaaaatactttttcagattgtttgttacagatcaagcaatctgaacaaacaattgcctgaggtcaggagtttgagaccagcctggccaacatggtgaaaccccgtctctactgaaaatacaaaaattagccaggcatagtggtgcacatctgtaatcccagctattctggaggctgaggcaggagaatcgcttgaaactgggaggtggatgttgcagtgagctgagatcatgccattgcactccagcctg

SEQ ID NO: 53206 - DNA, 606 bp, Homo sapiens
cgggccccccctcggaagtcttctagaattaattaacgcgggggggcagccagtgacatttgggtttaattagcttccgttaaaaagtttttatcctacattaataattaatgctaatggtcttttatatttgtccaaagctttgtgttgttggacttgaattatatgaatagcagagttgagcacctgtagaagtaatatactttccactatagcaaaacgacttgggaagagcaaagggaataaagagagggtctccagttgctggagcaaagataatggttaatggttattttcctcttattgccgctcttattgtttatttataactttgtgaatgtgtatgtgaaagtaacatatacttaactgtagaaaatttggaaaccacagaaaaaaattgtgtgtataaaatgaggtggttttgagaggggcatatacccataaccacaccaacttgaggcaaccatcttaatacattgatagatttccttctagtcttttttctttctttctttttttcttttcttttttttttgctatgtaccctccaccctttacttatggtttaaataataataataaaaaaaaaaaaaagcggccgccacc

SEQ ID NO: 53207 - DNA, 587 bp, Homo sapiens
attaattaacgcgggtcatccacttaaatcaactgactaaacttcctccctcattattgtaatctgtatactacaggtaaactctagaataaattactgatgtaaaaattgaacacgtaaggactgtcatgtcatatatctaccaagtaccttaaggtttaagcagtatgttggtaactatgtgaaatacctgaaactctcacacattatttgtggtgggaatttaagttggttcggccgttttgaaaaaccagcaatttccactaaagctaaatgtatacccaccccaagaatagcagttccactactaggtatacaaccaagagaaatatgtacatgtgtcttctaaaagacatgcacaatagtgtccatatcggccttattcctaacagccccaaactaattaataatccaagtggatatcaagaggggaatggatacaataaaatgtggtgcttcctatacagggaaatacttcatagcaatataaataatgaactaattaaaatataaactaatgaaacatgcaggaacatggatgaatttcaaagatatcatgttgggtgaaataagccagacactaaaag

SEQ ID NO: 53208 - DNA, 609 bp, Homo sapiens
  misc_feature 20, 33, 589: n = A,T,C or G
ggtaccgggcccccccctcnaaatacttctagnattaattaacgcgggggctaactgaatctgagtataatatttcaaaccctctgatcccaagaaaggtcaatcaagtatgttctataaatgatcttcagtaaagtctaaagtgtttaatgtaaaaagccaaacagagaaaatgtttattactcccgtagatagaaattaggaaagagaaaaactttcaaagatatagacaggaaaatttttaaagtttgttttgttttgttttccttaacttacaattttctttagctctttagctaagcagactgatttttaacttgattggaagtttaaaagtttaaaaggaggcactaacaaacacaaaagacaattaatagtatatcaatatcaatacttccaataaagtacctcatatgaaaaatataattgtatacctatggcatgttctacccagaaaacaaataacacatctaaaaacagaccataatcccatgccatctactaagggaggtttaggtaggaggaccacatgagcccaagaggttaaggttgcagtgagccatgagtgtgcaactgcactcaagcctgngcaacagagtgagatcctga

SEQ ID NO: 53209 - DNA, 299 bp, Homo sapiens
  misc_feature 16: n = A,T,C or G
ccgggccccccctcgngggtacttctagaattaattaacgcggggggaaagaaaaaaagcagatcccttacaatataatagaacaaaaacaaaatctacccagttatttgctggattatctgaggcaatctctctggtcctagttaacttggaatactgaaagacactctatacgcctgcaggtgggagacacaaattgttcttcaactgaaaatactcttgaaatgtcaacctgcctcctgagaagtactgctgaacacatagctctaaggaagtgtgttcaaaaaaaaaaaaaaaaa

SEQ ID NO: 53210 - DNA, 325 bp, Homo sapiens
ccgggccccccctcgaaagtcttctagaattaattaacgcggggggcttgtgataagagctgaaaatctcctgtcatacttcataaaagagaacctgattatcaccaagtatcacttatacctgctatatgaccctaagccaatcacacttattatttggggtcagctttcctattgtcagcgttaaattcactgcatggtatgtaaaaatgatcttaacgcccaattactagggaggctgatgcatgagggctgctctaccccagcagtcggagatcagccagggcaacacagggagatcctatctttaaaaaaacataaaaaa

SEQ ID NO: 53211 - DNA, 585 bp, Homo sapiens
  misc_feature 15, 28: n = A,T,C or G
cgggccccccctcgngggtacttctagnattaattaacgcgggggaggggggagggatagcattaggagataaacctaatgtaaatgacgagctaatgggtgcagcacactaacatgtcacgtgtatacatatgtaacaaaccacgttgtgcacatgcaccctagaacttaaagtataataaaaaatatatatatatataaaataaaaaaaagttacgatgtaaaataaaaatctcactatgttataaattttgttatctttttcccagaaccctacctttccagaatgagaggattcttgcttttcctttaacttactaacttctctgacttctatagaacctacataatggggaaatagagatattgtaagatataaaaaggataaaatatattaaataaagacctgagcaagagtgacagttgaaaaagataaaagcctactcaagtggatttttgagagtgtttttagaaactaggaattgtatgggattgattggagacagctgtagtttgtgaggcattgagagtgaaaactcagctgtagtttgtgaagcattgagaatgaaattggatgaagagact

SEQ ID NO: 53212 - DNA, 418 bp, Homo sapiens
  misc_feature 23: n = A,T,C or G
ccccccctcgaaatacttctagnaattaattaacgcgggtgggcactgatcacctttctgcctccaaattaaagtttcacctaattccaacaatagatctgcgtaactaagaatttccaaggctctgtcaacagctaacttctaaagtaacatctttttcttgtcatactgtatttcctaacacaagtatctgccaaatatacaaaacacgatgaataagctaaatcacaaactttctgaaatctaaagcaaaaataaataaaatctaatataattgcctgtgaatagttgtcaaaattttccatctaggtccatctgtttcagggcttcatattttccacctcttcctaccaactggagataattttttctacttataattattctattctatactaaaagcaaaaaaaaaaaaaaa

SEQ ID NO: 53213 - DNA, 496 bp, Homo sapiens
cgggccccccctcgaaagtcttctagaattaattaaatgacctaatttaaaacgttgaattattgtaatgtgtttccttctagaccaggggaagaaagaagcaaaatggagattggttacatttaagatagaatttctttagcaaaagaaaatacaaaaatcaggattggggcttaaaagctgtataatctggcctggtgcagtggctcactcctgtaatcccagcactttgggaggccgaggcgggcggatcacgaggtcaggagatcgagaccatcctggctgacacagtgaaaccctgtctctactaaaaatacaaaaaattggcagggcgtggtggtgcgcacctgtagtcccagctacttgggaggctgaagcaggggaatcacttgaacctgggaagcagaggttgcagtgagccgagatcatgccactgcactctagcttccagcctgggcgacagagtgagactcctctgtctcaaaaaaaaaaaaaa

SEQ ID NO: 53214 - DNA, 604 bp, Homo sapiens
cccccctcgaaagtcttctagaattaattaacgcgggtctattgcacactagggtgactatagttaacaataatgtattatatattttaaaatagctagaagaaagaattttgaatattctcaatgaaatgattactgtttgatgtgatgaatttgctaattaccctgatttgattattatataatgtatacatatattgaaacttcattctatcctataaatatgtaccatataaacatgtatggtcattatgcatcagttaaaaatttaataaagtatgcaaaatttttatcaacttttaaatacaaaaaattccttagtctaagaatgaatagcttaataaaacctacaagatacataatttttaatagtgatatgttattctcttttaattaggaaaatgatcagctgtattcaattgtcctctgattcaacatagtaagaaatatagaaaataaaaagtagaatgactagaaatatggttttattcacagttataactaaatatacataaaaccaaaagaacaataacagagtttagtgagtttgccagatataaaatatttaaatacaaatttaagtgtatactgacacaatggatag

SEQ ID NO: 53215 - DNA, 612 bp, Homo sapiens
ccccctcgaaatacttctagaattaattaacgccgggggaggggaaaaagaaaaaggagaaggggagacaggaaggagaagaaaaacaaaagtgagaaaaagagctgaaaatgggacaacaagaaagattcctttttaaggaaaatgaataaactacctgtcaaaataagtataacatccttttcattctggaattttaggaatggttgccttcccttccaaaaattccccatccagttatcataaagcgaattatctgacacctatacacattacatactaaagtatttattgaatgagcaaggaccaccagtcaacaagctctacctatatacaacatttccaatcagtctatctattctctcacattaaaatacgtctagacaggccaggtgtggtggctcatgcctgtctgtaatcccagcactttgggaggccgaggccagtggatcacttgaggtaaggagttcgagaccagcctgaccaacacggtgaaaccccgtctctattaaaaatacaaaaattagccgggcatggtggcacgcacctatagtcccagctacttgggaggctgaggcaggagaaacgcttgaacccgggaggtggaggttg

SEQ ID NO: 53216 - DNA, 595 bp, Homo sapiens
  misc_feature 581: n = A,T,C or G
acttctagaattaattaacgcgggaggctccttttttaagactcactaaaaatgagggagaaagagagagtcttagggagatgattcttagaagtgtgtgtctgatttagttcaaaaggcaaagaaatttatgctgtttagaaaactttgccagtctcatggttctaaaatactttattgtagtaaagtgatatagctgtagaaagacttccatttctaacagtcctaaatattgattttgcttgacttatatatatttaaagcatcgttgttcttgaaagggattatgacaaactatttcccaaatacattttaacttcagagtatttctgtgctataagtctaaacattctttatccacagacataaaagcctaaattcccaactgtgtgatttcatcttgatttattccaaaataattttaaggattttttgaaatttatatcataaagaccaagaaatcagattttagtttttaatataataatttttataaatatatgacctatttaagtgcatggattttaatatgtaaaatatgctatattgttaccaaaaatataaattatactttaaagatntatctcaggacttt

SEQ ID NO: 53217 - DNA, 617 bp, Homo sapiens
ccgggccccccctcggaagtcttctagaattaattaacgcggggtggggtgaaaggggtgctctcctgctgaacaagaatgcagtccctattgtactgtgcaacaaaatatcaggaataaaaatatctgtgcatggtggtgcatacttgtggtcctagctactccagaggctgaagtgggaagatcatgtgagcccaggagatcaaagctgcagtgagctgtgattgtgccattgtactccagcctaggcaacagagcaagaccccatcacaaaaaaaagacacaaataaatggaaacacatactatgttcatgaagtgacctaatattgtaaagacagccatactgcccagagcaatttaccgattcagtgcaattcttaccaaaatcccaatgatatttctttgcacctcacccttcctgatttcaaaacctattacaaagctacagtaattaactgtatggtgctggcataaagatagaaatgtagacttagtggaacagaatagagaactgagaagtaagttctcatgtgcatactcaaatgatctgcatagatttgtatcaaggctacaaaatgggaaagaataatctcttcagcaaatggtattgggaaac

SEQ ID NO: 53218 - DNA, 620 bp, Homo sapiens
  misc_feature 133, 134, 149, 537: n = A,T,C or G
cgggcccccccctcgaaatacttctagaattaattaaactgggtccaaaatatttaaaaataagcaaaaagtaaatttttgtgaaatttgacatctttggggagtttcaattaacaaatttctcaactaatannttttcattttcaatnggaaaatacactcttataacatattacatgttcaataatgtctaaaattatctcatcccttagtgcctctaaaacatatgaaacatttaaattttaaagaaattaagattttgttttgtattatgaattgaaacacttaatttaaggtctttgctgccgctttacctggaagtgacatcgtggtagccttgtggccaaattgaacttactctggatattaaaaatgtaagcaagactgtgcaagctaatgcatcatgtttatatttgacagataattagtttatacagtttaaattaccatacctatcttcttttctttttttctccatgggggattaaaagatttttgtttgtcttggatcagctaaaaatttttacaatgcagaangataaattggaacttgctccctactagtcatgtccaataattctagaaagtacctcactcccattttcatattaaagttgatt

SEQ ID NO: 53219 - DNA, 606 bp, Homo sapiens
  misc_feature 20, 33: n = A,T,C or G
gtaccggcgccccccctcgngaatacttctagnattaattaacgcgggacaccctctaaacttgactaaagagaagaacaggcagaaaaatgaattaaacaaagaaagaaaaacctgtccggtcatctaaaccattcaataagtctaaaagaaagggtggaaaattatgcagtgctcctagttgtttacaaggattatgtctatgggttttaaaatattctgtgtaagatgttgtattgatcatgattactaagccaaatacatatgacagcacctagcatagaactttaacaactctttatactatatgttcaatacatatttgttgaattagaatgtacatcttgcttaatcagaaccacatgtatactgttctttgaaaaattgtacaaaagactggccaatttggcattttttgttggaatcctattgaataactatcgctcttatacttctagtcattggtctaatggagtgggattttacaaacgtaagttatatagtcatccataagctaactgtgtgattctattatatctaatgtaacacagaaaaatgtatatacacactagtatacatttaaaacctagaggtattggctgggtg

SEQ ID NO: 53220 - DNA, 558 bp, Homo sapiens
cgggccccccctcggaagtcttctagaattaattaacgcgggcagtcctctctatgttccttttattattgacagaattcaataaaatataaagaaatctcaatccaattagtctacatttagcacggacacatcatttttaaccaataataatgcagaaaaatatgcgattttctaaaatgcatcgcacttttatttttatcataaagaaacatggaaccttggaactactatctgtgcaaccctaaagagcactttaaaaattatattagttatagcagttcatttgttgcaagccccaattcagccaaggaacattttgtaaatactttttgttcttaaatgttaagaatacctgtattttaaaatatttaataaaaggtttggtaatttgtcttctttggatgaatttaaaatagtgtcgtaacgctatggcagtctttgtatttctacatataaacccaacaatatttagatttaccattttcagaacaagataagcagaatcaacagtatctggtattcaggagtcctggactaaattctttgttcttttcc

SEQ ID NO: 53221 - DNA, 611 bp, Homo sapiens
cccccctcgagagtcttctagaattaattaacgcgggtctctcccctcccccacttgaattgcctgctattaaaccacatctcctttgtctaggaataattcagtatttctttgtttttaaagctgaacgcagtattttcatttattcttatttaatttgggtctgttttctctaccattgaagcctcttgaatcttttaaagcttgatttcgttttctactttcctttcaactttatattgtttgaaaatcctctcattttttgccactttgaatagctatggaaagcatcatcagcactgctctttctgatgatcaatagtaataagttccctacttcataaagtaaggggacacaaagtctgatttggttatcctcacaaaataatattttattaatttgaaaaaaatatgtaatactcaaaggatgccgtgaattttgttatttttttaaatgcttttttgggtcattcacaataatttacatatgaatatgaaagattatggaacaattcctagtatgcttatggattcatgctctctgcaagaattcagacccagtgataggaaaacactagtcagttcatagcttactattgtaacaaagactt

SEQ ID NO: 53222 - DNA, 464 bp, Homo sapiens
  misc_feature 33: n = A,T,C or G
gtaccgggcccccccctcggaaatacttctagnattaattaacgcggggagaatctctgtaaaaccataaaagttttaatagatttacttatagaaaacaagaactaaaaaacattactagtccacattttcaaaatctagtcaaaggataaatgaaaacctaggggaaaatatcttcaaaatatgaaatgataatttctacaattggagagttctcctataccataatctaagtgtgatgaattgaattatttttaaaaatattccatgcttctcctgtgggatatacatccctgccctgttgaatgtagatacagccacctttgctttgaccagtggaatatcaacagaattgacatatgttgcttccaagcaatatgtaatcttttttgtttggcttcttttactgggcaaaagaattttgaaagtccttcatgttgtttcacgtatctgtagtttcttcc

SEQ ID NO: 53223 - DNA, 619 bp, Homo sapiens
cgggcccccccctcggggtacttctagaattaattaacgcgggttggtcatttcctcctttgtgttagttctccattttctttaaccatgtaaatctgtttgtttcccacttataccttgaaattcttactcctaaaaagactagagtcctggatgccattccaacaagttcccctgcctctgcttcctgtggctccctctttctccctatacccctcccacttatctccctttgtgccccatctgagaattcccttagcagtgcctgtcttgggaggttgagggctttaggcagcacaaactttgagacatgaagttgtgtatgtttggccatgggtgccgtggcttggtcagcaggcaatgctgagaatcatacagaggggagaggagagaacactacgtgaagagactgtagattaacccagggtcttgggctgagctagggtgagtagggtggcaccagactttccttggtgtcctccagagcctgtactatcctctattgcattattataattcttcatgacacttaggaattttttcatgtctgtctccctctactttatgattgcaccccaagacctaacacagtgcaaatgtctagttgtgtagtcatgtg

SEQ ID NO: 53224 - DNA, 457 bp, Homo sapiens
  misc_feature 451: n = A,T,C or G
cccccctcgagagtcttctagaattaattaataagtattttgaaactcaaatttgagtaattgtctctcctaaagtccccatttttatttatttagtcttcttataaaaaccatggtaaagccatctttcttccctagaaatgtcaggaattacatgcatcttttaatatattctttgataggtaccccgcccattcatcatccctcaagtagagcacatactccaaatgatgggaaccacctgatctgttttgctacattagcagttgaaagcctttttctgcaattaatattgcaaagagataacttccaataaccactggaaatcattctagcacacatgttaaataaattactcagtagtgaaactatttaaattttttcatctctggagagaaatctaacaattagggaggccatgtggtattctcaggatgtgtgaaatcctctntgatgt

SEQ ID NO: 53225 - DNA, 448 bp, Homo sapiens
  misc_feature 411: n = A,T,C or G
aattaacgcggggaatctctgattgtaaattatataattaaaataatttgcagaacctattaaagttttcacatcagtctcttctgagtttggttcatatttgttttccctgagtacagtcaactttgagccattgtcaagataaaaatctagacttggaaaatatgagaaccagatcctgtacaattacagattcatcaaggaaatgccattctgtgagacctctagactgctagccaatgagtcttcctttgggaacaactttaccttgccatacaacatgtcagagatatttagggtggcacacacctatagtttcacctactcaggaggctgaggcaggaggattgtttgagcccaggagctcaaggctgcagtgtgctctggttgtgccagtggactgtagcctgngcaacagagcgagacccgtcttaaaaaaaaaaaaaaa

SEQ ID NO: 53226 - DNA, 581 bp, Homo sapiens
ccgggccccccctcggggtacttctagaattaattaacgcgggatctcaaaaaaaaagaaagaaaaaatatatagtttaaaatgagttccagctatctttaaattatgccccacttatcactggtctgaataaagaaggagaaagagaacttccctgtgccagaatgcagtcaggtctatttcacagccagctcctgctgactttaagaaagctcagcttgtgccatcagagtggaattccttggcccagggcctccagcagaagccccctgagaggtcaccctgatcctccagcccatcccatctcctgaccttctctgtcattgctatcttgccagtcacccctccagcccccacttcacccaagatcttccccgtgggaatgaactgaaacatcgagatttttctgtggtgatcgaactggaggactctaactttcacttacaagatctattcatgtttgcaacaacatatcatgatgggtggagaatactaataccaaaggactgagtctctttaaatttgaccaactgacttagcaggcagctggtgccttggttcctttctatccctcatgctta

SEQ ID NO: 53227 - DNA, 521 bp, Homo sapiens
  misc_feature 7: n = A,T,C or G
ttctagnattaattaacgcggggagtcaaggaacattatcctgacatcatcttaaggtttgacaccaacttttaattactttacacaagttgattttgaaaaaatatcttcagctacacataaaatgaatattaatttaatattgttaaattatttgttagctttggaaatactagtaaatgtaatttttaaaattgtatcacataatgttaacttagtaaaattagaagacttcagtaaaattctgtcagcaaggtggcatacaattttaatacataaggggtaactcagtaataaatttgtttttgcagctgcaaatccaatttttccttagggtttcagaaaatgtgagttattgatgtataaaaaatcaaaagtatggagggatatgtgttttggttgatgggtgcagcaaaccaccatggcacatatatacctatgtaacaaacctgcacgttctgtacatgtatcccagaacttaaaataaaaaaaaataataataaaaagaaaaaaaaaaaaaa

SEQ ID NO: 53228 - DNA, 285 bp, Homo sapiens
  misc_feature 37, 179: n = A,T,C or G
ctggggtaccgggcccccccctcggggtacttctagnattaattaacgcgggcccatcacaaatacactagttcaaagtaagtaagaaataaccaatgcacatgttcataaaatggtctatgctgcttcagaagaaacaatatactttatctagccattttactaatatccgtgggccnaacagaaaaagtacatgcccttatggagcaggaagttttagagagtaacgaagtaaacagatacataatataacattagaaagaggttggcttaaaaaaaaaaaaa

SEQ ID NO: 53229 - DNA, 619 bp, Homo sapiens
cccccctcgagagtcttctagaattaattaacgcgggatcaccatttgtgacatgacaaagaacatgtactttggagtcagatatacaatcgacttccagattcccctgttactatctgaataaactagcactgcttacataaatcctctaggcctcaattttctcatttttccaatgggattaataatatcttcagaatattgtaagaatgaatgattttatattttaagtatttatattagtggtcaattaaaataatagtttgaaataataccatcatgttcatttttcaagaaccatgtcaatttagacacaacaattcacaaaccattcattcattcactgatatgtttaacacacattgttgaatatcactaggcattagggataaaaatatgaataggacatgatgatttcaaagttcttcataaaatatacagaattttctaaggaaatttgtgatttttttaaatgaacgtgttatatttttaaaacattttttctctacaggacaggtacgtgctaagaggataaaatatggggccactctggccaaggctaaaacatttcattcttattgattcaacataaggaagaactggaaatgttaactattac

SEQ ID NO: 53230 - DNA, 488 bp, Homo sapiens
ccgggccccccctcgaaagtcttctagaattaattaacgcgggatagtggagaataaaaacagtttgaagaaacaggggatttagggtataaaaattatattagatcaagaataccaactttctaatgagcagaagcagcactctctctctctccaaagtaggtaaaaaggaaatacaaaaagctttaaagatgggaaaggataacatgaaattctatgctagaattaaaattaaatacatctcccctattgatagttccatgagggaaaggatgtctgcttgttctgtccattgctgtgtcccgagcacctggaacattgcctggctcatgactgcaggcaaaaatttctttaaggaatgaaattcatacggctaaattcacataataaagaaaaaggctttcaagttacttcaaataacaaaaccaactgttcttgagtatatcttcaatcaaaaaagagatcaagaccaaaattacaagactttt

SEQ ID NO: 53231 - DNA, 578 bp, Homo sapiens
  misc_feature 28: n = A,T,C or G
cgggcccccccctcggggtacttctagnattaattaacgcggggatgaggaaaatggcatccaaactggtagtgaaaagagtgcagaagccataggtccttaaataactagatataaccagatatttctaaaataaaatgcattgttaggaatatgcagagaaagagttaattagatgagcttggctactagaataaatttataacaaatacttcatagctcaatttgatgttagattaggcaactgtcaccaacattttatttacaaaatacagggagggaaataaaatcaatacataaggtaacagcaaaatttgacctcaaagctgaaggataagtcttctctaacatgtaaaaaaaaaaaaaaaatgtaggtgacaaatgagtcatttgtggaaataacctacttcaaaaaaaattttttttacataactggtaggccgtattttagggggatgcccaaattccaaaaggtagttcctagagctcaggatattaatgtgcctagtcctataaaccaattcctagcatgcgatatttgaatttttaatagtaatatatttgaaattgaaaggaac

SEQ ID NO: 53232 - DNA, 584 bp, Homo sapiens
cgggcccccccctcggaagtcttctagaattaattaacgcgggcatctgttcaatgctaatcctcttgaaataatttggttttcaaaactctgtccttgtactgttctaattttaacatcagtaaaccatcattgttatttttgtttttaatttttagagacaacgtattgctattcaagcctctctgttgcccaggctggacttgaactcctaggcttgagcaatcgtcttacccattgtcccttgtgacaatgacttgaagtgattcaaaaggcctttttagaaatgtcttttcttataaaacaagcatactaactagaaggggaaaataatatttaaatattgacagtcattaacaggatcactcaaacactgtgctctatgatgtttgactcttcttagaggagtgcagtggggtatcacacagcttctgctcaggtacaatcatgttttcaaaagaaaagggctgggcgtggtggctcatgcctgtaatcccagcactttgggaggccaaggcaggcggatcacgaggtcaggaattcaagaccagcctggccaacatggtgaaaccttatctttacta

SEQ ID NO: 53233 - DNA, 611 bp, Homo sapiens
cgggcccccccctcggaagtcttctagaattaattaacgcgggatgtatacatatgtaactaacctgcacattgtgcacatgtatcctaaaacttaaagtataacaataaaaaaaataaaaaataaaaaaataaaaaaatctatgatttcagtgatattacaaatgaatctctattttctatttaaaactgttttgtacatgtcaatttcctttaaaaaaaaaaagcctttaaatagcactccaatattctgaatagaaagttcacaacattggtatccagaatgctatataatcgaattcaattttactttcattgaacactgttacaaaaggcacattctataggaagcaactgtaacttataatactctatatttaggaatgccatccacctctaagaggggaagtctttaatcttttgagttcatatgccttttttcagaatctcatgaaatttatagttatcttttcagcaaaaatgtacatgaacacaagactcaatttcagtttttacacatatctcctaaacctatcaatgctttcctaggctgtatgttaaactgctatgtattaaaagcaccactgtatcatccttaaacatattctccaa

SEQ ID NO: 53234 - DNA, 617 bp, Homo sapiens
  misc_feature 14, 27: n = A,T,C or G
gggccccccctcgngaatacttctagnattaattaacgcgggactaatgaaatacttaaaatttaaaatagattaacttttttctgtattacagtgaatcatagcaagaatcatcgttactaactttttgattataataagttgggaaatatttcttccacagcactttctgtgcaattcatttattatgaaagcaggatgaatatattcacacattcattttgctttatatctaacccacaaacagcaccttgatatcacatagggacaaatgacatttcaaaaaagataaaagtaagatttcatgtaatacatataaaacatggtatctttttaaactcattttttatttaagaaatttctgttgcctttaactaaataggtatgattgtgtaaggatgatttcacccacctctatcttagagataactaggttttctcccttgcattagcccacacccctcaccactgtttattctctagatttcttgactatgtttgctatgcatcatacaaacttaggtgttggtccatttaaacatactaattttagcatttccaaatcattatcttacttcagttatgctgatagaaagcatgtggttatgagtgagtaa

SEQ ID NO: 53235 - DNA, 556 bp, Homo sapiens
ggtaccgggcccccccctcggggtacttctagaattaattaacgcgggggtgaagagtgaaattggactgttagactccatgatagtcaaaggacataacatcctattttactgtccttcagaagagctaaaatgttctcagagagtgacaaaaagatgatagttacttccttgacagcaacatagggagaaactttatgaaaagctagaaaatttatatgcatctgacttcagtgactatccaaaataaatttcaaagtatacaatttttttttttacaagacagctcaagtagcaccaccatttccctttaaaaaaaaataaaataagccttttccctgattgtaaggattatgcacaatattctagataaaaattttggaaagcataagagacgaaaattacctatagtctcacaagttaatattgtggtttacatttcagtgcatatacttctggtctttttttctctttgtagactttctacgaaatttcatatttttcccagaagtcaggctgctagatctgtgtgatctttaccaaaaaaaaaaaaaaa

SEQ ID NO: 53236 - DNA, 577 bp, Homo sapiens
  misc_feature 28: n = A,T,C or G
cgggcccccccctcggggtacttctagnaattaattaacgcggggacggtggtattttgtagctttgaaaataagctacaaggacaaagaaggagtcagttaaatgaccaaacttttaaaatatgagtgtccataaatatacatcaattgtttctaaatactaagatagatcgatatcttcatagaatggtgcctgttgagtctcagctgctttctaccctgtcatatacctcggtgaatagtagtgggtgtataattatagtcttttatagtcttgagttattgaggaacttattatactatatataaaattatttccctgtaaatttcacataatttacactattacctatatttagatttatctgaaggaaatataaagttattactttatttaaaacaactttattgcatacttattatataccagcaccgaagaattattaaaccccaaccctgccttcaagaagttcccaacatactggctgaaacagacctctagacagatcattacatgatagtgtgttgaaggaaaatcgtatatacaaaggatatactgcagaaagagtcttgaaag

SEQ ID NO: 53237 - DNA, 487 bp, Homo sapiens
  misc_feature 18, 31: n = A,T,C or G
accgggcccccccctcgngggtacttctagnattaattaacgcgggccataataatatgaggtagtttctagttcagttttcttacttcagaattactattatattattatataagaaaagaatctttttatttgtgagacattgagtctcaactggagccgacacaatgctgctagtccagattttgcataagctctggaatccaattcccccacagattcatcgttgacccttgaagaggcacttgacctcatcctttcctgacccatgaaattagaagcccaactgccacagagagatgatttagatttgattcctgatatgcactctatgtatgggaaacttggaaactttccaatagatccagtatatatctagatgcttaattattgggataaaaataatactcattatttcctgagttattctttaataatttaaagatgcattgcctttaagtaccaccatgctaaaaaaaaaaaaaaa

SEQ ID NO: 53238 - DNA, 605 bp, Homo sapiens
  misc_feature 566: n = A,T,C or G
cgggccccccctcgagagtcttctagaattaattaacgcgggggataaggaaataaatttaaaaggtactattttgatatttttccatcaacgattaaaaataaataatactcgaagggaccgtttatgttactcattgagatatttgatacactttttaaattgtgcaaacatcaacaggatcttgctgaaaggaaatgacagggtacagaggaaggttttttaatctgcctcaggatgtctagctagatagcattctgtcattccaaccccccaccccactttatacccagtgggtttctttaggtagcacagcttcactccctgagataccacaagctttgctgaggtttctgttaataccacagaagacccttctgcgaagaagagacatcagaatcagaatataccttctttaccattaatgacatggctacagctctgaaatcaaagacctcatgttgacagctttttgagagatatttgcggggaggggttgagtaggattttaaatttagtaaactattttgtgcaaataagacttggtttcctttgtcttaccttanagtggtgtgagacttcttttcatttcaaggaagggttat

SEQ ID NO: 53239 - DNA, 524 bp, Homo sapiens
  misc_feature 134: n = A,T,C or G
ccccccctcggggtacttctaaaattaattaacgcgggttgtccatttgttcaattgtagagatgaaaatattaatttaaaccaaaagcatattgcaggaaaagcaatccaattacaaaaagccatttatacangaaaaagtatactttcaaataaagtagtgaaaaggtcaccacaaatctttataggctaagaaaatggaatcaaatacataatgttaaaaatgtacagaaacagttttttatagaggactaacactgttctgttattgatgcctctagtagatcaagagaaaaatggagaccatttgaaaattaactaatacagttaaattaacaaatatactttcaactgggcacagtggctcacacctgtaatctcagcactttgggaggccaaggtaaatggattgcttgcacccaggagcttgagagcagccgaacaacatggcatatcctatatctacaaaaaaggcaaaaaattagccatgcatgggaatacacatgtgtagtccctgctacttg

SEQ ID NO: 53240 - DNA, 615 bp, Homo sapiens
  misc_feature 35: n = A,T,C or G
ctgggtaccgggcccccccctcggggtacttctanaattaattaacgcgggtactaattttgggggactataaatttgtattttgctcactgcccccatcagagtcttcaagacaagcagggcattagttgggcctggatattttcctccatctgtagttttctgagagtttctattatgaaatagcattggatttagtcaaatgagctttctgaatctgttgaaataaccatatggctttaaaaaaattctgctaatgtggtaaaatctattgactgatttttgaatgcaaccagctttgcattgctgagataaaatccagttggccatggtgtattaccctttttgaattttgctagatttactttgttaatattttgttaaggatgaagtggtaatatttttttatttctacggcacctaagaagaaaacaaatgacaggaggactcatttcccttagcaatggaaattacctttcacagtctctataaaataaaatattgccaaaaaaaccaaaacaagtaaaatcataaatctcaagagagtaaatctaagatagaacatcagcaaaatatgcactaaaagtaaagtactatgtgtgtttaaagctacag

SEQ ID NO: 53241 - DNA, 521 bp, Homo sapiens
  misc_feature 78: n = A,T,C or G
accgggcccccccctcgaaatacttctagaattaattaacgcgggagtcatctcaactctttctcaactgcacagggnaaaagtaacccagaataattggaagaagattggaagattaaaagttccaaccaaaaacaaaaacaagcaaacaaacaaaaacaactctgaatcccctgaataatcatttctttttttaaaaaaaggcacgtaataatccaaaatatgatcgggcacagtggctcatgcctgtaatcccagcactttgggaggctgaggcaggcagatcacctgaggtcaggagttcgagaccagactggccaacatggtgaaaccccatgtctactaaaaatataaaaattaactgggcgtggtggtgcatgcctgtaatcccagctactcaggaggctgaggcatgagaatccctagaacctggcaggtggaggttacagtgagctgacatcgtgccattgcactccagcctgggctacagagtaagactccatctcaaaaaaaaaaaaaaa

SEQ ID NO: 53242 - DNA, 437 bp, Homo sapiens
attaatctaccgcggggtagtcatacaacaaatctttttttattttttatccacaaaaataaaatattgattaatcaatacgcaggaggtgggacaaaagaattttctgttcaacaaagggaattgaattttttcgcgtcataaattttcacagttttttttttaaattgggtgaccttgcaaataattcacacctgggaaggggcaataaaaaaaatccaaagctttgccgttccttttacaccgtttaagaaatatatttcataattgcggggggcttatttccactgaggcacacaaagccttttaaatttatttaaacattgtttccacccttaaattctgtttctggacaaactttaaaacttttttatgaaatatgtttttatgagtttatcttaaaattaaaatacccagtcgggtgggggggctccccc

SEQ ID NO: 53243 - DNA, 542 bp, Homo sapiens
ggggacatattgagaaccattaggaaccattagaaacataagtttccacgtcaattttacatctaaattttaggtaatatttgcatttagcctctctctgctttttttctcaccaccacaaaatccataaaaatgttatcactttaaagaccatctgcaaaagaaataccagactaaaaacagaatgtttgatgcataaactgtcctttagatcacctttaagacaatattccatcaggcaataaaaacttccagttcaatttcctttaatagaactaagatttcccctgaacaaaattctcttcgtttgctgattgggaaagacagctaattttaatagcaattgtccctccaagactatcttatgttttcaggttgcttaggaaatatgaatttcaggatgaaaaaagtcattagcaatagaggtatttagaagatgtaaaagggtaaaatgtacgtttagcacaaagcagcaatctctttactcatagctccagggttatcaggatgtcattaacagctttttactatgtaaatgtttt

SEQ ID NO: 53244 - DNA, 560 bp, Homo sapiens
  misc_feature 28: n = A,T,C or G
cgggcccccccctcggggtacttctagnattaattaacgcgggcatagcatgagagatgcttgtgaggtaggagcgtggatttcattcaaccgaaagtgaacgttttataaaatcatttctgtcattgcagatcaagagcctccacattagattggtttaggattataaactagagttttcagtgtgtgcttaggatttaaggacggcagcacacctctgcacaggtgatgtttatttacctgcttcacaaaaactcctcttcctgatagatctaacaagatctttctattgtttaaagcttttcagaggtcagcttatctcaaaaatactatctaaaaaagaccctgtaagattttgtataagggagagaaggatctagaaaaaataataggaaaacgtaaagccagtcttcacaattgagcccttgtcccccaggagagcagcgttaaaactcagcacacaaaatgtagtggctgatgtgtttatgctcttagtgccagcatctcagagaatgcatgcatgtgagcttacatcaggttgtccaaaaaaaaaaaaaaaa

SEQ ID NO: 53245 - DNA, 576 bp, Homo sapiens
  misc_feature 22, 38: n = A,T,C or G
cccccctcgaaagtcttctagnattaattaacgcgggnaacacattaaaatatctttatggataggcagatgatctgatatctgagctttagcagttaactctttaatatttaatgtatatcattcaacaggtattatccacttcctacttggaaattaaacacttttctgctacatatctcatctcaattaataaatctaattgtgcatgctaaggtttattacttgcaacactcctttaacaagtacaactgactcaggaacatatggtaaaaatactacttaactctcttaataattagcttataaccagtgtgagcaagtaaatatttgagaatcatctctccaccgggcgccgtggctcacacctgtaatcccagcactttgggaggctgaggcgggtggataacgaggtcaggagatcgagaccatcctggctaacacggtgaaaccccatctctactaaaaacacacacaaaaaattagtcgggcatggtggcgggtgcctgcaatcccggctactcaggaggctggggcaggagaatggcgtgaacacgggaggcggagcttgcaatg

SEQ ID NO: 53246 - DNA, 596 bp, Homo sapiens
cgggccccccctcgaaagtcttctagaattaattaacgcgggcttcagttaattgccttttattttatacctcttgtaaagaaaaaaaaaaattatgggataaattaaaatgtttaacattccatctctatcacttgcagaatcaccgtaactgtatgctaggaagtaattcaaggcacccacatggccactatacccattcatcaatttatctactcagtaactaaactccatcttgaacagaaagggtgctacccagaggccaagaccacaggaagtccaagggaatatcaatagcattctacgtccaagatgcattcaccagcagaataaaatacttaaatacgtagactttcactgagatatgcatggtataaaagtcatttttaattttttttctgacaatgcataaaggattagggaataaaattctctcgtaacaaagtgatcaacgttgtacaccatcttgaaaactcccacttaaaaatgaacaggatgaaccaatctgtccaaaaatagagtcgttacccagaaaaaccacaatcatgcaaaaataagacatttcagaattggctcttctaaagaaaaaactcaaa

SEQ ID NO: 53247 - DNA, 539 bp, Homo sapiens
cgggccccccctcgaaagtcttctagaattaattaacgcgggagtctaattgtttctcctctgcttaaagtactttgatgaatctctattgtcttccagaaaattctaacctctttagttttgcaggtaagatccatcatcatctggctcctttctatttttctatgcatacaacttcatttccaaccatttccctgtatgtctcctgtaacatagctaggcagctttcttggacctccactccctaatatgtatacaaagttgctcttttcacacatcatttttttcttcctgaaatgcccttcctcctcctgtatattctagtcttcctggtgttttaacctgtacttatgcttataaattttacactgatgttattaccatttctctgaatatgtccccgagtgtgcccccacttcatgccaacaaagaaatggaaatttctactcttgcttttaaaacaacattatgagaaaggagcttcaagatgaatgactaaagacatttcatactctcctcctccctaaaaaaaaaaaaaa

SEQ ID NO: 53248 - DNA, 622 bp, Homo sapiens
ccgggccccccctcggaagtcttctagaattaattaaccgggccctgagaataggatcataaaaatgtttatgatatttttaaaactgtaccttatttatgaacactaaaaaaaataagcatttaaccttgctgtcagtcctagcttatttcaattttgactttttgcttcacaggatttttttctattagctttacagatatccagttcttagctcattcttaccaaaaaaaaaaaaaaaaagattcttttaacagggtctcattctgtcacccaggctggagcacagagtgagactccgtctcaaaaaaaaaaaaaagttactggctgggtgcagtagatcatgcctgtaatcataacactttgggagcagaggcaggaggactgcttgaggtcaggagtttgagaccaacctgagcaacataaggagacctcatctctaaaaacaagactgcagtgagccacgatcatgcaactgccctccagcccgggtgacaaagcgagaccctgtttcaaaaaaaaaaaaagactatatacttagagaactgcttggtgtgacaaaaacagcacttaaatgggactcaggagacttggtttctggtctagtactgtccttaagtag

SEQ ID NO: 53249 - DNA, 616 bp, Homo sapiens
  misc_feature 30, 590, 599: n = A,T,C or G
accgggcccccccctcggggtacttctagnattaattaacgcgggctgtggctactactacatgcttccacaaattcttatctaggctttcttcagaaattggacaggccagtcatggtggctcaggcctataatcccagcactttgggaggctgacgctggcagataacttaaggttgcaagtttgagaccagcctggcaaacatggtgaaacaccgtctctacttaaatacaaaaattagccaggcatggtggcaagtgcgtgtaatttcggctacttggaaggctgaggcaggagaatcacttgaatccaggaggcggaggttgcagtgagccaaggttgcgccactgcactccaacctgggcaacagagcgagattctgtctcaaaaccaaaaccaaaacaacaacaacaacaaaaagacagagaaagaaattggacagagggctttttctaattaggaaaagccagcatctccatctctgcctggtaatttcatgaagtctgcatagcaaaaagccctacatacactattttacacaatcaggtacaactgctttttcctattccattctccttgctcgcagcanagctggctntagctgacaggcaagat

SEQ ID NO: 53250 - DNA, 496 bp, Homo sapiens
  misc_feature 39: n = A,T,C or G
gactggggtaccgggcccccccctcggggtacttctagnattaattaacgcggggtcccaattttaatttccaataacataaatatcaatagacattaaaataaaataaatataaataaaagctcattattggaatccacgataactttttaagtatataaagaggtgctaagattaaaacatttgagaatcctcattctagatcactggcaataattcctcctgctactacacagatttcagaatactaattcttgaatgacttctggaattcttgaccttcaaaattagtgttcccagagaaaacatctaaataggaaagtatagcagtaatagctcactaaacaactttcctgagcagagtggggtaaatgcagcaaggagaaaagtggcttgctataagagtgaaaatatttaaaatgtctactcattgtcgcaatcccctaatgcctcagggacagatgaaactttaccatttaaaccttattttgagtta

SEQ ID NO: 53251 - DNA, 608 bp, Homo sapiens
  misc_feature 25: n = A,T,C or G
ggccccccctcggggatcttctagnattaattaacgcgggcacacacacatatcaaaagtctacatatgtccttgtttagtcttacttctactttttaaaaagatgcattctctttctttcaagttcaaaggcatcttttgaggaaatacatttgtattttccttgaacttggtacgtacacacctacatatatttcttcaagaaatctctagcatgtccaacttagtttttgagtaattattcttacaagtgaaaacttgttctcatggcagcaccaggctctgagctccctgaggcaggggtcatgtcatgtttgtgccctaggaagctggcctatggtaggtaatcaataattattgaataagatgaaaaagatcaggtagtacaagagtcctgatagtccccaactctgacccctgagtcccttcagtttctttctacttgacagtttgtaacactgggcacaaaagggagacagagagaacaaaccacttctgctgtgaccaggttacgtgatctgcagggatccagcctccaatcaggagctattgcacaagggctagcaagtagccaaggacaaaaaccaggtaacttcatcagttaagta

SEQ ID NO: 53252 - DNA, 484 bp, Homo sapiens
  misc_feature 38: n = A,T,C or G
ctggggtaccgggcccccccctcggaaatacttctagnaattaattaacgcgggtaaaaacaagcagatttaaaccttattaaataagactacctcaagacatttagtaatcaaacttcgaaaggttgagaatacagaaaggatcctaaaagaagcaagagaataaaaacaaataacatgccaagaaccttctatatgactggcagcaaatttctcagtgaaaaccttaagggccaggagagagtggcatgacatagctaaagcactgaaggaaaaagtattttatcctagaatagtatatccagtgaaaatatcctttaaaaatgtgggagaaataaagacttctccagacaaactaaaataagggatttcatcaataccagatctgtcctataagaaatgctgaaagaagttcttcagtctgaaataaaaggatgttaatgaattagaaatcatttgaaggtgaaaaactcactaataatag

SEQ ID NO: 53253 - DNA, 600 bp, Homo sapiens
  misc_feature 9: n = A,T,C or G
acttctagnattaattaacgcgggctcccttgactatctccactataggggttctggaaaagcagaatgtttttgatttctagtctttctcgcagcaatgtgtggtcatatgtttgaattctggccaatgaactaaaagcagaattctgtgacatggaggaaaaatctggaaaagcttctgtggtcatgacaaataaaacagacattattgatgcctccccacaacccactcctagcaccctatgctgaaatagtacatgatgttcagagatgcagagcccattttgtgacaatgaaatggccaagaggtttacagagatgtcagccctgatataatggcagtttacctccaaagttcataatatgtgagaaaaataatgtttatttgtcactcttaggcacattgctgcttgtagcctagatcatcactatctgatacagattgcataagggtttatgagtctttacagccaaaaatatctgggtttaaatccccattctgacaatttgtgatctttggtgagtaattatatctctaagatgaggtatgttaatctaaaatttggaacaacaataacattcacaagcttgttatgagga

SEQ ID NO: 53254 - DNA, 601 bp, Homo sapiens
  misc_feature 39: n = A,T,C or G
actgggttaccgggcccccccctcggaaatacttctagnattaattaacgcggggcctaactgatagttctcacttccccataagcccctgtttttcatcacatttaaatagccagttaggcttgaacaatgagaaagcctaagttcagggtctaatgtgtgttcttatatgtatcagcacttcagcaaatggtcaaatgcttgaggtcagaatgcttcctagggatttagtttttaattttaggaagtatggttgagataaaatatgtcaataaatctccaagaaggcttgaagaagttatttttgttatattaattgtacaacatatctattttaacagacattcaatgggcaaaactattcccttcattttcccccctcttttctcctttcctgtctcctcctccttccaagaagtcatggtataaacagcacaggttatattaggggaatcttctggagtctccacaggatgctgctttgcatcaaaatcataagaccgtcagagaagtggaactgctttactaacatgggaaaattttctattccagtaacaaaatattttttaacgacagtccatagatgtacctgtttctatgg

SEQ ID NO: 53255 - DNA, 616 bp, Homo sapiens
  misc_feature 16, 593: n = A,T,C or G
cgggcccccccctcgngggtacttctagaattaattaacgcggggtggggagcgcacttaggtcctctgtaagtgcccacagtgtccataagactgctgggtcatttctctagttctgaaataatatttcttaccatatataaagagaaaaatctagtggtccatgacacaggtgattggactaagtaagtctctccttttcaagaacgtgccttcttcattattaaaaaacataaaactaaaaagaaaattatggaaacatatatatgtatatatatatgtatatatattaatatagtacaggttattatacacacaagagaaaaaagccaatgtttgaataagatttgaaatctttttacagaaaatggtaaaagttgttaaataaaactcaactacaagttgtttttgatggaggaacaggatatgaaagattaaaaggaatgagtggtcttccctgggccactgcagatcaaagaaaacagaagaggctgagacaagttaaggtgggtatgaactcagaaataaatcagcacaaaaatgtttaagtgagaaagagtgccattttcattactagacgataaaatcttaantaagaatttgttgaccaagtagt

SEQ ID NO: 53256 - DNA, 463 bp, Homo sapiens
cgggccccccctcggaagtcttctagaattaattaacgcgggcacccccttttgagcagtcagggcttttatcagcaaatctttctgggaaaggatttgctccctttcttcttggaaacttttgatcatcagagtcagctctctcttttcatctttcagacttgtgatgttttccacagaggactggagactgagttttagacatgcaagttccaaggacagattttcatttatctacaaattataaatgactaaaaagtggttgaaaagttaattactcagaatttgcttatttaattgcattctaactttacttgaagttctggatgtttttggccccttctaagctgccttatttaatggcctgtggtccgttgccacggcaaaacagaattaacaattcttacttatgcaaacttaatacttgtcaaatatacgctttctttgtaaaaaaaaaaaaaaa

SEQ ID NO: 53257 - DNA, 630 bp, Homo sapiens
cgggcccccccctcggaagtcttctagaattaattaacgcaggcaggattctaacaattaggtatttaaagaaaatagcttttactatttccagagaatataaattagttaatttaatcccatctgtttgaaaatgtcagatttatgtagtttgacctttacagtcagaattttttattggaattttttttagtttttgttttcattcacaatcatagttacttggaatatacccagggaaaagaataataatttttgtgccttttaaaatgctcatatatagatatatctcatatattacaggaaacatcatgtggatatatgaaaaatactaccaaaagatagttatatattaaataagatatttatatcttattatattaaagtagtaggagtagtatattaaagtagtagaatggcttttgttctcagacttttgtttaaaatttttcagacagtttttttttttgtgaaaaacaggaagtatatacatagatttttttcttagaagcttgctttttcaaacctcttctaatagtgttcttcatcattaaccaatttactattttatccttttgcagaatattgttacatcttaccaatttttcatattgacagactccttgaaaa

SEQ ID NO: 53258 - DNA, 568 bp, Homo sapiens
  misc_feature 24, 37: n = A,T,C or G
ctgggtaccgggcccccccctcgngggtacttctagnattaattaatttataaaatatacatccaaagaaaagagctatttttaaaagacatgaggacattaactgtctgctcatatattgttttcattgagagaaatacagaatctaatatcattatgtttaaaataccaatgtctaaacttgaattttatttccacccattctgaaatgagtatacatattctttcatttataaacattaacattttgaaaatagtaatacctttgcacacatgaagaaaaatataaatacatactataaatcagtaatttctataaaaatatagaaagtatgtgggtaacttgctctggtatccaaatctagcaaatttagaaccaaacattttaatttacaatttttcgctcattcctaaagaccagcacaaattttagcatggttaactgaagatgtaacattcattacattcttaattataagaatcatgttttttaaaatgaactaggatatatgcaaattaggatttaacatagtaatatcttgcattaacactaccaaaaaaaaaaaaa

SEQ ID NO: 53259 - DNA, 315 bp, Homo sapiens
ccgggccccccctcggaagtcttctagaattaattaacgtgggggcctataattagcagcacgatctgcttaaactagcatctttttcttagtgcctaaggattagacactaaggtaaaggtactgaagcactagtttattaaagtagtcagttaatagaagatgctaacagctcaaatacttttttattcataaagaaagcaaattgaaaaattcaggcaaatataaactattttatttctcaaattaattgttaaatgagattagaaaactaaacctttctaaaccatctgcaagttcccaaaaaaaaaaaaa

SEQ ID NO: 53260 - DNA, 577 bp, Homo sapiens
  misc_feature 33, 568: n = A,T,C or G
ggtaccgggcccccccctcgaaatacttctagnattaattaacgcgggactaaggtatttctccttaacgaaaggttgaaattcccattcattgactaaatttttttctaaatccaatcctacaagttgtaattcaatatttgttgctgacaagttgtcagtgtggaaaggcttaatatttattttctaatagactgcaatctttgtgaacttagatctgtttgaaaacagcaacatcactataggagggtttatttcatctttggcaatgtcaacatttaaacatgtatttgaagcaaccctgtggctattacaattggccagagttcaggttccctaactaaactaaactatttaacccattctttctcattgaaagctttaaaattatggacgtggaagtataataatatctaatcagtttgtacagcagcataaaatatatttctgggggtcagtgtacatccaacataagaataagtcaagccaaacttcacattacaaggttcataaagaaatcgttgggttgtgtgatggaagcttattgaatgataaattgtgcccatanagcaatgct

SEQ ID NO: 53261 - DNA, 435 bp, Homo sapiens
cccccctcggggtacttctagaattaattaacgcgggctgggtggtaaatataaagacccaacactgaatccagtgttcagagaagactccattttctcaggacctgtggaatctatcaagcttttctcatgccttctttggtttccatgaatacaagccttgataaaacacacaaagacacacgattttatcagtccgttgtgctcagggacgattgcttagaaggctaaccaggaacagacaggtccctggtggtttttggtgcatttttgtatttaaatcggaaaagggttttgcagactcaaggagctgctcatcaagtcttcccggagtcaagcgaaggaccggtttcgggaagcgcctttaggattcccacactccctaagatgcttctacttgagccgagcatttcccttctttaaaaaaaaaaaaaa

SEQ ID NO: 53262 - DNA, 416 bp, Homo sapiens
cgggccccccctcgagggtacttctagaattaattaacgcggggagcaaggaagaaggttattttctgccctgaactgaatttcagagtcttctgcagttacttttcagcctttcaggatacagtggaaaaaggaataaaaagaaagggcagaagaagaaagatatgtaagagggcctgaaaagatggatcactcgaggtcaggagttcgagaccagtctggccaacatggtgaaatcctgcccctactaaaaatacgaaaaattagccaggcgtggtggcgcatgctcgggaggctaaggcaggaaaattgcttgaacccaggaagcgaggctgcaatgagccaagattgtgccactgtattccagcctgggtgacagagtgaaattctgtctcaaaaaaaaaaaaaaaaaaaaa

SEQ ID NO: 53263 - DNA, 499 bp, Homo sapiens
cgggccccccctcggaagtcttctagaattaattaatatcagtattgtctaaaaaaaaaaaaagaatcagctgggggcatagttagcaggaagaacaagtaattttgatcagaagattcatgattgattgatccttagctccatccctcactagctgtatcgttttggcaaagtcacttcactcctctaattctcattttccctagctgctaaaattaaggggataaaacacctttacttacttcagggttattttaaggattaagacagataagaatgtgcttcatacgctataacactattgaaatattagttactcaaggtaacaagtacttattggatacttctcatgtgctatgtgcagcacttaacagagaaagtagcataatacaatcccagtcctcaatgagtactgtaacagagaacatcgatgagtgaacacacaggcatctcttcaaggcagtatgaaatacagatggagtcgcaattgatttaatct

SEQ ID NO: 53264 - DNA, 592 bp, Homo sapiens
  misc_feature 31, 507: n = A,T,C or G
taccggggccccccctcggggtacttctagnattaattaacgcggggatgcttacaaccagaatgtgctttttctacgcagcagggatatagagtaatggagtcataggacccactgagaatctggagaaagctgtgtgttttttctttataaaaagacacatttgcagtattacacataatacttgagcacacacaaatgattttgtatataacttcaggggattccaggggcatcttagtgtcttctggtgacccagtgctcatttagtgcttctgttacgctttaggaaagtttgaaggattgagctgttatgctcaatgatccttatggaggcagaactcagcatggggactgttttttagatttaaatttgctgctgggtcaagaagcctgcctggaataatgatattttttggcctgacttttgctgctgagtgttatgattttctgtaattgccgtggaggtggctcgctgatctaccagttgaaagctagagttcattntcccctttcattagggtgtaacttctgggtaggggtaagaggaagtgaaaggagaaaaatacaaaaagattaaaatacttttttg

SEQ ID NO: 53265 - DNA, 606 bp, Homo sapiens
ggccccccctcgaaagtcttctagaattaattaacgcggggtggaatttgaagccatatagtctggttcttcagggtgtatacatccgtgtatctataaccacaatgctgcaggggcactcgaacaggctggaaaagaattatttttctttaaagggcaaattaatttcctcaaaagtaatctctgttcactttatcccataccagatgcttattttcatttcatatcctaaaagttagattggcacttacatgccaacttaaaatacctttaagtctttaaaatttatagtattttagaatttatcatagtgaaacatgtacagtctgttagtccccaagacaataaaataaggatgatagtgactgatactccattcccttccgatgtaatgacaaacacgtagaaacactgtgtttcatttattggaattatttggatccaaaggattgcttttaataccttaacaaaataggtcattaaaaaaaatcaagtgcctttcagtattcttccaagtttcaataactgatcttttccattaaaaaacttttgattcattattccaaatcaacatatcatctaaatatttacacatagttagatgta

SEQ ID NO: 53266 - DNA, 611 bp, Homo sapiens
  misc_feature 22: n = A,T,C or G
ccccccctcggggtacttctanaattaattaatattctttaaaaatgatcaggcaaacctagtccactctaaattcttcttgtccagtctttattctttttttctctttccaaaataccttaattgaatgtgcgatgctctgaaagtttcagggataaatatgttgacagggtccaagttccttttctcaaggaatttataatctgataagagcagattatttttagcagatagttttgtagtctactaaatttgactgtgccaggctcatctgcaacactcatgtctttggttattgtggagtataatttgctaaggcataaatttgaatcctccttgtcaaggtgctatcaggagtgaggggtggatgaaacttgcgacctcttctgtggtgtctgattgccttgcagcatacacattttgatggggcatatctacacttcagtgatttgtgcaaatttgagtgttcctgagagctttttctgaattcttctcaaacgtcaagggtctaatgcacaaggaaaaatgaaaggtcctatagtagaggggcaagtagcagctatcatattgagggctactaggaatatcttcgtggaagaggtagagtttga

SEQ ID NO: 53267 - DNA, 246 bp, Homo sapiens
ccgggccccccctcgaaagtcttctagaattaattaacgcgggggtggacatgtagccggccaagcttgttctgcaactgctgacctagggattcgcacccagccagggctctaaatcctatgtgacatacaagtcctgcgtcacgtgtgacacttcccagaccacatgctgacttcctcccacctttggccagggacagtccatcagcctgacactatacatcactgtttctttttcattatgta

SEQ ID NO: 53268 - DNA, 556 bp, Homo sapiens
  misc_feature 435, 436, 437, 440, 441, 442, 443, 450, 457, 464, 468, 469,502, 514: n = A,T,C or G
ccgggccccccctcggaagtcttctagaattaattaacgcggggggctttcccttacattatctcatttaattttatttccttcccttaacaatgctctgagataaccaccactatgacgtttttcagttgtttcacttaaaggtgaaagccatatatttatatctaattgtctgaatttaaaatatttataatatattttatactggaaacataaacggcctctaatctttttcggttttgtgcaagtatgcatatgccaggccaatgtgtgtctgattggaatctgtgccttttcagtgattcccaattagtaattaattgctcgaatgcaattcagagacttgttgatcttggctggcattcaactctttttttttttttttttttttactttttgtagaaacagggtgtcgctctgttgcccaaggtggannncannnncacaatnataactnactgcancctnnaacacctgagctcaagccatcctcccacctcancttcctgagtanctggaactacaggcatatgctaccatgccctgctgattttta

SEQ ID NO: 53269 - DNA, 605 bp, Homo sapiens
cgggcccccccctcgaggtacttctagaattaattaaggacttatttaaatatcaaagaaagacacatagaaaacatttagtatatttctatacttttattaatgtcctccataccttacacagatacttgacttggctatggtctagatactccatgaaaatttaaaggacagattttaacaactttatgctaaattgatagatctctaggatcagattgccatcactctcagatgcgaagcttccaaccacttataggttcctgatatcttgcttttatacagacctaatttctcttcctttaaactttcttttcctcagttgctatttgattgaaatattgagtcattaaaaatttccaagtgggaatttttgtgtttctgcatctatcatgaagctgctcaaataagtaggtgtttgaataggagtagaaacagtaataggctgaagccagaccaatacagcttcagctaaatgccgaccttgctaaagtctgggaggaccggtgtggtattctacaatgtacaagtctgtagccggtgcccttatatgttggcttcatgtctcatgactctcttctgtaaatatgcagtttaaaaaatac

SEQ ID NO: 53270 - DNA, 594 bp, Homo sapiens
  misc_feature 534: n = A,T,C or G
ccccccttcggagtacttctagaattaattaacgcgggaactgcgtatttatagttatttttttaaactctacttttacttaaaattcctataggaaacaatcccaaaacacccatcaacaagaaactaagtagacaaattgtagtatatttgtaaaatgaaatactatatgtcaatttaaaaaatgacagagatgcacgataacatgaatgaatctcagaaacattatgctgagtgaaagaaggcagatacagaagagtgtatgctgtttgtttccatttatatgaagttctgtaacaggcaaaactaaactatggtagcataaatcggaacagcagctgtgggtagggaaagatttaccagaaaggaacaagaaaatactgttcatgattggggtagtgattacataggcatatacatttgttatacatacaaagacttcattaacttacacatttaaaccatatgcattttatattacataaattattatatcaataaaactgattaaagagacatccgcactatgtttanttcagcattattcacaatagccaggaaaatgctcaacctagatgtccaacaacagatgag

SEQ ID NO: 53271 - DNA, 597 bp, Homo sapiens
  misc_feature 28: n = A,T,C or G
cgggcccccccctcggaagtcttctagnattaattaacgcaggaaaaagtaggttggccaagaagaggaggttgaagttcagatacggacatggcaaatctctaagagtttgtggggtatccaagtggaagcgttcagtggccatttggtctaacagtcagaacagacacaggtgatgcacccagtgccagaaagcacaggtcaggctggctcataagcctgacttctttctctgtaaccatgattatcagtctgcctttgtattatgtgttcatttttcatgtaattacatattgattatttcttttaatggaaatttatagttcaatctacggcatgaatttttgccattttcctccaaaagactgcatcctagaaaagagggattatgttctgttcacatttcctatctccaataccagtatagtcacgcaattttcagttggtccaatttggtgatccttatggagcccagagccaaaataatcagtgtagtaatatccaagatatataagcccagcagtatattgctaaaccactaaaaatatttttgctttttggttcaacaatagacgtagagatatatcctctatgatg

SEQ ID NO: 53272 - DNA, 577 bp, Homo sapiens
  misc_feature 9, 33: n = A,T,C or G
ggtaccggngccccccctcggagtacttctagnaattaattaacgcgggacaccctcttactaggatgtcctgacaccctcttactgagatatcctgacactctcttactgagatgccccctccttccccatgctgtgcttccccctcactataatgagtaacgaactcaatttcttcaactgcaggagttttcctgttggactgcagggcattggcacattaaattgaaagaagcaagtcctcccaagataaaaacttccttgaataggaatgatgagaaaaataacaataataataagaagaaaaaaagcaaaatataaacttgcattcaaatttcttgaaatactaattacattatttagggatgcttatcacatcctaagtgatgtgatacaactatacaactatagctgtataaatgatacaactatagaaataaaagcaaagaggccaggcgccgtggctcaagcctgtattcccagcactttgggaggccgaggcaggcggatcacctgaggtcaggagaccagcctggccaacatggtaaaaccctgtctctaccaaaaaaaaaaaaaa

SEQ ID NO: 53273 - DNA, 430 bp, Homo sapiens
  misc_feature 16, 18, 31, 46, 64: n = A,T,C or G
cggggccccccctcgngnagtaccttctagnaattttaattaacgnccgggggagagattgggnagaaatgcatggattcgtctttcgtattacatgggcgaggcaaagcttatattggaaatactctgaaggcattgatgacaccacacctgaattatgccattatagtgactacaatataaattaaaggcttgggccatgagcaaaggctcatgcctgtaatattagacactttgataggcctaggaatgaggattgattaatgccgcgagtgggaaaccaggctaagccacttagcaagacctcatctgtactaaggttaaaaaaaataaaaaagcggacggcatcgcgggagagctactgttcgctctataatgagtcatattacacacgctcactgtccgatgtgatacaacgcatgagactggg

SEQ ID NO: 53274 - DNA, 546 bp, Homo sapiens
  misc_feature 28: n = A,T,C or G
ccgggccccccctcggaagtcttctagnattaattaacgcggggcctcggcgttaagagaaggatcagtaagtgaggatcttagtttggggtctatgattggatgatttcttacgggtaatgagatcactagagtcctatgggggcatatgtcccggggacttgagtgggggatgagaggccatacagaaacaagacaaggaacacattacaaaaggggagaagaaagaatgagagaaaggaaggcagacgctcacctttgaggcactttggcaaaagaaaaagttctgcctactttgccctcccactccaggtcttcctgtttactggaaaccagcctggctctagagcaaatgttagcactcaggtcttacggcaccactgccctatcgatgtgttgacatcctgtggttgaggttggaaactcgcccctgataatatgggggagattagcactctgtctttccagaatagaatatcctgggcctacaccaactccctcttcatactctctcatccttgtaaattgtcttctccaggaagcaag

SEQ ID NO: 53275 - DNA, 592 bp, Homo sapiens
  misc_feature 584: n = A,T,C or G
cgggccccccctcggaagtcttctagaattaattaacgcggggtttttaaaataataagcgtatttttcatactgggaaagataaaaatttacctaacaaggcaaaagaattaactatcataggaaagttaattttgccatgcccgtccccatcccatagtgagcagtatgtgtttacgtccatgctgacattaagactgatgaaaacagaaaaaggacaggccgccatgtagaagaaatttttaaactaccagtttttaaaatgggaaaggaaccaaatggttttgtataatcccatataaaaatgtccctcataatgaatctcagactcaccttaaaggaataattctcaggattctcttccatgctggggctccagtaagagtcaagatttggggctttcttaaagcaggcttcaaaccttaaaagcataccttattgaatgccagtgccagcattctcaaataactgtgcccccaagtggtcacatgtacctgtaaattacatgcagcaaaaaggtgcaattaaccaggtcctggactgcagagtttgcaatttattaataataatgatgatgaaaacantaatacat

SEQ ID NO: 53276 - DNA, 602 bp, Homo sapiens
  misc_feature 23: n = A,T,C or G
ccccccctcggggtacttctagnattaattaacgcgggggattacgggaagagattaacttttttcttcatatatctgcataaggttcacactcattataatgatcataaaatgtcacacttttcctttaattgaatagaaaagattaaatagaaaaaacttgacaagaaaaataaaccctaagaataaagattttttaaaacactaaagaatggatttaccaagcattccctgagcaaaatgtattccacagcaaagaaataggcccaggcatcaaacaggtagtctgccggcgaaatgctgcccaagtgactctcaaggtgaggtctacctaaaggttttcagaaatgaaattcatctagcatctagcaccataaattagcagaccaataggatttaaccatttaccaaaactgcatctgggaactgatagctgccaggcatcatgctagcaggtttacagcaattactaattgcatctggagcagaaggtaattaactccagttttagagctatttgggtttaatgtactaactttctgtcatgaagctgacagataaaaagaaactaagtatgaagcatgctttcagggatacgtctc

SEQ ID NO: 53277 - DNA, 616 bp, Homo sapiens
  misc_feature 608: n = A,T,C or G
ccgggccccccctcggaagtcttctagaattaattaacgcgggagaaactttggctggagccattgattctttattcccttacaatgtttttatcacccaaccttgaaatagtctgtgtgtcagctgggcaggatctgtgctgaggcttgcgtccctgggggcaaaaaaagggtagtgacttttagttgaaagagtcaggaagggaagagtcaatagttcagcggtaagtattctgaacccaggcagggaaaccaaaattcagggatacctgaagccctcaagctaagggccaggagctaggagctgaaaggatacaggagctatgtcataaataatttaggaggtggctagatgattgccagagtgtccacagcatgctttacttggcttttatggatacaatgtgcataggttgcttttaggaacaataaagaaatgtttattaaactaattatgattcaataatattgacaataatgacaatgttgatagtatgcaatataataaactggtgtgcttttatttctcccttttcctgtgcacatctgttttactctgtgacatttttccatttagactcagaaataagaaaccagtattgctgcanaggtaggc

SEQ ID NO: 53278 - DNA, 611 bp, Homo sapiens
  misc_feature 460: n = A,T,C or G
cggggccccccctcggaagtcttctagaattaattaacgcggggtggggtacacagggtctcactctgtcacccaggctggagtgcagtggcgtaattaacaggtctctgcagctttgacttcttgggctggaatgatcctcctaatccttttgagtagttgagactacaggtatgtgccaccacacctggctgatttttaaatttttttgtgtggaaacagagtctcactgtgttgcccagagtggtctcaaattactggactcatgggatcctcctgcgttggcctcccaaagtattgggattacaggcgagagccgctgtgaccacccctatttttttttttccatgtaaatgtccagttgtgcaagtttcatttgttgaaaagattgtttcccattgaatcaccttgaaatttctgtgatgaaaatcaaattatgtgtgtctatttctggactcanagaagtgtgtgtgtgtatgtgtgtgtgtgtgtgtgtgtgtatgtatgtttgtatgtattatgctaattctatggaatgctagtccataaataaaatagtatttgattttttttctgctttaacattggatgtcttacattttctaaaatat

SEQ ID NO: 53279 - DNA, 603 bp, Homo sapiens
cccccctcgagagtcttctagaattaattaacgcggggctagggtaatattttagatgagacagcgaggaaggcctctctgatatggtaatattgaacagacatgagaacatttagagcagacatgaggtaagggagtaagccattcaaattatcttgtggaaggcaattctcgtcagagggaatagcaagcacaaagctctaagacaggaacatccttggcttgttcaaagaacagcaaagacaaggtggctggagagtagtgggcactaagattacaagataaggtgagagaacgttagaaaagtagccagggtcccatggcacatagaataaagaattctgaatgtattctgagtaagatggaaagctattagataattgtgtgcagagaagtggcatggcacgacaagttttagagagattattctggctattttcaagataaaatgtagaggccaacagtaaaaccaagtatgccagtccagagacttctgcattcatctttgaaccccaatgcctaacacagcatttggcatataaactctaaggtaaataccaacaaggataatattccttatcctatgtctttaatataatatta

SEQ ID NO: 53280 - DNA, 526 bp, Homo sapiens
cgggccccccctcggaagtcttctagaattaattaacgcgggttttgtccaaaaagcagctcctcttctggaggaatgagactggcctgaaatttgatacatgtttccttcaactatctggaaccatttggcaactacctttgagagggcaggtctcccatgcacagcactgtctgcttacgaaaccttctccttgtgagagtgagttgctccaaaaattgaatgtttattttaattcacgtattctctctgcctagcatcgtgacttctcatttttactttctctaggtttcatacctgtcttgatttacccttatgaacctcaaacttaagcttgcttttccttctcttcattcttagttttgttattttccatgttgcaccctattcatttcataattctatgttcctctatttcaaatcgctttcattatcttcttcagcttcctattttgtttctttttttgtttgtttgtgtgtgtatgtgtgtgtgttttgttttgttttgagacagggtctcttgctc

SEQ ID NO: 53281 - DNA, 426 bp, Homo sapiens
cgggcccccccctcggagtacttctagaattaattaacgcggggtatggaccattctataaatcacttttatagagggagtaactagtttaaagacgaatgcttaattgcaagatttccagtttgtttattttctcttgaagatgtagtagttgatttcatggcctacatctataattttcataaaacatctatttaaatgtacactgttcaattttattcaattactaatttctttcattacgtcttaatccaaagaattgattcaaaaaggaaaaaaagtattttaagtaggaatatgtttttagattagctttttttcattaaaagcaagattaaaagctattcattagatagaaaatacagaacatgatattggaatagttcattgtactagaaggcaaggaggcaccaaaaaaaaaaaaaa

SEQ ID NO: 53282 - DNA, 561 bp, Homo sapiens
ccccccctcggaagtcttctagaattaattaacgcgggaccttgttagctgaatacagaaggcaaaataaaagtccaaatccaggttgctatgtgctggtcttccttgcttccctaaaccctcaccaccttaagtcctggctctgtgctcagcatgcgcagagcttctattgtgaaatgcactgcagatccccgtgccagctgtgggctggtaaagtgctgatttaggtaactacaaaaggcttcttaaaaggtgaacatggccagacatggtggctcacgcctgtaataccagcactttgggaggccaaggcaggtggcggatggcttgagctcaggggttcgagaccagcctgggtaacatgacgaaaccttgtctctacaaaaaagacaaaaattggctgggcgtggtagtgtgcacctgtggtcccagctattcgggaggctgaggtgggaacatggcttgagctcaggaggcagaggttgcagtgggctgagatcacaccactgtagtccagtctgggcaattcagccaggccttgtctccaaaaaaaaaaaaaaa

SEQ ID NO: 53283 - DNA, 371 bp, Homo sapiens
gggccccccctcggaagtcttctagaattaattaacgcggggtggtgagtgctgctgagagctccttctgctgagaacagagaagtgtcttctggacttggcacagggatgtcactgttgacttcaaccaaaaaagtagaaaggaaggagaggaacaaatggagagttcagaagcagaggcaataagggaagacaatttcaaaaataagtttcaaccaagagcaatagctcatgcctaaaatctcagctacctgggaggccgaggcagcaggatgccttgaacccagggctgcagtgagctatgatcatgccattgcactccaggctggtgacagtgagacctcatctcaaaaaaaaaaaaaaaaaaaaaa

SEQ ID NO: 53284 - DNA, 606 bp, Homo sapiens
ccgggccccccctcgaaagtcttctagaattaattaacgcgggacactaagaatataattctgaactctttgggacattgtagaaaataaatcgataccacaagcaatcccatgataggcaaaagctgagaactgtgaggaatttagcattgaataaacacatggtgagtgtgctggcattgggtgggaagtctcagtgacttgtctaatggagagagtagaggcgtgagttatctgaagtacaggggaagctggtggatgctactgccagagccctggggtgtaaggcttaggttgaggacagtgcctcatccatcattgtcagcaacaggggtcaggaatcagatatggggaaatcttgaagatgatttggtgaggaaagacacaatggagttgcaggaatttatgtaactttataccctctgatgtggtagatttttctttttctccaatagcacttatttcaccttcctggtgttgggtatcccacctggaattttgcaataaaaccaacagaaataaaatgaattctgccaggcagagaggaaatgctgaggggaggaagaaggaaaccgtcgtgtagcttcctgctcaatgaacattcat

SEQ ID NO: 53285 - DNA, 605 bp, Homo sapiens
ccccctcggaagtcttctagaattaattaacgcggggagtgctatatcagcacgagggatggcagagaagttgagcagaggaaaagagaagttttccataaggtgtcatgctaaactgaacactgaaggactggctttccttatagaaaagcaaattgcaggcggggcgcagtggctcacgcctgtgatcccagcacttcgggtggcccaggctagcagatcacgaggtcaggagatagagaccatcctggctaacgtggtgaaaccctgtctttaccaaaaatacaaaaaattagctgggcatggtggcacgtgcctgtaatcccagctactcaggaggctgaggcaggtgaatcacttgaacctgggaggcggaggtggtagtgaggtgagatcgtgccactgcactccagcctgggctacaaagccagactctgtcaaaaaaaaaaaaaaaaaaagaaaagaaagaaaagaaaagaaaagaaaaacaaattgcaggccaggcatggtggctcacacctgtaatcccagcactttgggaggccgaggccgggggatcacctgacgttagtagtttgtggctagcctggtcaacatggtgaaac

SEQ ID NO: 53286 - DNA, 588 bp, Homo sapiens
cttctagaattaattaacgcgggattattgtgaagattaaatgacataagtaatattgcaaagataaagtctggcacttttcccttcttaaaaacctcattttaaaacaaacttatctaggaaaaaatctacaaagtttatatgaatatttttatgtatttttaatttcttctaaattataaagggcaacaccagttttgtcaatattttcataaatatttctaaagttgcaacataatccagtattaaaaagcctgaaaagattagttcacataattatgagcgtagtagtagaaatcacgaaagtaatatttatttgatagtgccgagttcttcccatatattgtctgtgttactcttcacacattcctttgaggtgtgttcttttatcatccccatttgaaaccaaagttaactgtgactcaagaggtttaagagacatgtccccaaatcactgagatggtaagtaaaaagagagaggctagctttgaacacatgactatttaactccacaggacaagttcttaatatagaaattcaaaattttaatcataagttctacaagtttccagtttgatttagcagtaa

SEQ ID NO: 53287 - DNA, 609 bp, Homo sapiens
  misc_feature 23: n = A,T,C or G
ccccccctcggggtacttctagnattaattaacgcggggagtacttaattacgcgggggattcctttggcatattagttggtattttcataatttttgaatattgtttttcatagaaatctaatttacattactaacatattggcctatatattatacagtatgaatctaaacaccacaaaatacccattcaaatatgccttttgattcatacatttgcctcgaaaattttcaaattaagcaaattccttctcaaaaatagagaaagaatagttatttctaatactaacaatttatcaaataggaagccagcctagagaagctgagtgattttctaacagacaaaaagctattaagtggcagagccaaactacaacccaaatttttggaccatgaaaacagtagtgtttcattacacagtattcatatatgtgttttgtagataaaataggataacatttagaaaaatacacattgctggccaggcgtggtggctcatgcctgtaatcccagcactttgggaggctaaggaagatggatcaccaggtcaggagttcgagaccagcctggccaatatagtgaaaccccccatccctactaaaatatacaa

SEQ ID NO: 53288 - DNA, 589 bp, Homo sapiens
  misc_feature 28: n = A,T,C or G
ccgggccccccctcgaaagtcttctagnattaattaacgcgggtatgttcctgtcttgtgcttgtgtttgtgtactttttatattcatgcaggttgaccgctgtgactcttgtcctatatgacatttcagggcagcaggaccatagatcacaccctcctttttttcaacatactctgatccacaaaataagagtaataggttaattttttttctttttcttttttttttttttcaattgagacaggttcttgcactccagcctgggcagcagagaaatttcccatctcttaaaaatttttttttaaggttgagagtgctcttgaatgcttttcaacaagggttctatgcacttaatttacagttaaatttttcagagttagccagaacagcctagttaagcaaacatccaaattaacgaaggtttacatctctatttgtgtgcatataggcttagaatattttagaataaattatgtagaggtttactgagaaaaaatggaaatctgaataaatatgtttctgtggtacagcattttccagagtttgatctgcagagttctaattctatgaaatgttaatagaaattat

SEQ ID NO: 53289 - DNA, 418 bp, Homo sapiens
cgggccccccctcgaaagtcttctagaattaattaacgcgggaaccactgaaaacatcttccttcctgcacctattccacctccaccatcagacctcacgctcctcaccatctatatgctccccactatagaatgttggctgggcatggtggctcacacctgtaatcccactttgggaggctgaggcgggcggatcacctgaggtcaggagtttgagatcagcctggccaccatggtgaaacgctgtctctactaaaaatacaaaaattagtcaggcgtggtggcagttgcctgtaatcccagctactcgagaggctgagacaggagaatcacttgaacttaggcaggagaattgagccactgcactccaacctggtgacagagtaagactccgtctcaaaaaaaaaaaaaaaaaaaa

SEQ ID NO: 53290 - DNA, 580 bp, Homo sapiens
cgggcccccccctcggaatacttctagaattaattaaccgggatgtatctctgcttgggattgctacatgtattctttcacagctatggtaggataagagtgttctaggagcacccaaggtgatcatctcagctccacatgtgttcctgccccggggtattgtggaaggtagccccacctcctctcgtggatcaggtcaataacccttcccaatacggtgactcatgttctcatgtcatggctcctatacagcagtctttcttgtcttctcacattatcctatttatttaattattagtgaaatatggttttgttgaactcattttactttttatgtcagtaacctccatttttatattatcctgtaatcttaataacatatttctgtcaatttattgagtccatgtagttcaaaagcataaagtatttatggaatatttcttctttcatttgcttctagatggtaaaataaaatatatagttgtctctgtcattctgatggccaaattacaactatctattcagtaatccattttaaaatgtatattggctagatgtggtggctcaggtctgtaatccc

SEQ ID NO: 53291 - DNA, 586 bp, Homo sapiens
  misc_feature 28, 44: n = A,T,C or G
cgggcccccccctcgaaatacttctagnattaattaacgcgggngagagtttatacctccactcttctaaccaggaaatccatgattcctgtagctcattagcaggcaagctgtatctcccactgtaactgctggaggagaccaccacgcttggtggctccactggaccaagaagcctcatgagcagaataaaaatggtggcacagcacagtctccaactggagaagactaagttggcattcctaagcttccttcagcagcctgaacacccaaagtgcccaggagttcctgccagttctggggctgcagaacgtagataatgaggctggcctgagtttgccatgagagaaggaaagagacttgggcatagggctgcagggcacgccacctaggctagggaagtgactgacactcaggtgtcacaaagtcagtgcctcaggcctgaccaagctaagattgaaacatgttatctggcagtttgcccgcaaatacagctgctaccatttcctcttctacctagatgtatgaagacaaggagtctgttttccttccccttgaatctggctgacactgcaccttgttttga

SEQ ID NO: 53292 - DNA, 494 bp, Homo sapiens
ctagaattaattaacgcgggctattggtactctagacccaaatagactttatttagtgtagttctaaattcatgttgccaattttaatcaaatatacccagtatgagtcctgaacttcagctgtgtgctctctgcatcacatcctttctttgacactacttgaatgaattcccagtctgtttctccactttagatagttttgtacagctatttccactttagctaatttgtagttttgcattcttgtcctctgctaaaatggaagctcttcatagaaacttagcccttttgactgggctaccaataactaagctagttcttgccgcctcctccattaaatgattggggtctttaagcccatgggattgagcacctggaatcaaacactactgtgttgattgatgaccagttctgaggttggaatacacctgtgtgatggttaatttcatgcatcaacttgcctgcccattggaatgaatgcctagatatcttgt

SEQ ID NO: 53293 - DNA, 604 bp, Homo sapiens
cgggccccccctcggaagtcttctagaattaattaacgcggggcattgccatgtgctccacaaaactccctatctgaaaggtagtggtcaggaattcaaagaaaatcctatagagagtgtgatacagaaggttttgcataaattaaatataacacaaccattcccagacctcagagatcacattgtttttctctccaatctccagttagattatttatttgaaatggtatcaaatatgcctgtccccaggctaggagtaaaatagcaattttgatgctgaacataaggagaagagaacaaaaagattaaagcaatcaaaacaaaatgtggcatgttttgaaaaaggctaaaaacatggcaaagagaataccattctttgctgatacgcaaagagccaaaatttaaataaataaatgttaaggccatgttcaagataagcacagttgttgggtatagaaaaatggataatatagcagagaaagacatgatcaaaaccaatggtttaaaaccatttttaaaacagcagaatgcttttattccagtgtaattgtacatgaaattcaattgataaagcaaataaaaatgcagctgctccagtagaata

SEQ ID NO: 53294 - DNA, 456 bp, Homo sapiens
  misc_feature 13: n = A,T,C or G
ccgggcccccccntcggaatacttctagaattaattaacgcgggcgatctttttaatttctaaggagtctgtagtcaattgctaaccaaaggcacctgagatttgaatttttattgcctgctctgatcttgtgttcttggtaatagaatccctttattcttctttctagaccactgggtggaaaaatcccttttatgatgtaacttctatccatcattgcagtaaattcttgtagagcgcatttggattattccacacctctaaaattgaatcatagtgctcccagggtgtattgttcttctgtaaagatacttctacatatttataactcaaaataccaattagcatctcaccctttcctccaagaaagtcacttactctgatgtagaactctgaattgtgtgaaccatacaataccaaacacctggggagaaaaatttactgttgattgctctg

SEQ ID NO: 53295 - DNA, 567 bp, Homo sapiens
  misc_feature 25, 38: n = A,T,C or G
ctggggtaccgggcccccccctcgngaatacttctagnattaattaacgcggggatagtacttttttatataggtaaagttgaccattctctctaaaaggtatgagggactatgccattagacagtgttaggctggtctgggttgtatttcttattgtgtaacttaatgctcttcagaagtattttaatgacgttaaaatacttcagaacctcttctagtgtactcactaaaatcaataagtaatgaagtacaagaatattgatgtctgtgtttagttataaaagcatatccatttagaaattgtgctaattctgttacagtgagcagctctttatctcgctatgacataatctggttttaggggatgaaatgccctagaagattaaaaaaacaaacaaacaaaaaagccttttatattgagcaacctctgtttgatagccaaaatctcaagataatgttgggacagtataaggaagcataaaagtgggtaattataatgtggaaaatagcatcaggtgattctccttgattttgagagtcccaccagattaaaaaaaaaaaaaaaa

SEQ ID NO: 53296 - DNA, 612 bp, Homo sapiens
  misc_feature 28: n = A,T,C or G
ccgggccccccctcggaagtcttctagnattaattaacgcggggcaggaacagttctgacatgtcctaaaggcaagagggacattgtgcgccaatacacagttaatttacatggggcgctgggaatctctggacacttcctactttagcagtactcaaagaatagatattacggccacaatttcatatcagcaagacttaaacagtgtgcctttttctcacgacaaccaatattatttgccagaaatctcaccttactcaaaaaaagttgtcagagagctatcaacagacaagttatcccccaacaagagggaagacacttgttgcaaaagaaaaggactctgagctcaagctaaagttccctgaaactctaagagcacttgcacctttcagactgtattcttggcaattaacctgtgtttaaaatgctccctattccaaacaacccaggttcttccctgtcccacaaatcggaagacttttgtttcaaagtctgttgagtttaagtgatatggagaaggaaatatttcaggaccatccatacaacaatctactttaaaaaaaaacatgaatctcagtttaggttccagaacaatttggtgatctgcacttt

SEQ ID NO: 53297 - DNA, 509 bp, Homo sapiens
  misc_feature 9: n = A,T,C or G
acttctagnattaattaagcggggctacccccagatgctcccatgtcatcacaaattactgtagaatgaacgacacaaatataaagagagtgagagtgaaaattctcagtgggagtttccaattgaccaactgtatgtcaaaggccagcattgtagctgtcagagcagggagaatatacttggcccccttacttctgccagaactattatgatgggtattccttcaaaaaatggaaagggggattgaatactggcagcagcagatggggaaagaaagatgtctactataggctccacaaatataagatcttcttatcatatacttttttctacatatataaacaaagtggtataatagtgaaaattggctggacacagtggttcatgcctgtaatcccagcatttttggaggccaaggtaggcacatcacttgaggtcaggagttcaagaccagcctgagcaacatgatgaaaccctgcctctactaaaaatacaaaaaaaaaaaaaaa

SEQ ID NO: 53298 - DNA, 531 bp, Homo sapiens
ttctagaattaattaacgcgggattaggtaattctactttcttcttcccgtttattcagaaactggagttttccttctttttcaattctcaaatgatttttttaaagacttaaaattaatacatgcaggggcaaagaatgtttttattttccataccaaaagtcacaactataccagtagttaagggctgcaattcaaaagaagataccattttttacccatcagagcaacaaaacaaaatccatcaagttctgtaacgcccactgacagctaaggtttaaggaaaggggccctcacacagattgctgaagggaatgtaaatgccacaacttttaagaaaaagacatggtggtacctattacatctttaacactcataccttttgtcccagtaaccccactttgaggactctattgctaaagaaatagaagccatggtctttaagaatatttactgcagcactcgttgtaatggcaaaaaactaaacaacccaacgtccatcaaatggggagtggctggaaaaatgcctgc

SEQ ID NO: 53299 - DNA, 496 bp, Homo sapiens
  misc_feature 28: n = A,T,C or G
cgggcccccccctcggaatacttctagnattaattaacgcgggcagttgaaggtaggtttcagtttttagcttcctttcacaagtggtacagcagcggagagaaatcccagctcagcaccggcttaaagcagtgctatgcttgcctccattttcattcctgatatttctgcctaccattaaaaaaaaaaaaatcagttttggccgggcacagtggctcatgcctgtaatctcagcactttgggaggctgaggcaggcggatcacttgaggtcaggagttcaagaccagcctagccaacatggtgaaaccccgtctttactaaaaatacaaaaattagctaggtatggtggcatgcgcctgtaatcccggctactcaggaggctgaggcacgagaattgcttgaccctgggaggtggagattgcagcgagccaagatcgtgccactgcactctagcctgggtgatagaacaagtttccatctcaaaaaaaaaaaaaa

SEQ ID NO: 53300 - DNA, 593 bp, Homo sapiens
  misc_feature 27, 568: n = A,T,C or G
cgggccccccctcgaaagtcttctagnattaattaacgcgggggtgaaaaatacagaaataaaaagtaatagattaatcctagaaaaatctctaaaggaaataaatttaggactggattttgaagatgtgtaacaaatactttggctgtaactgagtattcatattaggtactaatgggaaatgagtttgggaagatatgagctgagagagttgttggaggatattaaattttagaacagagaatgaccacttcaaggaaagaacataatgctctattgggttaatttcctcaaaatccaaattctcagagctcaatagtgaaaatgtttattttacaagaaagcataaaaataatatcaatatgagacaattagtttgacttttaaagacagacaattagtttgacttttaaagacaaacatgtctcatatttctgtaccaacttaagtcattaactgccaggttggataccaacttaactgataacctagctagttaattccataggacagaaactaaaacagcttattttcactccttggaaaataaagtgcttacacaaagcanatgaaaaatctgtttgcccttcaca

SEQ ID NO: 53301 - DNA, 606 bp, Homo sapiens
  misc_feature 49, 59: n = A,T,C or G
cccctcgaaagtcttctagaattaattaacgcggggagcaggcacaatnggaccatggnaagcacacagataaagctaagatagttggtggaggtgacagaaggagataagagttagaaggcagttgactgaaggtggaagaaactgctgtaggtagaggaaacatatttaggcaaataaatctctttttaaaattatcaaactctgtatatttacagttttgtaaacctgctttttaatttttttcatgaaacatcttttccattctcttctaattatgaacaatcatgaaatgtggcattgttggttcttggtaaacttataggctttaacattttctagcataatttatcttatccattcttagtgttaatgcaaccctgtagtactgactctcaacttcctacttgaatatatgtttgtctgttcttttaatgttaatattttattagagccatttggaattgtgattgtaaactcaaggaggcagtaacctattaatgtgtatgtctccaagtgacttaatcccatatactgatggttctttaataaatgctaagtaactatttcccctttgttagatttggaaaacaggtgattattatg

SEQ ID NO: 53302 - DNA, 485 bp, Homo sapiens
cccccctcggaagtcttctagaattaattaacgcgggatatgatccagtcaaaatctccaaagaacattgagaatcatcatgacacgtatattttagctttctgttgtccactgaagcacaaaatttttgaaggcacgacaattaataatcaggtgtatatgatttgttggaaaataaacaagagtttagaaaaataatccatttgttagcagacattgtaaaccaataaaaagaaaacctgttttattattattattttttgatcagttactttagattcagaattccctgaccatgagttatgactctgccttcgaggatgaatgctcaaagcatcctatgctcctgtctcagagtttcacaaatgatatccttctcttggaaatacatgatacataaagtgataatatatgcatttaaaaagttgttttgttttgtttaccccatcactttccaaaaagtttatgacaaattttcatatttt

SEQ ID NO: 53303 - DNA, 441 bp, Homo sapiens
acttctagaattaattaacgcgggtgggggagtaaggaaggacaactagctagacagaagcccccagggagtgatagctgaccacaaggtgacttcaagtgttatttaaagaaaggaaacatacccagttgtattgaaaggcatgcaacagctgggtcagtgggttatgcctgtaataccagcactttgggaggccaaggcaataggatcacttgaggccaggagtttgagatcagcctgagcaacatagtggggccatgtccctacaaaaaaataaaaaaattaccagatatcatggcatgtttctgtaatcccagctattcagggggctgaggtgggaggatcgctggagcctggaagttcgaggctgtagtgagccatgaccactgcactccaacgtggatgacagagtgagatcctgtctctaaaaaaaaaaaaaaa

SEQ ID NO: 53304 - DNA, 608 bp, Homo sapiens
  misc_feature 28, 44: n = A,T,C or G
cgggcccccccctcggaagtcttctagnattaattaacgcgggnggtcctataaagtatcccattctaaaagatgtctaacattatgagattctcagccttttggcatttgttggggaaagatatctcatgtttctctagcttttaattcgtttgcctcccctcccgccaggtaaagaaggcctaattcatcctgatggcagagctccttcctccttcccagggcataactcaagggtgtctaaaatggcatttctaaggcgaagaggaatctccctccagggacattaatgtcatcacagatgctgtggcagtagtagagataggtaggggtcagccttggagggtcagcaaaaaggaaatttaatgagatcctactggaaatcaagggtcatgatatcatcagtgctaagggcatgacatagctgaagcaagctctcaaatggagcagggttcccagacacagggacagacttctctggcagaaacagatatcagctggcaatcaagcaagagaaatgctgctgggtaggtgagttcattctatgcttggacctcacattatggtgcaattactctgcaagattattaccttgtccattaacggtg

SEQ ID NO: 53305 - DNA, 441 bp, Homo sapiens
cgggcccccccctcgaaagtcttctagaattaattaacgcggggatatctacctttgtgtgtcagaaagcctttaaaaatcatagttaataagtagcaccttgatttgccttcttgacacaccttttaacaactttatccagcaaatatgttaatatggtcagacacagtacttgggtgctagagttatactggagatatgaacaggaggaaggcaagtctctgctctcaaggagcccagagtctaggggaagaaagagaactgtcgactaatcattggaatccatgatggcaggccatatactggagataagtataaaatgttagaagagtaagtacaattatttacagaggccctggattacttccataaataagtaaaacaggggtataggaaggatgctgtaagcagaaggaacactataggcaaaaaaaaaaaaaa

SEQ ID NO: 53306 - DNA, 482 bp, Homo sapiens
ccgggccccccctcgaaagtcttctagaattaattaacgcggggggcctatgagcctgcccattctaaaagatttctaacattgtatagattctcagccttttggcatttgttggggaaagatatctcatgtatctctagcttttaattacatagcctcccctcccgccaggtaaagaaggcctaattcatcctgatggcagagctccttcctccttcccagggcataactcaagggtgtctaaaatggcattactaaggcgaacaggaatctccctacagggacattaatgtcatcacagatgctgtggctgatagtacagataggctaggggtcagccttggagggtcaacaaaaaggaaatctattgagatcctactggaaatcaaaggtcatgatatcatcagagctaaaggcatgacataacttaagcaagctctcaaatggagcaaggctcccagacacagggacagacttatctg

SEQ ID NO: 53307 - DNA, 592 bp, Homo sapiens
ccgggccccccctcggaagtcttctagaattaattaacgcggggtgtctcagggtagggttcagcttacagatctgcagacaaactgagttgtccacagacagattagatacctctttggagtggttggaaaccccttgggaaaagagctgaaaagagctgaaaaggcaagggaaaccccttgcctgaaaagagctgctctatactcctgccagggcaagtgacactcttctggattaaggtgtttatttgcttatctgttcgtctgtccactcacccatttattcacctatttgttcatcagctatacctttactgagtgcttgctgtgtgttagatctaactagagattaaacagtggatgaggaaggagtcccatgtactcaggcaattcatatttacagtacagttttgtggatcttatgatagttgcacagagaattatgggagtacatggagaatcaacaaaatatggcaaataaaatccaacagaaaataaaagtgattatctgaccaaattgagcttacccaagaattcaagggtggtttcatattagaaaatctatacataaaattagccacattaataggtt

SEQ ID NO: 53308 - DNA, 447 bp, Homo sapiens
ccccccctcgaaagtcttctagaattaattaacgcgggttagtaaaatatatttaatttgatttttttttgactggggctagctcttttttatttcagtgctagtttaagaactccattgtcatgacatttaggattactccaggaaaggttgataatctcctccctgcacccttaccaccactgtcaccatgcaaccctacctcttgtagaaacaagcaaacatacaaacaaaacccccaaaaccaattatggtgaaatataaaacacaacaacatgatgccttttaactttttgtattaaaaaaataaactgaaactttgagaatggattattttgaccttagcaatagtattacaattataaatcatgttgaaattttgtccttaagcaagaaagaaaaaaacagctaattattcaattctttctcaggaaaaaaaaaaaaaaa

SEQ ID NO: 53309 - DNA, 591 bp, Homo sapiens
cggggcccccccttcgaggtacttctagaattaattaacgcgggctctactaaaaatacaaaaattagccgggcatggtggcgcacgcctgtaatcccagctgaagactgggcctttttctttcttttttgaactgaagtagcctgtttaaaagctatgtgtgggctttttattgaaaagtgtgaattgctactagttttataaggcaaataaacagtttatagggatcaataccactgagtcacattttgcatttctaaaatctgtgctgtttacttggagaaaacaaaagaaatgtgcctacctcctccatcccacctttatttagaaacatttccagtgggcttgtttttttcagattcagaattactgtacctaaccactgggtacccttacagatttcaaagcctgaagtaaatgtttatgctggctttcgtagtcagcaaataatagccaaaccctaattcactgctcttttatagaatcttggaatctcagggctgaaccgttaggagtcagcagatccactcttagccctagtctcttcctctcacatgcaaacagttctaatgtctttggaatgtctgagca

SEQ ID NO: 53310 - DNA, 444 bp, Homo sapiens
  misc_feature 9: n = A,T,C or G
acttctagnattaattaacgcgggaagaggtcaggcctcgcagtcacatagacctgcacacggctgcccgcaggctgtgtgccctggagcaagtcgcctgcctctctgacatggctcctcacccttgcagtaaccccacaggctgttccagtaagactgaaagactgggccgggcgcggtggctcatgcctgtaatcccagcactttgggaggccgatgtgggcagatcacaaggtcaggaaatcgagaccatcctggctaacatggtgaaatcccgtctctactaaaaaaaaatgcaaaaagttagccaggcgtggtgggcaggaggctgaggcaggagaacggcatgaacccgggaggcggagcttgcagtgagccgagattgcgccactgcactgcagcctgggcgacagagcgagactctgtctcaaaaaaaaaaaaaaa

SEQ ID NO: 53311 - DNA, 582 bp, Homo sapiens
  misc_feature 28: n = A,T,C or G
cgggcccccccctcggggtacttctagnattaattaacgcggggacacaaacttataaatcacataggactagatttgaatttaggtgctgttccatcatagctatgcaacacattttcataatttcaaaagcagattaaaaatacaatgaataagccagatattaccttgactacctttaaacataaaacataacccaacattttaatgtaggatttaccttttcctaacctcagccttctagcttgaagaattcgttcctctcccttacctaccttatcccaaagggaagtgagcttgttgacgaatgtgcatggttcttttatatgtggagctaatgtaataaaaagctgccaatattactgattggcactattcttccaattactgattggcactattcttcttactatggaatggtctaagtcagaaattctgggtattttctttgcagtaccggcaagctcctttggcagcagctctaaagccatgaattctgatcatcttatcattaataaagctgacattccagtcttactatgttactctcttgtatcttatttttcatttggttccaaactc

SEQ ID NO: 53312 - DNA, 595 bp, Homo sapiens
  misc_feature 27: n = A,T,C or G
cgggccccccctcggaagtcttctagnattaattaacgcgggcacctggcaatccatttaccatgtttaagggccaaaatgaattcgcaatttttaagtattccatatagcagcaacttgaccctgtttaagttttggctcaagtttcagagtttgggattctgaatttttttaaataatgcttttggtaaaatagttagtgttttaaaatacaaagatataatttccatgtaacatttgtgctgtgtcatttgaattttgtaaccattatttgtaacaatactatcacatagagctagaatgccttgagtctaggtagcactgaccctttcataatagttgacctacggtaagcataagggtcatttgtacagttaaaacagcaagccacatcttacatcatctccttttttaagtaggccaaaattgagcaccttcattattttactgacatttcatgattcatattaaaaaacgcattgattatataaaagtaaacgagtcagttgtattttcagagaataaaagattgtgctttatagttaaactattaagctgtcactaacttacattaagttatatctagaatgaacct

SEQ ID NO: 53313 - DNA, 130 bp, Homo sapiens
gggcccccctgaatactttaataaaacgcgggtggtggggacacataagtggaaggaaaaatctaatactactgaactcatatttgaccaaacatgaccaagctgaatatttttttcccccccctagaaa

SEQ ID NO: 53314 - DNA, 614 bp, Homo sapiens
  misc_feature 22, 97: n = A,T,C or G
cccccctcggggtacttctagnaattaattaacgcgggggggggggtgtggaaaaaccaatcaaattttccggaaattcctaagatctagtactagngaaaagaagcatacaatgatagttaaaacttaggctctggaatcagagagatttggattaaaatctcagctccgttcctcaacagctatgtgtgcctaaagatcatgttaattgacttttctaaaacttgggttcctcatatataaaaactggtataaaacagtacctagtacatagagttattattgacgattaaatgagattatatatgcaaagcaccaaaatgcctagcatgaagtactatataagtgttcacagcatttactactatcctaatgtccattaattattagggcttgaaaagaacaaaatccagaaatcagtattacagaaagcataatatctatgtctgtactttaagctttttaattagtcaatactaggcttagaaactttttgtttgctgaacaccttttagacttaaagagctgtgtgttcgaatactctgtataccatctttgtccttaagtatgctagctagaaaggaaaattactagttactactaagggatatgac

SEQ ID NO: 53315 - DNA, 468 bp, Homo sapiens
  misc_feature 395, 404: n = A,T,C or G
gggccccccctcgagagtcttctagaattaattaacgcgggttatccacttgtttgaaggaggttcttctcatagtagatattaatgaatggttcatagatgtaaaatatcctaaactcttggtatttaaaaccatatctatagtctcaatgaaggaagaacagttttactggctataatacctaggttaaaatgttcttgccagccaggcgcagtggctcatgacttttaatcccagcactttgggaggccaaggcaggtggatcacaaggtcaggagttcaagaccagcctggccaatatggtgaaaccctgtctctactaaaaatacaaaaattagtcgagcgtggtggcgtgcacctgtagtcccagctacccgggaggctgatgcagganaatcacttnaacctgggaggcagaggttgcagtgaaccaagattgcaccattgcacccttacctaggtgacag

SEQ ID NO: 53316 - DNA, 599 bp, Homo sapiens
cgggccccccctcggaagtcttctagaattaattaacgcggggggagaacaggaaaaaatgtataggggtatgaaatcaacattaacagagaattccaagtactttaatatgactggagtaaagaatttaagagtggggttgacagattacagaaagcctgtttcacattctaaagagtcataaattaaatctgtagggcgggtaaagaggagctactcagggctttaagaaggaaagtaatcaatttgaatttgagaaaacaactttggcagcggtgtggaggacggtttggaataagcaaggatgtctgcttgtggctcgggtgtcaggtaattaattctgttatccatgatactctacttctcaaccaggcaagttcatcaaggaatttaagaaacaatacttttctttcttgctcatgtaaaaacacctaactagaatgataaacaaacaaggtcttcttttttttctaaactctattgtataaacttagttggacaccctcatttaataaatgagtgaggctgaatagtttttggcattaatcccagatactgaaacagtgagaaaacaacaaaacatggaacatagtatctat

SEQ ID NO: 53317 - DNA, 505 bp, Homo sapiens
  misc_feature 22: n = A,T,C or G
ccccccctcggaagtcttctanaattaattaacgcgggtccatttagaaatatctaataactataataaagttaaatccaatttaatcagtctgttagaagaaaaatagcgacaagagcaaattatgtcaaagaaagacacgcactgagagagtttaataatagatgtcataaagaaactgttgaatcttctccataaaaaagtaaatatgggccgggcgcaatggctcacacctgtaatcccagcactttgggaggctgacgtaggcagatcacaaagtcagaagatcgagaccatcctggttaacatggtgaaacctcctctctactaaaaatacaaaatatcagccaagcatggtggtgggcacctgtaatcccagctgctcgggaggctgaggcaggagaatcgcttgaacccaggaggtggaggttgcagtgagcagagatcgcgccactgcactccagcctgggtgacagagtgagactccttctcaaaaaaaaaaaaa

SEQ ID NO: 53318 - DNA, 471 bp, Homo sapiens
cgggccccccctcggaagtcttctagaattaattaacgcggggggtctggtcacctactcattctgtaatgtcaggtcttgtctgttacacaagagggtactaataaagtgtgtactgggtgtacctatttataaatgactcttacatacattacttcttttcgcttcaaaaatagattataaaactgctgcccatactaaatagtacaagacttgcccaaaattgcccaactggtaaagggaaacaactcaaggagacctacctaatgtgttctttccatttacttggctgagtcattgagaacggcaaatacataacctgaatgctgcattttggcgaatgtgaccctcctggaatggattactaacagtctagaaacactgaacgtaccatgcaattaataacacacagtccatgtcaagcacagtggtgcacacctgttatcccagcactttcagaggctgaagtgg

SEQ ID NO: 53319 - DNA, 594 bp, Homo sapiens
  misc_feature 28: n = A,T,C or G
cgggcccccccctcgaaatacttctagnattaattaacgcgggcttatgaaacctcactttccaggaagcgacccattctcacagctgaacactgcatcctctcttctttttggaatagccatatggcattaaatcaatgagcattttccttgatgccttactgaaacaaataccttttctggttttatttctaaaatcaatcctatttctctaacaccaaagcagttcttgctatcagcagatcaatcagccctctctttgagcagcctcatacagagcttactgcattactctgcagtggatggtcaccagacgtgattaacaagtgcctttctaacagtttctagtatgtgagtgtctgcagcacttgattttctccagctgcagttgcaacgcctttgtcagagaacaaaggagaagaattttcatccatcctagctcccagaggtgcctggaatctaactttacagaaagcattaaatactgatccttttcttctccttttatccatttgaagacagggatcttctgctgagcatttcagatataccctgctctgtgtaatgcccaacgatttttcattagctgggagc

SEQ ID NO: 53320 - DNA, 607 bp, Homo sapiens
  misc_feature 514, 552, 574: n = A,T,C or G
cgggccccccctcggaagtcttctagaattaattaacgcgggcatataatcatctcagatgaaaaaaatggaaacacgtaaccaaaagcaccaatgaaggtagtacaatttcaccaattaattcttagtgaaagtattaaccaagatgaaccctaccttcagataagcagaataaaaaagtaaaattaagatgatttttccagctgtgagatttgagatgtgcgttggattcaccaggtgcactgaaacaggtttcactgaactcaattctctaattaaccaaagcattgaaaccactgcaagaatgtttctcactgtttatcgtttcttttttatttgcttgctatttctctcagactctttgcatctgtcccatatacttactttattttccattatgccttctgaaatattgtggataatttgagggaagacttggaactgaagttgaaagcaaacaaaaatactatacttatgagctagatgttgactcactaacttgctctgtgaactntgagttactagatctctgctttcctctctatccattanaaaagtttagaaaatcactcanaccaaatgggtcatatagctgctctcttgtatg

SEQ ID NO: 53321 - DNA, 273 bp, Homo sapiens
taattaaacagcgagtttgtttcagagccaggcttcaaatccagatgtgtgaatccaatcttctgcttttttcacaaactacaccacatctttcttgacctatggcactctgtgagaagtcagtctctgtgagtggacctgtcaaaatcaaccaggcctgcaatcccagtactttatggtgtggaggtgggaagatcgcttgaggccaagagttcgagaccaccctggacaacatagtgagactcaatctctaccaaaaaaaaaaaaaaaaaa

SEQ ID NO: 53322 - DNA, 567 bp, Homo sapiens
ccgggccccccctcggaagtcttctagaattaattaacgcgggctgttctacactttacctgtattaacttctgtttgtcatttccacatagttctaaccatctctctgagtgtcccactttaacaaaagggaacactggggcccagagagtttatgtaacttctccagggtcacatggcgggagtgggcatagagtccgagtccacaccattagctaccatatacacattgcctcatccaagggccaaatggagcagggtgcctccacactgaaagattagcaccactggtagggcgcggtggctcacacctgtaatctcagtactttgggaggccaaggcgggtggatcacgaagtcaggagatcaagaccatcctggccaacatggtgaaacctcatctctactaaaaatacaaaaattagctgggcgtggtggcatgcgcctgtagtcccagctactcaggagactgaagcaggagaatcgcttgaacccgaggcggaggttgcagtgagctgagattctgctcactgtactccagcctgggcgacagagcaagactctgtct

SEQ ID NO: 53323 - DNA, 546 bp, Homo sapiens
  misc_feature 496: n = A,T,C or G
cgggccccccctcgaaagtcttctagaattaattaacgcgggggatgtcaggaagtcgctttatttgtaaaatgatgagttagaccagaatatattctctgatagaagtttacaaagatgaataaagatttataggctaggcgcggtggctgtttctgtgataatttagctcttgcaataccttgagttcagtgtaatgaatatcagttcctcatttgagtttttcaaagtgtagaagttcagaaaattatgctggatttgttttaagactagaacctattacgttgaatttttttaagctccgagatggcagataatttcttccaatttgtcctgttctcttaaaattggaggatagttaattgagggtttcagttagttaacctcaggtgaactaaagttctatgtttagtacttcaaatccttcctttaaaaatgtcaaaagtatttatgtatgtataaaatgatttctgaggtttgctttaaaataatccancggggagagagtggaagggatttagatgaaaccagattgatgctgtatcg

SEQ ID NO: 53324 - DNA, 602 bp, Homo sapiens
cggggccccccctcggaagtcttctagaattaattaacgcggggtacaatacaagcaaaacataaaaatatatgtattataacactaagcaaaaatgtaaaacaaaattcagtcaatgatataactagaaataagtaaaacttgattagaagatgacaacgaaataaaaacaataattgaattaaggaataggtttatgcaaaaccttgacctaaattcctatattactttaatatggtatttgcaataaagcacaaaaaaatttcatgatataatattaaagggaatacaaacaggacaccaatatctatcacagtatgaaattatatgaaataagtaaaaaagtgtgagaagttacaccaaaattctactaatggttctctttgtataaagggttatgctgatctattttttcttacttatactctctaaattcttcatataatactttaatttaaaaagagacttttatgtgtcactggaatatcagctaatattggatttgatgcgtcaaatcaagaaaaccataatggttttaagggcttaaaaagtaatagcaacatgccggacgcggtggctcacgcctgtaatcccagcacttt

SEQ ID NO: 53325 - DNA, 607 bp, Homo sapiens
ccgggccccccctcgaaagtcttctagaattaattaacgcggggaacatggagcagaaagctaacatcattctggggcttgctggctgctgtgtaaatgttctctgtgtagtttataggtaactaaaattatttattgtcaagcaaaaaaagaaattagggtgatggcaaagcattcaagagtgtaggctgtttgaatttatacattaccgggtccacgtttgatctcaccaggggtaactgctccttgcagactggtttaaactatgcagaaagtgcctatgttttccaatagcagggttcatagaaaagcctcattcattatataatacacattgtttgttgagctagcatgaatggaagttcctaagctgtggctgtattattatgtgctttctggccaaacaagcagtgcagatatactgcttctttgttaaggaaatcagatgctaggcttgtggccatacagcaatccagtgcagaggcagtgggcagtgttcctacactctaccttggaagagcgaagcagactcacgtgtgttttgggttagagaactggactccttctcccccctaggtcaggctcacgcaatctgttaaaatcaggg

SEQ ID NO: 53326 - DNA, 430 bp, Homo sapiens
cgggccccccctcggaagtcttctagaattaattaacgcggggtcatgtcaccatcctagcattacctgcgactggctgataactggtttcaatgcttccagaatggccctgccctatacacatagcggtaagaaatctgtacatcacgttctgcattatacctctgattttcctgtccatgacacatagaacaatgcgctctcatcaaaggagccagattggacaagaagagtctgagtagaaatctggaaatgtgataaagcatagtattaacagcaataagaaagactgataggctgggggcggtggttcaggcctgtaatcccagcactttgggaggctgaggcaagcggatcacctgaggtcaggagtttgagactagcctgactaacatggggaaaccccgtatctactaaaaaaaaaaaaaaa

SEQ ID NO: 53327 - DNA, 562 bp, Homo sapiens
  misc_feature 28: n = A,T,C or G
ccgggccccccctcggaagtcttctagnaattaattaacgcgggctgcattactgttgattcaccctggtttataccaggaatgcacacactctttgggtggttatcttactaccagttttgatctactgtccactggaatggaaggacacaaaacatactctcctaataagatggacccaggacaaaataccctgactagagtgacatcactgacagagaactaagtgattttgaatgaggcctgccatactgtctggaaaagtaatttatatctttcctgccactgattagctctcataaaatacacatatgacatgtgatatttacatgatctcttgattaaaatgcatggcttgaacattcaaaggggacgctccagttaaacaaggcagatcaaacacctctgctctacctgaaactgctgtaaaataaccgtaaaaggagcaaggagattaaatcgcacgaactaacaagataggagaaacaacattgcgaagctagaaaacatgtctctgccaacagcgaaaggccaaaagcaaacagcttcaaactgaacaacc

SEQ ID NO: 53328 - DNA, 501 bp, Homo sapiens
  misc_feature 27: n = A,T,C or G
cgggccccccctcgaaagtcttctagnattaattaacgcgggcagtctgggagacagagcaagattctggctcaaaaaaccaaacaaaacaaactgggaaatgtcacaggtttaatagtagtaaaataaatacataacttaaagcaattgtccattatcacctacagtcaccttctatactaccagtggcatgggtgacagactgggatagcactgatcatatatacccctcatcgtgtaagtgaggacactgagacccaggcaagtgaagtaattagccctggtggagtctatgtttgcaactccagtaaaaggcttgatgtattgaagaatttgataattaaaaaccatctaggtatttcagttgtactaatccttccttttcatattagccatatactccctaagatccaagggagtaatcaaaataaggactggccttagagaaagagaagaaagcactgcttattatatacataggcccctaaaaaaaaaaaaaaa

SEQ ID NO: 53329 - DNA, 622 bp, Homo sapiens
  misc_feature 39, 55: n = A,T,C or G
actgggttacccgggccccccctcggaaatacttctagnattaattaacgcgggnggaaagtcagacaagaatgaaagaagccaaggaactcagaattcttgccccggaaatgagggactcttgcacttcattttctgttgtccactaaataaataaataaataaataaataaaaattgatttctagttataaaattaaatgtgtaacaagtttaagaaatttacaatatgttagatacaaatatatataagtgagcttagaaaggtaaattgcatttcttagagcataaatccagccccctgtgctaatgctattgtgagttgacaagacagatacagacactggatctacaccactgaaaacaggatgattttggttgtaaacttggattagtgcgaaaccattctcttctgacagggtctgtcggcacaattgaaaggcatagtcgacaccggtggaccatggagagtggaatggatttctgatagtcacctaaaacctttcactgatgttggcttgaaagctgcttaattagctgtaggctgccaaccaatctccttatcaaagccagctgaaaacaaaactgagagaaacagcttgtggtttcgcaaaaatgtattt

SEQ ID NO: 53330 - DNA, 151 bp, Homo sapiens
cgggtgcccctgttactcaagtcccctattccaacttctgaaaccatgttgtctgttccaatcattttactttaatataccaattttttttttaataacctttcttattcctgcaagaatggtaataatcaaaaaataatatatgttggcg

SEQ ID NO: 53331 - DNA, 540 bp, Homo sapiens
cgggccccccctcggaagtcttctagaattaattaacgcgggggtgcagctgccttccatttgtttcatcaagagactaagctaaactaaagtagttcttcatgatgaactggcaggaaagtgccaagatagttttattgcttagcaacttggcaggaggaaatgttaaaatattacaatctctcgtatctatgaactgagacaggctttcaactgatggctctccagctcgaacgtgattaagatgcagccacatggcccgggcttatattttgagctgataggaggaagatagggaagttggatacttttaaatgtataaatagtaatttctcagaaaacatttgctgatctgagccaaatgctaatctgaggaattaagctgtccccgttgtgatgttgataagtactgcaacccctattgatcaatgggatttcctttgcatttcagaaggaaggatacgtctattgagaaattgcacgccaagtaaaatcctgagataaacaacttcatacaagagaaactgacaagttaccata

SEQ ID NO: 53332 - DNA, 405 bp, Homo sapiens
cgggccccccctcggaagtcttctagaattaattaacgcgggggtgtcacttccttcaatctttctcatgactgatttcctctcactgagagcagaaatccttcctgttcatctttgaggccccctcaccaagctcaggccagtcccatagtgggtactcagctgatgctggtgagtgaaaacccacgcccaagggccttgaccagtgagacaggataggcctgcgttcccaggcagggagttcctaaaagccctttcttgggccagacatggaggctcatgcctgtagtcctagcactttgggaggcagaggtgggagcatcaattgagctcaggagttggagaccagcctgggcaacatagtgagaccctatctctataaaaaaagtaaaaaaaaaaaaaaaa

SEQ ID NO: 53333 - DNA, 175 bp, Homo sapiens
cgggccccccctcggaagtcttctagaattaattaacgcgggggagggggttatattcaaaatcaagatttatttttggctgtccttttccttgccttacattcaattgtgttattaccattacttgactctcctttcccccatctttgacacatgcactcacacacgcacacca

SEQ ID NO: 53334 - DNA, 446 bp, Homo sapiens
ccgggccccccctcggaagtcttctagaattaattaactctgtaaactaaaagtcaggagactatcaaagcaagagcttctcaatctggcctcacacatgtctacgtaacagcgggctcctttcagggtgtagtgtccagaagttaacacagactcgaaaatctacccagaccagagaactacaggatgatcatgcccttctttccaaacattcaatatggtttggctgtgtaagtgtaaacatccattattagtttggtgttccttttttctttttttcttttttttttgagacagagttttgctcttgttgcccaggctggagtgcaatggtgcaatctcggctcactgcaattgcactgcagcctgggcagactctgtctcaaaaaaaaagagactctgtctcagaaaaaaaaaaaaaaaaaaaaaaggaaaaaaaaaaaaaa

SEQ ID NO: 53335 - DNA, 408 bp, Homo sapiens
ccgggccccccctcgagggtacttctagaattaattaacgcgggccagtgttcgctgagtcgcactcagcctctcctcagattgaggcagctttgctccctggaggcttgataaagatacatagtgagtgaatgagggaaagcatgaacttgctctccttgcttcccacagcccttccgtggtagtaatagtaaataatttataagtggtgacttacagtgtagtatctacacagtagatactactcaagtatatatacttatgtataatacttgtatattatagaataaataaattggcaggagaatcacttgaacctgggaggtagagtttgcagtgagccaagatcacgccagtgcactccagcctgggtgacagagagagactccatctcaaaaaaaaaaaaaa

SEQ ID NO: 53336 - DNA, 602 bp, Homo sapiens
cgggccccccctcgagagtcttctagaattaattaagcgggtgctcactctctgtagtgatgttctgagaggatgcatctgattgttgttcacatgcctacactccagtcaaaaaggtttccagggaaatttcttggtccctactgtgggtaggcaggattcataaggcggaaaatacgcaaatatttcacagataatcaacaggtttctaaaactcagaacatattacaaataaccaccataataattattcctttcttccttggttttgccttaccaggaattttagcatagatccttctaattcaatctcattttatctgttttccatcttcgtgtcctctcacaggtagcttagatttcatggtacacagttccagtcactcccttacatgtataccaagcttccttgctctattattttgtcacatggatagaccccagtgctgaacaaatccaactatttaacattttttttgtctgtgtaggagttgtgcagtactgttggaaacaatcacacaagccgataattgatgctctaaatgaatggttctgaggatcatactccccccgtcctcaagatttgtccaatagtacttgct

SEQ ID NO: 53337 - DNA, 500 bp, Homo sapiens
ccgggccccccctcggaagtcttctagaattaattaacgcgggcaccatgttggccaggctggtcttgaactcctaacctcaagtgatctgccctccttcccaagtggtgggattacaggtttgagccaccgtacccagtctagaatctttaacccacaaagttctttgaagagtcatctgtgtgaaataaagccattttcagacaaacaaactaacagttttctaccaacagaaaatctagtgaagtaaaatcattaaggaagagaagatctctccagaaggacagtgtgctatgcaaaaggaaagcgtgctatgcaaaaggaaatagttaaatgaattgtaactattgggtaaaaagtttgcctatattaggctgggcgcagtggctcatgcctgtaatcccagcaccttgggaggccaatgtgggcggatcacaaggtcaggagattgagaccatcctggctaacacagtgaaaccccgtctctactaaaaaaaaaa

SEQ ID NO: 53338 - DNA, 433 bp, Homo sapiens
cgggccccccctcggaagtcttctagaattaattaacgcgggggtggaaaaacagatttatgagatataaccaaatgcaacatatggttactactggatcctgatttgaacaaaccagctgtaaaatatattttgggggatgagaaatttgaacatgggcaaggtaatacataagagtcattagggtttttttaaaatgtttttactgtgtggaaagcagcatatagtaaaatgtccttgtattaatattttagagatgcaaatgatatttgtaatttagcttaaaagtcttcagttggaggcttcagcagtggctcatgcctgtaattccagcactttgggaggtccaggcaggaggatcgcttgagcccaggaatttgagaccagcctgggcaacatggcaaaactctgtctctactaaaaaaaaaaaaaa

SEQ ID NO: 53339 - DNA, 580 bp, Homo sapiens
  misc_feature 16, 29: n = A,T,C or G
cgggcccccccctcgngggtacttctagnaattaattaacgcggggggttaataagtggctatggttgcaatccatagggtagtttgttacacagcagaggctaacagatacaatgtgtaaacacactctctttggaaagagacatagccactaattccccaacaataaccacacaggcaaagacatgcatgtgatcaccatgtttcagtgctgcaaaccctactttattcatgcacagaaccactaggtggcaggagttctttggttcaaactttgacttacctacaggctaaagaatcaactcgggtctacacttaaaaaaaaaaaaagagaacggtgataaaaattagagccataggccaggcatggtggcttcacacttgtaatcccagcactttgggaggctaaggcaggaagatcacttgagcccaagagttcaagatcagcctggccaacatagcaagaccctgtctctacaaaaaacataaaatgtaaaaaaaagtactagctgggcatgatggtgcacatctgtggtcccagctacttaggaaactgagatggaaggatcccttgagcctg

SEQ ID NO: 53340 - DNA, 601 bp, Homo sapiens
  misc_feature 73: n = A,T,C or G
cgggccccccctcggaagtcttctagaattaattaacgcgggtgcccctgtatactcaatgtcccctacttcncaacttctgaaaaccaatgttgtctgttccaatcattttactttaaaataccaaattttttttttaataacctccttattcctgcaagaatggcaataatcaaaaaataatagatgttggcgtggatgtggtgaaaagggaacacttttacactgctggtgggaatgtaaactagtacaaccactgtggaaaactgtggagattccttaaagaactaaaagtagatttaccgtttgatccagcagtcccactactgggcgtctacccagaagaaaagaagtcattatatgaaaaagatacctgcacacgcatgtttatagcagcacaattcacaattgcaaaaatgtggaaccagcccaactgcccatcagtcaacaagtggataaagaaattgtggtgtatctatacgtaccatggaatactactcagccaggaacgaaataatggcattcacagcaacctggatggatttggagaccattattctaagtgaagtaactcaggaatggaaaaccaaacatcgtatgt

SEQ ID NO: 53341 - DNA, 481 bp, Homo sapiens
cgggccccccctcgaaatacttctagaattaattaacgcgggggaagggtgggagaggggtgaggaataaaaagactacacgttgggtacagtgtaccctgctcaggtgatggctgcaccaaaatctcagaaatcaccactaaagaacttttccatgcaaccaaacaccacctgttcctcccaaactgttgaaataaaaataaatttaaaatttaaaagaatttcttaagaagataccacattctttatggtagcttcatgagaagctaccataaaggatgtgaaaggtaagctacagagtagattttttttttttttaagacaatgcctcgctctgtcacccaggctggagtgcagtggtgtgaatatggctcactgcagcctcaatctcctgggctcaagtgatcctcctgcctcagcctcccatggtgctgggaccacaggtgtatgtcaccatgtctggctaattttcttttcgttc

SEQ ID NO: 53342 - DNA, 608 bp, Homo sapiens
cgggccccccctcggaagtcttctagaattaattaacgcggggtttcactgtgttggtcagactggtctcacactcctggcctcaagtgatccacccacctcggtctcccaaagtcttggaattacaggcgtgaggatcacatgaggccaggagttcaagaccagcctgggcaactctttttctgtagagactgttctctacaaaaaagtaaaataagaacaaaataattttaaaaacaatggatttgaactatatagctatttttaagttgtaatcaaatggtgttatattatctctatagttctttgcaacactaaacttctattaatttcataaatttcaaatgcagttattgagaagtcacatttttttttttttgcagataatcttacagcaccatcttctggtataagatcactgtgcacagtctaacaatcagaaaataacaatcatgttactatcttagttttactatatttagtaaaactttacagtacatgaaatttaaaaattcaagacagaataacaaacttggtaaccaaagagagatgttctctgttaaacaagagcagagggtacctaacactgggcttattaatgcaatcag

SEQ ID NO: 53343 - DNA, 512 bp, Homo sapiens
  misc_feature 23, 39: n = A,T,C or G
gactgggtaccgggccccccccncggaggtacttctagnattaattaacgcgggacattatatcaataaaatgttgagcaaaaatgacacagcagagttcactccctgctgacatttgaaaataaaacacgctacaaagagtgatctccattaatgtgactcccaccagccctctgtcacctttcccttgtcctaatgaagatcagcctcacctgtgtgatttgccctcaataagcacaaatattctccatgagccagtgagctactctttcaggttaagtgggcatgactacaaatgtatagtcctatgatgcctcaaaggccttcagtggttttctgaatttctttcaattttaatagaaatttgcaagtgacaaaagcccaaaatcacagcaaatgctggcttcaaagttggcctcttgggacattcttagtcctaaaaatctaaatgcagtaagtaaaagcattcctgtgtgtttaagaaaatgtactaaatttaccttccctttcct

SEQ ID NO: 53344 - DNA, 559 bp, Homo sapiens
ccgggccccccctcggaagtcttctagaattaattaagagtgtttctgataggatatgattctagtgggttagggaagaagaagtgagaggagagtaggccaaggttgacacagaggaagtaaataggtaaatagagagaagtcaggcacagtaacaaggtaagcaggatattggtgtatgcttcccctggtttatctgacattttcccctaggtgttcctactcatcactagcaaacctaaatctatattgacccatctgcacctctggaattctcagcatcaatctcaaattattgaaactagtcttttgaggatagcctgaaatattattttggcgaaagaaaaaaaaatctcgggctgggtgcggtggctcatacctgtaatcccagcactttgggaggccgagacaggtggatcatgaggtcaggagtttgagaccagcctggccaacatggtgaaacctcgtctctactaaaaatacaaaacttagctgggcgtggtggtaggcgcctgtaatcccagctacttgggaggctgaggtaggagaatcacttgaa

SEQ ID NO: 53345 - DNA, 507 bp, Homo sapiens
cggggccccccctcggggtacttctagaattaattaacgcgggaaataaaaaaaaaaaaaaaaaaaaaaaaaaaaaaaaaaaaaaaaaaaaaaaaaaaaaaaaaaaaaaaaaaaaaaaaaaaaaaaaaaaaaaaaaaaaagcggccgcacaaccgaatgggaaggaaaattaaaacaattggggggccccaaccggggggcgcctccctattccgctcttattaacaagctgttttttctgggccacccccttggcgtttcttttaaaaatggtgtgggggaaaaccccttttttgccccttattatagtcttgagaagccccccccctttcccctttttggttatttgcaaaaatggccggccttaatggacttttcaaacgttattatcccgttaaagtgcaagtaaaatttgcgggtattcttttttttttaaacccccttgaaagaattggtaaaatccctttttttttaacaaaatggccccgagatgggattccctttttt

SEQ ID NO: 53346 - DNA, 607 bp, Homo sapiens
acttctagaattaattaacgcgggttgggggctgaacattctctcctttgcctcaaaccaaaattacagtgatgtcatgttaccagaactttctgtatggatcccacagctccccgtgtgaacccactgatggcatctaacataccagttaggccacactatatgtatttcttcatttattcaggatttattagcttctatgtgccaattactgtgccacacattaggcatataaaggtgaataactacaggtttctaatttagataagttcatttttcagggaaactgagagctgcctggtaacttttttcacattgtctaggtcttgccagtaaaagtgaccaaaatggaaatgattgcattcattacttcatttcaacagtaatgaatttattctatcattcaatctatactactgtgagctgcttacgggcaattgaaaatggtgctgccagaacaatttcttcattttgatacctgaaggagaaggctagagattagaagatcagagttaggagataagttgtatcaccatgtatgttaaactaaagcccccaacaagacctacctgagatatagcctccccccaaaaaaaaaaaaaaaagc

SEQ ID NO: 53347 - DNA, 601 bp, Homo sapiens
  misc_feature 17: n = A,T,C or G
cgggcccccccctcggnagtcttctagaattaattaacgcgggggcagtattgctaacttggaaataaatttgtaagcaatattgtacttccacactagcaaaaaacaagtgtagtctaatcactaagcttatgtgattgctctatgatcgacgaacagtttgtgaagaaaactgagaatgagcctccttctagtcaaagattctggttgttctttagggtacactgcataaatgttattaatatttcaagttactgttaatattttatggaagatatactacttttaagactgtcgatatttacaagcaaataaggttttatgacatttagatgtcaaaagtacacacatggcttatagttttaatattataatgaaaatcactgggaaaaaatcactacaataaataggaagttcttacagaacaaactttgtaggaatgcatctattaaggaggcgatactaaaatatataaatctttaacaaaatatagaattataaaaatatgtatggtctacctaagatgtgttccatatgtttaatgataagaataagaatgaaagattaagaatgaaagagcacacttcattatctttcttct

SEQ ID NO: 53348 - DNA, 481 bp, Homo sapiens
  misc_feature 28: n = A,T,C or G
cgggcccccccctcggaatacttctagnattaattaacgcgggtgatgaccatatcagggtaattagaaaatctatcacctcaaacatttatcgtttctttgtgtcatgcaagtctattctgatcccgaaagtcaaaactcccatcccactggttgctgagtaagggaaacaagctgaaaagttaactgttggaaaatctagcacagtgtatctacttcctactttgtatttgtattaataggtgagttcctaccactgcctttttctgtgaaggtgaaacctaatgtgagccacatctccattccttctactgccctgctggtggcagcaagaaagcgagtacaggtaattcacaattaggtgttggacagaacaaggctgtcagatccaggtaaaagcacaccatgctgtttgaaagatctggtccctggttgggaatgcctcactgtttctttgaagactttctcctcaaggcgaaag

SEQ ID NO: 53349 - DNA, 486 bp, Homo sapiens
  misc_feature 24: n = A,T,C or G
gccccccctcgaaatacttctagnattaattaatttgagaggcaggtagacaaaagatcaattggttgaatcaaactttaaagaaaattatttgcattaatgccacatgataaatattgtacaggtttgttttttttgccagcttaataaattattagaaagccactttacatttaaaaaatttcatgaggctggatgtggtggctctcatctgtaatcctagcactttgggaggccaaggaaggaggatcacttgaggccaggagttcaagacaagccttggcaacatagcaagaccccatctctacaaaaatagtttaaaaattaggcatggtggcacatgcctatagtcctagctgcttgggaggctaagatgggaggaacacttgagcccaggagttcaaggttatagtgagctatgatcacaccactgcactccagcccaggtgacagagcaacaccctgtctctcaaaaaaaaaaaaaaa

SEQ ID NO: 53350 - DNA, 354 bp, Homo sapiens
cgggccccccctcgaaagtcttctagaattaattaacgcgggtcagttaatttaacatcagcaggtcatttgtgtgcccacagtgtggggcagctgtagtttctcctttgaggatccttaaaaacaatgtgaattgggggaaggcacagtcatagttatatacaggcatttgcattttagggcttgaccaactaaaaagccatgtatcagtaaatgaacgcgtatcagcaaacacttaagtacattataaatgccaaaagttccttgaattgttacttcagggtcttcacagttaagagtacccatatcctaccttattcttgctttactgattaaaaaaaaaaaaaaaaaaaa

SEQ ID NO: 53351 - DNA, 496 bp, Homo sapiens
ccgggccccccctcggaagtcttctagaattaattaacgcggggctgcagtgaaagaaagatttgaattcctgatcaattctttagaaaaacgagttttgcaatctgttctgctctgtacttgtatccagaagtgaatgtgttaaagatgctgagaaaataaataccttttataatcatgagtttgggggaagaagtgggtgtatctatttgacgcttgccaactcttgcctttctgtttacttccctcttgtgtaatcattcttcatgatcctcttgttgatgttaacatttaatgagtgccaaaaatatgctaagccctctgtggtacatagaatgagcaaggccctttctctgaggactcacatcaagacacaaaagcactagaaaaataaaagattaaaacggaagacataaccacagaattataaaataaattccaccaaccattctcaagaaaacacaaaatcccagccctcaccaaaaaaaaaaaaaaa

SEQ ID NO: 53352 - DNA, 612 bp, Homo sapiens
ccgggccccccctcggaagtcttctagaattaattaacgcgggtggcgtgggacacctggatgctactgtgtgtattgtgctccttggggattttttttttttcttgagtcggagtcttgctgtcacccaggctggagtgcagtggcccaatctcggttcactgcaacttctgcctcacgggttcaagcaattctcctgtctcagcctcacaattacaggcacacgccatcatgcccggctaatttttgtgtttttagtagagacagggtttcaccatgttggccagcctggtctcaaacctctgacctctggtgatctgccctccttggcctcccgaagtgctgggattacagacgcaagtcaccgcatccggccctgaggatcaatttttataagagaatttctcctgttatacttctccctctttgctagcctctatagggtcctatgtggtaggacagcgattttctagaagattctaaccatagtaaaataccacttttaatataactcaataatatatgaaagaaagggaaatttctgaagtaaagaagtgatagtggcgatgcagacaagtaggtttttaagttttaaagagtaggatccacagg

SEQ ID NO: 53353 - DNA, 607 bp, Homo sapiens
ccgggccccccctcggaagtcttctagaattaattaacgcgggggcggtttgaaaagctaacttgtttcccacaagtctaattgtcccactgggcaattaggatctcatattaacttcctaggttgaaaggacctaggaaggcccacaaccaattccactctcccaatacccagtagaattagtctccaatgaaaaggcaaaagattcatgataaaaggataatccacaagaaaaatcaccttgctcaactgcaaaaggcagttcactgaagtcatgaagatgaaaacagagaggctatttacagaaacataatttgaggagcaactcactttacagctagcataactaagactgggaaaaaggatatatcttatcttcctacatgggtatttggtccaaagacccagcattcctgtaacatggattcatttttctcttcctggcaacatttccaggtgtggaaggactaaaataacacaggccactattttttattttaacattctcctttcactaaaactactgatgtcttcttcctgcaacaggattttggtggaacacctgcttctctgcattttctagcttatttcattttatgccagatac

SEQ ID NO: 53354 - DNA, 571 bp, Homo sapiens
  misc_feature 26, 50: n = A,T,C or G
cccccccttcgaaagtactttctagnaattaattaacgccgggtcagggnagtcccaccatgggccctgcccatgggacttgatgcttgggtcagtgtacaggtcagggccttccttgaactaaaggctacgtgcacagactgacagctgacacttgctataacttactgctttgagagaaagagaatgagggttatgcgtgccattaatattttcctttgatttctctcatattttggtttacattatatcctttgcctgggttttgagatggtaagataagaagtttgataaatggcatatataaaagcagttttttcccttctaaatggatatttttaagaacagtttgatttacagaaacatctagaaggttacatggagagttccgtatctcctcacctagtttccttattatcatttgacattacattagtatgagacatttattaaaattaatgaaccaattatcaatacattaatattaactgaagtctacattgtattctgatgatctaatatcctttttccatcccagaatcctgtccagtttttcacctcgtatgtcact

SEQ ID NO: 53355 - DNA, 257 bp, Homo sapiens
  misc_feature 28: n = A,T,C or G
cgggcccccccctcggaagtcttctagnattaattaaaagatttatagaagtgcaatatctttcttttgaagaaaatgcttattatacagatttttaattttcaaacagtctctaggctggccacagtgtctcacacctataattccagcactttgggaggccgaggtggatggatcacaaggtcaggagtttgagaccagcctggccaacatgctgaaaccctgtctctactaaaaatacgaaaaaaaaaaaaaaa

SEQ ID NO: 53356 - DNA, 572 bp, Homo sapiens
taattaacgcgggtctcccttggtttccgcctttttagcataccgttcctgcctttactggaaggagcagggctgtgtatccatgcttctcttctgcctagtgtggttggaaggagaactgtatcatttgctgcaaaccattagcgctcttcttaccctaaaaacactcagttgtcccatttttgcttcattccttttgaggcaagtgtgcccaagtagatacaaaacaaaactgcccatacctctctagcaaccaagtgatctctggctgctgcttcagctgccagacatggcctgattcaaatatgtttttatttctctgagccccattcatacaccctggcgtcagagtgagagggtttgcagttctttgtagacagagagcaaaatttggagcttcaaatttatatatgtaaaaattggtgtctgaatctttggttggttcagtttgcctgttggcccttcagtggaattttatcattgttttacaattaagaagtattggaaaatataattttaaacagggcaggcacagtggctcatgcctgtactcccagcactttgggaggcca

SEQ ID NO: 53357 - DNA, 549 bp, Homo sapiens
cccccctcgagagtcttctagaattaattaacgcggggaggctgaggcaggagaatcacttgaacccagggggcagaggctgcagtgagccatgatcacgccactgcactccagtctgggtgacagggcaagctccatctcgaaaaaaaagaaagttttaaagtttacactcaaattattctgatattgtaaaatttgtcaaatacttctcatttcctctcatatttttcatagctttatagatttcacttagcttcctcttcaagcctttctagagaatgtaattattcactttttatatccaacagcccccaaatctcaattgttttttccatggatctttatctaatccttttatatctctcctagcatgaaatcataacttcgcatgatgaaagtcacaactgcacatgattttccagaggcaattgccacataactgtactcatttttcatatttctaaaatcatgggcctgtttagcaatgcattttgctgacatttttaataaacaatttaagactgcttccagttcccttttttttttttt

SEQ ID NO: 53358 - DNA, 603 bp, Homo sapiens
  misc_feature 44: n = A,T,C or G
ccgggccccccctcgaaagtcttctagaattaattaacgcgggnaaatctattggaaaagtagaaataaacaggccttctgatgtattgttggtgggattgcaaaatgatacaacttacatacagggaacattggcaatatatatcaataatctactccacaatcctactttttagaatgtatttcaaaggatgactgactaaaacatgcaaaacatgtctcactgtggctttattattgacatttggcaacaacataaatgcccatcggtaggaataaactaggttacaaccatacggtagaacactgtgcagccagaagaaggcagcaaagattatttctacggagatctcataaagtggataaaaattgtttctgaaaagttttttataagaaaagggtagatacaagtataaagatatatgtatttgtttctttttatttggaaaaaagcatcaaacactggaaggattaaccaaaagtatttatgaatatttacctacaggaacaggaaaatcaacatagatagaaatatgatatttaaagaaacacttttggaagaaagtttcctctgaacatattttatcatgttgtttaggcact

SEQ ID NO: 53359 - DNA, 326 bp, Homo sapiens
  misc_feature 181, 298: n = A,T,C or G
cgggccccccctcgaaagtcttctagaattaattaacgcgggttccctattctccttttctcaatttcctttagaaagtttagttgtcaacacaccatccaatgttttcttttggtaatgacttttctgtgttagttgaaaagggaaaaataattaccctctctttttctaatatagttgncttatgtctgaattattcaaactaaatcgagctgttgcatgaccaaaattggtatcttttttgggtttagctaagtatttttgataccaaaaagtaaaaaagaagcccagcacagtngggagtgcctgtaatcccagctacatgg

SEQ ID NO: 53360 - DNA, 565 bp, Homo sapiens
  misc_feature 529: n = A,T,C or G
cgggccccccctcgagagtacttctagaattaattaatgcgggccattggtctttatctttacagtacctacctagtacaatgatgagctctataaaggaactcaaggtgtgcttgacaatatgaaaaaaaagcaaacattaaattatatatttcttcttaatacgtaattccatagattaactaggcaaagaatacatctttattagtttaaaccaaggcatcagaattcaaatcgagataagacagagcataaaaacgcgcatgagctggctgagggcggtggctcacacctgtaatcccagcactttgagaggcagaggcgggggaacacaagatcaggggatggagaccatcctggctaacatggtgaaaccccgtctctactaaagatacaaaaaaaatttgccaggcgtcggggtgggagcctgtagtcccagctactcgggaggctgaggcagaagaatggcataaacccgggaggcggagcttgcagtgagctgagatcacgccactgcactccaacctgngtgacagagcaagaatgcggctcaaaaaaaaaaaaa

SEQ ID NO: 53361 - DNA, 579 bp, Homo sapiens
  misc_feature 43: n = A,T,C or G
cgggccccccctcggaagtcttctagaattaattaacgcgggnaatcaacacgtgtcagtttcacttttccctcacactcctcatttctcacagacacaccaaccattagaagcatccaatttccattttccaccagagtgacttgcatgcaaataaaagttgcagttccttagttccctggcctgggttctaagttcagtctaaaagcaccaaccaatgatcttaaggccatctctggtgagcagcccaagcccattctcactgctggctattctgtggctacaataggctgctgacaccatgattagcactagagaatgctaccatatttctgagcaaagcacacctcaaatccctgcttgagggcatggaagggataatcctattcacaatatgcagagtctaaatagctccatggaaggagataaagagacaaatccctgctaaggatactgatgatattgttgtcaggcaggtaccctggaaggtaccccagtgagatcactaaggatgcccccaagtgttagctgccaacaggtgacaattctgttcctattctcagcttctcagcatctttg

SEQ ID NO: 53362 - DNA, 355 bp, Homo sapiens
ccgggccccccctcgaaagtcttctagaattaattaacgcgggtcagttaatttaacatcagcaggtcatttgtgtgcccacagtgtggggcagctgtagtttctcctttgaggatccttaaaaacaatgtgaattgggggaaggcacagtcatagttatatacaggcatttgcattttagggcttgaccaactaaaaagccatgtatcagtaaatgaacgcgtatcagcaaacacttaagtacattataaatgccaaaagttccttgaattgttacttcagggtcttcacagttaagagtacccatatcctaccttattcttgctttactgattaaaaaaaaaaaaaaaaaaaa

SEQ ID NO: 53363 - DNA, 297 bp, Homo sapiens
  misc_feature 16: n = A,T,C or G
cgggccccccctcggnagtcttctagaattaattaacgcggggggttacacattagactttattggcaagtatttgcaaattaggcagacctcatatcctagccacttataaactgcatgattctgtatctcatttttctcatggagaaatagagataatattaacttggtttttgctaattgttgttagctctgtagttctatcacatttcagacctatttattgcatgtgatatttttcacaagatgcttaaatctctgacttttaatttccttatctgtaaaaaaaaaaaaaaa

SEQ ID NO: 53364 - DNA, 520 bp, Homo sapiens
  misc_feature 28: n = A,T,C or G
ccgggccccccctcggaagtcttctagnattaattaacgcgggtagctaggactacagactcaaaccccacacccagctattttattttatttttattttttagagatggggtcttgctaggttgtccagactggtctgaaactcctggcctcaaaccatcctcctcccttggcctcccaaagcattgggattacatgaatgagtctctgtgccaggcctaaagtgggacatttaaaaagtcaacttttatatgtcttacagctgtgctgccaaggtggtttttttgtttgtttgtttgtttgtttttgctcgggaactaagaaaactggtggaagggtggaagaaagtttggaggaaaaagacttaggtgcaaagaaagctgtcaagaggcagttaaaatgtcaagacatgagactccaacaaagggaacagcattgaaaggagtggatgtatggatatgacagcgatttaagagttgtttactttttagaacaattttctcagcaaaaaaaaaaaaaa

SEQ ID NO: 53365 - DNA, 611 bp, Homo sapiens
cccccctcggaagtcttctagaattaattaacgcgggcacccacacttatgtagaaatagtcgtgtatggaggaataatagagataagcaggtacacttgaagtcaaaatgcaatcacagttcttttgatctttttaatcagtttctccattggacatttttcttgcattgccccagtaacagaatagaggagatatattttgatgttacttttctcttgtcacttttgaagggtggtgttgaagagatgccaccatcagttggatatataaaagaaatagccaaataaagagataatctgtctctcccatcagcccctgaacaattgatagtggaaaataatgtaatacaatttataatgttcaaaataaaagcttattgataattttttatcaataaccatcaaggatgatgtaattacaaaactcaagatgatttgacagaatttttcaaattatttaaatctaaatattcagactgaataaacttcaaattagttaagtggattcatttgatagatgctttattttactcattagccaataaaactcttaagagttttcttaaggtcttaggacagacagatttatgcttcagtgacaaaaatcaag

SEQ ID NO: 53366 - DNA, 519 bp, Homo sapiens
  misc_feature 22: n = A,T,C or G
cccccctcggaagtcttctagnattaattaacgcgggtgcctcagtttgtcctctctcacctaatcagagcagggataattgcttctcatgtgggccccaggacaaaacaaagccctgactcccacaggaaggtagatgggttatgtccaagggaagacagacctgaggcagcattttatgttcccgaggtggcagaagtacatggagaacatgctttctttgtgggccagggataagggaagataagcagagaggtgccagacacctgcctcacccctacctcccccaccccatgccaggcccattcccacttatcccccaactcatgcagcaccattctacttatggtcagcatgacttcccagccaagctgatgaaagctgacagcttggattcatcacggacagcatgtactataggtgatgtgcacgacggaagtggagaggggacatgggagccgcggtgtcaggtctggggctgccaacatggtacctgccttggctgtaaaaaaaaaaaaa

SEQ ID NO: 53367 - DNA, 313 bp, Homo sapiens
ccgggccccccctcggaagtcttctagaattaattaacgcgggctgttctgttccttccagaataaagatctttcagtatcctccatgtaaataaaagttaccccttcatttattatttgtaagtattgggattttaacatcacactgtcttaaagtaggacacagctcagtttattcattaaaataaaagagttggacttgatcctttctacctataataactccatgaggctttgctataacctctatttagaataatttaaaggcatttaatagcttaatataatatatatataatatattaaactcaca

SEQ ID NO: 53368 - DNA, 540 bp, Homo sapiens
cccccctcgagagtcttctagaattaattaacgcggggatacaaacattgatatcacatcacacatcattgctggtattaatactattgtcaatctcaacagctacctacccaaacatcattaataaataaattttatgaacaagattacgaaagccccaatgaacactaactcttaatattaatggttaaaatgttggttatcaatattgtgatggaataagatcatagagcatctttcatccacaaataaaatgaataaaatgaaagtaaaaagtataactatcagtatcccagctattaccatgtgctgttgaattatgtatttggtttctggcattatttggttcaattttacatgtgttagttatctaggagaactaaaatgactagcagcttctcatacattggtatggaatatgatattaaatttgccagtatttttttagagaagagaatccttagtaatctgagagaattgagtacttactaaaaacaacaaagaatggcataggattaacacacagaaaaaaaaaaaaaa

SEQ ID NO: 53369 - DNA, 546 bp, Homo sapiens
cccccctcggggtacttctagaattaattaacgcgggatccttctggaaggagcccttaattgctaagtagcatattggctcagggtctgctcttgagggaactccaaagttatacacttcttctcctgtttttccatagcacttttcctctatgtttcttagatttcattatagaacatctattagatctaatctcttttgcctcctcctctcgactactccagcaaagggacttatctctgcatttccacgatcttgggctaaacttggctcatgatggacctttaacaaatggctactgaaacgaactgggattatcctttgtgtcattgaaatccctcaatcaccctttttagtcctctgattcctctagaattgtggagtgtttgaccctgtgtggaccataaagcttgtctttcagggaatggactcttgtgcctgaaattccacctcatgacttttgccttctaattgatgacaagcttcattttatttgtttttctgatttttgctttcctggctagtctttcaaaaaaaaaaaaaaa

SEQ ID NO: 53370 - DNA, 446 bp, Homo sapiens
taacgcgggggtagaaaaaaaaaatcagtatcccttacaatataatagtaacagaaaacaaaatctacccagttatttgctggattatctgaggcaatctctctggtcctagttaacttggaatactgaaagacactctatacgcctgcaggtgggagacacaaattgttcttcaactcgaaaatactctctgaaatgtcaacctgcctcctgagaagtactgctgaacacatagctctaaggaagtgtgttcaaaaaaaaaaaaagcggccaggcgcagtggctcacgcctgtaatcccagcaccttgggaggcctaggcaggcagatcaccaggtcagaagatcgagaccatcctggctaacacggtgaaacacccccaccaaaaaaaatacaaaaagttagccgggcgtggtagcaggcgcctgtagtcccacctactcggga

SEQ ID NO: 53371 - DNA, 545 bp, Homo sapiens
aattaattaacgcggggcagcttttcccagactgtgccatcccaaatgattaacttgtggccaaagacacagcaaggtccaacctaatgcattagtgggttggaagaggccaggggtgtctcagtgatggagtggcctgatgctgtgagaaatgctccacatgtttcagataatctgaaaagaggtgcagacatttttgggctctccaaaatatgcatctagggctgaggagttttagactctatgaatagatccaaaagctgacatacatttcagaccgtgtaatacaaaatgctaggaaacagcaaacttgatctgaattccctcccctccccactcttctcctgcctgcctgcaagctgtgtctcagtctttatcttacacgttcactgtgacttttttttttaattgacagggtcataagttcacttctgatggagaattactcttcggcccacttgcttaaaatatatttgaggccaatattaagagcatagctgtactcactctgtaactggaaaagaaaaaaaaaattctggagccca

SEQ ID NO: 53372 - DNA, 600 bp, Homo sapiens
  misc_feature 43: n = A,T,C or G
cgggccccccctcgaaagtcttctagaattaattaacgcgggngaaaggacagactattgaacaacagttatcctgagacataagttaactataagaaaataaaatcattatctcacatcatagagacacattttcaagctataggcttaaatgtaaaaataaaattttgacaatttttaggaaaaaaatgctctttaggtaatgatttttaaaataacatacaaaagtagaaattataaagtaaaagactgataaatgtgttactatgttgaagtttttaaaaattctaacaaaaggttcttcaaacaaaatgaaaaaccaaaccacagactacaagatattaacaaaatacataacaaaaaggtattaattttcaggatacattaagtcctaaaagtcagtaaataaatacaaacaactctattgaaaaaaatgaggcaaaaaattgtgaatagctagttaacaaaaaaggaaatcacggtgaaaataaacataagatgttcaagttcagtacgatgcagtttaacactacgatgaaacagcatttcgcgtcagactggcaaagtatcacactaatgaaagaaagtacactgagtcaa

SEQ ID NO: 53373 - DNA, 597 bp, Homo sapiens
  misc_feature 44, 553: n = A,T,C or G
cgggccccccctcgaaagtcttctagaattaattaacgcggggngaaagaaaaaagcaagatcccttacaatataatagaacaaaaacaaaatctacccagttatttgctggattatctgaggcaatctctctggtcctagttaacttggaatactgaaagacactctatacgcctgcaggtgggagacacaaattgttcttcaactgaaaatactcttgaaatgtcaacctgcctcctgagaagtactgctgaacacatagctctaaggaagtgtgttcaaaaaaaaaaaaagcggccaggcgcagtggctcacgcctgtaatcccagcaccttgggaggccgaggcaggcagatcaccaggtcagaagatcgagaccatcctggctaacacggtgaaacacccccaccaaaaaaaatacaaaaagttagccgggcgtggtagcaggcgcctgtagtcccagctactcgggaggctgaggcaagagaatggcgtgaacccaggaggcggagcttgcagtcagccgagattgcaccagtgcaccccagcctgngcaacagagcaagactccgtctccaaaaaaaaaaaaaaaaaaac

SEQ ID NO: 53374 - DNA, 570 bp, Homo sapiens
  misc_feature 508, 551: n = A,T,C or G
ccccccctcggggtacttctagaattaattaacgcggggtgggggggggcgggaacttagaggatgggtcaataggtgcagcaagccaccatggcacatgcgtacctatgtaagaaacctgcacgttctgcacgtgtgtcccattttggggggttttttagaagaaaaaaaattgaaattatattaagtatctcctcagatcacagtggaataaaactagaaatcaactccaaaaggaactttcaaaaccataacaaataaatggaaattaaataatctgctcctgaatgatttatgggttaacactgaaattaagacggaaattagaaaattatttgaaatgaatggtaacagtgacataaattatcaaaacttctaggatacagcaaaagcagtgcttttaagaggaaagttcatagcgctaaatgcctacatcaaaaagtctgaaagatcacaaattgacaacctaatgtcatgcctcagggaaccagagaaacccaagctagcngaaaaaagaaagatgagagaagaattgaataaatttgaaccanaaattaaaaagatcattta

SEQ ID NO: 53375 - DNA, 599 bp, Homo sapiens
  misc_feature 28, 574: n = A,T,C or G
ccgggccccccctcgaaagtcttctagnattaattaacgcggggggtgtggtggggaagggtcagttggacaagcaggaagcaaagaagcacatatagtctgcagttttgtttttcgcattttataaatttcctcctttcttctagattaaataaggacagcctatcactaacaatctcaaaataaaattgtatatgtcctgaagaacctccaaaactttcaatagccaagaaccatatgaagcaggatccaagtaccacatgaagcaggatccaagtcttatacacaagtaaataggtttgaggaaaattttcagaagagcatatcacagaacatatttggaaaatataatagaaggaaaataatatagaactaaaagttcctattatgtaattactttatatatataagtagcttttgcattcaagacaaataacattactggaaaaatttctctcttggaagacatttccacattccaattttcacattaaaaatgacataatgaaagtgccccaagttgtattgaaatgaccacaagcaccatacttaggtataacaggatttcacctgngactcactaatccagttgtttacag

SEQ ID NO: 53376 - DNA, 614 bp, Homo sapiens
  misc_feature 587: n = A,T,C or G
cgggccccccctcgaaagtcttctagaattaattaacgcgggagagtacagccaaaagtatgttagtagggccaaaaatccactctagatgatctctgtcttcccacaaaagcttcatcagagatgctcctccacctggggttttctgtttattcagcctcacttccttcttcaagtgatgaaatgcttagagcatcatgtccatgcctgtctacatggcttatggagcacacaagacttctgagactcagagctctgaaggcaaagctgacagatatgaaatgcaagcctagctttgccagggtaaacgtggccaggaaaggagcatacctagttctactggcatcaaaacagggttgcgaaagagtctatgagaaagaaatattaagtaatactgcatgtctgacattgacatgagcttattattcttccatgccaacacaccctaatccaaagcttatgctattccaatccaagcctgccctaaaacagccaattatgctgaatgcagtctaagctccaaggagtctccagacttaaagacaatgtttcattggcccattcgtttttgtattatttctacattntgagtcagcttctaaatcatatgcatc

SEQ ID NO: 53377 - DNA, 108 bp, Homo sapiens
cgggccccccctcgagagtacttctagaattaattaacgcggggccctcgcaggtctggacatagctggaaagacagactcatcttcatcatcagaaatggggggggg

SEQ ID NO: 53378 - DNA, 604 bp, Homo sapiens
  misc_feature 28: n = A,T,C or G
ccgggccccccctcgggagtcttctagnattaattaacgcgggggtgggggtggtgtggaaatgggataatcccaagcttattatattcaatccttagagtcaaattcagctagctacttcgtatataactaagtcactaacccctttacttctttccactccagaataagaaattttattttaacaaagacttagcaaacagtaaaatcagagggcttgcttctatggagaatccatgtgtcactttatttttcacgctgtgtatttttgcagtgaagatgtgtaatttgtaacaccatcattccccttcttccaccaactgtacccagatttccctcaggggctgtcaatcatattgttgagccttcccctgtctaaagacttagcacagaatccaggctgctccaaatcggcactttttcccagaaatctgaatcttaggtgggtgacagaagattggaaatggccagagttcatccatttcacagatgagttctctgagcctgccctagtttctaagaggccatccttcagcttctactcccttctcccagtgagtccattttcagataaattcattttctgcttaagtgagccagtgtt

SEQ ID NO: 53379 - DNA, 599 bp, Homo sapiens
  misc_feature 560: n = A,T,C or G
cgggcccccccctcggaagtcttctagaattaattaacgcggggatgtatatttctgtttcacaaaactgtttgccgatttcttatttttaaatatccctggatttaaattttaatttaataactattaattgcaaactatgttgtaagtattcaatatacacataaattaaaataaaaataaatacctgcctttactatgtatttctcacattaatggtctaaagctttgtttgagtcatttattttacaagatttgctttctaaaagactaataaagtttacatatagtacatattataatactaccatctccaaactcctgttttccacctatgttctataatcccttatctctgtcaaaatagaataaaaaagcattaaagaattctgtctgatgaaaggaaaaaagcaaatttagtctaggagagtatgaaccttatgaattaaaattaagaaccgtagtttggcaaggcacagtagctcatgcctataatcccaggactttgggaggccaaggtgagcagatcagttgaggccagaagttcgagaccagcctgngcaacatggtgaaaccccatctgtactaaaactacaaaa

SEQ ID NO: 53380 - DNA, 602 bp, Homo sapiens
tgggtaccgggccttcctcggaatcttctagattattaacacgggagtgaacaaaaatttacagttacgtagagtctgctgaaaaattgctaacctttggcttgtgaactctttagggtttcattattaatacattgcaaggaattattttgttaaaggtacaactatcccaggctaaaaatgtcttttgttggcaatacagtaatttacaaatattctctattatgaaactgtttaagaacctctcatcatgtatcgtgtaagatgatgtaaatataagaacagaccagcttgttcatgatttcataatttgatatgtttggctcttattaacaggtatttatttctgtataagagaatcattgattttctgttgtctttttttattggggcagcaagagataacatgggatctactctgttaacaaattttgaagtatagagcaccttattgcttattacaagcacgatgttgtacatcgaatctccagaactaattcatcttgcataactgaaattttatacatgtttattaccaactcctaattttcctgtctcctcaaggcctaccattctgttctttgtttctataaatcaggcta

SEQ ID NO: 53381 - DNA, 569 bp, Homo sapiens
  misc_feature 23, 36, 58: n = A,T,C or G
ctgggtaccgggcccccccctcnaaatacttctagnattaattaacgcgggcactttnattatctatggagaaagacaggccatttgattgaagttcactttcaccaagaagctttagtactcagctctgcatgaccaacttcaaatagggaaaatgatgtaaaaattatttggattattcaagtaaatgttgacataagacataatagacagggttaagagacgcagggatataacaaaaaaatacatctgtagtttatgtgatggtgtttaaagagatagatatgttagttttcagaaatttacactgtctcagtttgaactacaaaattgtaccagatcctattcatttgcacactaataaaaatgaccatttttcaataaggttaaggtatataagtggaattcaaaataattttaggtactttttttcatgtaattattgacagtcatgcaacccatcatctaagtgaatttctttacaaagtagctatttgaattggctcttgaaactcaaatttgaacttccttttagttgaaaatttagaaaacgcaaaaaaaaaaaaaaa

SEQ ID NO: 53382 - DNA, 581 bp, Homo sapiens
  misc_feature 536: n = A,T,C or G
cgggcccccccctcggggatcttctagaattaattaacgcggggaggttaacaatatagggaaataattagaaggataaatgggaactctgtgctaatgttacaaattttctataaatctaaaactattctaaaactaaaggttttctaaaaaactcagcagacctcattcttgtacacacagctcacaattaacattttagtgccccaatctcaaatatacagggtaaccaaggagaactaaatatttgaggagagactgcagaattaaaaatgagagaaaagtacaaaccaacaataaaatgatccccagaagaaaataactgtagaggccaggcgcagcagctcacacctgtaatcccagcattttgggaggccgaggtgggaggatcatgaggtcagcagttcgagaccagcctggccaacatggtgaaaccccatctctactaaaaatacaaaacttagctgggcatggtggtgggcatctgtagtcccagcgactctggaggctgaagcaggagaatcgcttgaacctgngaggcggaggttgcagtgagccaagatcatgccattgcactccag

SEQ ID NO: 53383 - DNA, 374 bp, Homo sapiens
ccccccctcggggtacttctagaattaattaacgcggggtgctagggttcccatgatttccagtttcaggacctctcccttgtgagtatagttctattttcagcatcaatttataaagaacatacatacttacaaaaaaactacatgaagctctaacactcaaataaatttgtattacaacagcatttagattaatctgaaaaatagtaatgtatgtgtagctaagaaatatttattcagggccgggcacggtggctcatgcttgtaatcccatcactttgggaggctgaggcaggcggactacctgaggtcaggagttcgagaccagcctggccaacatggtgaacccacgtctctactaaaaaaaaaaaaaa

SEQ ID NO: 53384 - DNA, 606 bp, Homo sapiens
ccccccctcggaagtcttctagaattaattaacgcgggacaattataaatctgtatatttcagtgagtcttttaagtagtgttttaccttctcccattataagtaaaacagagtaatttagaatacttatgagcagtaagtactcttctttggaacactctagtagtcctcttggctgattttttttcccagtatttgttctctttcaactttgtttctctaaagaaaaagcctagattggcaactgaaaattttttggcaaatcttggatttgaattttttcctaataagagactttactgattttatttttcctctctcactaagaaatagacttaaaacagagctaccattcaacccaggaataccactactgggtatatacccaaaaaattaagtcattctagcaaagacacatggacgtctgtgttcacggctgcactatttacaatagcaaagacatggaatcagtgcaggtgcccatcaatggtagattgaataaagaaaatgtggtccatatatactatggaatactgtgcagccataaaaaaagaatgaaatcgtgtcatttgcagcaacatggttggagctgcaggcgatattcta

SEQ ID NO: 53385 - DNA, 544 bp, Homo sapiens
  misc_feature 28, 43, 447: n = A,T,C or G
ccgggccccccctcgaaagtcttctagnattaattaacggggngaagacgggaggggagtgagggttgaaaaaccacccattgagtattatgttaatatcttaggtgatgggatcaatggaagcccaaaccccagcattacacaatataaccacataacgaacctgcacatgtactacctgaatgtataaccccgacccaccctccaaaaaaagaggaacgccaatcatcctgaatgtgaatttaattataattcttaaagacgacaagagaaaaacgatactttcctctgggtttcttttggccacagaataacaatgaaattagactaaaggaatttcattagagtttcaataccttttaacgtgactaaacatatgtttgtaactttttaattctcataattttcatatataatatttagaaaattctaaaaatattaagaatntaaaacttattatttcaagcagatcaatggcagtgtcctgcaatcaagtctgaaaaggtcagcctgtaagttaaagcatattattttaagtatgcag

SEQ ID NO: 53386 - DNA, 482 bp, Homo sapiens
  misc_feature 440: n = A,T,C or G
actgggtaccgggcccccccctcggaatacttctagtaattaattaacgcggggtggcccttaataaagaacagcctatctataaaagagggtgaaaattttttctggtagtcctggggaaagttaaacatattttttctgcagtagaaataaatctttaaaatgtttacaggtatctaaaaatggaatggtagtctttccaagtgtgagctccttgatactttatatgttaaaaagataaaggattatcagatttaaaggagacgctggataagtctctgctgcaaacacttctaatggaaaaatctctgattctatgtataattgtggttgcatttttttctttattgtcttttgaagtttcttatttcctcagtttactagtcctgaaagtgtttcaagtttagctctaaaacgttccatctaaagaacattgaatntagtgtttagaccatctaaaaaaaaaaaaaaagcggccgcca

SEQ ID NO: 53387 - DNA, 551 bp, Homo sapiens
attaattaacgcggggctttttgatgatgcatgttaaaaaaaaaatttctaacagaatgtattaatgacaaacattatctctgacacacatctatatctttttttctttttggcaacatttgagaaaaagactgcacgtatctgagcttaacatctttgaggagacattaggaatgtaagcagaaggttgctatctgaggattcattacctttccccacccagctttaaactgcctgatttacatcagaattaaagttcctgtacacctaactctgtcctagattgtctatctaattatcaataaataacagttgtatttaagggatgccaggtacagtgataacaaaacatacattagtagttacagagcgtgtcagaatacttgcattctcagataatgaggtgattgcaaaagtccaaaaataaagagttcattgaattttggtttatacaatcaatgtaaccatttaaaaaaatgatgataatgatagtttttcaacaagctaggtaaatggttagaatagaatgcaaagttaagagcaaaatccca

SEQ ID NO: 53388 - DNA, 534 bp, Homo sapiens
ttctagaattaattaacgcgggcatataatcatctcagatgaaaaaaatggaaacacgtaaccaaaagcaccaatgaaggtagtacaatttcaccaattaattcttagtgaaagtattaaccaagatgaaccctaccttcagataagcagaataaaaaagtaaaattaagatgatttttccagctgtgagatttgagatgtgcgttggattcaccaggtgcactgaaacaggtttcactgaactcaattctctaattaaccaaagcattgaaaccactgcaagaatgtttctcactgtttatcgtttcttttttatttgcttgctatttctctcagactctttgcatctgtcccatatacttactttattttccattatgccttctgaaatattgtggataatttgagggaagacttggaactgaagttgaaagcaaacaaaaatactatacttatgagctagatgttgactcactaacttgctctgtgaactttgagttactagatctctgctttcctctctatccattaaaa

SEQ ID NO: 53389 - DNA, 556 bp, Homo sapiens
cgggccccccctcggaatacttctagaattaattaacgcgggagactcttggccttagagaggagtaagcaagagagaacagaaaaggaaatcagataagtgacgggaggttgcagagtctgaagacctgggttttcagcccttgtgacttttaaaacaaaagttctcatgggatcataaaggtcataaaggtcaaccagcccaatctcttcactgaacataagcaccacatctccgctaccaccagaaacatgaatcgcttctgcaacacatctatttttgtaacagtttctcataacaaccacgagaggttagcagaacaaatattattcatccccattttacagatgacaggttaagtaactgagactcaacagcctacttatagttgagcattatcctgtaaaaagctttgttatcctaagccactgcttaatcttcctgaacattagtttttcccatctgtaaaatggtgacaatgttacctgcctttcagagttactgtgtaattccaatgaaattcccatcagataatgttgtggagcacctgctgcac

SEQ ID NO: 53390 - DNA, 423 bp, Homo sapiens
cggggccccccctcggggtacttctagaattaattaacgcgggtctgttctagccttctgggaataggcattgttggaacattgaaggctaagtcagcctggactaactctggagctatgtaaatctccagagaccttgagagacacctgcttttgggactgagtctgtgtaaatagtgtgcaagaaccatattttatttgaccaggcaactagattagaattgtcccctagacctgctgttttcattcattgcgagcatttgactggttgtaaaaacactgagatacagtctggatgtggtggctcacgcttataatcccagcactttgggaggctgaggcaggtgggtcacctgaggccaggagttcgagaccagcctggccaacatagtgaaacctcgtctctactaaaaaaaaaaaaaa

SEQ ID NO: 53391 - DNA, 525 bp, Homo sapiens
  misc_feature 14: n = A,T,C or G
gggccccccctcgngaagtacttctagaattaattaacgccggggtttagcccaacacacacagaagagcttccagagaagaggctatgcgtggaatgcctgataaggtgccaggaatatgaccccctgggaactatggtttaaatatccttgggagcactgatattgatagtgatagtgacctcacaggctttaggactcaacgtgggactcaagaggcatgagacaaggttaaaaaaacacagcacacagtgcaagagtctagatagatctgtggactttgatagaatgttggtggtcaagctatcctggctaacatggtgaaaccctgtctctactaaaaatacaaaaaaaaaaaaaaaattagccaggcatggtggcaggtgcctgtagtcccagctactcaggggctgaggcaggagaatggtgtgaacccgggaggcagagcttgccgtgagccgagatcgtgccactgcactccggcctgggagacagagcgagactccgtctcaaaaaaaaaaaaaa

SEQ ID NO: 53392 - DNA, 596 bp, Homo sapiens
  misc_feature 9, 64, 73, 491: n = A,T,C or G
acttctagnattaattaacgcgggtccatttggggggaaaatcaagcaatgaagcaaccaaagnaaacagggnaaaagagaatctgcatgactcccaccgtcagaatgcagtcagcaatggccccaaattgaaaaccaagcgtcctatcggacatgagttagccaactgccctattttataagcagtgtgattctaagtcaaagaaaaacaggtgtctttaatcagaatgaaaatatgaggcaatgatatcccaagagcaagagttatcccattttagtgcctgaactatacagcttaaggtgaactatacagctatagaactacacagcttaaggggagctatatagcttaagaacaatggagatttgagatcctgcctttgatattatgagtaagaatttagaacttaaaatggttgttctaggtatatagaaaatccatccccctctggaaaagactctcttctccccactataaatgagaataaatntcttcttttggtcttaactcccatgagacaagtattttaaggtatcagtttagaaacgaaattgttttggctattctagcaagtttaatgtgcagagatgatctg

SEQ ID NO: 53393 - DNA, 593 bp, Homo sapiens
  misc_feature 28: n = A,T,C or G
cgggtccccccctcggaagtcttctagnattaattaacgcggggcatatagggtttcttgttttgctttcccaaacaagaagttcaagtacactcgtagcatttgatggttaaatttctttgatatattttaatccagaataattcccttaccttatttctttgtttgttttcatgatattaacttcttttaagagactaggccaactttcttgaacaatagtccatgttctggatttctctgattgttttatgtatgtgtgtctatcatataccttgttactctatcacctgtttttgaaaagttgaagttggctccaaagatctgattagaaacaggttgcatgtttttgtctagaacaacttgacaagtgatgctttgtattttatatctggaggtgcatatgattgtcccctcttagtgctactaagtttcatcacttgattaaaatggtggcagcctggtctcccagtgttaaagtactttttttttcctttaacaattagaataatttatggaacaattatttggctcatatgagtatcctttctacaacctttcatctaatagtgttagcctccattgatgagcct

SEQ ID NO: 53394 - DNA, 598 bp, Homo sapiens
  misc_feature 28: n = A,T,C or G
cgggcccccccctcgaggatcttctagnattaattaacgcgggtggtgtttggaataaaactctttattgtagtcttcaaggtcctatgaaacccatcccctgcctacctcagtgatcttattctcccatcccattccttctttctcactgtatgcttcaaccgtacaggtctcctttctgatccttgaatatatcaaggtcattccaaactctacacctttgtccttgtttttacttctacttagaatgcttttcctcgtcatcactgcaatagagaagacaatggttggatctcattgtcatataatctttatttcagagaggccttcctgaccacttaatctgaactagccttccctacaccttgaaataaccctactgttatttacatattgctagcctactgtatggtaaccataatgtagaatatccttttattagcttaagaaaaactaatgggggcctatttattaacagtgaatagtgctggctcccttatttgagaagtaggtatatgttttcctatactctaaaattgcccatttttacctaagattgtgtagaaagataatttctgtcaagtattttttctttata

SEQ ID NO: 53395 - DNA, 603 bp, Homo sapiens
acttctagaattaattaacgcggggggaaggaacagagggccaacggtctatcacctcaaattcttcttgggtttctgacctagcaacatttcttaacacaaaagctgcaggggcgaatcaggggcaggagccccaggtacagaaacctggggtgctgatgtctgtgtgcaaatgtcactgccatgctacctggatgcatggatccggtctgaggaaacagagaagacatcaacgttatgcagtgaacaccaaagaagctctgaggtctaaggagtcccgggtcttctgggcagcacacagggtcactgtgatctctcaaatgaggcctacggatccagcgcacacccagaggcacagacgcagaatcacgctgcccaacaaaggcagcacagcctcatggaaacagtctctctacaccctcttcccacctagaagaaggacctcagaccaaacagcctgcctgagcctcaattttctcctccattggaaagggtaaaggccaggcgcggtgactcatgcctgtaatcccagcactttgggaggccgaggcgggtggatcacttgaggtcaagagttcaagagcagcctagccaacatggtga

SEQ ID NO: 53396 - DNA, 322 bp, Homo sapiens
  misc_feature 99: n = A,T,C or G
cgggccccccctcggaagtcttctagaattaattaacgcgggtccatcttactttgttattttctgagccacgggcatgctgttcaaatgcagataacntcagaaaaatcacacaccttgtaatgctccttctgtagttctttgtttcacactagcacctgcaatcacgtaaccttctgctccacaagcccaatgcttctttctttctttccttccttccttccttccttctttctttctctctctctttctttctctctgtctctctctctttcttttttctttttttttttttttggagacagagaaaaaaaaaaaaaaa

SEQ ID NO: 53397 - DNA, 502 bp, Homo sapiens
ccgggccccccctcggaagtcttctagaattaattaacgcgctgggggggaacaaaactgcccatcagacatgtaatgggtttctctaatatgcctgaatgaattgattactctagcagctcactcagtggaataaaaagtgaaaggcactcgtcatgtagttgtaaatttattcattgcaaagagcctccattaattttatgtaatttggtacttcccagtagttgctactggagtggttttgtgtaatgatgtcctctggaggaactctattgcatatataaattttaaagggcgaaaagatcctcagagaactcacaatcttaactgttgttttgttcctgtgtgtactctcacttttagaaatgcgttcatctgctgtatttctgaacctaagtatgtgcagaactatagcaataaaattatgtacaaaccagttgatcttgtgttccagtaactatctacctcacctcccccccgctcccccccaaaaaaaaaaaaa

SEQ ID NO: 53398 - DNA, 403 bp, Homo sapiens
cgggcccccccctcgaaagtcttctagaattaattaacgcggggtgagaggagctgtcacttgtttcatttcttatgcaacacttgcaatccttcttataataaatatttctttaatttaaaaaaagtagaaagaaaacaccatccaaaatgttcttaatggtcctctatttcttctgatagagggaactttagagcaattaaaatatgttaggacaatagataaacttcaataactttttcccttacaaaattaaaatagtactcatggtctcttaataataaaaaaaaaagatagctataattaagtcaccagcttctgaacatttataactcctattggtataaagcacataatggatcattaggattataaaacatttgccaatcaaaaaaaaaaaaaa

SEQ ID NO: 53399 - DNA, 462 bp, Homo sapiens
ccgggccccccctcgaaagtcttctagaattaattaacgcgggggcaatatcaagactaacacattttaagaataaaatctcaaaaaattccacagtaatttttgtggtttttagtttagcaagattcaataactttttatgaaaagcaaaattttgccgggtgcggtggcttatgcctgcaatcccaccactttgggaggcctaggcgggcggatcgcgaggtcgggagatggagaccatcctggctaacgcggtgagaccctgtctctactaaaaatacataaaaaaaaaaaaagtgagctgggcctggtggtgggtgtctgtagtcccggctactcgggaggctgaggcaggagaatggcgtgaaccctggaggcggagctttcagtgagcccagatcgtgccactgcactccagcctgggtgacagtgcgagactccatctcagaaaaaaaaaaaaaa

SEQ ID NO: 53400 - DNA, 577 bp, Homo sapiens
  misc_feature 27: n = A,T,C or G
cgggccccccctcgaaagtcttctagnattaattaaccgggggactttctgtatctattgaaggtttgtcttgaactatcttctttcatttactagactgactaaccactttaagacgcaaactgcatattattttatattcataaacaaaaaattaatctatcactttgctccaagacctataattctttccttactgcttttagtacagcactaattagcgacataaactatacattttgataaaaatacctaactgtacagagcagattgggagtatgaatgaataaatgtgtgccatctacaaatatttgtacaaaatgagaaagcacctggcggggtggctcatgcctgtaatcctagcaccttgggaggccgaggcgggtggatcacgaggtcatgagatcgagatcatcctggctaacacggtgaaacctcatctctactaaaaatacacaaaattagctgggcgtggcggtgggcgcatgtactcgcagctactcgggaggctgaggcaggagaatggcgtgaacctgtgcagaagagcttgcagtgagtggagatcgcaccactgcac

SEQ ID NO: 53401 - DNA, 553 bp, Homo sapiens
  misc_feature 28: n = A,T,C or G
cgggcccccccctcgaaagtcttctagnattaattaacgcggggaatagggagaattaaaaagaaggcaaggcatctaaaacccctaaactttatagggaaaaatatagttaaggatattccagagctaataaaacaagcttactgctgcaataaaatgtattctcgttattgaaataccatcacttttcaaatagaaagcaaagaaagagaaaccaagaatcaacaatgtgctttttatattaagcaggagtattatagaaatgttttctcagtgtaattatctgtggttgcctccaggacatgactgggtttccatagaatcattttttccaaggaattgcccacaattaagctcagactcaaatatttactagccagttacagaaaaaagtttttctaaataccaaatgggatgcccataaaccttatattttaatatgtgtacatttttatggcatattatcacactcaagtgtgatagtttacatgtacaatttaatagattcctgcatgtcaaagaatcacacgtttatggcatattacggaacatg

SEQ ID NO: 53402 - DNA, 600 bp, Homo sapiens
cccccctcgaaagtcttctagaatttaattaacgcggggaaacaaactttcatgatatctttttttattgttattgatagcaggacaattggttcatttgctcatttcagcaggggggaaacatctgacaatctggttgtcagtccagctgtttgactctccacattttttactttgcaaccaaatgtgttggcgtcttagagttgaacttttctggaagggaaaaaataggtatttaagaggcatcttggaatttggaaatgcattctaactggttatctaagacacatccatctctgatgcccttcaccagcatggcaaacaccataatatttaaggacatggttttttgaatttttctagacatacccatttgaattaagacaagtattttgaataaaccaccatgagagaaataaaaagtattaaatcagacattttcatttaatgtcaaagctcaaagatcatttttgtttatgagacaagttcatgtggcttattatgcaaattttttgccatggctctaatatatcacagggagaaatcatggagaaatatttgcgagctatgatgcatcctgccataaaaaaattcttgttg

SEQ ID NO: 53403 - DNA, 630 bp, Homo sapiens
  misc_feature 24, 37, 149, 157, 164, 165: n = A,T,C or G
ctgggtaccgggcccccccctcgnaggatacttctanaattaattaacgcgggagccgagatcgcgccactgcactccatccagcctggtaacaaagcgagactctgtctcaaaaaaaaaaaaaaaaaaaaaggccaggcgtggttggnctcatggnctgtaanntcctacagtttgggaaggggccgaggcggggtggatcaccagaagaatcaggaagttcgagaactagcctgaccaacgtagaagaaaccccatctctactaaaaatacaaaattagccaggcgtggtggcacatgcctttaatcccagctacttggaggctgaggcaggagaatcgcttgagcctgggagacgagaggttgcggtgagccaagatcgtgccattgcactctagcctgggcaataagagcgaaactgtctcaaaaaaaaaaaaaaaagtgatttatgctcatagtggccaaagtacaaagaggaaaatgataatcacttacaatcctgctatataaagaacactaagtatttcacattttcttctgtacttttcttctatgcatgttctcttattaagatacactatatgtgcgattcaatatcatcctttttattagcttaacagtgtaccatac

SEQ ID NO: 53404 - DNA, 566 bp, Homo sapiens
gggccccccctcgaaagtcttctagaattaattaacgcgggctgggtgtatgggggcagggtgtatatggaaattcttttaacttcctggtcagtttgtctgtaaatctaatatcctttaaaaagtaaagtcttttcattaaaataaaaaacaatcctacattactttattggtgaattctaccaagcatctgaagaaaaattaataccaatacttgacaaactctttcaagaatcaggagaaagggaatagatcccaacttattttatgaagccagtgttacctgtatgtatacataaaagacatcacagagaaaaagctgactaatatcccttataaatatagatccaaaaatcctaaacagtatattggcaaactgaattcatcagtatttaaaaagcactggtcatggagttacgactaagtaatatttcatccaggaatgcaaggttaacttaatatatgacaatcaatcaaaggagctgggtgtggtggcacatgtctgtagttccagctaccgaggaggctgaagcaggaagattgcttgatcccagcagtttaaggtt

SEQ ID NO: 53405 - DNA, 603 bp, Homo sapiens
gggccccccctcgaaagtcttctagaattaattaacgcgggggagggcagcttgaaatatatattccagactttaaaatgtatttatccttcgtttcagtcagtccacttctagagattatcctaaggaaacaatgggataggcatataaagatatatgtaaagaatgaccatctaagcattgtttaaaatagtaaagcactgaggataacatccaacaagacagacactggttggtttcagtgttgtagatgtagcaatcataatagaaaggcttgcattaaatttttgaaaaaacatatttcaaaatgcattcatatagtccagtttatacaaaatgtatgtgtgcatgtacacttctaaaagaacatatgctaaattttaaatgcttttaaactgtaaatgaaaataaaaatgttttaattctaaaccaaaatgtggactctcagtgctaaattctgagtgatgtaaacggtcctctcataaattactatcatttttgtagagcctaaaacatgttcccatcaccacccatatgcttcctctccaaaataatcctgaatttcttaaataaaaattgtagttcatcctaaattattgagta

SEQ ID NO: 53406 - DNA, 543 bp, Homo sapiens
  misc_feature 468, 495: n = A,T,C or G
cgggcccccccctcgaggtacttctagaattaattaagaaggctaaggagattctggtttaaaatactccttattcatattgaatattcccagaaatatgttttatttttaaggtactatctttaaaacttcactccttttcttaaacaaagaaataattgatggctatcattttgtgagggttattaatttggtgatgtagctgtttctcttggtttttcagccttgctttgttagtcttaatgagcattaggaaacttcagataagcataattttgttccctttgactttcaaaataacaatacataacgtagaactttgcagattttacttagtaaagcatatcaaagagtttatgatttattgcaagaaaattcatttaggaaattcatatagtaaagtaatttgtttcttagcaaaagttaatgttataatatcaaacttctaatgacagttttcatcataantggccaaaaactatctcttgttatctntatggattatctccattcaactttcccctccaagagtggtatttttta

SEQ ID NO: 53407 - DNA, 598 bp, Homo sapiens
cccccctcgagagtcttctagaattaattaacgcgggtacagactaaacttcacataaatgatacagaaaatgtcatgtgctaaaatagtttgttgacaaaagagagaaaacactgatggtgtgataggaaataaattgctgacaggaatttatttttagcatttggactgggttttgaatatgccttgcatactgaattgtatttaggacatgatggtaaaatgtgtaagtattgcaaattcctgtggatgtaggtatagattttgaatcatcattctcctgtgccctggcataacaatttagcataaggaggggaaataaacccagaaaatgaatacctttcattgattcaacaaataatattcttgaagatcttcacaagtaggtggaatcccttagagaaaagcactgagtactttgtatgaatcttcaattagaattgatgtttgtcaaaatacaaaatagttacagtctaagactttccataataaatcagtctaactattctacccaagaagagagatctcctcttatgttttgtgtttttcttgaattttctgcaaatacatttgctcagtactagtatcatgctttcta

SEQ ID NO: 53408 - DNA, 586 bp, Homo sapiens
cgggccccccctcggaagtcttctagaattaattaacgcggggtaccctaaaacttaaagtataataaaataaaataaaataaaataaattatccatccatcaatcaatttacttatttattcatgctctacccctccaattttactgcacacctatcatgggtctaacctggctgggctcagagctcctgggaatatgatattggacaaatggagatctttcctttcggggaacatcaatgttttatccttttttcttcctgagcaagaagttcccactggggatggacctaataactttgaggaacaccccgaggcctgctctcaaggaggcacaggctggggtggaaggccgcccccactgtgggcctccaggggctgggagctctcatttccaggtgttctccacagggaatgaggtgcgtggcaagttttctgtataagtgaagagctagccgaggaacgtttttattttacgactgaaaacagagcatcggagatttttacgcttgctttaattcggattgcaggcaatctacttggatgattcaactagagcttcaaaacggtgggcttcattttctta

SEQ ID NO: 53409 - DNA, 447 bp, Homo sapiens
cccccctcgaaagtcttctagaattaattaacgcggggtagaggaagggatctgactagagttgtcagtatattatctgaaatgtcaagttttcaacaaaaattggactttacgctccaattaaaagacaaagattaggctgggcactgtgactcacacttgtaatcccagcactttgggaggctcaggtgggtggatcacctgaggtcaggagtttgagaccagcctggccaacatggtgaaaccccatctctacaaaattcaaaaatacaaaatacaaaaattagccagacgtggtggtgggcgcctgtaatcccagctactcgggaggttgaggcacgagaatcgcttgaacccgggagacagagattgcggtgagccgagattgtgccactgcacttgagcctggacgacaaagcgagccttcgtctcaaaaaaaaaaaaaaa

SEQ ID NO: 53410 - DNA, 560 bp, Homo sapiens
cgggccccccctcggaagtcttctagaattaattaacgcgggcactatcattatcaaaacaaagctgaaacaaactccaaagaaatgaagatgtgaagattattgggaggggtgtgggagacagaaggacgtgctgagaaaattgctgaggaaaatcaaatgttttcaacttggatagttctatttatcattaggaatgcatttttccctccttctaatagattcaagagaaaacgtttttaatagtctgctgacatatggatgtttaattttcttattgaaagcaaaaaaagtggattttcttattaatctcttatttgttcgttttgtgattgttgatgttgaaatattaaggatacattattgtaattttttctcacaatttgtattttccatctttgactttcttaactataaaccaaaaataaaaagtaaaattttacagaaagcctgagagtacagaacaagctataaagaaaatcaagtataatatctggcttttaagcataatgtatattattttataaaacaagagctggtctttagaaaaaaaaaaaaaa

SEQ ID NO: 53411 - DNA, 346 bp, Homo sapiens
cccccctcggaagtcttctagaattaattaacgcggggtggggcaattttcatagatgacatttgtgaacttgttaatttccctccctctttccataaaatggactttaatagtaactaaataatttctagtggatattaaatataatctagtggtttaacaaggttaccaggcattcactgtagacttccctctagatacctgttcagaattaacataatacgcttttcttcctattaaacagagagggaatacgttagaaagctatactgtataatacaatttttgattatttcagtttcaagatcacgtaaagactgtttttttttttttttttttcaaatga

SEQ ID NO: 53412 - DNA, 607 bp, Homo sapiens
  misc_feature 537: n = A,T,C or G
ccgggccccccctcgagagtcttctagaattaattaacgcggggaaactgttcttgccctaaataactttccaacccccacgtatgtgggagcatgaagatacacacatgtagaattaaaatatgttgcaagaaaggccaaaacaaacaaaagatatgtatgaacgattaggatgttagaaatactcttgaatataactttggagactttcatggcttttcagaagaaaatattgctcaaatcatgtgggcagttctgcaggatcaggcaaataaacttctgtctactaaaattgtttagccccaagggggctctttggacataggttcaggtaattctgcagccttagcctctccataaatggaaagaccacaggtccagagcctggagcacagtggaatctgaggtgtaggctgtggccaaggaaacttctcagcagtgtcccaagaggaactgtgttgggtgttgctaaaacacagtggtaatgtaatgtgtgccatgaaacaaatggaggcaagctttctgcttccaccctgngctctgtttcttcagaagcaagttaagaagaaggggagatggagctgtcaactctctgtacataaattca

SEQ ID NO: 53413 - DNA, 604 bp, Homo sapiens
ccccccctcgagtctttgaataatacgcgggccctttttttacaatctcacacttctgaattgcatgtcccttgcagctccgatctgctccctctgtcacctgttattcctggcccttcttcttccttagtttgctctcccaagatccaggtaattcatctcctcagccaggccctgtaaaagcccccatccaaatctcctgtctcctcttgatttttccatgtactctgttcaacaggacttccaagaatgcagggagtaacccagagaactggagagaatgatgatagtcagaattcagggcatctaccagcttctattactggaagcacttggaaagcataagagaaatggctttctgaagccattaacaggattcagctcttgaccacctgctgctccttgctgatcctgtcagcctaaaagcctaaacacactgaattttatgaagtgacaagcatggaagtggcaaacagaggtcttcccaatcatacaccccttcccaatcatatatattttcctagggcaagaagggcatttgattgcaacacaaactccagaaaatacaccacagagggcatctcacatgccatctcccttcctt

SEQ ID NO: 53414 - DNA, 355 bp, Homo sapiens
cccccctcgtgaatacttctagaattaattaacgcgggggggatgatggcggttgtcaaggccaggggaggtgcagggacaggattctggctcccgtgtgtaacgtctgcatctcaggaggctctcatgttagaagctgggtcaggggcttcgtgatgcacacaaacaccaaacaagcaggaggccttccgggatcctgctcacgagcagcttcctggaggcaagcctggcccgtctgccccttggtgacatcaggaccccagcaacagaaccagggaagccaccatgttgtcgctgccattttccagcgtggtaaacagaagcaagacaaggcgcactcaggacacccaaacaa

SEQ ID NO: 53415 - DNA, 564 bp, Homo sapiens
  misc_feature 24: n = A,T,C or G
gccccccctcgaaagtcttctagnattaattaactttgggaggccgaggcgggcagatgacttgagacccaggagttcgaaaccagcctggccaacatggtaaaaccctgcctctactaaaaaatacaacaattagctggggctggtggcacacacctgtaatcctgactactcagatgtctgaggcacgagaatcacgggatgaatcacgggatggctgaatatgggaagtggagggttgcagtgagccgagatcacgccaccgcactccggtctgggctacagagcgagactctgtctcaaaaaaaaaaaaaaaaaactacatctataaaaactagttttatgtaattaaaaaaaataagttcaacagggatcaaagaaggaagagagaaatttcaactgaaatgagcaaagtcccctctggaaaatgtgtataaaaaggtaggggctgtcaggaaagtcctaaggctgaatttccaagtcacataccccaaaggcaggtagtgtagtttatcctctcatgtctatgaactattatcctaaggtgcggtgggtagactctga

SEQ ID NO: 53416 - DNA, 566 bp, Homo sapiens
  misc_feature 488, 489, 512, 548, 549: n = A,T,C or G
cgggccccccctcgaaagtcttctagaattaattaacgcgggttgcaagcataaacattttgatgggcatgcactagaattggaagaaaaccaatagaaatacttggtttgctgaagaaacggtggaagagagatgattttcatttcagctactgttgcatttctgcaaggtagtgctactgctgcatttctgctactgttgcaaagtactgtgcacagtataaatgtgggtggagaggtgctcaaggaaacaagtgtatttatccagacctctcctgattaattcttgcctatgtgagtggtattgttccctccagagcgggcaggaagaatcctaggaagcaaccaagaagactggaatgctgcagcacctggtgagttcagatctcagccagactacccaaccctctgcatggccacagaccagcaagcagtatagtgaaatggggagcatttggacccacatgtcctccaagagcaagccatannatattttcttcacttccctcgtnccttcttctgctgagtctttcttacatgacacactnngcagtgtgtcatcatct

SEQ ID NO: 53417 - DNA, 597 bp, Homo sapiens
  misc_feature 27: n = A,T,C or G
cgggccccccctcggaagtcttctagnattaattaatcaaaagatgcgcagctgacccaaaactggcctgggatttttggaagccagtcactctctctgatttaagccatgagctgccaaactcaggagcacttggcagcctcatggaataagctggtcagcttggagaaaggaaggagctaagaaccataaagaaagagatgagcaccccagaaggataaagccatggcagcactatggcctctggttcagctagtcccaagggtgtatttcagttctgcctttggcttggtttttcaccttttcccttggatttcatgagccaaatattctgttttatttatgtgaatttgaatttggtttctgtcacttacaataaatgtgtcctgagtaatatagagcctctgttcagtaactgctcggcttctcacccaactgaatgtcctcactgagagatgagcaaagggctttgccaggcctctactggacaccttggggcctaagaagatacttcaaccacaaaattaatacctggtaggtcttctaggagagcagatgaaacagaaccacacaggctggcctggaacttcagaaagg

SEQ ID NO: 53418 - DNA, 611 bp, Homo sapiens
  misc_feature 24: n = A,T,C or G
gccccccctcggggtacttctagnattaattaacgcgggtaccaagtggtttgaatggaccatacaattttctaagataataaaatcaaatgtttcaattctttttttcttatagttcaaaggtgtatgtcaagtatctatgagttgatcaagacaagtatctatgtcaagtacgttagagttgagcaaagacttgaaatgtgatcatcatttacatctctttgcaaaccaactttcatgtgtgttgtgcctatttcgaggactaaccaagctttctccctctggtttactgtttatagcaaatattgtttggcaagaaatccataagaaatgatgtcacctgccagtcgtctacaatctcacacccttttatctctgtcatgattactcaatgcatatgtcctgattctgttcaatagctttgattgctggccatccacacataataaaatgactgtcctatatggaattaatgaaagactgctatgctttaatccctaaatcaaatcctgtcagatctgtgagctccttctccattatttcactgagatggaaccacagatgttatgtctctagaatttatagggatggttcttaagccatgctggtca

SEQ ID NO: 53419 - DNA, 420 bp, Homo sapiens
attaattaacgcgggatattcctaataaactattaatattttaaaaagttaacgctatcaagtactgtatcggtatgggctttcaaagaaatataaatgattttcttaagtagacaaataagcatatcaattgtaataaataccgctctggtgggggaacgctgataataggggaggccgtgcatgcatgggggaaaaatgtaaatgggaaatctctgccaccttctcaattttgctgtgaacctagaactgctctaaaaaatgaagttggccaggtgcagtagctcacggctgtaatctcagcactttgggagactgaagcaggaggacagcttgaggccaggagtttgagaccagcctaggcaacaaattgcgaccctgtctctacaaaaaattaaaaaaaaaaaaaaaaaaaaaaaa

SEQ ID NO: 53420 - DNA, 580 bp, Homo sapiens
  misc_feature 28: n = A,T,C or G
ccgggccccccctcggaagtcttctagnattaattaacgcgggttgggcaaatgatagtagttcaatttttaatgtaaaatagtagagatttttattctagaaaacattgtccagtatcaggtgacacttaacaatgttattgacaatgctgttaaaatgagaagtattagaactgtgttcctgaaatcataaaatcttactgaggattgtaattcttagatcttttaatttgagctacagcccaagaggcttaccaaaaggtgctaggcaattattaatcttttatggctgggtacagtggctcacacctgtaatcccagcactttgggaggccaaggtgggtggatcatttgagctcagccaggagtttgagaccagcctgggcaacatagtgagaccctgtctctacaaacaaaaaatacaaatattagctgggtgtggtggcacgcacctgtggtcccagctattcaggacgctgaggtatgaggatcacttgagcccaggacatggaggttgctgtgagcccagatcatgctactggactccacctgggtgacagaacgagaccctgtctcaaaa

SEQ ID NO: 53421 - DNA, 573 bp, Homo sapiens
ccgggccccccctcgaaagtcttctagaattaattaacgcggggtggttttattcattattgctaaaattgtctttcagttggccaacaggtaaataaaactttagtccatccataaagtggattaccactcagtaaaaaggaataaacaactgtatgaagcaacatgattgaatctgaaatgcactgtgctaagtgaatgaagctaaactcaaaaaactacataatgccattatggaaaaggcaaaactatacacacaaaaaaattgatcagtggttgccaagtgtttgaggtggtgggaagatgtgactataaaggagaattaatgaactttgggggagtgatagaaatactctacctacttattgtgatgctagaggctgtatgacttcatgcattagtcaaaactcgtaactgtagattaaaaagtatacattctactgtatataaaaattagatcatgataaacctgacttataagtgaacaaagatatcagataggacgggaggggggttcaatttgaagcctatgctctgcgggcagggcttcatttcatcatcattatctatata

SEQ ID NO: 53422 - DNA, 393 bp, Homo sapiens
cgggccccccctcggaagtcttctagaattaattaacgcgggggctgtttttaattttttttaagagacgggtttttgccatgttgcccaggctgtcaaactcctgagctcaagacacttctcctgcctcagcttcccagttagctgggactacaggtgtgcaccaccatgcttggcctccagtgttgttttctacttaatgtatattattgacctttaagttgtcctgtaatgtttggatttttttgaagtttcacttcttttttcctgtagccaacattatattaaatgtcaggatcaatcccacagcagccctccctacagatatatccatttgtgacactctaagaaagtcagtgctgtgtataaaaatataacaaaaaaaaaaaaaaa

SEQ ID NO: 53423 - DNA, 532 bp, Homo sapiens
  misc_feature 24: n = A,T,C or G
gccccccctcggagtacttctagnattaattaacgcgggtgttaatttacataatttgtgaatttagaaaataaagttacatttgctatgcagcaggcacaaatacacaattcctattaatttaatgggagttgtgactcccattaggtttacagccaaatccccaagtaccttgctaaaaatttacctcctagacttcaactaatcaaatatactgaaatgaacaaaagtagttaattttgttagattgggaaatctgaaatccccacagtaagtcaattcagtgttatcacagcattggccatgtagttattctcaacaagaaaagaaccagggtattagagtgaaagagacaaattgaaacaagagttttaagagctctactaaacagagcatttatccctaagaggaaaaatatgtttttttccaatttggtgtaaatttttcaaaatttttttctgagtatactcttgaaaagagccaaaaaggctgggtgtggtgtctcatgcatataatcccagtcctttgggag

SEQ ID NO: 53424 - DNA, 490 bp, Homo sapiens
cgggccccccctcggaagtcttctagaattaattaacgcggggtaaatattgaagatgagagtgggtgagagtcctagattccagaaagataacttttacttctgctatttattattaattttcttcctttcaaaatagagttttgtaaattgcagctatttctaattctactcaaacctttgacaaagaaggagatgtatacacaaacacattaaagaaaaaaataaatggttacattttaagttggaaaatattattccactttaaatatatcctaagtttaaagaaagtatttattgtgagccaaggcttcacattaaattttgcaatttgtctccttaatacttctagaacaaaagttaattatttcttaaccacttacataggaaataagatttagaaattactcaactcacttatttctgctgatatttttctttgtttttttttttcctttgagatggagtctcaaaggaaaaaaaaaaaaaa

SEQ ID NO: 53425 - DNA, 589 bp, Homo sapiens
  misc_feature 28, 45: n = A,T,C or G
cgggcccccccctcgaaagtcttctagnattaattaacgcggggnaaaagcagttataaaaagtgtaaagtgtcagggcaattgaaggtctggaaaatctctcagaagtagcagagaaatcccgatgggcaaacgtctacttgctaacggaacagaatgaatatcccaaggcctacttgcttcgttataatgtcatgaaattgcgtgctctgcaaaaactgtcctaaaaaattaaaattcgcttggaagtgaagaagccacttatttttttcaaatgaaacaagggggagaaagcaaaaaatacagtagtgatattgaaatactatatgaaaactcaataggaagatgccattttcttttatagttagctaaaaaagttattcaacaaacaataatgatgtcttttgggctctaaaagtgctgagggtgccacagtggaatcagactcacactcaggtatgaacaatcgctttttgaccatgaaattgtgactgggaatactgaaaaaattcaaattgaagatgtcattaaaaacagaaatagatggccggcctggtagcatgcacctgtaatgacaactactcaccaa

SEQ ID NO: 53426 - DNA, 587 bp, Homo sapiens
  misc_feature 27: n = A,T,C or G
cgggccccccctcggaagtcttctagnattaattaagcggggaagtttccagaaattgtaagaaggtaatggcgaaatggatggcttaggaacacaggcaacacctcggctgagtttgaggccacggtccgtggctccggagctcggcgtccagccaggatgctggactgcagaatatgccaaccttcttctagacccatttccagtgttttaaatgctgatagtacacgctacctcctattccctacatgtcctaggtgggtgttcataggcacataccataaaataaaaaatgaatatcatgaaattaaaaatcatacaacaaatcataaactaaaaataacattaataataataagacccacgtgcaaagaggggggaaagccttcccgcagggtccttgcgcattgcttcctcccacgtgaccccagacgagccgcctcacttctctgagtctctttccacttctgatgcagacaatgacgccacgcgtcccaccccacagggcggctggaaaaaggaaatgaatccgtgcgtgtggaaacgcttgggatagtggcaacacatgctccttatgacatcgtgtc

SEQ ID NO: 53427 - DNA, 584 bp, Homo sapiens
  misc_feature 25, 42: n = A,T,C or G
ggccccccctcggaagtcttctagnattaattaacgcggggnaagaaggagtgttgactttgtatttaatatgagtataggaagaagactggctttttgggaacattttctatcattctgatttttttcagtcatacattttctcactttttcatgttgaggacttacaaaagaaattcttagaaatgtttgcaattgtctcacaggcttattgaaccacagaaacggagataagagagtatgtcacaggtgggatcattgctttttataactgcaaaattatattaaggaactatagggtacattagagaacataaacagcctttattataggatgataagaaaactggtggtccaaaagttagcaataagtaaaagtaccaatttcataaatcaatttattaatatgtctttatctattctacagttacttatttaaccctaacaccactttacattttggctgctcctgatagtaagagcttaaaatctactggaagggaaaaataattaaagaaaagtaagcaaggatttccaggcaatttggcaacctgagctgatgtgaaggaatttcttccccgaat

SEQ ID NO: 53428 - DNA, 601 bp, Homo sapiens
  misc_feature 536: n = A,T,C or G
cgggccccccctcgaaagtcttctagaattaattaacgcgggggagagagccttaggagtggatgctgagtcagccagttgcagtgtctgccccagaaccatcctataaaagccattttcaaactttattcattgtatgtgaacatgtttcaacgtctttcacaagtggcttttaaatcgttgttagtcatggaagctttgattagatgaactcttgtgagggaacctggcatggtgggcataccacgacaccagctctcagagactcagatggagggagccaggctgggtgtcgtggaagccccttgaagctaagtgaagagggtattggcaaagagtagttgaaaatgaaaacttttcatttttagttgagataagatgtcagtaaaagttaccactatgaggatttggctttgcatttagcgatccatttttgcttttctttttttaaagtaggagaataatatgttttgaacatttagaaatggcctctttattgaaatacataaccttgtgtggtttgggctggtgcttanatcctcaagaagaatttccacatggaaaacgaattgccaccttagtcttctccaaagatgctgtc

SEQ ID NO: 53429 - DNA, 555 bp, Homo sapiens
  misc_feature 17, 19: n = A,T,C or G
ttaacgccgggtacagnanaagcatataatatttaaattatacatatatatcaacttcatcaactatttatggtgatcactatgcttggccttctcatcttgttgatgtatatattctagctataggttgtaactaggcagtaaaagttatctggagagaagcaaataacaatgtaactatttcgaatgtttatattctttaatttctggcatcacatagcttataggttaaataaaatatgaaagagacatgtgaatctcagcctttgaatacttaggatgtgtttaaatatataatattattgaagttgttatagattttcatcagttatataataaaatatattattggcacaaggctggacagagataggacctcaataagttctatctactaatatcactgtaaatactactggtttgtgtgggtcaggaatgctgaaatttaagtttttgaaagaatgaaactcaaatttgagttgacctttgggctcactcaagagatcatattgaatgcacgttgttaaaattaatatagagaattgtattccaaga

SEQ ID NO: 53430 - DNA, 560 bp, Homo sapiens
taattaagcggggggcttttagccttggcacctcttgctgtgctggcacaagctgagaaggacctgctttggggtccaggagggaacattttctccaccaagttgggactgggcacagtggctcctgcctgtaatatcaacacctccggaggccgaatgctcgagcccattttttttaggccagcccgggcaacataacaaggccccatccccacaaaaaaaaaaaaaaaaaaaaaaaaagaattttaaatagccagttgtgatggcacatatgtgcctatggtcccggctactcgggactacgggtgggcacccccacacccagagaattttaaacttttttgtagagacagggtctcaccatgttgcccaggctggtcttgagctcctggactcaagtgatcttcctgcctcagtctcccaaagtgctgggattacaggcatgagccaccatgcccggccatttttaactttttaagtcccagcaaatactcactggtcacccatgggcctgaccctgctcagtggggggctggcagccttggcacctcttgctgtgc

SEQ ID NO: 53431 - DNA, 606 bp, Homo sapiens
cgggccccccctcgaaagtcttctagaattaattaacgcgggcgggcgcctgtagtcccagctactccagaggctgaggcaggagaatggtgtgagcttgcagtgagccaagattgcgccactgcactccagcctgggcaacggagcgagactctgtctcaaaaaaaaaaaaaaaaaggaaagataaaaaagaaatgttgacttcatgtgattggtaagagcattttcaaagatttgacatttctcttaaaattactgattgcttctaatatgagttcttaagtaaatgctataaataaccaaaatttcctcatctccatgacttaattttatacatttggtcaggtgcattattgtctaaagagttgtctttggaagtattgttacagaatattttaactaaatttttgcactactctaaggcactactgcatttaaaaacacatttcagccgggctaggtggcttatgcctgtaatcccagcactttgggaggccgaagcgggcagatcacttgaggtcgggagttcgagaccaccctgacaaacatggggaaaccctgtctctaataaaaatacaaaattagccgggtgtggtggcacatgcc

SEQ ID NO: 53432 - DNA, 601 bp, Homo sapiens
  misc_feature 23: n = A,T,C or G
ccccccctcggaagtcttctagnattaattaacgcgggggtccaacaaatacatcacaaatattaaaagacgattattaaagagtttaagccaaagctcacaaaattgttttttaatttggttttcagcaaagactaaagcagaaacaattttgtgagccaggcatttccaatcagattagaattagaaacctatatgtctcctatgtactaaaaatgctggcatttcccttagatataaattctctttaataaatattatatgcctattacataacaaaagaaaggtaggtagtttgagaaacaaaaataaacacctaaaaatatgacacattttctacccttaagaacctgaactctctgaggaggatagatagatctaaaataaatttgagaaaaagacagattataagtacaaatacattctaacacacttctttctgacttctctgtgaaatcaaagaaagatatgaaattcggcacttgacctgttgattgacaagctctatgttcactgaaattctcatgtgtgaccttaattcaagtactttaattataagtcactgacttttaacttttcaaagaaagtatccccaaccttc

SEQ ID NO: 53433 - DNA, 586 bp, Homo sapiens
cgggccccccctcgaaagtcttctagaattaattaacgcgggtcagggagatgtggattcaggcttgagcagtgccaaaaattttcgttatggccttggtaaaggtgatttcccatctctgtgactttgtgtctccttctgttaaatgggcattcaaatcttttgtacctaacttattagggccctgataatcaaattagccaataagtaagaaaatgttttcttaaccacactgtaaattaagaggattcatattgaaatcacttttccattattgctgtcttagcctgctaaagttatatttagtgtagtgcaactaagcagggttgtgagagctgggaaggtagactgttgtattgggcagggtcagggcagataaaggaccaaaataatgcctgaaatgctgtattaacctgctctaccttgaactgctgtcttgaattggggggaaaaaatgaagctctgaggggatggtgcacagggagaaaagagagaatctcaggaattgaaagtctcaatggagaagaggtgggagaagaataggaggctagagtgagggcatgtgatcgtggagtaccgatctgga

SEQ ID NO: 53434 - DNA, 592 bp, Homo sapiens
ccgggccccccctcgaaagtcttctagaattaattaacgcggggtgggtggggggcagaccaactaaagcaacaagcagagtgcttcacacagaccagcacactggtctctgagtcttcccatgaatctgcaacctacaactggtgccctctgctggcaaaagtatacatctcttcataacaaaagtaaaacctaattactacaactggggcttaagaaggaaaaaaatatatgcttccttcacagacattctattcaggaatgaacattatttcttacttacaactttccaataggcatatgcaactttaaattgactgcaatgatcctctcctctatctgctgcccctgcctcacgcctgcagttctttcctttcgggatccaaagaaaattgggctgttttacataaaaaggtaaaatataaataaatgatgcaaagccctaaagtcaaaaatacagtgatgtgtatgtgggtgagatcaggtctgcacatctagcaagtacagagaattgaggcaggcacacacttgaagtgatataaaacccatgggcacgtatgctcaaacattttggtaaatctctaccttcgtc

SEQ ID NO: 53435 - DNA, 606 bp, Homo sapiens
  misc_feature 590: n = A,T,C or G
cccccctcgagagtcttctagaattaattaacgcgggatttcaggtgcctttgtgtcactgtcaaagtacactaactgatggccatgaagaagaggttaatctgcacttttagtatgcaatttaaagtgtcaaggtagtatgtaatgtatttcattttttaaggaaaaattaaaaataaaaatggatatccaggaagttcctgacatacagcacctcatttccctgtcctgggtggacaaatgaagtactggtagggcaatttctaatgaggcaagagttgacaaatatgtaggcatcaactcagtgtttatattatatagcttttttattggtctcccgttttttcacaatacaaaattttatacaaaattcaaaaatttatacaatctggaaattcgacaacctctcctgccatacaaaaggcagtttggcactcacatttgcccagtccagggaataaaaggcacacagacatttccgaatttcacaacatttgatttatattgatgcttggtattacacccacttttaaccaacaatattgtcttactaatccaagtaccgcgtagatcttacaatgtgtatgttntctacggttttcattt

SEQ ID NO: 53436 - DNA, 544 bp, Homo sapiens
cgggccccccctcggaagtcttctagaattaattaacgcgggacataaaggtttccactagcatcattagcttcgttataataaatgagatgctttatgtgatgtataatacggtaaagccaacacagctgtttgcttctgtaggaaagagcctaggtgcaccgcacctgagtctgcaaacacttaataagccctcaacaacaaagctgcctcactgagaactctggtggctgaagccattatccacggataattaactatgtcaggacactgaggtcctaacatgaggtcctcataattccccactatgggaaagacagtaaaacattattatattactaatatttagtaagaagactgttctatttgtgtgttattaatgcgagctgtaagttaccgcatcatttgaattactattagttcttctgggcactctctcacatgaagggcaaagcagccctttgcgcttaagaacaggaaagaaatactttcacgtggattaaaattttttaaatgtatttgtaatttggtctggttatttttc

SEQ ID NO: 53437 - DNA, 592 bp, Homo sapiens
ccgggccccccctcggaagtcttctagaattaattaatagagtctattgtgaaaattaaataatatcacatacgtaaaatgtttcagaattaattttcctccctctcttgcccttttccacctagttaatgactatatcctttaatgatcaggaaggatctgaaaatttggcgtaatagcctcccaaactctcttacatatacgacactccccataaacagacagacaagataagttagtccccgcttgacctgtgtaatcacaaaaggacacatgtaaatgattttagtactggttatgctttaatgaatttctatttatattaccttccacattgtctgtgatggcaagagtgagcctttatcttctctttatcttcagcacaaagtatggtgcatgtgtcagagcagctggcatttaaataactgtaaatggtacaggaggaaggaacacatgcacattattataggcatactgccatttcctgctgtcatgcagaaaaggctcaagactgaacctctagcttggtcatgctataattctgactgaatacaaacccatataaggaccatgttaagtaataacatggact

SEQ ID NO: 53438 - DNA, 359 bp, Homo sapiens
acttctagaattaattaacgcgggcatttctcagtgatacttgtactatcactttcgtgattctgaaacacatgtattccaactctgtttcccatagttttgttgattccatgacaaaggaaagatataactcagaattttccccctggcattgattatatttataacaaatcaagtgcctccatttgcattggcattcctacatgccgtagaaatgaaaagcatgggttttattataaaattatataggtaaattgctgtaatggaaggttgtatgtgctatgtaacaacaacataagacttggcagaatttttgaaaagtggcatattgtttactttccttaaaaaaaaaaaaaaaa

SEQ ID NO: 53439 - DNA, 455 bp, Homo sapiens
  misc_feature 21, 34: n = A,T,C or G
ggtaccgcggccccccctcgngaatacttctagnattaattaacgcggggagagtcttcaaagtaaaacatgggacatacgaggtagtgatgtatgtatgcagccatagcgaccacagcactcacaatcttcacatcctgacttgaatccttggatttaaacctaagtgccaaattcagaatatgtaaactaattttttatttctggaaagattatgttctttcattataatctttaatatcaagagtagcgaagacaagtaaaaatgctaacatcgataagttaaaacttcataacttgaatacatacagacacacacgcacagacagagttttggctcaatgtcttacttgatctcttcaaagaaatggtatcataatatattctgccaagctgaggctagatgcttctagcctcaactcaaagtcttatcagttaaaaaaaaaaaaaaaaaa

SEQ ID NO: 53440 - DNA, 317 bp, Homo sapiens
  misc_feature 28: n = A,T,C or G
ccgggccccccctcgaaagtcttctagnaattaattaacgcggggaatactcaccactttcttaaggagagtgaatggtgaaaagccatacgcacatagacacatgcgcagcactgaaccaaaccgtacctacctgcaaaatgctaaatcaactacacaaaaaaggtgccaacacgcacccattgcatatttattcacgactgactggctcattcgattagtggaatttatatacctttataccttcttgaaaacccacactctctcggaactaaacgccgtacccccttaacatgagaaaggctcctttctaacaa

SEQ ID NO: 53441 - DNA, 601 bp, Homo sapiens
ccccccctcggggtacttctagaattaattaacgcggggtgggatggtggcctctcgggacctcactgcactctcctgttctgacctgctgatctactatttccctgattctaaactcctcattccatcccccagccctttagtcccttactatggttcttgcctaacatggcatctttcattactgaacctgttgaccacctattctttctccttccatttgaattcaactctttggtggtggcatgagcagggacgttggttaagttagtgaactgccataagtatttgtaaacccagtgtacgcaaaagccattaagaaaatgaaaactcccctggccatggattgcttctgtgtagcactgctgataagaaagacgggtgaagcaatgtgtggtcgagagcacttggtttattttcaccaatggcaacaacagagggaggaacaaagtgcaggtgtgtgtcctgcagttctcaaactggtagacctaaaacattttgtggacaagttgagcccttcttcatactgtcttaaagctgcttccaactccctcaaggcagttcatggctcctacttgacagacttccacctgtggtctgg

SEQ ID NO: 53442 - DNA, 514 bp, Homo sapiens
  misc_feature 22, 33: n = A,T,C or G
gtaccgggcccccccctcggangtacttctagnattaattaacgcgggcatgcattaggtatttgtcctgatgctttcgcttcccctgacccacctcgacaggccctggtgtgtgttgttcccctcctgtgtccatgtgttctcattgttcaactcccacttataagtgagaacatgtggtgtttggttttctgttcctgtgttagtgtgccgagaatgatgatttccagattcatccatgtccctgcaaaggacatgagctcattcttttttatggctgcatagtattccatggtgtatatgtaccacattttctttaaagataactacttttgaagtcttgttgaaatataaacaaactagtacaaagggtttctaaaaattaatattattgcagggcaataaatctactgctaacgaaacatacatcaataatcagtaccccttcaatgagaagttctcaaatactccattatatttaggattttgtaggcactgatgtttagaaatgctt

SEQ ID NO: 53443 - DNA, 608 bp, Homo sapiens
  misc_feature 28: n = A,T,C or G
cggggccccccctcggggtacttctagnattaattaacgcggggtaccctgacagaccatttgcccacttgctgcccagcctatttttacccgaaggcttaaatggcctctgaagtctcaagtctacgggaaaataagtaaaacctgcccacatgcttgtgatggtattggaatatttcagtcctttgagaagaacacttcactttgaaccttacgggctattttccagactgtccaaatatgatttgtttcctctcaccatcatttccagtaccctgtcccaagtgtttgaatatagacattgatatgccctgatttttgctctacttcagaaaggatcggggatgtaatttagccctctaggagcttggaactaatttgtttgtctatttcttgtttgcttccaagttgcttattatgtgttacaggtagcaactacagctgaaggccatggtgaattgctggtgatgtaaatactcccagccctgactgatcggccttgtttaaattttaaggattagtaaacaggttgctgctggagctacttctgcttaggctattaggagaataaatgttgaaggaaatggagtccaattcggggcttactg

SEQ ID NO: 53444 - DNA, 580 bp, Homo sapiens
  misc_feature 28: n = A,T,C or G
cgggctcccccctcgaaagtcttctagnattaattaacgcggggcttaaacaaaagaaactggagaaatggaaaactctctgcatttcattcacaacccattgctcttcataatataatattgtttgctcttttttcatgggtattgtttcccaataattctgtaagctccttcaggcatactgtcttgaaggagcttttaatggagccacagtcaaagcaaatcagaaaccacttactgaattgaaataattgaattggatatgcttacataaatgataagatcccaaatcaagtacctagtaagagtaggatttgaagagaatcacgaggtctgtagatgtgttctagaatattaggttgaaagaagaaaaagaaacagtattacaatttatcttatgaattaaaatattattggtctagaaaaacgttaagcactgtaggaaaattaaaaagccaatgaaaatagtgacttatccataaaccacaccaatgatatttttattaaaattcacattgttgacagcaatgttgcatcaaatagcagtttttcctgaagtattcatatatggtatatttgt

SEQ ID NO: 53445 - DNA, 244 bp, Homo sapiens
cgggcccccccctcggggtacttctagaattaattaacgcgggggaggaggggtggaatacttgctacaaccctgaaaattggtgctttctgatcataactctcctgaaataaatcatctgttatacatgcttctgtgagacacactctgtgttacatgctgagaatagatcccagtccacatggatcttgcttctaccgaagtggctccccaattcaccatatgctgagtaaaaattacaccc

SEQ ID NO: 53446 - DNA, 478 bp, Homo sapiens
taattaacgcgggctccccctcaggagctgtgacctaaggtagaggacagccagaaaaaaaaagcagaaagaactacaccatcctcctacattcaacgcccagcatcccagctaccccattattttcgaggactggtcctcccagtgatttgtccaggtcatcaaggtatcaactttttaaaaaattctagaagacagcaatctctctaaaatgtattacctgctctacatttttacacaatgcaaatgatcacaggacaatgcaatgaacacagctaaaccatttctcattagcctaaggacagtgtatgagtagccactcttggaacagcaccctgtgtctgctttttacatttatctgcttcttctgccaggctgtcagctacacttcctcaactaatatgttgcttctaatctgctatgaggttgagaacccagaaaattagaaatctgctctcatttcaaaaaaaaaaaaaaa

SEQ ID NO: 53447 - DNA, 605 bp, Homo sapiens
ccgggccccccctcgaaagtcttctagaattaattaacgcgggcagcctagtcaccatacatagagaattttgaagcaccagttggcatcatactcaattcaaacaaaatctatatcccatacaattacaatttattctgaaatgatgttttctgttaggtctgtttgtttagtggattcaggtgactaggctttcttgtttgattgcactttttttaaatgattttttttaaggcagagaactcggtgacaatttattcttttttccttaccaccatattgatttttttcactttttactctctttggctctgccagttcagcaccaaaggtttatttgatggtgaattttgatgcatcttgcaataacgttctctgtggtgccctcattcatgcattttcctattattacaaccttctagttaaatcacaccatgcatagaaatttattgatgttaaaaacgataaggtgaaattcagatacagtgtttgataaaatggcatttgcataataatatataaaagttacctgccaggccagatgcagtggctcatacctgtaaccccagcactttaggaggctgaggcagaaagatcacttaaag

SEQ ID NO: 53448 - DNA, 593 bp, Homo sapiens
  misc_feature 27: n = A,T,C or G
cgggccccccctcggaagtcttctagnattaattaacgcgggtaccatagtttcttacctgtccatcttctgaatggcatattgattgcttccaagttttggaaatcatgaacagagttgctggaaacatctattttatataaacttgtcaactcatttgagtaaatacaaagtagcatgactgctggttcatttgctatgagtacttttaattttgtaagaaaccgccaaactgttttccaattcccgccatcaatcaatgagagtttctgttgttccgcatcctcaccacatttggtactgacagtgtttctgattttttaatagctgtgtagttgtatctgtgttgtgtaaaattacaatatcctaatgaaatataaaggagatcaccttttcataggcctatttgtcacttgtacttctttgctaaagtttctattcacatgttttccccgttttctaatcaggttgttagttttcccatttgtcaagtttttcttatgtgttattcccctttttacatcatcatgtactaaaaagatggagtgcctgaatggcttccaagaaaaaacgttgcatatataaatgcgatc

SEQ ID NO: 53449 - DNA, 606 bp, Homo sapiens
cgggccccccctcgagaagtcttctagaattaattaacgcgggtggatcacaaggtcaggagttcaagaccagcctggccaagatggtgaaactccgtgtctactaaaaatacaaaaaaattagccaggcctggtggtgagcgcctgtaattcccactactcaggaggatgaggcagagaattgcttgaatccgcaaggcagaggttgcagtgagctaagatctgcgctccagcctgggcgacagagcaactctctgtctcaaaaaaaaaaaaagaaaaaaagaaaagaaaaagaaaaaaatcaaatggcttcttctataaatattttttcaaaagtcaaagaatatttaaatattttaagttatattcatgtttagatctgaagatgcaatatgaacttgctttggacacaaggtgtcttcaaaaaatgtactctgtaacattatgttgtaagcctcaaatatacacaataaaatttatttttcaaaaatgtataccataaaattcttaacatcattaactcctctaagtcaattcattgaaaatattgagaagttaaatgttaaatgcagaaagctgaaataaattaacaccagcaatcttttg

SEQ ID NO: 53450 - DNA, 432 bp, Homo sapiens
ccgggccccccctcgaaagtcttctagaattaattaacgcggggccgggcacagagtaagtgctcaatatgggaactattaatattcccaccatcatcgttattgctatctatggctgtcaatctgctttcgccatctggtcactatgggtataggaaagaaattcagttttctgccccatcttcacaagtagatgcaggaggagctgctcacagtcaccacacaaatccaccgagctcatacatccttattttcaaagtcaatcccctcacccacgtaggcactagcatctcttaaattagggtccaggcacagtggctcacacttgtaatcccagcactttgggaggccaaagtggaaggactgagggcccagaggttcaagaccagtctgggcaacacaacaagaccatatacttaaaaaaaaaaaaaa

SEQ ID NO: 53451 - DNA, 443 bp, Homo sapiens
  misc_feature 41: n = A,T,C or G
aagactggggtaccgggcccccccctcggggtacttctagnattaattaacgcggggactccacctcaaaaaaaaaaaaaaaataaataaataaataataacaataataataataataaaacacaaaaagctacagttcattaatatctttttttaagtagatataagcagtttccaatttaactcatgcaagagtgcttctagtaacttttttgctgctagtcttcagtagaattaatcttatactctattgctgcctggcttagactttgacttaccccaaccccgcatctgtgtcccttctttttaacttgtaccattgctgacccacagctacaagaaaatggttggaagaagtgaaagagaggttaataattccacaccaacccctgcctcttcctcagctccaccttaattactggtcaggtcctatcttgtcccca

SEQ ID NO: 53452 - DNA, 539 bp, Homo sapiens
cccccctcggaagtcttctagaattaattaacgcgggactccagcatactcttgacatttagtctctactttttaaaatattgacatgcttatattttttttctgattttggatttatattcaatttccaattatgtttgcaagaatttataagtgctatactcagccaagtgttagctacttccttaatctaactcttctaaactctttgatccctgaatagccataaatagctctttatatcttccaacataaatggtaaacgtacttagagttggggttttctatatatgtttgggttttcagcatcagagtggaaagagctataaaggaaagctataaggcgtatccttttgtagctatgcttttcagcttttttttttcttgccctaatccccttctgggatatgacccattccaaaaagtaacaatagctcactgcagtggatattctgaactgaagttgagatgaggggtgtaagtggtttgaaagagtcttcctcactctgaccccagcttctgatactgaggacctatct

SEQ ID NO: 53453 - DNA, 609 bp, Homo sapiens
  misc_feature 28: n = A,T,C or G
cggggccccccctcggggtacttctagnattaattaacgcgggtgtgcctcaaccagtatcttcttcaaacttggatttattaacaagtttcatgcctctcagtggtttttccttggaatttcagggaataggaattttcatattgacaaccgaggtccaatacctctctctaccttagatgattttactttaccaatctatcaaattaattttgtcttttcttaattcttaaattaagttgagatctttcagcaaaacaagaactgttttttttcaggaacaattagtgtaaagaattggataaaatatattcactgtattcaaaaatattatttgggtgaggctaaggggatgtttgccaacatagaaagcataagcattggaaagaaaatataatctggtttggttcccctatatcaaaaattaaatgacaatttttaaataacatcttaatataaaatacttacctaaagatgtggaagtgttttttctgcccactaaggcactgggtacattggatggtctccagaagctctaaaagaatagggcagccttcctgagtttgtcacttattcccaggaaactagttgtacaatcagattcttggc

SEQ ID NO: 53454 - DNA, 194 bp, Homo sapiens
gccccccctcggaagtcttctagaattaattaacgcggggtggacactcccctgtacacccctgcactatggcattgcaccacatttatttcttcttcaactcactactctatcaacgcaccaaatataccatatatggatagaatgggcacgaactactggtccttcttagtcttcctagaaactagaaaaca

SEQ ID NO: 53455 - DNA, 591 bp, Homo sapiens
  misc_feature 38: n = A,T,C or G
cccccctcggggtacttctagaattaattaacgcgggnaaagggaagaattaaaatctaccacaccttccaagatgaagatgggaacttaccagatctcatttctttaaaccaaaaagttggataggaagaaagtaaaaactgatagaacacaaaggagtatgtttttgctacttacagttggaaggagtcttgaaagcctaacttccatctatgtttgagtattctccgtattgttctggccatcttacagatgcagaagacgacttcttacagcctcaaaaagtgtggcccgtttcattgctgctcagcttttttaataagaaatttctgtctcgccaggcgcaatggcgcaggcctgtaaccccaatgctttgggaagccgaggcaggcagactgcctgagctcaggagttcaagaccagcccgggcaacgtggcaaaaccctgtctccacaaaaaccacagaaatcagccaggcgtggtggcgcacgcccgcagtcccagcaactcaggaggctgggtgggaggatcgcttgagcccaggaacttgaggctccactgagctgtgattggaccactgcactccagcct

SEQ ID NO: 53456 - DNA, 578 bp, Homo sapiens
  misc_feature 24, 538: n = A,T,C or G
gccccccctcgaaatacttctagnattaattaacgcgggtgcgcacaaagatgactgtggaatttttgaaggaggcaattattgtcattgtttaatatataactggaggcttaatttccaagtagctgttgtagcattaaatgtccctggctaggtgccagtagctatttccattgtacattgaatctattgcttctttttaaaatacaatggttcgtaggttgatttatctttattttaaagaaagggctaatatcacaaggtaagtttttgagcagatactatattacgaagtgttctgactcggatactggagaggaagagtggccctggatacctcctctgtgaaggtcaggttaagatctctttatgctcacagtataaagattaggtttggctgagagttacaggggagaggaaataacaattgtgtaactcaaattaaagtttgttcactcacattaagattccctagaagtagtcattccaaggctgtttagtgctccagcatagcaaggcctcgggctcctcctatgtntactttgctgtgcaaggttctttttttttttttttttaaa

SEQ ID NO: 53457 - DNA, 619 bp, Homo sapiens
  misc_feature 559: n = A,T,C or G
ccgggccccccctcggaagtcttctagaattaattaacgcgggggattaactaaaattgtggcaaccttttcagccttgagattccattaaattgtagtgtgtttgcttgtttgtttttgtattgataatttttgtgaaagccttcaggtcagagtcacttttctagatcagaatgtcaaaattaactgagagagaataacttaaaatattcagtggaattagacagcattgtagttttctttttcactttaaatgaagtttgcagtaacatttgagttcccaagaattgtggtttgctaaaaatttgaacagaggaaaaatttaaaagtaaacagaaaatgaactttgaaattaatttaatggtgaatttatatataccaaataatgaaaatgacacaggaatgttatttcatgtaatcatattttaatttgaaaaatcatgagtccatagaaacatcatagaactttgtacataaaatgttaaaatcttgagactttaaaattcagaacccttttaccatttcataatttctcatgacatatacttctcttaaactntatcatttcctccttagtaattaatgatataagtagttgcaagcaatgccaaatggatgt

SEQ ID NO: 53458 - DNA, 491 bp, Homo sapiens
ccgggccccccctcggggtacttctagaattaattaacgcggggggtcagagctgagcaccacacttggcctaggttctcctgtttctctttcttcctttgcagccaggctgttgttaaacctggagtataagtcacctttttataaagttaacctaagacttttcagtgctgaagatggagctatagggttaagtaactggaaaggtaacatatttccaaagccatttcagaaaatcagtcttggcgttaagttagagtgaactattccattctctctctgctatacccattgataccccatcctaacccagacacctagctgattttgttttcctgatgtgaaaaatactctaattcaaaaatgaaccctccatcaagtttcaaagacaacacagaagaaagtagacaagttttatctatgatttatacctttctaaatccaaattagatttgatctggcttcatcaaaaccaataaaaaaaaaaaaaa

SEQ ID NO: 53459 - DNA, 528 bp, Homo sapiens
ccgggccccccctcgaaagtcttctagaattaattaacgcggggaccatgaagcatagtttgaaaaccacaaatttggttcaaacaatttttaggaaataactatcttttctttttctgatcctctattaggtaagagacaatttaactttttggggataccgtatcttgtgggttttggtatatgtgaatcatttattcttctaaagctaaagctcctgaaggaaaaggactttgtttttatttttgttttggtttgtttcctccaggagcctaaaattccgtattgtacatagacagtccaggccatctagttactctatgtgtacatcagaaaacttgaaagaggagtccaaatatcagtctcagtcctttcttctacccttccatgcttctactactacctctacatgatgccgttgatagcaaaagcaatccaatgtatatcaaaatgtcatgtttaccctacatatatacaatttttataaagcaacctagttaattcccttggcttctagttttggaagct

SEQ ID NO: 53460 - DNA, 492 bp, Homo sapiens
  misc_feature 471: n = A,T,C or G
ccgggccccccctcggaagtcttctagaattaattaacgcggggcgaaaatgctgaggcaatttatcaattcccttagttccttccacccatggtcctcagagtatctctagtttccagaactttccgaggccagatcattcgcttttcctttgatagtgtcagtcacccaatatcctttcaataaagtcccattttgtttaaattcaccagggctgagtgcagtggttcatgcctgtaatcccagcattttgggaggctgaggcaggcagattgcttgaggtcaggagttcgaaatcagcctccctaacatggcaaaaccccatctctactaaaaatacaaaaatttgccaggcgtggtggcgtgcacatataataacagctactcgcgaggctgaggcaggagaattgcttgaaatctgggagatggagtttgcatgagctgagatcacaccactgtactctagcctgngcaacagagtgaggttccatc

SEQ ID NO: 53461 - DNA, 440 bp, Homo sapiens
cgggcccccccctcgaggtacttctagaattaattaacgcggtccataagttactttgccaatttttctaaagttattatggataaaatcagatagagagtaattagaaactgatccagaggtttgtgggaacttgcctaaatctattgaataatttttcaattcagagtggcaaaagccattttgatgttgggaaggccatctcatattttattacttctcttcattttactgaaaagatagttttgtttttgtttttgtttttctttgtttgttttttgaggaaatacgtagagtctttctttggacattttcccaaagcacaaggatctttcttgcagttttgctctccattaaattataaatatatcattgaatgatattttagtaccatagcctaaacctcaattacttagatgcccccccaaaaaaaaaaaaaa

SEQ ID NO: 53462 - DNA, 188 bp, Homo sapiens
ccgggccccccctcggaagtcttctagaattaattaacgcggggagtcgttatctgccacaatcaaaataactttaggataaaatgtttcctaaaaagtctgaattagaagcatcattgggtgggaagatagccgagaacactctgggcaacatagtgagacccctgtctctacaaaaaaaaaaaaaa

SEQ ID NO: 53463 - DNA, 606 bp, Homo sapiens
  misc_feature 28, 39: n = A,T,C or G
cggggccccccctcggaagtcttctagnattaattaacngcgggtcacgaaggaaaaaaaaaaacaaagcaactgcaacatggacaaaagagacataattttaaaagaccctcataggaaattagattagaaggtaatgacaaaagtgctcttgcttctttgatgaaatcagtgaaaaaaagacaggtgccagcagtattgatgtaccaggataaaggaaattttgacaagcactctcagctaagaaaaaaggagagaaacaaacaaaacaggttgctaacaaaaagcacaaatcagtctgactcagacttcttcactatcaaaagccagaatgaagaggagtgacagctcatgagtttgaagagaagaaggttgtgacccaaaatctttacacatgtcccagctatttctcatgcatgtgacaacagaaatatattcacagctctccaacagcttagagacaggctacccatggatccttactggaaaaaaaaattacatgaagagatgactatagaataaattcaaatttaaaaatatcatgactagacacataacaacataaacataccaatatcctttgtctttatcatcagggtaacaatg

SEQ ID NO: 53464 - DNA, 252 bp, Homo sapiens
attaattaacgcggggggggggggacaaccaagatcctcatgttgattttttgttaagttccttacacgctcatccccacatcataggaatcattgtttcattctcttcctcactttgttcttgcaaatcaaatcccagtcttttggccattgagtccaaatatttgctagagataagcccaccaaggcctaatgttgttttgacgtgaattcatacctctttcatccaaaaaccgaaaaaaaaaaaaaaaa

SEQ ID NO: 53465 - DNA, 497 bp, Homo sapiens
  misc_feature 497: n = A,T,C or G
ccgggccccccctcgaaagtcttctagaattaattaacgcgggttccactctgagcttacttctcttttcgtctgcatttatatttataagaggcatcagagtgctgggaagaactgaagcatggctgaaaagttgaacagatactgtctccatatcatggtttaatacaccaataaaccgaccattgaattcagtcaccattcaaaagaagaagcttgaggaagtgagcacatcgaacctgccctgattttagcataacacacacttaggagactccagaaagatggcagaggaactgcagcctcaggaagccaaccaacccctgctcatgaaatttaactaccttcaaagatgatcaagcgttggccaggcaagctggctcacgcctgtaatcccagcactttggaagggccaggtgggtgaatctcaaggtcaggagttcaagaccaggctggccaatatggtgaaaccccgtctctactaaaaaaaaaaaaan

SEQ ID NO: 53466 - DNA, 593 bp, Homo sapiens
ccgggcccccccctcgaggtacttctagaattaattaacgcgggggagttccagtttagcctcatagcagtttagtctaaacaaattttttaagttattttttaataggcttagcttgaaaacccaaaaactgtcagctggcttacagtttaaatattaaaccatgttatgtttattactgaatctattattcaaaaattatgtactatcctagcaccaaaaatcaaggaaactgggcacttctcatatgaatgaaactaaataaactgaagtcaagagaccacaaacaagaatatagttaactccaagaaaataaaaatttctgcctttaagacagttattggccgggcacagtgctcacgcctataatcccagcactttgggaggccaaggcggtcggatcacctgaggtagggagttcaagaccagcctgaccagcatggtgaaaccctgtgtctactaaaaatacaaaaagtagccaggcgtggcggcgtgcacctgtaatctcagctactcgggaggctaaggcaggagaattgcttgaacccgggaggcggaggttgcagtgagccgagatggcgctactgcactcc

SEQ ID NO: 53467 - DNA, 590 bp, Homo sapiens
  misc_feature 28: n = A,T,C or G
cgggcccccccctcggggatcttctagnattaattaacgcggggcatatgagaccaggtagatctgggtttaaatcctgtgtcctgtgcttcttataaggtgtgtgacctgggtagaatttcttttaaattttaggcctcagtttctttcataagtaaaatagggttaataccacctacctcacaggacaagtttaaggacagaactgaataatgcattaaaggtcaggcacggtggctcatgcctgtaatcccagcactttgggaggctgaggtcggtggatcacttgatgccaggagttcgaaaccagcctggccaacatggtgagaccccatctccactgaaaataaaaaaaattagccaagcatggtggtacacacctccaattccagctgctgaaaaggctgaggcacaagaatcacttgaacccgggaggcagaggttgcagtaagccgagatcgtgccattccactccagcctgggcgacagagggagactctgaaaacaaaaaacaaaaaacaaaaaccaacctgtgcaatatagtgagacctcatctctacaaaaaccttaaaagaaattcgctgggggcc

SEQ ID NO: 53468 - DNA, 594 bp, Homo sapiens
cggggccccccctcgaaagtcttctagaattaattaacgcggggggtgcagcacatgctggtcgcgttcctctccaggaggagctgctagaaagcagagctaagcccacagttgctgttgctggtcagagctggagtggcgtcacgggcacttccagggtcttagaacatggccagatgggacaaagccaggaggccagatgggggacatgctgagggaccgagtcttcgaggggagggcctttgtcctgtccaccattgcacccagcacagagctcatggatagacaggaaaacaaactgctctcaagtaccatctgtagtactacaataccgccatgtcaccggcctggtgtcgaaaggccattttcggctggaatgacagccactcccacccccaccctggggtaatctcagtttccctgctccttgcactgctctcggtcctgtggctctctctgccacccgcacccccaccagcacctctgccgccttctctccctcagcttttccctggggaggagaggaccaaagtcactggggagctctcagaccgacatcctgacctctggagatggagcagaatccccgggcct

SEQ ID NO: 53469 - DNA, 378 bp, Homo sapiens
ccgggccccccctcggaagtcttctagaattaattaacgcgggggtggtgtgtatgtgtgtgccccagtttgaccagctctggtttctggttacctgctgccaaaaaaacaaatatttcccaaagtggtaggtgcaggaaacagacctcacttctttaaagcccaaagtaggcaagccatttctaccttcctccctttttctcacctaaccatttgaggataacagtgattaaatgcctgctttctggccaggcacagtggctcacgcctgtaatcccaagtttgggaggtcgaggcagaaggatcatttgaggataggagtttgagaccagcctgggcaatacagtgagatccccatctctacaaaaaaaaaaaaaa

SEQ ID NO: 53470 - DNA, 580 bp, Homo sapiens
  misc_feature 28: n = A,T,C or G
cgggcccccccctcggaagtcttctagnaattaattaacgcggggggggtaggaggcaggactgcccagaacaattagggcacccaagaggcaggactgcatggtggctggtaaaattaggagcacctggaaagacaagaagtgtccagcagataccccacacatcttgtctgggggactgggtgggtggcatacccagggagaggtgtagagttccctaagatggctgtggaaactgattataaatggtacagtcctactcaaacagtatttcctatggcattttgctttaaagatttcctttgcacctgtcattcagcactttgggtggctgaggcgggaggatcagttgactccaggagttcacgaccagcctgagcaacatagcaagacctaatctctacaaaaagtcaaaaaaattaactgggcatggtgatgcatgcctgtagtcccagctccttgggaggctgaggtgggaggattgcttgagcctgggagattgatgctgtagtgagtttgataacaccactgcactcagcctgtgtgacagagaccctgtctcatgaacaaggaaaaaaaa

SEQ ID NO: 53471 - DNA, 365 bp, Homo sapiens
ccgggccccccctcggaagtcttctagaataataacgcagggagcaaacacaggccatctgttcatgtagcctaagcttttaactgctacgccaactccactgcctcagggaacaactgggcatggcacctacatttatgtgaacccaaccctccaaattatgaagtctctgtcatgctaattatctgcatgagacatgagacatcaggcacttaaaaactcaccattacagggccgggtgcggtggctcacatctgtaatcccagcactttgggaggccgaagtgggcggatcatgaggtcaggagatcgagaccatcctggctgacacagtgaaaccccgtctctaccaaaaaaaaaaaaaaa

SEQ ID NO: 53472 - DNA, 533 bp, Homo sapiens
ccgggccccccctcggaagtcttctagaattaattaacgcgggggtcgggaatgaagctcctttccagcccttctcttcctaggtgtcaggatcctccgggacagcaattctcaaatccgtactgtgcacacgaatcacagattagcaggggaccttgttaagatgtagaggactgaggcagggccccagattctgcatttctaactagtcataggtagtagagctgaagagcacactttcagttggagcaccgggcgcagtgactcatggctgtaatcccagcaccttgggaggccaaaatgggtgggttgtttaagcccaggagtttgagacctgcctgcgcaacatctagaaaccctgtctctacaaaaaaatacaggcatagcggcacatgcctgtagtcccagctactcagaaggctgaggtaggagatcacctgagccggcaaaagttggaggctgcagtaagctgtgattacaccattgcactccagcctgggtgacaggcaaaaaaaaaaaaaaaaaaaaaaaaa

SEQ ID NO: 53473 - DNA, 537 bp, Homo sapiens
attaattaacgcgggctggcacagttttctcaggaatcggtgaatgtagccactgagttgagcacttttcccagaggaaagctcccaaaactggctccactacacacccctctgtgaattccaggattccaggcatccccatcccactgggagaaggtagtctgggaccagtgaagccttccaaacaggcccacaaacttaatttgcatgctcccattcttttatttatttattattattattatttttgagatggagttttgctcttattgcccaggctggagtgcaatggcacaatcttggctcactgcaacttctgcccctggattcaagtgattctcctgcttcagcctcccgagtagcttggattacaggcatgtgccaccatgcctggctaatttttgtatttttagtagagacagagtttgtccatgttagtcaaggtggtctcgaactcccgacctcatgtgatccacctgcctcgacctcccatagtgctgggattacagacatgagccactgcgcctggcctgttct

SEQ ID NO: 53474 - DNA, 513 bp, Homo sapiens
  misc_feature 38: n = A,T,C or G
gactgggtaccgcggccccccctcggagtacttctagnattaattaacgcgggattgttggtcaggttagtatttcgattaatagtatcctgagtcttaactcttcatttcacactagttttgacactttagttgccctgtctttcatacttcttgtttttgttttgagacagagtctggccctgccgctcaggctggattgcagtggcacgatcacggcacactgcagcctctacctcctgggcccaagcagtgctctcgactcatgcatgcccaactcagtagctgggactacaagtctcactatattgctcgggttggtcttgaacccctgagcttaaatgatccttctgccatggtccgcaaagtgttggtattacaggagtgagccaccatgcccaacctccttcatgcttcatagcagtcatctgttagttgtaatatctttttgcactcttgaagtaatgaaaacagataaatgattgtatcaagactgtagtccggaaataaagc

SEQ ID NO: 53475 - DNA, 500 bp, Homo sapiens
  misc_feature 27: n = A,T,C or G
cgggccccccctcgaaagtcttctagnattaattaacgcgggcagtccagaacttccaattcagaaataatagaaggtaggccaaggaactggcattttcaatcaattcccaggggatttttatatacaatgaagcatgaaaactcctgtttcagaaatgataaggtagaaacagtataaaagggaagtgatcagtctgccaagagagacttccctacatcatttatgttacaatcattattaatagcacagttcttttgtataacattttgactatgaacattaatcagaaaagtataaagttgtcattaaacattcaaaaaacagagtaattttattacatgtagggctcaacattttttttcccagtaaaatttttagcgattaaaattcataaaattcacaaaattcttactacagaaaccatcctaggatctcatctatgttgttaacaaaatagtcttgaaagtatagatagttcttggaaaaaaaaaaaaaaa

SEQ ID NO: 53476 - DNA, 330 bp, Homo sapiens
ccgggccccccctcggaagtcttctagaattaattaacgcgggacagcagttactaatattttctgcttattaaaatctgagatcatgctgttaagccataattctataaaagcaagtccaaagggaccagtatatactatgtattttctgatgatgtgacttgataaataggttgaatctgaaggaatgagtaattagcatatcctttgtttagactgtttatcttggcttgtagggcatttgaccagttgtgagagagagaagacatgtcagtagtaaatacctgaatggcagatattccatgtagctgaaagaaaaaaaaaaaaaaa

SEQ ID NO: 53477 - DNA, 520 bp, Homo sapiens
  misc_feature 9: n = A,T,C or G
ccccctcgngggtacttctagaattaattaacgcgggtttcaaaaacacttgttggccagccatctatatagaaagtagcaaatgattctatttatttggtagctgccacgaataactgctttagaaagggatttgtaaaagcacctgtaaccacagtgagttacctgcgcactcaagacctacagcattctgcaagccccaacgcgagcgcttaaaccatcagccagctgggcagagtggctcatgcctataatcccagcactttgggaggccaacggaagtggatcgcttgagcccaggagtttaagaccaacttgggcaacacagtgagaccttgtctctataacaaataataaaaaaaaaaaaaaaggccggcacggaagctcacacctgtaatcctatcactttgggaggtcgaggctggtggattacctgagatcgggagttcaagaccagcctggccaatgtggtgaaaccctgtctctactaaaaatacaaaaaattagttgggtgcagtgg

SEQ ID NO: 53478 - DNA, 359 bp, Homo sapiens
aattaacgcgggggatatattttcagttagataggcatagcatggtgactataattaataataatgtattgtacatttcaaaatagtttaaaaagaggattttaaatgttttcaccacaaagaaatgatatatatttgaggtgacgaatatgctagtctaatttgatcatgccacaatgtatatatgtactgaaacattataccataccccgtaaatatatataattatttatcaattataaaggaaagaaaagatttcaaagaactggatatcagtgtgggaagttgagacatattttgagaaaataaaggctgtttttatctttgctgaaaagagcttggcaaaaaaaaaaaaaaaa

SEQ ID NO: 53479 - DNA, 595 bp, Homo sapiens
cgggcccccccttcgaaatacttctagaattaattaacgcgggattactttgaattttatcttcagattttaacctggcaagggaaatttaacatttgggtattatttattcctgtgaatttgacactagaaagtttattcaaattttatcatcttcatgtttatcatctttatgttggcattttattaccagagtatctcaatgctattatttattctcattgtagaattctcattgtagaatcccttatacgctatgttggaccacatgactgggcataagttggaatgagaaatagaataaaatgataacttttttatttgtcaatggagtttccttgacattgaaaacgtacagttctgacccattttataggctaccagggacaaaatataaagaacccaccagtggtaggaggaggatacacaaaggaacctcaattggtacttttagagtagatttaggaaagtgaatcaggaccatcctgaaagatggcttatctcctcccttaagggcaacggccccatgcctgcttgaccatagtttgatgacttaagccaaacgtgttaagaaagcatgagtttagagatcatt

SEQ ID NO: 53480 - DNA, 520 bp, Homo sapiens
ccgggccccccctcgaaagtcttctagaattaattaacgcggggtatgcatatatatcaaattttgtttacccatttatcagttgatggacatctaggttctttccacattttgcattttggttgttgtgaataagctgcatcaaacatttgtgtataggtttttttatggacatatgtgtttatttatcttgggtatgccttggagcgggattgctgggtcacatggtagtgttaagggtttgagaagcaagctccagtgttcaaactctgtaaagtgcagtttggtactatctgtaaaaattacaaatatacttcttcgacccagcaattctacttcttggattttaaccagtaggtatacttgcacacttacaaaatgttgaatatataagattactcatttcagcattgaaaattacctaaatatcctttaataagggatagggttaggataaatttaacccacactgtgaagtactatgcatttgtaaaaactaaacacataaaaaaaaaaaaaa

SEQ ID NO: 53481 - DNA, 588 bp, Homo sapiens
ccccctcgaaagtcttctagaattaattaacgcgggggcacatagtaggcacttaatacataatactgcttgtatatgtagaatttgggtgctatatgcataaatgaaaaggaaattatgtggatttgcttagggagtgagcctgtagtgaaagttttgaatggctgttcccccaccatgattattcctacccatcccactacacctgccaagctattgtcccaatctccaaatgcggaaaggagcatttaaaggaaggtttaggagagattataaaggataaatacatgacggatgtgatgagatttttcttgtctttctaaaacatcagactccagttctgaggggtctgttcatcattaagctttctttaagacaactccactttgcagcttatgtttgtgtgtgtggtgtgttggttttaaaatatttctgcaaatgtctattttttattttttgaggcagggttttgctctgtcacacaggctggaatgcagtgatatgattatagctcactgcagcctcaaattcctggactcaagtgatcctcctgtatcagcctcccatgtagtttggactagagggatg

SEQ ID NO: 53482 - DNA, 548 bp, Homo sapiens
ccgggccccccctcgaaagtcttctagaattaattaacgcgggggtagtgtttcattgcacaatcaaacaatgctttcttcacttaagtatcacgttttctaatttgcttttgaactttcttgtgcttaaaaagggtcataaaagactgttaactgtcttaaaatcttgatttttttaactggttgtttcctgtcatttgaataattgcattgaaatgaacaattaataagaattcagtcttttgagaatcctaacactttttccatctcttgagggataatacaagcctctttctattattttgtgtcttgtaacatttttattttcagtaagacttatcatattatactatcaaaaaaaaatctcagtccacattttgaaaaactcatttcctgtttttaaaaagttaagtgaaaatatatatgccttagctaattttaggcgttggctttttctccatattatcccattacttatttatccaattccactttcaactctcaccccagttttaaaaagagcagtttttcagaaaaaaaaaaaaaaa

SEQ ID NO: 53483 - DNA, 626 bp, Homo sapiens
  misc_feature 28, 613: n = A,T,C or G
cgggcccccccctcgaaatacttctagnattaattaacgcgggggatcacctgggagcttgttagcaatgtcaattatgaagtccacctgacacctataaaaatcaaaaccaccagagtaggatctgttaatctgtgctttaataaggcttccaactaattgtgataacatactcaaacttgagagccactaatctcaataatctctattatccctggtcaagcagtcagggtgcttaagtcagctataagcaatttttgtccaggttttgtaaatcttttgaaaggtattaaaatttcaataaatatttttagtattttggtggtgttatttctatattgataagtgagtgccaattttgaaatcaccttcttttaagaatttggggtagaccaacatattagaaagcattggtaaactgtgggagaatgcttcctttaccagaacaacaaattaaaggatatataattgtggaaagcttattcattcaaccattatgtatctaacatcatagactctggctttataaatctaagattggtagactgaattctggtacaagaaagttacttctttctaacccataatctaaatgaattttagaaaaaagtanaagagtaccaatt

SEQ ID NO: 53484 - DNA, 524 bp, Homo sapiens
cgggccccccctcgaaagtcttctagaattaattaacgcggggatctaaaaaaaaagttgacttcaaaatatgaaaagtggcaaataataactatgtaattaatgtctacaaaacataccattattgtcatttttaaactcaatttttagtcatgtatattttatgtgatgtggatgtattttaatgtgtttaatattatatggggttggaagtcttcaaaccaagtctttaaaatggccttaatctttaaattttttttgagacagggtcttactcttttaccgggactggagtgcagtggtgtgaccatggctctgcatccttgaactcctgagctcaagtaatcctcctgcctcagccttccaagtagctgggactacaggcacgcaccaccatgcctagctaatttattttttcatttttttgtagagacagggtgtctttcttgcccaggcttggcctcccaaagtgctgagactaaaggtgtaaggcatggcacctgtctctacaaaaaaaaaaaaaa

SEQ ID NO: 53485 - DNA, 455 bp, Homo sapiens
ccgggcccccccttcgaggtacttctaggaattaattaacgcgggggagggaaaaactgagctttgatggggaaatgacattaaatcctggaaattggtcaaagagattgagaacagagagagctgaacagaattatgactttgaaattgtagtgttaggtgactacaagatggaacacagaaggtaagctaaaattttcacaataaatggaatttaacggatgaagaaagtaaggcagagtttaagcctcattgattttatgattgaatgattttatgacctcattgattgaatggaggtcaatgtatacggaaagaaagggctgttcctttctcgaacagggtattggtctttggaccacccatttgctgcagatgacatctgccaggctcttagcccatttatgaagattataatgcatggtgcatgttgcccctgcagggtgatctggtag

SEQ ID NO: 53486 - DNA, 351 bp, Homo sapiens
  misc_feature 23: n = A,T,C or G
ccccccctcggggtacttctagnaattaattaacgcgggggggactgctcatccaaccctgatgtttattggccagtacaggattaagctcacactgtcttaacataagcccacaaaacacctccatatacctccgtgcatacctcggtcagtcggaaaatgaacatgtctttgatcactcagagaaaacccagggacgagagtataacttttatcgcccgtagctaggccttgtagggccaccagtctttaaagcgggataactcaccctccaccacccaagaatcctaaatagtgcggccttcaccgcaggcgagctgcagttcaacctaacttgaggcgtataaaaca

SEQ ID NO: 53487 - DNA, 367 bp, Homo sapiens
ggccccccctcgggggtacttctagaattaattaacgcggggatatcagcacataacacgctgaccaccaacctcctgttgagaaaaagccagaaggtgttgcctgatctcgatgctcccaccctgcaatgatgtacatagcaagtgagacttgctctctggccattacctatatggcatactctacttcatcgtgtacctcagaggatacacccatactaccgttgcctgcatactctgagctaacttctgcacagaggtcctttgtcttcattgaatttatagggacataaaacctagtatcatgcataagggactgatcaggacatactaattccacattaagaaggcatttaactgtttgaag

SEQ ID NO: 53488 - DNA, 425 bp, Homo sapiens
cccccctcgagagtcttctagaattaattaacgcgggtggggtaaaatcctaactctaccacttaccgtttgccagctgtatgtccttgggcaaactatctctttgactctcattttcttcataagtaaacaaggccaatacctacactgaaagacctggttgtgaatatcaaatgttggtgtagtgaaagcccatcatacaacatacggtgagtgatggccatatcattgtcacactttaacttaaggacaaaaataaagtaatacttggtagttctatcagtatttccttctaccttgtcctttttcaaattcctgtctctttttagcaaaattaagccattgcttatttccagagaaaaggcatttaaaaccaacaccttacaggtttggtggcatccaattttctccaaaaaaaaaaaaaa

SEQ ID NO: 53489 - DNA, 613 bp, Homo sapiens
cggggccccccctcggggtacttctagaattaattaacgcgggtccgggtcagcttcccaaatttgcatttctaacaaagtctcaggtcgtcctgggatctcacactaagaacctctgttctagtctgaaggctgaactaggaagctgtcaataccgctaacacacacaaaaaactcatcatcattcccccaggtgttcatttgtcctccatctctgaataagtcttccattttacttgggtactatgctaaggaactggcttactttcaacttcttttttggggggtcttattccaatgttagggaatctcttttgaaatccacaacattctccaacactgaaagcaaggaggtagttttaattacattttatagatacatgaaaagtttacaagggtaaagacttccagatatttttggaacaactctttttctacttgataattcctaaaagctattaacacatgctgttataaaagagaagatttagagcctctgtttactgctgccttgtcacttactgccagggttctcccacacacacaaaaaaaacaactaaaaattaaactaagagtgaacccctgtgtacacaatataacgccacaaaatcat

SEQ ID NO: 53490 - DNA, 588 bp, Homo sapiens
cgggccccccctcggaagtcttctagaattaattaacacgggggccttttcctttgactccgcattttagtcaaaactgattgttataataggggtttgactgcaaatattttacattaaacaagccatttttatataaaagtattacattcttatactcatagttgcatatgttaaaaggatgaggatattgagtttgttttttattaaaaggaattttgaggtaaaaattagaaaataacatctaaaatacttaatttatttggtttatttttcattataaagattatataattatagaaagttaatgagattcagaaaagcgaaaagaaacttaaaagcatccacagtttatcagaaataaatgttttgacgtattgtccttcaatctttttcctataaagatatatacacaaaactgtattctgccttttccacaaagcattaaataatgaatatttcccacatctttaaattttttaagaaaataattttatttgtgaaagtgtatttaatgatatagtcatttcattaatagcctattattagatatttgttacttttcatactttcaaataacattaatta

SEQ ID NO: 53491 - DNA, 602 bp, Homo sapiens
  misc_feature 541: n = A,T,C or G
cggggccccccctcggggtacttctagaattaattaacgcgggggctgaaatcaaattcaaagaactcacttctaccaaaagagaaagaactggtttgtataatatgtttcaaagtacagaaggtagaaggtacatcaccaccgtccatcacgtgaaggagtagaaaaagtgggatgccacagttgcggcagagaatatccaaaaggaaagggtccaagtcagaccgctcacgtgggtggcagcgtccaagtccagtttgtacatttctgcatggatgaggtcttttcaaagcacatacagttgtgtgatttttatttccccaagaaaaaataaaaagttaaagtcagtctagtcaattgctttaacacaaagagcaaactgacacacagtttccctgggcattgctacatattccttgctcttccgtaaaggacacatgtgtctctgtgcctctcagtctcccagttgcaaagatgccatcccaggtcaagctgaggtccttgcaaatgaactgcatgctggagataaagcgcctactangctgccgggtactggcagaagagagtgagcgtagcaactgggaggtggcctgatggcctgc

SEQ ID NO: 53492 - DNA, 602 bp, Homo sapiens
ccgggccccccctcgaaagtcttctagaattaattaacgcgggtgaggacataggagtgaggctgcagggaaggagtgagacatacacgttcctgaggccttgagttccaggcttcaggaacgcctgcccgtgcccgggctctgtattccctggccagtgctgacggtgtctctggcaaaaatgcaagtacccttggaggctaggccttggggtggagctagctcagacacctgccctctgggaacattgccttcttctgctttctaatgctgatggcttccctgagatcccagagtcatcaagggtcaccctgcagatgggaccatgagccccactccccaaaatgtggcttgctcaaggtcacataggtagtagcaaagctgagacgtgagcctggcccttcaaagcctaaattggggataactctggcaagagaatgtttcaaggttcatctttgtgtccccagagcctggcatgtcatagggagatagaaagtatctgttgaatgagcaagagcagccaacatggatcgagagccaggaactgtggtaactgcacatctgtctgatctcattgattcctccccagctctgggcagtgt

SEQ ID NO: 53493 - DNA, 609 bp, Homo sapiens
  misc_feature 528: n = A,T,C or G
cggggccccccctcggaagtcttctagaattaattaagcgggaataaatgaatgagagatgagtcagctcgtttgatggaaagggtttaaaaaatacttcaaaagcataccacatgacttggtaaatattcagtgtatcaaaatgtagttgccatctggcattgatagactgggctagaatatgtgtttaaaaagaacaagaaaggaaataactcagccaggttaatgtgcacttgtctacatttcataattcaggtattaagtgctttaataaatattcactatgaaagaaaggctgcattacaatcagacttgggcagtatttgttggggacagctagaaagaaatgaaagaagacaagacctgatggcacttaagaaagctaaaaacaacaataaaaaagtggtttaggtaaacagaattctcaatcatatgtaatattgccagaacactagtatcacagttaaatgcagggaagtggtaagcttatatttgaaaataaactgaaatcttgcttattttcagctntgaatattttaattattcttttctttggctttgacaatttaaaagtatagagaaatccagggaataagtaaaacccttggt

SEQ ID NO: 53494 - DNA, 396 bp, Homo sapiens
  misc_feature 28: n = A,T,C or G
cgggcccccccctcgaaatacttctagnattaattaacgcgggtcccagcatagtaatttctaagctaaattttaaaaatgacttctgtctccacttccctcatatccaatacatagtgaaatctatcttcaatatatattcagaatctgatatatattgctgtgaactcttatcaactcttgctgtcaccactgtccaagctattatgttttgcctgatttctacaagagcctcctaactggtatccttacttttactcttacacttcaaagtctacatggctccttatgtttgcttctttctttcacaagctacgtatgtaggcatgcttatgtcacttaaaatattcttacgcatctgtttcacttatattatagaccaaaaaaaaaaaaaaa

SEQ ID NO: 53495 - DNA, 332 bp, Homo sapiens
ccgggccccccctcggaagtcttctagaattaattaacgcgggggttattctgcagccaaataatgtgaagctaactagaactgaaccaatgctcatttggcaaggacacctgaactctgaagcacttcgtaaacagctgattatttctagtaatactcctgtgaagtttcagtattgagccatccactgtacttcattgccaactatatgtcgccttaaaaacaagaaaagtgcaagacagttccctggttatttgagtcagagtctcgctctgtcgcccaggttggagtgcagtggcagagagagactccatctcaaaaaaaaaaaaaaa

SEQ ID NO: 53496 - DNA, 602 bp, Homo sapiens
  misc_feature 578: n = A,T,C or G
ccgggccccccctcggaagtcttctagaattaattaacgcgggagagtggcagcagaatataaacttccccccaaagcccatgcctcctggtcatgactctgggcaaagggcagtagtggtggtgaggtaagaccagggaggggaaggctgcgtgggtccagagggccaacgtgcttgaaagcaaccccttagaaccatggctgagaaggtaaggagagggcaaatggtgtgattacacatgagctgagtctccaaatacccagcatgtgcttcattgtcccactggactttgcttatgaaacacaaattcaaaagtcgttattaagaatttcaactcacgcctgtaatcccagcactttgggaggctgaggctgacggatcacaaggtcaggagatcgagaccatcctggctaacatggtgaaaccccgtctgtactaaaaatacaaaaaattagcccggcgtggtggtgggtgcctgtagtcccacctatttgggaggccaaggcaggagaatggcgtgaaccctggaggcggagcttgcagtgagcccggatcgtgccactgcactctagcctgngtgacagagcaagactccatcccc

SEQ ID NO: 53497 - DNA, 492 bp, Homo sapiens
  misc_feature 27: n = A,T,C or G
cgggccccccctcggaagtcttctagnattaattaacgcgggggaggacggggaaggagagatgttggtaaaagggtctcaagtttgttagacagtaggaataaattttggtgatttattttacagcatggtaactatagttagtaataatgttgtatatttcaaattgctagaagagtagattttgaatgttcccaccaaaaaaaagataagtatatgaagtgatagatatgttaattagcttgatttaaccattctacagtgtactataaacatatttcaaaatatcatcatattgaactccataaatatatattattatttatcaattaaaaatattaaaacaagcaaaacccatgatacatatctggtggcaaatgagtatcgtggtagaaattcatcaaactgctcagatgtgatttgtgtacttttctggctgatggtcatacttcagtaaaactaaataaatgtaagctaaaaaaaaaaaaaaaa

SEQ ID NO: 53498 - DNA, 331 bp, Homo sapiens
cgggccccccctcggaagtcttctagaattaattaacgcgggggcaatgataaattatcaagatttaaaacaaaactacacagcctgaagtcgtatcaactctaagacaccttggatcataggtgttatgctgttaagacatcatctccccaaaattagatttttattttatctaagtacatttaagctgtgatcaggggccgggcgcggtggctcacgcctgtaatcccagcacttcgggaggccgaagcggggagatcacgaggtcaggagatcgagatcgtcctggctaacatggtgaaaccccgtctctactaaaaaaaaaaaaaaa

SEQ ID NO: 53499 - DNA, 500 bp, Homo sapiens
ccgggccccccctcggaagtcttctagaattaattaacgcgggacggtagtaagaacatattacatttttctagatttaaatcagtacatgctactgcccagagatattagtcttacaatatattatgtcatttaaaagtttaacatatgtcaaaagaaaatctttggtttagaggctgcagagatataactttttaaaaaaactgattttaagtatgtcatttagttttcctactctaataagcagtttacaaggttgcaaccttaccattccagttttcaaagaaataagtatatttgaaacatctgaattccttagatgtgcagatggttatggaagatttaaaattatttatgaacgataaaagcactggctttttcattgaagcattaagtttgatctccagagactctcaaattccaaagctgtttctcacaacctcacctcgagactgaatcccaaactaatcctttctcaactacccaaaaaaaaaaaaaaa

SEQ ID NO: 53500 - DNA, 447 bp, Homo sapiens
  misc_feature 9: n = A,T,C or G
acttctcanattaattaacgcgggtacaatatttgctctttaaaaatctggaatattggccaggcgcagtgcctcatgcctgtaatcccagcagtttgggaggccaagacaggtggataacaaggtcaggctggtcacgtgctcctgacctctggtgatccacccacctcggcttcccaaagtgctgggattacagacgtgagccaccgcctggcctctggatgaacttttatagacagcatagaaagaagagagagagcacatgtcttgcactaaacacatgtagtgatttttttaatagaaattcactaaccaaagctcaagagcatttggttaagtttctgtgataccttagagttaccacaaaccccaaaagtaacactgtaattcactttctcttaattatagaacaaggcaaggtagggctttagcaaaaaaaaaaaaaaa

SEQ ID NO: 53501 - DNA, 400 bp, Homo sapiens
cgggcccccccctcggaagtcttctagaattaattaacgcgggtctagtcacaatagtgccaaggaaaggcaaaccttctagagaacaaggaggccacagcagttgtgggagagctgaattatcacttcacaaaatagctgtcaatgtcatatttacactgtgaggagctattttatgaatctaacaagattaagtttagtagttaataatttttgttaaaactttggatggtactgtactttgaggtgcactgtcaaactgactgatccataaaaacaatgaatcattggcttaaaataagtttattgtataagaaaaatattattatattcaagatgactgaaatgatagtccatcaagctcaaaatcaaatgaagcacaccaaaaaaaaaaaaaaaa

SEQ ID NO: 53502 - DNA, 552 bp, Homo sapiens
cgggccccccctcggggtacttctagaattaattaacgcgggcagtctatgggagaaccacttactaatgggggcatagctcagtggttcccaatcctatatatgatacacatttatctcaactcttaaagcagttaaaaagtttttctagtcactagaataattcattgtcattatagagcatttggaagatgcagaagtacaaaagaaaaaataccattacctggaatcctgccactcagattttactcctattaccatttggaaaactatatagaattttaatatatttttatatataggtatcttaatgtgcatattgtcaaaagaaatgttttctactaaaataaaatagttcttcattttcttgtcattgatgctttcaaatgaacatccatatgttaattcttaccaactttaatctttttgttgatttttatccatgctctaacagggaaaatcaagaatgtatgtattgttaagataactaactgatgcttgttttagaaagtgtgctagctattctgaagatcctttctaaagacctcactg

SEQ ID NO: 53503 - DNA, 426 bp, Homo sapiens
ccgggccccccctcggaagtcttctagaattaattaaattacttaattattgttacagacttcaccggtagacattaactggtttaatgtgaaaacagaaatgcttgggtgccctgctgagtggactcttcatcattgatcagtcctttctcagagagaatggagagctactggcctagggtggattgagagcgaagtgtccccgcagaagttacattcagctgcagaagggcctcagcttcctcaccctactcagccggtagaaagccctgacatcaatctcagtttctccatttagaaaacagttggatgacctttctgctggtattccagtatgacatataggggtctcattttccatcctaatcatctcatccatgtattttttttaagtacatatgtacagtccccaaaaaaaaaaaaaaa

SEQ ID NO: 53504 - DNA, 550 bp, Homo sapiens
ccgggccccccctcgaaagtcttctagaattaattaacttggggggctgaggtgggagaatcgcttgggcccggtagggcggaggttgtagtgatccgagatcatgtcattgcactccagcctgggcaacaagagcgaaactccgtctcaaaaaaaggttgacaattaaacaactgtaattatctggactaattatctggtccctggaggacacgtataatttaagttatattgatattctagtcaacacccagtcaccagctggcaggtaaaagaagcagcttaaagctgtttgaaataatttttaaaaataactattagataaaaataattttttaaaaatgatactatgttactggttagaggtcaattatttttgtctcttagtttaaataattcatgtaaactatatttataatccatgtaaagtgaactgctacttatacataaagtagagccttcttttggtatgagatgaatgaaagatttttgccaaaagctctttttaaactgtaaaatgatgttgagatgtttgtcgtcaatgctgcat

SEQ ID NO: 53505 - DNA, 603 bp, Homo sapiens
  misc_feature 28, 536: n = A,T,C or G
cgggcccccccctcggaagtcttctagnattaattaacgcgggagagcaaatttccacaggaacgacaagaagtttgattttggatttgtgtggttttgaggtactttcttgtacgtttggagaaagtatctaacagggaattctgctactgaaacaaagtagagtgagagggaggggtagacttagctcccctgaccttgtatgtatggagaaagtatctaacagcgaagtctgctactgaaacaaagtagagagagagggaggggtagacttagctccccctgaccttgtatgtatctctttttcaatatttatttctaaactagtttgacaatgctgcctatgaacttaagcaggtgcctgaaatgattgaaacgtccttgtcggcaggcagtgtgtttcacatgttaagttcagtaatggtgaacttaatgtcctctgctatattgacctccaaagccttagagatttgtggcctaagaattacaccagatagatttttatctcagcccttattttagataataaacatatntttaattagtaagttaataattaacatttatagagccttaatgtgagcctggccctgctatatatta

SEQ ID NO: 53506 - DNA, 541 bp, Homo sapiens
  misc_feature 480: n = A,T,C or G
ccccctcgggagtacttctagaattaattaacgcgggttgcttgctaataccaaatctctttctcatgtctttgttctgcattcaaagacttaatggtaaattacatcatttgatgtgagcttcataggatattccttaatgtcttttctccccacagactttttagtacacactcatctacccaaaattcaatttaaaaagtctctttgggcaaagtgatagcctacgtgctgctgtaatacataattgaataagctcgggaagaccttaaactcaccaagtgagagtataaggaattggagagtttgtttaaatggatgttctgattaacttaataatttggaatgtattagatatgtacattatacattttaaaatattagaatatgataaaattaatcaaagactcaagatttcttgaagtgttttgaagtcatcattacgtgtatttgttatctttgtctataagaatgtatatntttagggtttttgattctggacaaactgaaagcatctaaattttcttcctgtaagtgcttc

SEQ ID NO: 53507 - DNA, 609 bp, Homo sapiens
  misc_feature 505: n = A,T,C or G
gccccccctcgagagtcttctagaattaattaacgcgggacggtgtggtcaaaaataactcattccccccactcttaagaagcactaactcaaatgtgacaggaatttgtgctcacactcagcccaccctgtcattttcctgcttctggcaaggcccctgcaggagtggggctctccacggtgcctatcaaatgaaaagggacttgaaaattcacaatcctgctctcctaaattccttcaccaacgctgtgataaaaaagagaaaatgagtgtcctatgctggaaatccaactaaaagaaagtttgagaaaaatgcttcctttttaacgttcaaaaccaacatttataaaaataatgtttgttccagaccaagggagtagaatagactaacattcaaaatggaatgcattattagtgactcttgagacagcaactgaatgacacagagcttaatcttcatggtttgtttgagataaaaacaaaattattggggagaaaaaagganaattttacaatttatttcttaatgtacaaattttgaaaattgaagaaatcaagaagttcacaaatattgaattagatttctgttcatgcttgaaaaaaaaaaaa

SEQ ID NO: 53508 - DNA, 366 bp, Homo sapiens
cgggccccccctcggaagtcttctagaattaattaatgaaattccagctttttcttttttagtaaaggagcaaattaaaatctagtaacaccttctagtatgaagtgtaccttcactcaaaatgagatctgctctaatccctaattatataccaggatcacatctttgtgtgaagcacctgcctttctctggagttcatattttaatgtgcccatcagggaatactgcttagaggtccccagagatctcaaatccaaatgtctcttgcatcagtacctcttacatcttcagacccttcctctccactctcattccttctcttctgcctataagcttgctcaaggatccttctccttaaaaaaaaaa

SEQ ID NO: 53509 - DNA, 603 bp, Homo sapiens
  misc_feature 11: n = A,T,C or G
cgggccccccnctcggggtacttctagaattaattaacgcgggggcctgttgcaggaggagagcattaggataaatagctaatgcatgtggggcttaatacctaggtgatgggctgacagtgcagaaaaccaccatggcacacatttacctgtgtaacaaacctgcacatcctgcacgtgtatactggaacttaaagtaaaataaaatatttaaaaaagaaaattcaaagcacaacaaaattaataaaagaggccaatcattaagcaagcaagacgttaatattaagactacaaaacactgaagcaaacgaaagtgtctacaaaggctcaccactgggcttgttcctggtttttcccctggttgcttaaatatcatccttctgcactaggtgcactacatccatatattagagcctgaaaatatatgtacaattgatgtccagatacctatgaattttaatgttgtaataataaactctgaaaaattacattgcaacactgttattttagtgttgtttgcagaaaacacatttcagagggaggcttttgagttctctgtactacctggtcactgtgtcatttcctttttgttttcttaggttt

SEQ ID NO: 53510 - DNA, 549 bp, Homo sapiens
ccccccttcggaagtcttctagaattaattaacgcgggtccccacaccctgcccctggcaatcgccagtctactttctatctctgtagatttgactattctagacatttcataaaaattaaattatataacatgtggccttttgtgtgtggcttctttgacttaaagtccacttactcgaccccatcttactatgctatattattttaccatcttacctctttattcgtgttttaatcaatatataataatctaacaattactcctaattcatatacattcttgatagcactctgaaacaataaattttaagataaattactgaaacatataactacatggaagaatgatggtgaactacagtgaaaaaaatgcattaaaaagtaaaaatgcattataaaaaggaattaatctagtcaggcgcagtggcccatgcctgtaatcctagcatttttggaggccgaggcaggcagatcacttcaggtcaggagttcgagatcagcctgaccaatatggcgaaaccccatctctactaaaaaaaaaaaaaaaa

SEQ ID NO: 53511 - DNA, 565 bp, Homo sapiens
cgggccccccctcgaaagtcttctagaattaattaacgcgggctctaaattgataaacagcgggagccatcctgccatggaccagagtgaatcacagagctctgtgaaatcgtctccaaattactgtggagagtcactgtgcgacgtctcaccaaaaccacccttgtttggggtgtcatataccatcatatcagcgctgcacacactgaatcacaaaggctcatactcattctcctctaacgcacttcccaagtccaaataacacatgaagtgatctgcttaatgcaatttcctattttaagcctcatgtctcgatacattaacacttcaaggcatgttctagtgacccagaacaataagtgtcctgactgggaatacactcgcattccacggaggtaataagtcagaacaaccactcaccacaggacaaaagcaagtctacatgcgaccacctgtctttctggacaaggatatcggaggattttctaggatggtgcatattacataaaggatggctggttgtgccttctgaagtgaagcactcccactgtggcaagctcaggca

SEQ ID NO: 53512 - DNA, 270 bp, Homo sapiens
tgtttttgacattccaaaaatattaaaggtaggtgcttctcattatgatagtggcatgctcaatcaagtcttactgactttactagtcaccctaaaggaaaatcttaccagcacttttttaaaggattacttatgaggatcagcactagttaaacctaaaagtctattactaatattcatgaaaaatttaccatcgcctggtatgaaattctacctagcagttaacactcacctttgttaaaaagagaccaattaaaaaaaaaaaaaaaa

SEQ ID NO: 53513 - DNA, 450 bp, Homo sapiens
cccccctcgagagtcttctagaattaattaacgccgggaggggtagaagacaaaaagataaaattgaacacactcactaagatcagatggtagaatgccttggctaacactaaggaatttggacttgattctaacattggtgatactacttttgtgtaacacttgcccagtgtcacacaactattaaagtggaagccaacatttgacttccagcagtctgattccagaattctcacttttaactgccatgcttaacttctttcagtgagcatcaggaatccagtcaagggttttgagaattgcaaggtaatgcacaagggattttagcaggtgggttcactagaagtgtgcagaatggcttgcatgaggcaaagactggaggcgagcagtctgtgaggaggggagtatgacaatgtccacgtgagctgataagacactgactaacgtgct

SEQ ID NO: 53514 - DNA, 583 bp, Homo sapiens
  misc_feature 17, 44: n = A,T,C or G
cgggcccccccctcggnagtcttctagaattaattaacgcgggnaaatcactaatttacataattcaaatttaccagttattctgttctacttcatatggaaacctagatatagacttataattgacacaattttcttaggttgtttagagtgaggatgagtgctggggaagaaacaagacaaagtttgggaggtcattgtcttcagcaattcttggaaaaaaatactgatacttcttatggaatattagccctcctcattcactgaatagatgatttaaggtggaaagcacttgaaaaacaccatttcttagagccagtgagtggttaacttgtttatccccacattaattgctaattttaactccatgtattgataactggaaatcataacataagccacaatttcgaatccttctctgtgttatttgtcatcttttgtgaatcccaactgattaagtcaaatcctggtcttcctatctttcacaattatcttcttgaaaactggcttttggcatctctaaagaattttatgtaacagattatttaaactagttagggaaaaacagattttcaaaatgaat

SEQ ID NO: 53515 - DNA, 606 bp, Homo sapiens
cgggccccccctcgaaagtcttctagaattaattaacgcgggatgtgttgaaactcaactcaaaaaatataaggtggaaaaggaaaaattttactgagcatttttatacatcaataacttagccattaatatttttaaatattaaaaagggcacagagtatggtattgatttgaaatatagaaaatgtcatgctaaaaactgtatctggttttgacctgacaaaataagatgagtcaatctgattttaccacatactaaaggctagatttcagcacaataaaattttgtcttattaaaatgtggattgggacactaaatatttgtacgatgctataagtattgatggtcccattattaagatatgaagaatgcattctttactagaatctactattctgattaaagagttccaaagaaagaaaagggaattgcaagcttgaatatattctttaatgactgcctatatttgattatggagtcagcaatggtaacttaataaattataatgtgtttctggaacttagcttataatagctacttttattccattttttattcttttttttccccctcaagaaaatcacattcaatacaatagctactat

SEQ ID NO: 53516 - DNA, 158 bp, Homo sapiens
cgggcccccccttcgaaatacttctagaattaattaacgcgggggcacgctgacatttgtttgtgtgatttggccgccgacatctgtctctcccacagactggaagctccgtgagggaggagctgtgtctggctttgcacaccacgtttctgtcttgc

SEQ ID NO: 53517 - DNA, 604 bp, Homo sapiens
cgggccccccctcgaaagtcttctagaattaattaacgcgggcctcgctctgcacctggcagccggttattttctagctcttgcaatattggggatgatgatatggagggggccctaatattccacagtactaacaccactgctccgtggtggggtgtttagggtggtctcatgattttactgcagaaacaaacatctgcattctcccacttgtgtgtctgtttgctatgacttgctttcttacaataaattccccagcatgggatttctggaatccaaatgaagaaacgtctccatgggtcttgcttccacttttgcctttttgcttttccaaaaaggtttttcccatgtacgtgatgcttgggctgtaacagtctgtccatttcaccacaactgtgccagcaacatatgttatctttttatgtttgggggctgacctagcaggtataaaatggtactggagggtgggttgaaattttaccttttatgtaaatttttaaaaattatttttaattgcagtaaaatgcacataaaatttgccatctttgccatttctaagtgcacagttctgggatattaagtacattcacactgaggtgcattc

SEQ ID NO: 53518 - DNA, 374 bp, Homo sapiens
attaatggacgcgggctgggttgaatttctaaggggaaaaaaaacactctatgaaatggttccaccactatgattcaccatgtgccctaagcaacatcaaggtctgccccatcatagccacctgttattttatttcagcaacagagaaactattatcgaatgacaatagaaaggtgactgaaacagtaaggaaaggttattttgttaaagtcaacaagctctgaatcatgtaatgcgatattgaagcaaggcttctaaaaacaagcaatgtagtacccagacaataaggacctgtcactcctctagctcttcctagctggacaaagctgtgactgaagtaatcattgctgagaacaaaacaatgtaggtgcttg

SEQ ID NO: 53519 - DNA, 359 bp, Homo sapiens
  misc_feature 27, 341: n = A,T,C or G
cgggccccccctcgaaagtcttctagnattaattaacgcggggtattagttataataatgacaataataatcaacattgacctatacctcaagatatatacaaaaattaacccaaaattgatcatcatcgacctaaatgtaaaacataaaattatacaactgctagaagccaacatatgagaaaagttgggtaatcttggcttatgcaaaaaatgttgagatatgacatcgaatgcatgacacataagagaaacaacccaacatccttcagctagaaaatgattagacaatatgcgattaatccattcagtagaatattactcagcaatgaaaaggaacanacttgattaacataacgt

SEQ ID NO: 53520 - DNA, 418 bp, Homo sapiens
  misc_feature 371: n = A,T,C or G
ccccctcggagtacttctagaattaattaacgcgggtcatatgaattaaatactagatccctggatgttgaagggaatgaggaatagtagaaagtacatagtagcagacagatgatcttatgttgctcctgtgtagctgtcctgcatctcatagatgctcaaattacactgaagggtgagaataagttcttcccccttttactacattaagtagaaaggattttgtctagaaatttttttttgtggaaaacagattatgtgtgtatgtatgtatgacaaacatatacatatatgtatgcagaagacttatgaagatggaaaataaataagatcgtaattttggaacttttttgaagatctagaggtagaanaaagttaaatatgtttctgacatcccaaaaaaactaaagtgtcctac

SEQ ID NO: 53521 - DNA, 506 bp, Homo sapiens
  misc_feature 23: n = A,T,C or G
ccccccctcggaagtcttctagnattaattaacgcggggggggcagaaaggaaataccctacaatgtccagtagtagaacagttaaatatttatttatagtgcattcatataatgaaataccttgcagccgttacaaatttcagagcagaacttggaaaaaaaaaatcatggagatgctgagcttcagccctgatcaaatcttatctgatctctatactacctttcaacgtttcgattatgtgagccaatacacacataactcgactgtgtaggctagtataacacattctgttaactgcaaataacagtggcttaacacaatgggaaaatgtttatttttctaaaaggcaagttatatacagtatggtctctacttttaaaatgcccaggacaggaatagtggttcacacctgcaatcccagcactttgggaggctggcacaggcaatcatctgaacccccgaacacaggagtttgagatcagcctccaaaaaaaaaaaaaaaaa

SEQ ID NO: 53522 - DNA, 406 bp, Homo sapiens
gggccccccctcggaagtcttctagaattaattaaaaaatcatgaattataatttaaagcatttaagatagacgtaccacttacatgttaatcactcattttgctgaacttagaacattccttttcaagctgggcgaggtggctcacacctgtaatcccagcactctgggaggccgaggcgggtggatcacgaggtcaagagatcgagaccatcctggtcaacatggtgaaaccttgtctctactaaaaatacaaaaattagctgggcgtgatggcatgtgcctgtaatcccagctactttggaggctgaagcaagagaatcgcttgaacccgggaggcggatcttgcagtgagccaagatcgcgccactgcactccagcctggcaacagagtgagactccgtctc

SEQ ID NO: 53523 - DNA, 607 bp, Homo sapiens
cgggccccccctcggaagtcttctagaattaattaacgcgggactcttattcgcataatttgacttcaaagctagtatacataaacggccaataattctaccatcatttttttctttaattttaaaaaattgtttagtttttcacttcatttttgaaggaatagattcgtgtgctatttaaaatatgtaatttaagcatagtatcaacattttttaaagtttgtagtttctcttgtttgtattttaagagcttagtagaatcagaaattatataataactgaatccatacaaaacaatttagcaaattggaaatccaattggtgttttcaaactattctataaattaaactaataaaatggattagatactaacctattggtctggttgagatagtaagattatctagatcacaaaccatctgcacaattggtctgtttattttgtttgctgtagaaaagtgaatcacattgaccatggaggaagtgaatcagttctatcatggcatctaatctgctgtgcagcttcagaaactgacccttgtctataaattgtagaaagtttgaaatgatagtaaggaaaaatatatttggattccaaataaacta

SEQ ID NO: 53524 - DNA, 527 bp, Homo sapiens
ccgggccccccctcgagagtcttctagaattaattaacgcgggatcctgagtatctggtactaccggtgcgcactaccaggcctggctaattaaaaatttatttattgtttgtagagatgggtctccctatgttgcccgggctggtctcaaactattgggctcaagtgatcctcctgccttggcctcctaaagttctgggattgtaggtgtgagacactgctcccagtcatcaaatgtacattttctagaaaaaaggtagtatattacaaagatgtagtgaatgcttttacataccacaacatacaaatcttccagaaggatctactggtgacgtgtgtagaatattgttttattcctgtgaatgcataaaacatatgaatgaaccaaaaatgaaatagagatagtaaaacatagtgttaagagcctggaattctaagacagcttgcctagggttggatcctgatttctactctcagttgtgtgaccttggtaaacttatttacctctctgggtcttaatgttctta

SEQ ID NO: 53525 - DNA, 484 bp, Homo sapiens
  misc_feature 426: n = A,T,C or G
attaattaacgcgggatatctagattgttcattaattggatatatgcagcagcacgtgggcccaaggagaaaagaattccttttgcagaaaagtcctgggatgaggctggggcaaggtgtcacacaagccaagacatgaaagaagctcttggaagaggctcaagtgtggagggaaaattctatgctgagttttaccatgaaggcactagggaagtcactggagctgatggcctccttctctgggcctccattctcaaacacaacatgaagctccaaaatgcttaagctctctaccttgattttcagaaagtctctgtggcttgtctatctaagaaagttccagcctctcagcagaatgaatttgacattccaaagatgtgaattttgaccagaatcaattcactggatgcccacatcaatacatanagcattcaattattgttagataatttacaaacaggttaatactggtaccacatattct

SEQ ID NO: 53526 - DNA, 527 bp, Homo sapiens
taccggggccccccctcggggtacttctagaattaattaacgcgggttacccattttataacaaattataaaggcaagatactaatggtgttctcattaatatttaataaggcagtgttaaattgagctaaaattagaagttattgatgaagctgtaagtctgagagcaggcacaatatttctttaatgaatgtatatgcatgtgtctatgaagttctgttgttaggcttttgggaataatcaaaagaaactgtatgtttaaaataaggacaaaaatacatttgtttttgttaagcctcatgacccaacatttcctactgggtcttcttccctttatcccagaagcatgatatcactcaatcaaccatccagaacccttttgttttgaatcacatcactacccttgacacatctgaatggttctccctgcccaggagacagattctacctcctcctgatggcaaatcttcagactccaggcttcaaggggctccccagccctgctgttccagggcccaggttctcct

SEQ ID NO: 53527 - DNA, 467 bp, Homo sapiens
attaattaacgcgggaagaggggaggaagagttatcccccaacgtcattattccttccacctcccttactagttttctttcccgaatgggtatagaagaattccattttatctcctttgcttttttcttactcttcttatattcccttctctctcattcatgttctactacatttacaatataaatttcattactaattaactattcaaagataaatctgttctgtaagaaaagatgctaaagtacttaagagagaaggaaatcccgatgaaatatgcctcaactgaaacaaaattaggagaaagcaaaatcacctatagtttactgaaagcaaagggatttcattacatattaatgtgaactgaattgtcatggagggtagaagtgtaagaagagccacagggagattacttgaaaacaaagctgcatatacactgagagatagatcctgcccccaaccacctgtc

SEQ ID NO: 53528 - DNA, 424 bp, Homo sapiens
cgggcccccccctcggaagtcttctagaattaattaacgcgggggataccctcgtgaaaaacctatgttgatagtagacattgcttcagtgctgatggtttgtcccagactctgtcatgatatttatccctaagggtagcttatcagtgaatgatacaattattcaagaagaccttcatgatgtctatggttggtcccagtctcagccgaaacaagactgcatagggttagactgaacgctttcagtgtgggctgaggctgacatcagagcagagcacaccctgatattaagcctcccaaagcatacccatcatcttattcattttttccttttttagctgcatcagttagttagcggataagaagaacatatctgtctacatagcaacatcaccaaaatcttaattgttaaaaaaaaaaaaaa

SEQ ID NO: 53529 - DNA, 345 bp, Homo sapiens
  misc_feature 16, 29: n = A,T,C or G
cggggccccccctcgnaaatacttctagnattaattaacgcgggagttagtgcaccttttttacttcactatgtaaatagggaatttagaatatatttcacaaaacacaatgaatactattatcactatcaatcaaattaagtttataagtgtcatattaaaaaaaaaccttcctagctgggcgtggtggcaggcctgtaatcccaaccactcaggaggatgaagcaggagaatcacttgaaccccggaggcggaggttgcagcaagcaccaatgtactctagcctgggcaacagagtgagactccgtctcaaaaaaataaataattaaaaaaaaaaaaaaaaaa

SEQ ID NO: 53530 - DNA, 501 bp, Homo sapiens
  misc_feature 35, 493: n = A,T,C or G
tgggtaccgggcccccccctcggggtacttctagnattaattaacgcggggaactattacctctcattcagggaggatcagtcctcacatttacgtacaccattttccttcttatttttaacttaagctaaatcctgtcgttgggacagctgctcccattaaacagagaggaggaggataaaaccatacttagcaaaaataaaaaagatgtcatcttatcgaaaagaaaatgtattttgtaaaggtttgcattacatagggaaaaaaagggggtcaaatacacagacagtaactcaccttctcaaaatattcctctgctggaagattctacacactgtgcctacctaaataaataaccagtagggttggccacctgcagtggctcacgcctgtaatcccagcactttgagaggctaaggcaggcggatcacttgaggtcacgagttcgagaccagcctggtcaacatggcaaaactccgtctctactaaaaanaaaaaaaa

SEQ ID NO: 53531 - DNA, 530 bp, Homo sapiens
gggccccccctcggaagtcttctagaattaattaacgcgggctactaaaaatacaaaaactagccaggcgtgatggcagacgcatgtaatcctagctactcaggaggctgaggtaggagaatcgcttgaacctgggaggtggaggttgcagtgagctgagatcataccactgcactccagcctgggggataaagtgagactctgactccaaaagaaaaaaaaattgaataaagaagtaaccttatttgatattagccagtgaattaggtcataacaattacatgaatgttcctaattcactcattatcaagtgacatcttcatagagtcatgtcaacagagaaatagaatggcccactgtttctctcttgtctggtttctctctgtgtcagatgtttctctgaagctctttatctcagtcagccaactaggaccaagctactgaaatcaagttctcttttattttcagttaacatttctaccctgcttggtttgcagcacacttgacagatagggaaaaaaaaaaaaaaa

SEQ ID NO: 53532 - DNA, 610 bp, Homo sapiens
cgggccccccctcggaagtcttctagaattaattaacgcgggacactcagtggaatataagtatctacaaatagttgaaaacccacaatacagaagagacagtgaggacacaatttctagttcagtgaaagaaataattttataaaaattagagttgtccaaacatggcgaggtgtgtgcctataaccccagctacttgggagggtgaggtgggaggatcacttgagcccaggagttccagacaagcctgagcaacatagagaaaccctgtctcaaaaaaaaaaaaaaaaaagaattgatcaaatatctttgcctcagaaactatgacactataaatagtctctccaaaaaatatacaaatatgcataattttgcataatatttccaagagttcacaagcctactttcatatctattcatgccgcacacctagagtcatgtatcccagattaaaacggaaaggatttaagtatgaagaggtgagtgtatttgattctctttaaaatccactacaatttaaaattctatgatctaaaagaactctcaatctatgccttctagtttcttctgagatccattataacacatattgcaataagagtttaaaaga

SEQ ID NO: 53533 - DNA, 596 bp, Homo sapiens
  misc_feature 556, 557: n = A,T,C or G
cgggccccccctcggaagtcttctagaattaattaaaagtttctggctgagtcaattttttttgaaagctaattttcagatatgatcctttaggtttatttaactcgatacaagttccccacatttttagcaccggcttttaaagaacagtctaaaaaatgttagaaataaaattaagacgcaagccagttttatggcatacacccaagtagaacttcatccttggtgttctcatcctagcagtggcctccagaaggctgcccgctgatgtccagaaactgagatttagggcagtttctcatatttctggctcagtcgaggaacatgggaaggtacacgttctgcattgctggagggtagattatgtcttcttaggcagaggagttagtgaaaggtcctggtctactggcatccagatttcacaagttagctctgtggtatggatttgaaactaagcaggcccctgtctggagatgaggttctgtctggagcagggaggagccagactttccatccaggaaagctgctttcatgcaggacagcaggcgagagcccnncagcaccaccatgacgctcttcggtttcttgtgattctg

SEQ ID NO: 53534 - DNA, 381 bp, Homo sapiens
attaattaacgcggggatggctcatgggtacaaaaaaccaggaagaatgaataagatctggtatctgatagcacaacagggtaactatagtcaataataattgaattgtacattttaaaataactaaaagagtataataggattgtaatatgataaatggttgagttgatagataccctcatttaccttgatgtaattattgcgcaacatatgcctgtatcaaatattgcataaactgcataaatatatgcacctactatgtacccacgaaaattaaaaattttaaataaataaaaaaatttttcaagttttctcctgtatgtataaaatttgcaggctggtctgaaaaattgtaaaaagagtcttctcctttaaaaaatt

SEQ ID NO: 53535 - DNA, 479 bp, Homo sapiens
cgggccccccctcgaaagtcttctagaattaattaacgcgggggaaaacaggaaaatgtttgcatattcaaaaagaaagtaaaattttaaaaaatgaaacacagtttatatttctcctataaattagaagaaaaaacatactccagcctgggcgacagagtgaggctccatttcaaagaaaaaaaaaaaaaaagaaaaataatttataaccacacaccccaaatcaacattaaagctttcgtagacacttcctttcagcctttttcccatgcatagttgagattatattgtatattcaatcccgcacatttattataaacgtatttgcccgttatcacaaaccctttgaataaacatcactttaaatctggtattacatcctgtgaatccatccctgtttcccctattattgaacataagttaaatttgtccacatttctctccccatacttacacacagtactgttcatttgctttac

SEQ ID NO: 53536 - DNA, 470 bp, Homo sapiens
taattaacgcggggataatatcacctgccttgtgggagtgttgggagagttagagacaggatgcttagtgtaaaactcagcacagcctaaatgttcactgtcatcaacagtaacctcctctttcaggtgagaaaagtgagactcagaaaggggcagggcattgcccagatgaaacattgcattatgagcagagttaggtggggtgtggtggctcatgcctgtaatcccatcactttgggaggctgaagcaggcagatcacctgaggtcaggagttgaaaaccagcctggtcaacatggtgaaaccccgtctctactaaaaatacaaaaattagtggggtgtagtggcaagtgcctgtagtcctagctactcgggaggctgaggcaggagaatggcttgaacccatgaagcagaggttgcagtgagccaagatcacgccctgcactccagtctaggcaagagagtgagact

SEQ ID NO: 53537 - DNA, 469 bp, Homo sapiens
  misc_feature 414: n = A,T,C or G
ccgggccccccctcggaagtcttctagaattaattaacgcgggctgttcgtgacttagcacaatggcagtcaccaggatggacagtcaggggatcccttcctcccatccatctgggttattgaccaatgttaacaacaatcattccttcattttgataggtatttatagcttacagatgagactgtatgcttttatgaattcgttcatttgtaatttcattactaatggcatctctaggataccagttctgttctgtggcaaaacagggttccaacaaatggccacaggaactcacaggcctggcaccatcttccaatcaacccatgagcaaccgtccaaatcccagtcagcgaagaagagttcgttgtaattcaaagcttaacataatctcaggctgatatattgtggactcntttagacacagaaatgaaaattataggcaatttatactaaaagctcatttttccc

SEQ ID NO: 53538 - DNA, 598 bp, Homo sapiens
cgggccccccctcggaagtcttctagaattaattaacgcggggacgtggccgctgctggttgggagtagtggttgagctgagatgattatctgacccactaactgaccgaaccccaggacggaggttttgacttctctgtgtcaggagatggacagaatgatccttacctgcacgcatcaaaaagcacgctggccccagagtagctgtttaaaactcgcaggtacctttttaaaaattaaaataagaggccgggcgcggtggctcaagcctgtaatcccagcactttgttaagcacattttttcttttcggctaacaaccaccttatgaaagccaaagtgattcccattttgcaaatcctattttgaagatattggagtttggagaggttaagtaacttgttaagtttcggtcattatgtggctgaaacttgggaaatacagaaatgaatgcgtactctccgtgcttccggacaagagacactaccaccaataacaaagaccggagtcattcacgcatttatgaaagaaaagacacagaaatataccgtgggaggctagatcagggagcattcattcgacctggagaacaccaaatct

SEQ ID NO: 53539 - DNA, 486 bp, Homo sapiens
acttgctacaattaattaacgcgggtatgatagacttttgaccatgattatcttttaacagctcatatatatatcattgtctattgaggaaagtacaaacaactcaaaagaaacataccatggaagtcatatctttcaaaatcttaagctagttttatataacagattctatataattctccttgatgttgaatccattttcaaattttctctaaaaagaagttcatcattgtaacttagctttctcctccacacccctttctcccccactgcccacaggtacagagctgtgcactttttcattattattactatttgtaaatgtttatctaatacatactttattcatcattacacaaaggcagatggaatttgataaactctttctttactgaatgtgtactaagagcaatagtttcctacttaagattcaagtaatgacagcattgtagagtgaaaagttaaacctgaatataagagagtcta

SEQ ID NO: 53540 - DNA, 610 bp, Homo sapiens
cgggccccccctcgaaatacttctagaattaattaacgcgggatcaaaagatttcacagattctagaagtaggtcatgtatctcatgatcttcattttggaaagatttgtttggttcctgaaaaaccaatcacttatgcctatagggatatttgctcaccaaacactcattgagcactgctgtacacaggactctactaaacattctagaaaatgaaaaaggctctggatgggtaagggtccagttgtgtacaattatccaaaatacaagaaaagacagaaatgatgctggttatagcgtttaataaagagtgattatttctggcttgagtgagctggaaaggcttcagaaggaagtaaaatttgaactcagtcttgaagaatgggtagttttgtcattagtggaatagaggggatacagtggaagaacattcccagaaggtggatcaagaaagaacaaagaacagagctggaaggtgactcaaggatacactcaggcctgtttgttccagtagagcttttacattgggaagtaacaggaggaaattttgcaaagtggacaagagtgtctaagaaaagaccagaatggcagtagtattaaacaggactca

SEQ ID NO: 53541 - DNA, 539 bp, Homo sapiens
  misc_feature 10: n = A,T,C or G
ggcccccccntcgaaagtcttctagaattaattaacgcgggacctgacacatagtaggtattcaattaatgtatgctgccaaaattatttcagtgttagaggccaccaaacagatatcctttcattctctcccctctgctgcctacataaggagccaatgaagcacattttaaaaaagatagcacatttgtaattgcttcaaagttaaacctatatacttttttggttaattttattagctgtagttgctcttgttttccatactataagaagattatctcaattagtgttaattgtctccttccgcgtggtccttcctccatctgacttaggggaattttcttggtgtttttccatctcattcagacataatagtgtggatggtgggtggtttggggttacatattggagctatgtaaggggtacaattccgatgacggttctgtggccctaatcccctgctccccacccccactttttttgaagagggtgtcaaatatggattaattacttatctttgtgaccaaaaaaaaaaaaaa

SEQ ID NO: 53542 - DNA, 324 bp, Homo sapiens
ccgggccccccctcgaaagtcttctagaattaattaacgcggggattatacaggcacctgccaccatgcctggttaatacataaatttccaacattagagatacatgtcattaatctacattgtacattttaaccaaacagaatagtaagaagttcactgcaattgatctcttggtaaaaagaattgtttaggccgggcgcggtggctcacgcctgtaatcccagcactttgggaggccgaggcgggtggatcatgaggtcaggagatcgagaccatcctggctaacaaggtgaaaccccgtctctactaaaaaaaaaaaaaaa

SEQ ID NO: 53543 - DNA, 397 bp, Homo sapiens
  misc_feature 24: n = A,T,C or G
ccccccctcgggggtactgtctanaattaattaacgcgggtagagtggggtggaaggatactaactcattgatattttataatggtgctttttttcccttagaatttctctatcttctggggacaatctgacaaccatggatttaattcagattcttagattttaaaaacaattcttttgatattcttggtatctttcattctctgcctgttctctttttttttttaattttttcagacagtctctagctctgttgcccaggctagagtgctgtggtgcaatcatagctcactgcagccttgaactcctggactcaagagatcctcccccatcagcctctcgagtagcaaagactataggcacacactaccattcccagctaacttttttaatcttt

SEQ ID NO: 53544 - DNA, 496 bp, Homo sapiens
  misc_feature 444: n = A,T,C or G
ctgggatacccgggccccccctcgaaatacttctagaattaattaacgcgggggttaagtgattaatgaagtgctcccgggagagaccagtgaggatggaaacctaatggaaaaggcaaataaaagtacaatcaggtgaagtcttggccttagcccaatatgatggggaactcctgtctctgagcaagggagctgggcttctgcagccctgcatcagacagtccttggttagggaccactcaagagaaatgtaaactcccaggctctgcctgccctccatgaatgctgggtatggtgactccagcaacccaaggacagattgctgaagatgttcccagctaggagactttagcagtgaagttcaaagaagcaggtgataggacccagtagcaatagaaggaacccaaggggatccacccccaaagtattcctaagaaagcttcngggatagttctgaatctacaagtcctcagcagattaaaatatcactctcaaa

SEQ ID NO: 53545 - DNA, 408 bp, Homo sapiens
cgggccccccctcggggtacttctagaattaattaacgcggggtggggagactcaggctgccctgatgggaaccactgcacagtgatgatatccatccatctatccacccatcagtccatccacccatccctccatccatccaggaaatgttcaccaatcgcctgctttatttgcacagagcctcgcacatggcagtcactcaaataaaccggtggaatgaagctaggcactgtgttaagtgctggggatacaaggatgtgggcacctgtttagaaatcctagcaaggggtgggggctgcaaaaaatgagcaaccgctaggccgaggcgggcggatcacgagttcaggagatcgagaccatcttggctaacacagtgaaaccccgtctctactaaaaaaaaaaaaaaa

SEQ ID NO: 53546 - DNA, 603 bp, Homo sapiens
cgggccccccctcggaagtcttctagaattaattaacgcgggctggcagtggaatgaggctcacggggttattatcaataaacacataaagaaaataaaaggctatacctatttttctttctaatgttctcaagagtaggccaaaaatataaaaagcaagatactagaggtttagttaatctgattgtattgttttcatatacatctctacatttctgcaattggatgtgtttaacatgaaaccttgatatatgatttcactaccaacaacaacaaaaaatcagttgggattatgatttctaatggtgtggaaaccctgttttataaaaataagacacattagctacttaaagttcatctgaacctgaactgtaattatttcagagaagtcctgaaatcattttggtcctgatttagaggtcttctttgtcttttcaatttaaagcaattttcatgtatagatctttaccacatttccaccttttataaaaccctaaagagtatcagtcactagacctactgtagtaactgatctgatattcatctaagctaaaactttaagcctaaaagataataattaaatttgtttgacctaaaaagaat

SEQ ID NO: 53547 - DNA, 297 bp, Homo sapiens
ccgggccccccctcgaaagtcttctagaattaattaacgcgggggagcaggaggcaaggcgcacaagaaaactcacgctctgtattactgtccctagtgtggcatgtacacgaaataaggcgctcattgactaaccccctgaccatggtacctgacactgaggacctgctatgctgactctctatccaattcatccatcatcatcctaataactacagcctcccatctttgattaggaacgcatagttgctctgaacccaagtactaaaggcttctcagagagctatatgttgtgta

SEQ ID NO: 53548 - DNA, 604 bp, Homo sapiens
  misc_feature 45: n = A,T,C or G
cggggccccccctcggaagtcttctagaattaattaacgcggggnaccttcaacattgcaaagttcctgacaagtcttgtagactactactgaatgaagcacctcctcattcgttcctgtgggatcaactgttatccatgcacttattcattccataaacattaattcttacacacaaaatggctatgtgtattctagactcaagtggtcgtctctgaggatcatgtattggttcaaaaatgggatgctctttctctttctcagatttgtttttctgttaggtgcagttgcttttttccaaagtcaaggaagtccaaaatgcaggttgcatattggtggaatgggttccaaatgtggacagatgttgacagaagaagtgtcagttggggagtttattacaaatggatatttagggtcccagtttctagaagttctgagccagttgggtggggctcagagttttcttatgtgcagctatatgttgtcccactgatgtgtagggctagagtgatagcagtggatgtggagaaagaggatggattgaaaaacgacccaggaggcagagtgtgcagggcttgatggccacagataggagtgaggccac

SEQ ID NO: 53549 - DNA, 563 bp, Homo sapiens
  misc_feature 7: n = A,T,C or G
ttctagnattaattaacgcggggacaggagtagtacaaactggaaaaggagaatcggtcaacagatagaaagttacagttagaaagaaggaccaagttctggtgctctgtagcacagcaaggtgactacagttaacaatatatttcaaaatagccaaaagagaggatttaaaatgttcccatcacaaagaaatgataaatgtttaaagtggtagatatggtaattactctgatttgatgattctacaatgtatgcatgtgtcaatatcactttgtactctataagtgtctaaaattattgtcaaaataaaacagaaaacacatcttagagttttataacaatatttatatatttataacattttatcagctgatagcattaactgttattcagaaacacaaattgcatataattatagaacctaaagctgtagtatacataattctacataactactcattttatatacctacataccctgtagacccaaacttttatgttctcctttgactcactgctgctacatatggctgcagagctccaatttgacaactacaatgtga

SEQ ID NO: 53550 - DNA, 482 bp, Homo sapiens
  misc_feature 39: n = A,T,C or G
ccgggccccccctcgaaagtcttctagaattaattaacngcgggacccatgttctcacttataagtgggagctaaacaacaagaacacatggacacaaagaaggtaacagcagacacaggggtgtatttgaggacagagggtggtaggagagaggacataagaaaaatatacctattgggtactatgtttattgcctgggtggcaataaaataatctgtacgtttaacttccatgacacaaagtttacctatataacaaacttgcacatgtactcttgaatctaaaataacagttaaaaaattgaacttttcaagttaaattcatgtattcacacactcacctacagacacaaataagtttcacttctaaatgtgaatacaaagaagtaaaaaagttccagatatttcccataccatttcctaaaatgcctgattagactattaaatgaacatctgaaggatttgctccaaaaaaaaaaaaa

SEQ ID NO: 53551 - DNA, 607 bp, Homo sapiens
  misc_feature 28: n = A,T,C or G
ccgggccccccctcggaagtcttctagnattaattaacgcggggcgggagaatcgcttgaaccctggaggcagagattgcagtgagccaagaattgtgccactccactccagcctgggtgacacggagagactctgtctcaaaagaggaacacaaataaagactgataatgttgttcctttatcactcattaattctttttagtgtcaggtgtttttagggtaaactcgcttgatcccttccagatatgtaaaagccaactgccataatactttccagtcgttgtacaatcaggtcattgcctttggctttaactcataactaatttccttgatctttttttatgatttgtacccctgagcttcccttaattgcttaaactcttgtgtgttgatgctagatgtaatattctgacatacaccccaggagaaggctggctaatctctttccttctatactcctcctcttctacttggtaaaatcttcactctctttaaaataataaaaaccaaagtcttttacttttaaagcatctcagacccgaatagccacataatggtctgataaagggaaaagagctttggtgaactttatcaaagtttttgggg

SEQ ID NO: 53552 - DNA, 465 bp, Homo sapiens
  misc_feature 28: n = A,T,C or G
cggggccccccctcggaagtcttctagnattaattaacgcgggccttattgctatttttatccttttttctaatatccaacttctagctgtgggttttacatatctggccaacaaaaagtttgaagactaatcacaaaagcatgtataaacaccaagaggttttagcatgtgtatagaatatgaatttggaaatgtttacatatgcaaatattttgagagctagaattttattcttggcatagaaactaagggttttttctaagcacattgctacagaaaaccgatatcctggagggattgtttactcggaagaggctttgggataagagttacactagcatttaatgatgttgatctaatgttattttatggttaaaggagctgcagaattttaccctaaacttttaccttttatctaactgtctttttttttccacttctttaatagtaaaaaaaaaaaaaaa

SEQ ID NO: 53553 - DNA, 600 bp, Homo sapiens
cccccctcggaagtcttctagaattaattaacgcggggggggttagggaagacaggattacttgaaagtaatacttcatttcttcttaccaacaattatgttaccaactctatttgactttataatctctgtgatatagggttctgtgatacataatacactagtttccttaggtctatgtaagcacactttacaataagactaacgactccatagcaatgactttattaaatgctactctaggctaaaagctaaagatgaggggagagaaaaaaaacactggtactttaagaactcaaaaagaggccaggtatggtggctcacacctataatcaatcctaatactttgggagggcgaggctggaggatgacttgaagccaggaattcaagaccagcctgggaacatagtgagaaaccattgtggccgggcacagtggctcatgcctgtaatcccagcactttgggaggctgaggtggggagatcactcgaggtcaggagttcgagaccaggctcaccaacatggcaaaaccccacctctacgaaaaatacaattagcacacacctgtagtcccagcaatttcggaggctgaggcacgag

SEQ ID NO: 53554 - DNA, 301 bp, Homo sapiens
  misc_feature 17, 28: n = A,T,C or G
cgggcccccccctcggngtacttctagnattaattaacgcgggtgggcttccaagttacaataaatgtgaccccaggaaaacaacaaacaaacaaaactaaaaaacaataaaaaaataaaaaaagaaaaaaaaaaaaaacaaaaaaaaaaaaaacccaaaaagaaaaagcaccacgaaacttaacagacctgaatccattaacgcccctccacctctacccctggttcatggactccggatccccccctgcgcgggggagcccctcttccctccaactctgttaattcctcccccccaccc

SEQ ID NO: 53555 - DNA, 451 bp, Homo sapiens
attaattaacgcgggtcagagtaatttaatgatcatataacaaacatgccaagcaataaactgacacatatcaagaggatgcctactttagtacaggctttttattttctaaaacttcctgactagattaatatttgaagttgacgcaagtttaacacagtagtgtcatctacagcagcacatacagtatagtcctatagttctattcttggatatactgataaatccacatgtccccttacacatttaccgctctgtccactgacattatatagtgtacccaccccacctcccaccatccccattcccagaggcctctccttagctctgtagcaataggaaatgagtggagaggtgaatcaggccggcccaggctggctctagaccagaatatgtgctctagacacatatgcagccatgtccagatcacaaacgtatatgtatcctttga

SEQ ID NO: 53556 - DNA, 589 bp, Homo sapiens
gggccccccctcgaggtacttctagaattaattaacgcgggtatgaggtagtatcctgttgtgattttcatttgcatttccctcccttgcatgatcttatgaggtaaaaaccaatccgtattcctgttgggtatacaaggaaactggattggaaaggttcagtgactgattaaagataaaagtcatatgcagattctgcactctccagagcccatttcaatgcacaactacaaggtctcacaaattctgagaaggctgtacaagccagcccttcaagattcttccagctatgacattctgggaccatgaatttatactgtttaaaaatctcttctcagccaggtgcggtggctcacgcctgtaatcccagcactttgggaggccaaggcgggcagattatgaggtaaggagattgagaccttcctggccaacacggtgaaaccccgtctctactaaaaatacaaaaaaaattagtctgtgtggtggtgggcacctgtagtcccagctactcgggaggctgaggcaggagaatggcatgaacctgggaggcggagcttgtagtgagccgagattgcaccactgcactcca

SEQ ID NO: 53557 - DNA, 409 bp, Homo sapiens
ccgggccccccctcggggtacttctagaattaattaacgcggggtggggagactcaggctgccctgatgggaaccactgcacagtgatgatatccatccatctatccacccatcagtccatccatccatccctccatccatccaggaaatgttcaccaatcgcctgctttatttgcacagagcctcgcacatggcagtcactcaaataaaccggtggaatgaagctaggcactgtgttaagtgctgggggtacaaggatgtgggcacctgtttagaaatcctagcaaggggtgggggctgcaaaaaatgagcaaccgctaggccgaggcgggcggatcacgagttcaggagatcgagaccatcttggctaacacagtgaaaccccgtctctactaaaaaaaaaaaaaaa

SEQ ID NO: 53558 - DNA, 581 bp, Homo sapiens
  misc_feature 24, 448, 481: n = A,T,C or G
gccccccctcggaagtcttctagnattaattaacgcggggggaaaaagaagagttttctagacaagcaagacctttaaaaagtatcagaattctttatgcctttacacccaaaagataattaacatatagatttgactcacattagcctatgaaactgcaaacattttcatggcctcagcattctcatatttctaggtaaggatatactttcagaagtactccatggtagcacttagccctattgtgatcatttacttttctgtctgccttcttttctactccctgaatttcttgaggacagtgactgtgctgtaatttacctttgtattactgtctataactggaacccgatccgaaggattggatgactttggattactttgtaccccatgctgggtggtcatagatatgcaagatgcttgttgactgatgagtagcatgcagctntcctcatcagtcattggcaagactatagttatntaaaggtgtgtcttgactaactataggatagttaccacattagaaataaagcaactgaccactgctgtcctatgtgtgaaatctactagaaaaaaaaaaa

SEQ ID NO: 53559 - DNA, 612 bp, Homo sapiens
ccgggccccccctcggaagtcttctagaattaattaacgcgggtactgagaataaggcaagtttgtgttctctctctactcccattgaacctagtactggaagtcttacccagtgcagtaaagcaagaataagaaataaaagacatacaaattgtaaagaaagaggtcagacttcccctattgaggtgacatgattgttggtgtagaaaatttgaaagaattagggaaaaaaaacctcatgtaactattaagtgaatttaagatagtggcaggatacaagatcaatacacaagaatcactcttatttctatatattagcaatgaacaactagaaatagaaatcaatacaatccaatttaaagcagcattaagaaacaaaatacttaagtataaatgaaacatattaagtatctatatgtcattaactccaaaatgctgatgaaagaaatcaaagaagaccattggtgagacataccatattcaggcactggaagactcaacatccaaaaatatcatttctctcaatatgtagagttattgtcattcctatcaaaatcgcagtagagtttttttgtagatacagacaaattgattctataatttatatgaaag

SEQ ID NO: 53560 - DNA, 332 bp, Homo sapiens
  misc_feature 32, 162, 193: n = A,T,C or G
taccgggcccccccctcggaaatacttctagnaattaattaacgcggggccaggaaaacagctggagttattcacttagtaccatttttacatactaactttgccttttccatgcttgcttgatgcggtttgcagcactgaagaacagtttcaattgctagnccaaccagagagcatgatcaaaccaacaagntctcccctgtttaaggagaaaaacaggttttaaggtaactgaaggtttaccagttactgattccacaatcttctctgtaaaatattttctgcctattatgcagactggtggttttaaatttggtaaaactataaaatac

SEQ ID NO: 53561 - DNA, 594 bp, Homo sapiens
cgggccccccctcggaagtcttctagaattaattaacgcgggtgcctgtaatcccagctactcgtgaggccgaggcagagaactgcttgaacccgggaggcagagggtgcagtgagctgagatcgagccactgcattccaacctaggctacagagcaggactccatctcaaaaaaaaaaaaaaaacttacacaactgcatggtcaccatctcaatcttataccatataatacagtttttcttaaaatataatcactacttcttatcccacctccatgagagaattatactttccttctgaaaagataccaggcttggtcacatgccttattttggcctcggtggggacagagtatctatacttccctgacctgatcgtcttggccacctgacttactttggccaaccagatgccagcctatagttatcaagttgtaccagtatcatttgttaaaaaatagtattctttacccattgaattgtcctggccccttttataagatccattgccgtaaatgtatggttttatttctggactctcaattctatcccattggtctttatgatcttataccaggactacacaatcttgatt

SEQ ID NO: 53562 - DNA, 559 bp, Homo sapiens
acttctagaattaattaacgcgggcttagtaaaagtgtgataatatacattagatacttaaaaaagattttttaaaagacaaatttaatgaggtattactatctgtactcctataattagttgtatgaaagaagtcttaaaaataacaaacatgtattgacaaaaccaagatactattgtaccctttgtaattctaaagcataaaacagttcatttcagaacatactgctcagtctgaaaagtcaacacattttgtttggaaaggtaaatactccttctcttccctattgtgtgttcaggttacttatttacagtcccatggggaagaaaaagcacatgctaaaaaccgacctaaaagatgttttgaaaatgaaattacctgagtagcttagcaaagctcacattttttacatcatctctctcctgacattaaagtctccactgacccagtaaaacacatccatctccaacatatgataaggatgtaagccatcactcaataaagtcacatatctcgggtatgcctacttaataatgaaatttctgaatcactttaaaa

SEQ ID NO: 53563 - DNA, 318 bp, Homo sapiens
ggccccccctcgaaagtcttctagaattaattaacgcgggggcaggactctcggcggaggtgactgtgacaacttcttgctctgaacagttgtacacccacgtttgtgccaggcagaatcactagatttggaagctggcgtaggaaaataacccgcagagattattcaccttaccactattgaagattgctcgtgattaggtaacaacataactagctacattaagcctataggtacataatgcatgtgtatgggcatacccatgataacagcatactacaaagctgaaacacttactataataactgctacacgtaa

SEQ ID NO: 53564 - DNA, 587 bp, Homo sapiens
cgggccccccctcggaagtcttctagattaattaacgcgggcccctcttccgaaacacctgacttgttcacatatatgagaagatatggatcactggggcagtggttttcaaacatggctgattattagaatccctcaggtggctttgagaaaataccaagacaatatcccagacctgctgagtcagaatctctggggatgacctggaagtctctgtgttaacaagctcctgaggtatttttggtgatcaaccaggtttggaagtcactgttccatggctgacttgaagacagggctccaggtctacaccttttttatatttccaatagtgcagggcacagaggtcacactcaaaaatatcatattgatggctcatacctgtaatcccagcactttgggaggctgaggcgggtggatcacgaggtcaggagatccgaaaccatcctggctaacatggtgaaaccccgtctctactaaaaatacaaaaaattagctgggcatggtggcaatggtggcacacacctttagtcccagctattcaggaggctgagggaggagacttgcttgaatccgggaggcggagattg

SEQ ID NO: 53565 - DNA, 616 bp, Homo sapiens
cgggccccccctcgaggtacttctagaattaattaaaacattaaataattttgatccttaacaattaatgatcatttactcaccccctaacaatatattatgtgctacaagtagagacaggtactgctgtaggaaactgtgccgtaagcaatggggatggatccactgcagtctgaggataatagtgtaataatgaaataagggaggggagtgtttttaaaagaagggggaagaagagaggaggaagaaactacagagaagaaggaaaacgtggagaaaaaagagaaggaaaaagagaaggaaaaataacaacaaagtaggaagagaaaagagaagaaacagagggaagaaaaggcagtaggagatgattactatgagctcaaatttgtttctccctttgttcccaagttccactccaatgctgcagtacaatcagctcagagcctgattatcatggctgacatagcctagcgcctgcttatttttagatgaaattaatcattttcatgtgttatttttggtttagataatagctcgagtacacagcagcttcttcattagctgccaacaagaatgtaaacaaggttgcatctctccttggcaggttctatattca

SEQ ID NO: 53566 - DNA, 607 bp, Homo sapiens
  misc_feature 22: n = A,T,C or G
cccccctcggggtacttctagnattaattaatttaacatcagtatgtgataggttgtgatggactgaatctgcctttactacaaaatacaggaaagggaagggggaaggtagtttactttcattcttctgagagttgttttgttctggagtaagtgtaatttaaatatattggcaagtgtttcaggaccaaaattcaaaatacgtcattaaacattgagaaaataagactaatgtgaactacagtagaatttttgtgattagatatggaagaggacatagtagtgcatgttgttgtcttataaatataatgaagtgcttttcatttcatttgatatggcctgtaagcccttctatattcaggagatttaaagatgaaatttctctataaataacttaaaaattgagatgaataaaacacatttagttagcgacaccttgaagatgatttgaaatactgatgaatctggtacttttattaaaatttgaagtaatttaactcaaaaaatttgatttcattatgagcagatatttagcatgttttggatgcggagaactcattaaaatacaaaattactttttttgcattggattcagctttaagtgaaa

SEQ ID NO: 53567 - DNA, 394 bp, Homo sapiens
  misc_feature 13, 26: n = A,T,C or G
ggccccccctcgngaatacttctagnattaattaatggtgttaaaatattaaaatgtatgtgtctgttgttggtgcttaacgtggtactgtgttggtaatgatttatagctgtctgaaatgcagtcttgtgtgtgacataaaagtcaaaataataaatatgtaaagcccacctcaatactgaatagaaatcagaaatcccaggttcgtctactaaagttcatacacatagtgctcattagaaagatccataggatcttcatgtgaagcctggtaacggtagaacttgattgtctggctatgtagtgtattgtaaattagaaatgcgatgattggttccctaatgataagctaacaacaagagatggcaatccaggagcaaaaaaaaaaaaaaaa

SEQ ID NO: 53568 - DNA, 235 bp, Homo sapiens
aatccttgggtcatcagccgtagagagacattgctgaggcgttagttagtggggacaacgagagaagtgtttgactgggtcccaggatcgcccatggccttatcttcttccagccatatcatgttcgggaagcaggtatttccaaagggttatgcaaagctcatagggacatctatctgatgtaaatgatggaaataggtaagtgtgagtcaaggagaccagtcacattgtgcct

SEQ ID NO: 53569 - DNA, 364 bp, Homo sapiens
cgggccccccctcggaagtcttctagaattaattaacgcggggagcaaacacaggccatctgttcatgtagcctaagcttttaactgctacgccaactccactgcctcagggaacaactgggcatggcgcctacatttatgtgaacccaaccctccaaattatgaagtctctgtcatgctaattatctgcatgagacatgagacatcaggcacttaaaaactcaccattacagggctgggtgcggtggctcacatctgtaatcccagcactttgggaggccgaagtgggcggatcatgaggtcaggagatcgagaccatcctggctgacacagtgaaaccccgtctctaccaaaaaaaaaaaaa

SEQ ID NO: 53570 - DNA, 393 bp, Homo sapiens
attaattaacgcgggtgtggtgacatgcgtctggagtcccagctactccgaaggctgaggaaggggcatcatttcagtccaagagttgaggctgcagtaagccatgactgcactccagcctggtcaacaaagcaagacttgtctcttaaaaaagcaaaacaacaacacatctttatattatagggcacagaaaggagcaagattataaaactaaaatagggtgaaagaatgcaagagactcagaactatggcaaacttataactaaaattccaaactacaggaaactctcagagcaaacgctgcatcacataagctgctagcccggcacatgattgtgaagaatcaggagtcctgtcaacaccaacagacagttatggacacagaccacaggt

SEQ ID NO: 53571 - DNA, 278 bp, Homo sapiens
attaattaacgcgggagtatcacctctgtgatcctacttttcccacctttgaaatagggtaataaatatctaccctcataaggtcgtgtttttaaataacctttattgaggtataatttccacacagtaaagtttacccattaaaaggccccacacagtggctcgtgcctgtaatcccagcactttgggaggccgaggcaggaggattgcttgagcccaggagtttgcaaccagcctgggcgagatggcaaaacctcatatctaaaaaaaaaaaaaaa

SEQ ID NO: 53572 - DNA, 592 bp, Homo sapiens
  misc_feature 16, 505: n = A,T,C or G
cgggccccccctcggnagtcttctagaattaattaacgccgggaataatttgggaatattcttaccaatgtgctgctccctccatttttccacttaaattcatttaagccttgcctcgttttttgacagtgttagatgaggttaaacagaatatttgtcttcacttagttctcaagaaacagattctgagggcttctgttttattgttgaactcttttaaaaaatgtcggtgtcacagatcacgcgggattgaagtgaagtgctctccttaggttccaagatggcagccatctctctgtcccctcctccgcttctgtgtgacacaagagaagcccagccggggtttcagaattaatctgattaagatgaatgttttcatttgctatcaattgtgggcctactccagtggttattttacaaagtctactaccaggaataaaatcttacgtttacttgttatgtagggattatcttgttgagctgataagtggagtaggtttaattntgatgattttcagatggaattccagctgtttaagcatcgtttttcacatttgaatgttaggtcagcagttccatgctgacagcctta

SEQ ID NO: 53573 - DNA, 358 bp, Homo sapiens
cgggccccccctcggaagtcttctagaattaattaacgcgggattttaaaacttgagagggccagtcagctggtggtctcagccagagaaaacccaggtcttcctcttgggcaggtaggcacagtcctctgggtttaccacaccacgtgcacgcttcctctttcaaatactcatcaaaaaactggcaggggtactctgcgttcatagggacggtggaaatagtgctctatccattgttggtaaaagtgccaagtattacctttctactgtacagttcagcaattgatttcaaagccttaaaaatatgtacatcccacttcacagtcattaagatgactactatcaaaaaaaaaaaaaa

SEQ ID NO: 53574 - DNA, 460 bp, Homo sapiens
  misc_feature 24: n = A,T,C or G
gccccccctcggggtacttctagnattaattaacgcgggtccttgtataaatacactataaaattcattatcctatggtataatctattatatattagtctctttatttatatatatgaacaaaaaatctagataaaaatatcattgaatagttccttcatgattaattggattcagtaagcaaaatctaacaactttataattctagtcaaatatggaccttcctttaggcttctccaaggctttttactacaactaaggtatccagctgcactctacctttactgagtgagtccccatggttaccagcaaagtgtgtgactgaaacaaagaggacggctgttcaaaaatgtatgtctaaaatatctctacctaagacatttttttctttcgtactttgtgtgtactgattctcaaaacaattgagttactcgttgattctttttctctcctccctaag

SEQ ID NO: 53575 - DNA, 571 bp, Homo sapiens
cgggcccccccctcgaaatacttctagaattaattaacgcggggatcatttattggaaaaaccttttactatctcttcttacttcctttcctttgttagctacaaagggaagattttcttttgcaaatccttagtaattaaatgagcacttcagtggctgtagccctcaatggcctgtttcctaggttttgcctttgacagtcatattttgcaaaggcccctgagatgactctgcatcttcccctactcaacgctaaaccaactgaagcccgtgctcactgcatgaaggaggaaaagattcattaagggcacttcattaagaggctgaaatgggaagctctaaatgcgcctgaaccaactacaatccagagaagctgtctattaggagtgccacaaagacagtttcggaagctaaactccagctccagtgcatcggattaggaagagtgatgggattagtgtttaatgacttggggcaggagacaaagggaatttcgacaaagaggcttagatatggaagaattaacactctgtattccaaccaggcctctgatgacttccagcattcttt

SEQ ID NO: 53576 - DNA, 601 bp, Homo sapiens
cccccctcgagagtcttctagaattaattaacgcgggggggcttcaacatacccattttgggggagacagaattagtaacatccaggaactattaaattatatcattttaaagtcttcccaaaagaaaacacaaggatgatatcataccagatattcaaagagcagattatatttatcatgttcaaagtctttcctaggagaaagagcaaacctccaggtgcattttatgagtctcttatgacctaataccaaaaacaaataaggacagcacagaaattggaaagcatggacccatctctctcatgatcatagataaacaaaaagttctaaattatgactaaactctagcatgttttaaaatatggtggccaagttaggtttatttatagcattttaaaattggttttgcatgcattaatgtatctaaacatactaaatttagattactggacagaaatacatgttcatcacaaaataccagaaaaagcatttagatagaattcaacactcatttgtgacttgtagcaaaccaagattagtagagaaactttctaatctgataaagaatttctaccaaaagccctcaatgaatattattaa

SEQ ID NO: 53577 - DNA, 575 bp, Homo sapiens
  misc_feature 17, 544, 551: n = A,T,C or G
ccgggccccccctcggnagtcttctagaattaattaacgcggggggaccaacctcagatttaagaaagacatgtggctgatttttagggttgtttttagaaacattagatttcttctctaataatgaaatatacttttgaaggactctgacaatgctggaagctcttttaagaaaaatgtcattcttatctgaaaatctttttttttcttctctctctcatgctacattacagctgatgaagttaaaaagcctgggcataagaaaaggggagccctgggtgtgactgccctggaaaaagaggtagagagtgcagtgggttcaagtatgtttgggtatgtgcagtcagtctttgtgtctttctcattcaagtaaattccatagcaattaaagtgaaaataatcatctttcatttgtgagtagagcatccatagaaagcaacatatatcttggtctagaacttaaattccaaaagaatgtgttatatttttcattttcccgtttttgttgcacagggacgagtttcctgatgcttccttgccatangccctgngctctgtgtgtagtgttcttccca

SEQ ID NO: 53578 - DNA, 222 bp, Homo sapiens
  misc_feature 28: n = A,T,C or G
ccgggccccccctcggaagtcttctagnattaattaacgcggggattggatgagagttcatgcctacgcatgttttatgagggtcattgccctaccccttatgtatttggactaaactgaacatgtctctgcatggataactctttgctttatacccatctaacaccaaggatgcctctctcataacactgcatagacctcacccgtctatggcacttattc

SEQ ID NO: 53579 - DNA, 590 bp, Homo sapiens
cccccctcgagagtcttctagaattaattaacgcgggtttcttacaaccaaccctatgaggcatatacacaatcaattgtggtttacacagactatgatataaatggagccacaaagggtttgcagtggacagcaagtacaacctgccaggcagacaatcctctgaggcaacaaaaggcaaagtctgaacattgactatactctttagactgagcctgtgctcccctgtgcctcccagaccccacagctcccaatttattcttgcttcacttgtgtttcctgcctggcccctgaggcttttgcatatacattccctgcattagacttctttcctttctgactgtctgacaaagtgatggggcagaaataatgaagagctatccattttaaccttttcatgccacagcgtcaatttttgtgaatgcaggtatatattatataatgaaaatattttaaaataatcatggagtcactacctacttctgattatgtgattaataaaggtcaacttgctgtttcaggcccttataactgagttgcaaataaatgttattttatgttactaatgcaataatttcacactatattga

SEQ ID NO: 53580 - DNA, 604 bp, Homo sapiens
cgggccccccctcggaagtcttctagaattaattaacgcggggcaacagcctgttgcagtgaatccaaatctgttaccagactgatttggttcgaaatggccaaaaagaataaagtaaacggcagtacatttcatagacagaaccctatgtctaggaaccaagaatcctcttgattcatcaggctacaatataactcggcctccagcaacaacttaatgtatcaaaatcagaaatatacgtacacgatgcagcgactggctcaggtgtgtagcattactatcattgggaacactatttcgtcaaactgtaaagtgcaagcaaactgggttcctgacctgaatttcatggaagtctaaacaactccattactgtacacaggagtcgccccaaacaaacatcacacatctcacttctgcctcagcaacggcggcgaccctgggttcccctacagagatcagaggagaggagaggacaggacacagccccaccctcttgccaaagggtccacagccgtttccacaggccacgtgtttccccgtgatccgagactcctcgcccgctgtgggacggaactacagggcaaaccggcgccatcacctgtct

SEQ ID NO: 53581 - DNA, 459 bp, Homo sapiens
cgggccccccctcggaagtcttctagaattaattaacgcgggacctcctgacagatgcagaatatgggtaatgaatgcaggcttggcgagatattacaggtgttggtccaggacttcgtttgattttgagcctatgagaactcagaaaagatattaaccagaccattaagaaatgatactgtggaatgttagaactgaagaagtcttaggaatcacccagttctgtcttcctaaccgcttgctaggcccagagacattaaatccttctttaaagccaaatagtgtgtcagtatcacaacctgaactaaaactctactgggatatggggtagggcgtggtggctaatgcctgtaatcccagcactttgggaggccgaggtgggtggatcacttgaggccaggaatttgagaccagcctggccaacacgatgaaaccccatctcttaaaaaaaaaaaaaaa

SEQ ID NO: 53582 - DNA, 459 bp, Homo sapiens
cgggccccccctcggaagtcttctagaattaattaacgcgggacttatccaaggtcacagagctatggaccagcatttcaaaaccactctgggttagacccagttccaaccactcccagatgatgacctctggagaaaagaagtcagggtcaaggagctacatctaccaatccattcaacaaacattaatactttggggcctggcgtggtgctcatgcctgtaatctcaacagtttgggaggccaggagtttgagaccagcctgggaaacatagtgagaccctgtcactaaaaaaaaaaacaaaaaaacttaaattaaccaggcatggtagtgtgtgcctgtagtcccagccactccaggggctgaggcgggaggatagcttgagtctgggaggttaaggatacagtgcactgtgattgcaccactgcactccagtctgggtgacagggcatgaccctg

SEQ ID NO: 53583 - DNA, 534 bp, Homo sapiens
  misc_feature 19, 32: n = A,T,C or G
taccgggcccccccctcgngggtacttctagnaattaattaacgcgggggcttagtgttcgaatacacgcttaccatgacaagactcagatgcgaaaagtggagtgaaaagtatgacccatctttcattgaactgtaccctttaattctgtgaaaatatgtcactgtaaaataaatgatgcacgtaaatctgcgtccatacagcaatacaatctctttttagggccttacaaaaagtaatgaggccaagcaacggaacatgtgagtttgtctatattttcacgatacggacacaacttaaaatcacaacaacatagactaaccctggctaatgtctgtcatcccagcactttgggaggccgaagcctgtggatcacaaagatcagaagtgcgacaccagcctggccaacttagcgaaaccctgtctctactaaaaatcctccaaatccgcgaggtgtgctggtgtgcgcctgtaatcccagctactacgcacgctgacgcacgagaatcttgtgaacccgggaggctgaagttg

SEQ ID NO: 53584 - DNA, 466 bp, Homo sapiens
cccccctcgagagtcttctagaattaattaacgcgggatattacaattgcatgaaaccaaatctgaaaatttatacatctatctggtgagttccaagtgaagagaatgttacttttttatttaggcacttgactttaactatcagataacaaaggaaatgactcatggaaatgaaagagatgacagggtcctaccactgtgactttgtaactacaccataaatcaagagtaaaagtcctcaatgaagtcaacccatagtctcctctagaaggcttcttattactctttttgctctttagttccatgtttttttgaagtctttttcatctgttgaaagctacttgggaggctgaggcaggagaatctcttgaacccaagaggcagaggttgcagtgagctgagatcatgccattgcactccagcctggccaacaacagtgaaactccatctcaaaaaaaaaaaaaaa

SEQ ID NO: 53585 - DNA, 317 bp, Homo sapiens
cgggccccccctcgaaagtcttctagaattaattaacttattaatgcggtaatcacagaattttccaactattatacttgttatgtgataaaattgtatctgtggctatgtaaaaattataatttctatctttaaattcatatatagttattagctctaatgtattcaaaatcttagggtttaaggccaggcatggtggctcatgcctgtaattccagtgctttgtgaagctgaagttgaagattgcttgagggcaagagtttgaaaccagccttggcaacaaagtaagactctagtctctgcaaaaaaaaaaaaaa

SEQ ID NO: 53586 - DNA, 431 bp, Homo sapiens
taattaacgcggggattggttgatttttagctgtggaaatgcggctcccaggatgtgactgtcagttacttcctggctctcagaaacttatgtactcatgagaaactgtcatttattgatttggccaggtttaaaactggttctggtggttacctgtagccaaggaacaaccagttctttcctgggaaggtaggaacattttcacttcatgcctattgacagccaagtgaatgagctacacaagaagcaggaagtctggttaccaaagtgatactttaccctggtgcacacctaaaacaaattttaaatgtgcattgattagtgaagaacaagggaatccgtgaggcattagagaaaaaagtaccaaccatggctttgactcaggaccttggaccttacctgctgatctgccacatgtatcaaatgaggct

SEQ ID NO: 53587 - DNA, 560 bp, Homo sapiens
  misc_feature 22: n = A,T,C or G
cccccctcgatagtcttctagnattaattaaaactggaggtaattcatcttgatgacttagaacatttgaagataaaagtttactaattaataaaaaatatagccagttacagaaaatgtttctctctttgtctttgtgagccactgcacccggccgtgttttgcatttcttaaaataatttcatcattaaaacattcttcattctttcagtgagaggatgctagatgagcaaggctgcactgacgttctatcttggtctcctctgttagtggcaggtttcaaaggttaaactagctacaggtgaaaggtaatcactagtagtttggtacctttccagatcccactggaaactgtaatagccaactctgttcatttgtaaagaaaaaaagaaaagccattccctgagtagtatggaatgggaagcaaccaccctcttcttccctcttacttaaataaacaagctaaatggaaaaataaactctacttcttcacatctggtagaaagctttctcttctgttgaaagttcacatgctccctttgctgtgcttggccatgtga

SEQ ID NO: 53588 - DNA, 600 bp, Homo sapiens
  misc_feature 516: n = A,T,C or G
cgggccccccctcgaaagtcttctagaattaattaacgcgggcattatctaagagagccttaataaaactaaaactatcagaatcaaagggagaaatacaaaaatccacaactaaacttattaattatttttgttcagtaattagtagaatagttgggcaaacaattcagcaagtagataatgtacctgaacaatacagttaacttgaactaattgacattgacataagttcttccttaaaagcaaaagctgcatgctttcacatgaaaagcagcaaagcttcaagaggttcttccacgtttactattttcccagatatatgagaatttggcattggggtgtgtgtcctctttggatctatgtgctttttgtagctcacttcctactgaggtctattttaaggctttccaaaaaggtcaggcaaggtggctcacacctgaattcaggtgtgattcagtattttgggaggctgaggttagcggattgcctgagctcaagagttcgagaccagcctgngcaacacagtgaaacccagtctctactaaaaattgcaaaatattagctgggcgtggcaccgcatgcctgtagtcccagctacta

SEQ ID NO: 53589 - DNA, 600 bp, Homo sapiens
  misc_feature 579: n = A,T,C or G
ccgggccccccctcgaaagtcttctagaattaattaacgcggggctctccttcgttctctcacctccaactccagtctttggccagtattatctggtattacccctccttggttttaatcagagttacccttcaacttcattcctcctgtctgagcatgcttgccttcatctgtttttcatctgtaaggataatcctagtgtaaggaacttcgatttcaacctaacctaaaccttcccctgatctaagcttttctttccactgcagctatgactttgatgtgatggggagttgctggttgtcatacttgttttcaaattacccctcttggataaataattttttttgtctagctttatcataaaggtctctgatgttttgaaaagaagtatctagataaccaaccagagaactgttggggggaaaaaaagcaaaacaaaaccaaaagaagtatcagagcactgaaaatatgcttagcaatattaagcgtgaaaaacgaatttcagatatgaaagattatcttggattgaaaccacattgtgattgagaaacttgaagaacaagtaacttcatgagtcanaagataagaaaccaactagca

SEQ ID NO: 53590 - DNA, 364 bp, Homo sapiens
cccccctcggaagtcttctagaattaattaacgcgggcagagatgagctcgggctgctcctttacgtcactgagagaagttaacagagtctgaatgaggcagaggcacttccactgggtcctaatgcccaagatgtttttttttgtttgtttttcatagtctcaggagttaaagctagaaagaagagttcttaggtctaacccctttcaaatttatcccctttcctctatgaacaagttccgattctcatataaagacaatgagggctttatttccacccttagatctcagctataagatttcaagcttgattttaaaggggctcctgagacattgccttggagaacacgcaaaaaaaaaaaaa

SEQ ID NO: 53591 - DNA, 560 bp, Homo sapiens
cccccctcggaagtcttctagaattaattaacgcgggcttatagtaacctaatttcaactgattacagatgaactacttgttctgtcatttaactggacactttaatttttttaccgtcacatatgcactattagattattttttagatttcctttccccttaaaaatagttatgtctattttaacaggcctaaaacagagatgcagtttaacttcaagttaatatttgtatcaacagctatcaaaaagtccaaatttacttgtatgaaagtgaaaattcagctgggcgcgatggctcacgcctgtaatcccagcactttgggaggccgaggtgggtggatcacaaggtcaggagattgagaccatcctggccaacacggtgaaaccccatctccaccaaaaacacaaaaaattagccgagcatggcagcgtgcgcctgtagtcccagctgttgggaagactgagggagaagaatggcgtgaacccgggaggcggagcttgcagcgagccgagattgcgccactgcactccagcctgggccacagagcaagactctgtct

SEQ ID NO: 53592 - DNA, 355 bp, Homo sapiens
cgggccccccctcgaaatacttctagaattaattaacgcgggcctcacctgccacctggcaggacagtctcaaaagccactgcgttctcaaattcaccaggtgaaaggaaaacaacgtcactttaaagctgctcaatgtcactctctgggtttgttttacatttctttggtgcaggaaggctttggtgttctgcctaggtataaaaatccaactaactatattcagctttgaaaacaatagattaatggccaggtgcagtagctcatacctgtaatcccagcactttgggaggctgaggcaggaggatcacttgagccaggaattcaggaccctgtctctctaaaaaaaaaaaaa

SEQ ID NO: 53593 - DNA, 408 bp, Homo sapiens
taattaaccgcgggggattccatagcgttgtcaataacagtgctaggctttaaatccagtttctttgccttcagaacccatgctcttgacaactataccagagatgtacttgtggccttcctccctgcccataagagaggtcagtttcttccagatcaatatctggagtgagatagcctcttcaatattttacgtcaattccagtgcctgctggactaaggtacgggcatcttctgctccaatttttacattatctggctttgctagagtcagacaaatgttgtttgcacaagtcttgtatttctccagcaattccactctcaatccatttgcaagattttctctgtggtgacatctgagggtgcaaagtgccacttgctgcttaatctataactggactgaaaactg

SEQ ID NO: 53594 - DNA, 309 bp, Homo sapiens
ggccccccctcgaggtacttctagaattaattaacgcgggggtcaatatctgagactttgttcaatttcatcagttcatccaggcttgcaccaaaagcacataatcataattgatatagctgcataatgaatcttgatatctgttagggtaggtcctttggccttgttcattttcttcaggactcacttggttattcttggtctactgaaatgctatacatataaaattcaaagttaattgtaaatttgtatcaaggaaaaaaactattagggtatttgaagagtgctaacagcaaaaaaaaaaaaaaa

SEQ ID NO: 53595 - DNA, 584 bp, Homo sapiens
  misc_feature 27: n = A,T,C or G
cgggccccccctcggaagtcttctagnattaattaacgcggggtggtagagggaaacaagtggccctccatgccctgcctgtatttcagaatcttttgttcttgtgagacttgaaattgtagagtggagcataggaatacgcagagtggacattgtagtcaggtaaaatccatcctcatttctgtatcttcctcattctgaacactatatatacttgcctcttggagtgtgtgattcatctttcaaactcactctcttgttcctattacttctcccaggactattgttaacttcactcttatgtttaatgtttttctgggacaatctcatctacttcaaatgcctcaaatatatttctcactccagtatattttcttagctctggaataatatggccaagttcaaattgtctatctctcacaggatgcttcatgaacacttcgaatataatagttctaaaataatcttatctgcaaactttagctttaaaatgtcattcttcttgaaattatataagatttattagtaacaataccaatgtagtcatccaagacaaaaaaaaatcattgatatgcaaactcagc

SEQ ID NO: 53596 - DNA, 376 bp, Homo sapiens
ccgggccccccctcggggtacttctagaattaattaacgcggggggtaaaaaaaaaagcatgaaaaaaaaagaaaaaaaagaaaaaaagaaaaaaaaaaaaaaaaaaaaaaaaaaaaaaaaaaaaaaaaaaccaacaaaaaaaaaaaaaacaaaagggtgacattatataacttgcgtcccccagagggggggggctccaccaccccgaatagactatatgacatgaccccgaaagctgagtggattataacatttatcaggagggggaaaccccccgggtaacacatgttgagagcttgtaggcatttcccctctctcataaggggtgtactttcataaggcgccaaagacaacccctcttggaggctgacacct

SEQ ID NO: 53597 - DNA, 451 bp, Homo sapiens
ccgggccccccctcggaagtcttctagaattaattaacgcgggaatgaccaatagaaagtggaagaatgattctctgtgggccaatactcatttaatgatgcaggttgatcacaattgttgtgtggccatgtaacaatactctgagagctggacttatgtatttaccatggggggattattacagagcaataagaagtatgtggcaaaaaccaattacagaaaaagaaatgatttcgaattaaaataacactaataatattcttagagatttgttgcatgaaaaatgagaaaggaatttgggaggagcaggcaaacaaatgagaaatctgcctattaaagaggcataattttatcaactaagaacaaacaagttttttgtttattataaaaaagttattgattgtgaactaaatgtgtgcatgttgagaactgttgtcccaatgaatacaa

SEQ ID NO: 53598 - DNA, 525 bp, Homo sapiens
cggggccccccctcggaagtcttctagaattaattaacgcggggcgtggtggggcgcgccttacattccagctactcaggaggctgagaaaggagaaccgctcgaacccagctaatttttgtatttttagtagagacggggtttcaccatattggtaaggctggtcccgaacgcctgacctcaagtgattcacccaccttggcctcccaaagtgctgacattactggcgtgagcattattaaaaatttgaaaacttttgctggtatatatggaaattttatctaaaattccaggaaagccaggggcttctagattgcatatacaaaaagggaaagaactgctctatctgctagattaaatactgggcttttcctttctaactactaacctgtgaagtcaacaggaactgaccagaaaaagcatttttctccctcctaaggagttcatactttcatgttctctttagggggatacactttatcagctaacagcacccagagatatggcatagataatttaaataag

SEQ ID NO: 53599 - DNA, 590 bp, Homo sapiens
cgggccccccctcgagggtacttctagaattaattaacgcggggcaggtattcttgagggcagtcaatcatcctgtatcttaaacacagaagagaaatactggcaactggaaccacagaaccactaactgaggcttctcctctaaagacagctttgataatacagggccagcttttagtatactgaaatattaagtgacttcatgcacaatttataaaacttaatgtgcttgttttgtgttccaaccaatgttactaacttaagtgactttggttgagagttttaatttgggtgtttttgttctattctctcagtggtgctagttactccttacattattttgcaaagtgatctgacagacattagaacaacaaaaactggaagtggccgcagtgattgatgttgtctttatatttgtttagtagagcaagtgtatatcctacttccactgagagaataacagggaaaaattaaaagaatcaggaattgtgtgtgggcagtaatgtgcttattgaactttttgaaaatagtgacacttggtgacatctttccaaatcacagtcattttatttaggctaggaaaaatgcag

SEQ ID NO: 53600 - DNA, 406 bp, Homo sapiens
cgggccccccctcggaagtcttctagaattaattaacgcgggggagagagagcaagaagaaacacaaatatttacagttttgaaattatctactaattaggtgataagtagtgtgtagatagtggaaacagaataggatgcacagaagaatgttttgaatatagaaatgatacaaaacttgagcactgatcacaaatgctgaggcagacctgaagatggcacttcagggtttggacatatgaagaacgaaagttccattgatagaaatgagaagttgccagggggagctcatttatggtggaagaacattagtttagtattgagaacactgcctttggggcaatctggcacctccctaatgctcagcctcatcttccactgtccccttaaggctccaatcacactg

SEQ ID NO: 53601 - DNA, 548 bp, Homo sapiens
cgggccccccctcggaagtcttctagaattaattaacgcggggtgaactgaaattatatagctaattttacttacgtcttttgcagaaaaatactctgtgcaaaaataaagataatatgttagatgatgtttaaatccagaattttactccactgggcttatccaaataagcagcttacaaatcaacgtactttgcaatcaaatacattttcaactaaaacatgtaattttcacctgaaaaatgtgcaattgaaaaaaaactgttcgatgatggttaagatgtgttttaaccatagaggggcatatgttctaatgtggctggatccccatttttacatgtcctaatgtcccccatgatttagcatttacttgggagtaaggcattccagtttgtatggtgaattatatggtcacagttaaatgccattctcatatactgagagcaacaacgttgaagaaaaaatgctggcactaacaataatagcttccatttactgagcacctattacacttcaatcaataaacctgacagtttccatactgcacgt

SEQ ID NO: 53602 - DNA, 568 bp, Homo sapiens
aattaacgcggggacagaacagtataaataatacacccctggaggaccttggcctacaaatgaattcctcaaatagttttcaattagggtttcaaatgctgtatctcctaccctccccgcttaggcctagcaatcatttataagttaggcccaatgatcatttataagttaggcccaattgcttctaatcatcaaaccaacttctagttatggaaaatttaccatttaagtaggcagttcacaaatgattttacatcagtctacttctggctgaacactacatcagagtttcctcatgacgctcggtctcagttgaaactaccttccctctccctagggtctctgagcaccacatcagtattatcttagcccagggaaggtaggaagtaagaaaagaaaaaaaagcagatcatgacaagaaaagaaaaagaaagcagatcataaatgtgaacttcttatatggctgatgagtaaagctgaaaattccaaaagttatcaatatttctgatcagctagctatcttggagggtatcatttatatcaagaacacaggagtgttattgacaaa

SEQ ID NO: 53603 - DNA, 592 bp, Homo sapiens
cgggccccccctcgaaagtcttctagaattaattaacgcgggtattcatgtgcagcaaatatgattaaagatctaagtataacatataccccctaccatcaattctagtacattttaaaaatggtaacatggaatttgaattgaattttctatgccacctctattcctttctgtgaaggcagccccacccagtagctgaagtgtcactacaatctgaggactagtgggggcagtctttcttggcctggtaccctttgccttcctgggaactactttctaccactgttttgggtccaagataggattggttgtttttgttttgttttgttttttcctccttccacctatttttattgccctcctgagattaaggcattcttactatccttgttttattggtttcctgtggtagggctggaaatgagggggagatttctgtgtccctgttggagttggctcggagtagctacctttctcccgagtagctcccaagacttcagatcttcattgtcccctctcagggcagctatgtggattatctgttctacctcaacacaagccttgcttctaattatcagagactggcagtttt

SEQ ID NO: 53604 - DNA, 418 bp, Homo sapiens
cgggccccccctcgaaagtcttctagaattaattaacgcggggagaagaaaagcctgttttagtcttttggaattcatctttagaaatatttctaaaagtaggccgggcgcggtggctcacgcctatttttatttttgtatagatagggtctcactatgttgcccagactggtttcaaactcctgtatctaccaaaaataacttaacaacaacaaaaacaaatgccctgcttgactttgtcacagtgttttaattttcatttacatcacccttctctatgtggcactgtgcgtgtggcatctatgctgctcaggacacagtgaggtgtctggttgtcagggtgagcaaagaccagggcaggcagagggacctcagattccggcttcacgtctagacattagtaaaaaaaaaaaaaaaa

SEQ ID NO: 53605 - DNA, 471 bp, Homo sapiens
ccgggccccccctcggaagtcttctagaattaattaacgcgggtcatgtttacatacaagtttttacaattacttttgcataaaatcgtaaaagaatcaacaataaaaaaaagtgcaacaaaattctgggtacacatccagattgcaaggaataaaggcaaaagcaggtaataatgaagccaaggtggtgagtgatgatcgtttctttcataagtcaggtactggcgggacagcgtgaggatgataattcaaaggggcagatagggtggaaggaaagacttgaggttgataaaacctgagcaaacttaaaagactgaaagagtctgtggaagggatatgctgaaaaggtaagaacaatagcggttgaaagatagggcagaaacctgaagggtacgagaagacaattcaaataatggaggcggtgggggtaaagagagatatttctttgtcagatgcaaaaaaaaaaaaaaa

SEQ ID NO: 53606 - DNA, 503 bp, Homo sapiens
cccctcgagagtacttctagaattaattaacgcgggtcattgatcattagagttttgtttgttttatgtggatatttaataaggtgagaattgagacattacccatggcagggtgcatcaatgtcatatacctgagatatgtgccttgattggctctatgactcaggctcaatattcactgaatattaatgccctaaaatatggaagaagaataatttccaatattcttacctactcttagaaaggacttttctctactgtatgaacttgtttgactcctaccttctatggaagtcaccattgccataggcatgttccgcagctgcagcccagccaaggctgcacaactcgctttccatctctcaaaacccccaacaatgggtcctaaagtttcctgaattttagaggattcaggcatcctttactggacgcaatgaggccaatacaatgggaagccaacagactgttttccagattgtataattctaaaaaaaaaaaaaaaa

SEQ ID NO: 53607 - DNA, 465 bp, Homo sapiens
  misc_feature 20, 33: n = A,T,C or G
gtaccgggcccccccctcgngaatacttctagnattaattaacgcggggccgatcataaggtcagggagatggagaccatcctggccaacatggtgaaaccccatgtctactaaaatacaaaaaattagccgggcatggtggcgcacgcctgtagtcccagctattcatgaggctgaggcagaggaatcacttgaacccaggaggcagaggctgcagtgagtcaatatcgtgccactgcactccagcctggggacagagcaagactccatctcaaaaaataacaatagtaatttaaaccaagatatcggtaatcaaaaatttagagagctgtataactctttgatgaaaattgttttgttttaacaaatgtgctactgtctgtggtgtggctatgcctttaaaacatctagatataaagtaaaaccagataaagtcaaacctcagttttataaaaatttgtagtt

SEQ ID NO: 53608 - DNA, 560 bp, Homo sapiens
  misc_feature 9: n = A,T,C or G
acttctagnattaattaacgcggggtgtctaatatctgtctgcttttgatttctctccagtaccttaaggtttcttatattttatccagagtgtagtagttatccacagatgaattagtctgaaaggagctatttctctattaccagaagctggaagcacatgtatctttttgaaagtatattttaaaaagtaaaaaaaaaaaaaaaaaatgagcctggcaaagtcattaaatattaagaaatgataaaatgaccgactactagaactccagacctgaaacacatcttatcaatcatctcatccagttgttctcgttagcgtgtggtatctcctcccacctccctagagtgagtagcaatgtgtgagggtgtttcatttttcacagtgactaagggagtcctgccggcatttaaaaaaagagattagggtcaggcacagtggctcacgcctgtaatcccagcactttgggaggctgaggcaggcagatcacgaggtcaggagatcaagaccatcctgggtaacacagtgaaatgccgtctctactaaaaatacaaaaaaa

SEQ ID NO: 53609 - DNA, 419 bp, Homo sapiens
ccgggccccccctcggagtacttctagaattaattaacgcgggctcgctgaaaccttaacctcctgggctcaagcaatctttctgcctcagcctccctagtagctgggactacaggtgtgtgccaccatgcccagctaatttgtcatttttttggagagatggggtttcaccatgttgcccagtcttattctctatgtttctctcaaatatatgaaccaacactttttttgcttaagctaatttttgttgtttcaattatttgcaacctaaagaattctgactgtggttaaatacagtaaggaaggaaaaaaaggaatactaactattaaactgaggtaagttacagaacccaagtgctactgcactccagcctggtgacagagcgagattctgtcaaaaaaaaaaaaagataaaaaaa

SEQ ID NO: 53610 - DNA, 556 bp, Homo sapiens
  misc_feature 514: n = A,T,C or G
ccccctcggagtacttctagaattaattaaccgggcttctagaatgctgacaacccatttgtaatctgttcaaggaatcaatacaaagactgctttatatgattaaagagtattcgctaattaaagcatgataacaagatgttgagaagcagaaataattgtgctttatacgatttctctttgagaaaatagatattatttgaatcaaatttgaacataaactccctagcattatgtaaaatagccatagtattatttttattgaccttggtaagatttatgcattcttttaattctttttatgtaatatgaaatcatagaatgttccaatttttattaagtgaaaatcaatttatatagaacatattacatcagagcattataggtgaaaaacttcataaatcacataaacttgctgaaagtatgaactttcttatgtttattttttatattacaattagactttaacatttgtgacttctcctatacattgtttgtaataaatgcatcacanaatccattaatgtgctgtccacatactcttagagactacatt

SEQ ID NO: 53611 - DNA, 297 bp, Homo sapiens
acttctagaattaattaacgcggggtctccgattctgtttccatcactctcaatctcaagaaaattcctcttttagagtatgtttcggcatctggtggaaactggattaaacctctctggttctcttcaataacataatcccatctgccctacttgctggtcacaaccccctctagtttccaagttactgttttccaacccctgacagcagaaacatcactaatgcaacacaagagctgggtgaatttcattctttacagcctagggctgcattaacttctccaaaaaaaaaaaaaa

SEQ ID NO: 53612 - DNA, 493 bp, Homo sapiens
  misc_feature 9: n = A,T,C or G
acttctagnattaattaacgcgggatcctgggattcacagggttcacttaagatctaaattaacattttttaaaagcatctaatcagaacatcctacattattgcaaaatattagtactggtctccatgggaactttttttatttgtttgagaaacagaactgtcctaaaattttcttcaacggtgtaactgccttattaaatcatatccagaagaaaactaattttcagcctctccttcctattaattctagacatgttttgtgaagttatataagagatttcataaagactaatacattgatgttctttttttcaatgattacttctctcaatgcttgacccatcatcattttaatggaatgaacctgacagagcaatactgaagacattggtaactagatgaaccagaaaattttaagatcaagcatttggaacgttttagttacagcagcattaaaaacaaacagacaaaaaaaaaaaaaaagcggccg

SEQ ID NO: 53613 - DNA, 498 bp, Homo sapiens
  misc_feature 470, 477: n = A,T,C or G
gggccccccctcgaaatacttctagaattaattaaatgactgtggctcaatcagttaaaagtttctcctcttatcactttatgacattttattgcatttaaaaattaaaggattagttaaattcttctatgatgatctggctggcaaagttggttgcaaaacatataaattttggatgtgatcctcccaaaatggcatacagaaacccgatttgcaatttgttcaagtcatgctaaatgtgcacttgttaactaaaaaacattctgaaactgaagaagacttcatttctggcactcactaaaaaggttttcttgtaaatgtgttgtaatctcaaacaatttccattcttgattaatagttttagggaatttatttaagaaattggtatatattacagatgttaaaacatagttagtcctcaaagctgagttaaacttagaaccctatgatgttaatgattttgaggacanaaatgancattactaatatttactggat

SEQ ID NO: 53614 - DNA, 619 bp, Homo sapiens
  misc_feature 556: n = A,T,C or G
cggggccccccctcggaagtcttctagaattaattaacgcggggagcttttgtttcctcattacatacattatataagatgtagtgatgatttatcattcttctaagaagagttttgtaagagataaagtgtgactcaaatatgtatggacaccttgagagcagaaaataactgagttttgcatcactttcacagtagccaccaaatagatgtttaataaatatatgaatagaggaaagaatgagggtctatctgtcattaacattcttatgggaaagagcaggatgtggttataaatgtaaatgattataagtagaacaaagtaagtcttgtttcatccctggtgctgtgatttttgaaaaacgtcattcatttttgccaagctcagtttcttacttaaattgggcatcataatattattttaatgtcctacctacacgacagggttattttcaaaataaaatgtatgtgaaaatctgtcatgacctctaaagaaaatgtaatgctaacattggttattgtttcttatagttatatcatcttctcctgctgaatngcacttgattggaaggggagggcccctcactaccttgagcttttattacattcccctcagtgt

SEQ ID NO: 53615 - DNA, 477 bp, Homo sapiens
gggccccccctcggagtacttctagaattaattaacgcggggagccctggatctggatagaagttgagttcagagggagagagatttaaaaaaataaaccttactcaaggtgatcctgtaaatacaaatcctaaaacctaagagacaatctaatgctaagaaagattgaaaattgtaagctgaatccactccaaatgacataaaaataacagataatgtgaaaattatgtatgtaaagatatatttaggattctcaaagagataaagacatccaggaacaaaatagaaacttatgaaattaaactggcataatgaaacaggacaagtggatatgaaaatgagtaatttgaaatcctagaaatatgaaaaaaaaatactaaaattaaaatattaacgggattaacttaacactggaagctgctgaagaaggaactcattaattggaaggtaggcttgaatttatttggaacacagcac

SEQ ID NO: 53616 - DNA, 595 bp, Homo sapiens
  misc_feature 468: n = A,T,C or G
cggggccccccctcgaaagtcttctagaattaattaacgcggggggagaggaagagacatttggagggtcatgctcatctcttttgctagaagtgaccacgccacactttccacaacacactggccaaaaacagtcgtacaggaccttcagcatgacaaagagctggtggaatgccatcttcctgtgtgcctggaagacgagaaccagacttgggaaagtaccagacctctctagcacaggtattaaaaatgaatactgtgaccttctggaaggacaattctagaaggttctggaatgaattttacaatcaataagtccagattctagtattgtgtagactgcaagggataaaacatatgtgattgaaacatttgaaatatattttcctcttgtaagacatgtaagtccaaatgaaatacacatatacatatgtagtgggtttgtaaatttaaccagatgtacagcanagaaaaatttctttttttgtaataatgtagtcttttacatcccctgctcattggaaggcaggaaaaatattaactaaatatctaggaacctgtggtttagcggcaaatatctgagctgcagtgatga

SEQ ID NO: 53617 - DNA, 561 bp, Homo sapiens
cgggccccccctcggaagtcttctagaattaattaacgcgggttgcaaggtcaatgattggtggcagaactgagtttcaaagcagacctctgatctccttgtccagggttttttctaccacatcacggcccaagaaaaagcctatctttaagcctgaaatatttccaatattttcaggacccatctggccttgtcaaccatgaactttccttataaactattaacaaaagtaacacagataaatagaggaaagcagtcaggacttaaccaaggaaaaatatcaaagtccatttagctcatactgctctcaatttgccaggtgactaaattcattaagggtttttcacataaggcataccatcctcatcagcaactgttgcctttgaggttgtgattttacattcaattccaattttccttggatttcagcaaaacaaaaataaatagaaaaggaatccctttgaaataatgcagaagcagaattcagaaaccacacagacctcttatataagcatttaaaaatacaagcattattcttgcttaaaatgcctaaacaagcct

SEQ ID NO: 53618 - DNA, 451 bp, Homo sapiens
cgggccccccctcggaagtcttctagaattaattaacgcgggtggcactgaattatgctgatccagttcaagaataatctctaaggcatgggtatctatgaagatagatgggtatccatctatcttcagaataaccttaaatggatctttcaggcaacttcttgaccctaataaattccagtagattcttgatacacttgggagtttgaattagtagtatgtctctccttttcccactcccattccacttagtatatgaaccaggttgttgactgcaagtattgctagagagtggctccaagcacagcagtatcatttatcaatactagtatatctagagtgttccaaaagtaaacctgtatttagttggtagtaaaaaataatttatcaaacctacactgagacatacctctcctctgtaccaaaaaaaaaaaaaagcggccgccaccgc

SEQ ID NO: 53619 - DNA, 604 bp, Homo sapiens
cgggccccccctcggaagtcttctagaattaattaacgcgggggtgttatattttagttttatttcatcttaatttttgcatatggtgtaaggaaagggtctagtttcaatcaacctgcatatggctagccagttatcccagcaccatttaatagtcctttccccattgcttgtttttgtcaagtttgtcaaaaatcagatagttgtaggtgtgaggtcttatttccaggttctctattccgttccatcggtgtatgtctctgttcttgtaccagtaccatgttattttggttacaggagctctgtggtatagcttgaagttgggtagcatgatgcctccagtttcgttctttggcaaaactaaatcttaaaagtagtcaaaacagaaagacattatattcaaagaaacagataaaaaatttttgctaactttgcaacaaaaatactggaaagcagagagaatggaatatcttcaaatttctgaaagaaagtaactgtgaatctagaatctaatgcacagaaacaatatccttcaaaaacaaaaacaagtacattttcagataaatacaaagtatatttgacaactgacgtttaccaaaaaaaa

SEQ ID NO: 53620 - DNA, 539 bp, Homo sapiens
ccgggccccccctcggaagtcttctagaattaattaagcgggaagaggaagaagattaaccttatgctgtccacctgggtaactagcattatggctgcatcattaatagaagtaagaagcccaggattgttgtttgctttctgaacaatttatatatattgggaaataaggaatataaaattttaaagactaataaagattaaatatagtcttatactatattatttatgtaacaattaaatagctaaggccaggcatggtggctcatgcctgcaatcccagcatgttgggaggccgagacggacagatagcttgagcccaaggagtccgataccagcagggcaacatggcaaaacctcatctctacaaaaaaaaaaaacaaaaaaaaatttagccaagtgtggtggtgcacacctgtagtcccagctactcgggcagctgaggcaagaggatcacttgcactggaaggtcgaggctgcagtgagtcatgatcgtaattgtaccactgcacttcagcgtaccctgtctctacaaaaaaa

SEQ ID NO: 53621 - DNA, 595 bp, Homo sapiens
  misc_feature 537: n = A,T,C or G
ccgggccccccctcggggtacttctagaattaattaacgcgggacctttttgcagaccagcctgttcttttaaaaaccaacttaagtttttttcaacaagcaaaatgtaacccagtatgaagtcaaagtggtttaggttatttagcctgagttctgatagtttttgaaaatatgttaaatatattaaagtgtcatagacagtctgtcctggaattcagctgccaaaaaagttccaaattaaaaggactaaaccaaaatgactctttccagcacagctgtttaacctttacaatgataccatgccaccaacttgcactgtgtctgctgcatttcaccagccagtcattaaaaaattatcgctattttctaaccataatagcaaaaaaataaaaaatcatattttcaagtacttcattaacaaaaacttgaggtttacagttgtctgtttgcaatattgattaaaaaatatataattcagaacaaaattttcctccagatttaagcatataaggaaaaaggagggaaaggaaggaagcncagaaggaaatgtgaagaaagtgtcaagtaaagttacttataaactataaattttagt

SEQ ID NO: 53622 - DNA, 526 bp, Homo sapiens
  misc_feature 27, 499: n = A,T,C or G
cgggcccccccctcgaaatacttctanaattaattaacgcggggttggccatctggacccaacagaccctccagctgcctgtgacccataaaatctgagacccctgccctccccgtgcccacatcttgtcaacattcctcaagtgacccaatttggttggaccttctgtttcctgctgagccctgaccgatggaggacacaggagattgtgcgtgcatgtgtgtctgtatgtgtgcatgtgggtgcaaagggctcacactttccattagattctcaaagcatctggggaccaatgaagcctgaacactgctctagcagccagagagaactcgggacccatgctcagagcaatcggggcatctgtggtccccaacaccgggaccccagaaatggtaccggaggtgtcggctgggtgactgccccctctgggcctcagattgcccatctccaaccaaacagaatggattacaccaggaacccttttattctattctcaatncatggatacaaccatggaaaaggacct

SEQ ID NO: 53623 - DNA, 496 bp, Homo sapiens
  misc_feature 30, 487: n = A,T,C or G
taattaacgcgggccgggagtacagatttnatggagaaataaaaactcaggtagtaatatcaatgtcagctaaaactttacacaagtcataaattagaaagtcatggctgggtgcagtggcacacacctgtaatcccagcactttgggaggctaggccagaaggatcgcttttttttttaagttcaagaccagtctgggcaatatagcaaggccctatctctacaaaaaattaaaaggaaaaattagccaggtgtagtggcacacttatagtaccagctagccaggaggattgcccacttgagccctagagattggaaggtgcaatgagctatgatcgtgcctctgcattccagccttggtgacaaagcaagaccctttatttaataaaaaaaaaaaaagaagtcatattactctgataaaaggtataatcctcaattgagatgctgacagtaaataacacataacacattaacacatacgccaaanaaaaaaaaa

SEQ ID NO: 53624 - DNA, 442 bp, Homo sapiens
gggccccccctcggaagtcttctagaattaattaacgcgggctggctagatttctaggggtgaaatgcagctggtggcctagcacagcagtaatcatagcccacctctgtcgtgtgccctgcagtttacacattactcagctcagaatcacctcaacagggtgggacaatggttcccattttgcagatatgaaaactgaggttcaaggttggggagtggccttacagcttgtgagtggagtggcctgagcttgagccctggtcctctgctctttctgctatgcacagtcactaagatggtaaataccttccaggtcttgtggccaggatggggaactggagggtcagctgagctgagaaagttgtaaggttagattagaccagaatcggaaaggagcagtgaaaatgggagcaacctccctgctccaggcctggaatccatg

SEQ ID NO: 53625 - DNA, 571 bp, Homo sapiens
  misc_feature 38, 508: n = A,T,C or G
ctggggtaccggggccccccctcggaggtacttctagnattaattaacgcgggtcagaaacatacaattgaaaacatctgtcaaaatacagaataaaaaagacagaaaacttgagaaaagagataaagaaatgaggatcaatcaagaaagccaatattctgctagtaagtatcccaaaatgggcaaacatagactaagaaatattaccaaggaaataataaaagaacattttccataactgaagggagacacttgcatttcaactgaaaggacctactgagtccagcaaagaataacaaaaacaattcatatctaaacacataattataaaattccataactacgaaggacaaagataagatactaaagcttatctttgtgagcgagggaaaggatcatttagaaaataacaggacagaatagcatcagacatcttaccgtcttgatgctcaacagaattgagcaaaaacctctaagttgtaagagagaaattatttgaattaaattnctacaccagccaaactatcaagcaattatacccaagccaaagctattttcaacatgcaagatt

SEQ ID NO: 53626 - DNA, 363 bp, Homo sapiens
ccccctcgggaatacttctagaattaattaacccgggggcacaagagcaccaatggcccttgtacgcccctgtcccacccaaccaaaccagtaaatccctaacgctttgctctgactctctgctttgctccacccacactgtacaaaaaccaaagggcagcgcactaacaattaacactaacataacactggcacatgcgaacggggaatcgggaaagatacttacactcactatctcatgtttgccaccaagcccttttccattaatacaagtctactggataattgaccaatacatatagctgacaggtgctaagagcccctgtgactatataaaactacttgatacaccatataaaacaa

SEQ ID NO: 53627 - DNA, 549 bp, Homo sapiens
  misc_feature 37: n = A,T,C or G
ctggggtaccgggcccccccctcggggtacttctagnattaattaaatgtgatatggtattattatataagccattttctatcattagtgaaaatatctgtctatatcactagttcctagacttctgattttcactgatcgtgggaaaagggtagaattttcagagggacagagaacaacttatagtataaatactcaaagttatatgaccctccttcacaagaagtcatatttactatgcaaccaaaaaaaaaaaaaggaagaaatagagacagaattgaatatactatctcatggaataatcagaatttcttgttgccttgtgggtaaaatttgcctggcttgcattgtagaggttggaagcaaaatttaaagcactcagagtattccctgataaaagtagttgttgtttttttcttcctctttttgagacagggtcttgttctgtcaaccaggctagaatgaaatggcttgatcatgactcgctgaagcctcaacctccgggcacaccgatcctacctttcagcctccaactgctgggactagagg

SEQ ID NO: 53628 - DNA, 446 bp, Homo sapiens
attaattaacatgtgagccaccgttgcatctccttgaagtttcaatagattgtcagtgtgattgcccttgtaattttccagtttattacctacaaatagtgagagcttgctcttatcttttctaattatcgtattggctgggacgaccagagcagcactggacagtaacggtgacaacagaaatctgtatcttctcctgtgttttaccttgaaatggaatattcactgaagatctttgaaagaatccttttatggagttaactaggcctattttgctaatgtcagcaaagaatgctgacatttagcacaagcatttatagcatgcactgagatgatttttccctctaaaattaaaatgccctcatgtggattttttaatgctgaaccatgccaaaattgctgagggtcttttaacataagaccagggctgatttgctaaatgctat

SEQ ID NO: 53629 - DNA, 161 bp, Homo sapiens
  misc_feature 14: n = A,T,C or G
ggccccccctcggngtacttctaggaattaattaacgcgggaggataaaatagttttcttctctttaatactattagcatctaattaaaatggatttgttagaatgttaacaatgcacagaaatatgaagatggcaggtgataaggttgttgtagtatgtg

SEQ ID NO: 53630 - DNA, 377 bp, Homo sapiens
ccgggccccccctcgaaagtcttctagaattaattaacgcgggctgggggtaattacatacaaacaaatatggcatcaggagagtgtttttcacaggcatttgggtttttaccacaggcattgtttggaagctggttggtggggaggcacaaagtcccatcacaagctcaagagcccctgggaaaatccattcttctggaatttatggcccagaaaagccaacagtttgaatttgcttcagggactcttgcccttctagtccagtatttagggaatttgttttgtttgtttttgagaaaagaagagaaattggggttaagaacagaatgtctttttttttttgtgcccaaatcatggaagaaaacaaaggctaaaat

SEQ ID NO: 53631 - DNA, 626 bp, Homo sapiens
  misc_feature 17: n = A,T,C or G
cggggccccccctcggnagtcttctagaattaattaacgcgggacagctggtctacaaatggatttttgcacacaccaaaacttgccttgtggcaaatgttttataaaagttgtatagaggcttcaaatattgttcttcatgattctttgctgctaattttccagaagtccttctctttcagagtctttttttttttgagaagcatttaagaaaattatgttgagtttggtgtaaattagagttgtgacaaattatagagcagttttcacaagtaaaattgggccagttagctcagaattagaaaattaatctttttccaaagcattatctcactttctgtgtgtttgtagtgtttatagactgatagtatcagtaccaacagctaaaacaaaagtcagttttttttcttttaaaaaacattatttctttttaatgaacagttattgaagtattggccttaattggctaggtgtggtggctcatacctgtaatcccagcactttgggaggccgaggcgggcagatcaccggaggtcaggagtttgaggtcagcctggccaacacagtgaaactccgtctctactaaaaataccaaaattagccaggtgtgatggcaggcacctgtc

SEQ ID NO: 53632 - DNA, 473 bp, Homo sapiens
cgggccccccctcggaagtcttctagaattaattaacgcggggacatggtatttcaagtgtctggcaaaaggttcgtgggcggttgtttctgttagaccattaatcattctgttccattatggagaacctcagatttgaagttattagcttttttaacccttctttgtaattagatcagcataatttcttgttaaaaggcaacaaatcaataagtcagctgaaggaaatattccccacttcaggcaacatataattagcctattggcctcaaatatctttcaagtaaattgcttgaagcttattgtcaaattaaaattcatccaatttgttatgtatctactataggtttgtttacatctaatgctaaagagtaagtgtaattcaactatttgtttagctgtaattttttttccatttaggccttctttttattaaaactgaataacagtctacacatggaaaaaaaaaaaaa

SEQ ID NO: 53633 - DNA, 347 bp, Homo sapiens
cggggccccccctcgaaagtacttctaggaattaattaacgcgggtcctacataaagcctttcctgttaactcttggccaaccccgactggtcataagatcctatggcacaaggagttagtgcatcccacatagtcatcattttaaaatatgccttattctattgttctaaaaattatttgttgaactatacagtagtccccacttatctgtgggggatgcattttaagacccccagtggggccgggagcggtggctcacgcctgtaatcccagcactttgggaggccgaggcgggtggatcatgaggtcaggagatcgagatcatcccggctaaaacggggaaacc

SEQ ID NO: 53634 - DNA, 528 bp, Homo sapiens
  misc_feature 35: n = A,T,C or G
tgggtaccgggcccccccctcggaagtcttctagnattaattaaagtgatccattattattaaacgttaaggaaaaatttcccttaatttttttctgttgaacgttctgagcaatttgagtgttagttctgagaaatggtccatgaaaagggtgccagttcagccacactggggtccagggaagggaaagctgtgtttcattttcatctccttaagattcatttaatgtaagctctacgaagtcttgcattggagaaacctgggtcgcctgtgcttcccatcttgttttgccccaaacccctttaattctgtgataaatcttagcattctgagatagcagtgtttcctggaacacactttgggaaatgctgttttggaggaaagggggaaattgtgtgtataatgactaaatcatttttttagagatagatttactcactggcaaatgtattccagaggtcacagtaaatggaaggaataactattagaaacggcttccttgatcactacactcactgtgaaaagaag

SEQ ID NO: 53635 - DNA, 609 bp, Homo sapiens
  misc_feature 12: n = A,T,C or G
cccccctcgagnagtcttctagaattaattaacgcgggatagagttctcttaacatgctgttcgattttgttagtattttgttgagaatttttgcatctatgtgtataagaaatattaaggctatagttttcttttcttgaggtgtctctgtctggatttggtatcaggataatcctggcttcatagaatgagtttctcttttttttttttttttttgaagagcttgtgagggatttgtgttctcatgtttgtaaaattcaccagtgaagccataaaaacctttccttcttgggagatttttgattacagattaaatttcttaacttgttatagatctgattctctctttcttaggcagtttggtaatttgtgagtttctagaaattgtccatttcatctaggtaatctaatttgttggtatacaattgttcatagtttttacttataatcctttttatttctataaatttggtaatgtcaccactttcattctgactttacttatttgcagcttctctttttcttagcccagctaaagttttgccaattttgttgaccttttcaaagaaacaacttttggttttgttaattctacttttctatcctct

SEQ ID NO: 53636 - DNA, 596 bp, Homo sapiens
cccccctcgagagtcttctagaattaattaacgcgggaggattgcctgagcctggggaggtcaaggtgagactgacctcaaatgccactgcacttcagcctgggtgacagagtgagaacctgtctcaaaaaaaaaaaaaaggatgtggtcttgccgtgttgcccaggctggtctcgaactcctgggctcgagtgatcttcctgccttggttcccagcactttgggaggccgagacgggtgaatcacctgagtccaggagttcaagaccatcccaggcaacatggtgaaaccccatctttacagaaaatacaaaaattagcagggcatggtggcacgcaccaggagtcccagctattcgggatggggctgaggtaggaggttcacttgagcctgggaggtcgaggctgccatgagctgtgtttgcaccactgtactccaacctggacaacagagtgagaccctgtctcaaaggaaagaaaataagattttaaaggtaaaaattgtttatatgatatgttaactgttatgctattctaaatattacatatttggctgccctctggatattagaaatctcaaaatcgctactaattctt

SEQ ID NO: 53637 - DNA, 306 bp, Homo sapiens
cgggtccccccctcgaaagtacttctagaattaattaacgtggggtcatttggaccaactgtcatcgttagcattacatttcaaactactcctcaagttagaaatattactgccatactagagaagaatggttcgttctgtagtttaataaactcgtatttattccaaaggataagaaaattagtatattttggccgggtgcggtggctcacgcctaatcccagcattttgggaggccaaggcgggcagatcacctgaggtcaggagttcgagaccagcctggccaacatggtgaaagcctattgc

SEQ ID NO: 53638 - DNA, 495 bp, Homo sapiens
  misc_feature 29, 455: n = A,T,C or G
ccgggcccccccctcgaaatacttctagnattaattaacgcggggagttgtaataaacaaaaataacttaataaaaattattcagtttactgaaggccccagtggaagaagtatttataattttatgatcaacattaattgaatgctatgtaaacacaatgctaggcattagcggtattaaacatttttctactatcagctgggtgtggtggctcacgcctgtaatctcagcactttgggaggccgaggcgggtggattgcttgaggccaggagttggagaccagcctgggcaacatgatgaaaccccatctctactaaaattacaaaaattagcctggcacgttgggcacacctgtaatcccagctactcggaaggatgaggcaggagaatcgcttgaaccaagggggcgaaggttgcagtgagcagagatcttgccactgtattctaacctangcaacagagcaagactctgtctaaaaaaaaaaaaaaaagc

SEQ ID NO: 53639 - DNA, 627 bp, Homo sapiens
cgggcccccccctcgaaatacttctagaattaattaataggataagaaaccatgttcatagaagttaggaaacaagtgtttaggggttaaattataattaaaataattgacctcttaataactgaaaatggtctgtacctaaaaagttggtataaagttattataagtaggattaactatcattcatcagcattttgtaacactcagatttgaaagaaagagaaaaagagagcgataaacaggatttattcacaagagaaccttctgtggcattttctgaagattagaaataatcagttctaactcctaagacaacctataagtgtaaaataataatggatatttataatgatgattctgagttgcacaatttaactcatcaaatatgttcattcccttccatagattatacttaataagccaagaaggggattctcaatcattttcaaaagatttttaataaggaatgaaattttaaaaatgttttcctccctggtttactttaaattcatgaggaaatttaatgagtcagatcatcccatttccaaagcattgcactatttgttagggtatacttttttaaacctccaagctgctctgtgaaaggttacattttattttatgcta

SEQ ID NO: 53640 - DNA, 362 bp, Homo sapiens
ccctcgaaagtcttctagaattaattaacgcggggggattacgggcgtaagccaccatgcctggcctagttctttatttataatgtgactgtatttcagagagtgttttaagatggctcagaaacaaattaaattctcagaaatggaaaccttgaccttgatctcatttgtcccatattttctattcaactgagtcaacgaactatgtagtctaactaaattttaaatgtcatcaaactcacgtcaccctcagctgtcagcttcggcctcctgcaaatcagatcattagtgaaaaagcataatcactaccctgtgatatcccctaccattataataatctactagggaaaaaaaaaaaaaaa

SEQ ID NO: 53641 - DNA, 356 bp, Homo sapiens
aattaattaacgcgggaggcggcggccaaatgcccagagctcacaaagggactgagaagagtttacagtccccaaagagaaaggactaaaatcaatgacctctgcttctaccttaagaaactaggatgagaagagcaaattaaactcaaagtaagcagaagaaagcaagctttattgatgaaagctcaatcaatcaaatggaaaatggacaaacaacagagaaaaaccaatgaaaccaaaaactgattctttgaaaagttcccttgagctagaatggccatgaataagaaaccattaactagaagggttttgaatgagtcaaaaattactgctatcagaaagggaagaaaagtctg

SEQ ID NO: 53642 - DNA, 617 bp, Homo sapiens
cggggccccccctcggaagtcttctagaattaattaacgcgggattaactgaagggaataattaaacgtttatttgtaatatatggaaatcattgctagctttcagagaaatagaaagtagttcttagtcttagtgcacagatcagtaccatgcatgaaattccatctcaggttctatccaataatctaccttatgtttggtaacatattttgcatattatattatttcttgttctatcaaggaaatataagaatattaatagaataagtgtcatttggaaattttgaagtgtaccatttttaatgtatttaatattattaaaaacaaatgttttgatatatttaataatgactgaaatagacatgatctctgaaaatgagtgagtttttctcgtcatctgatagaccaccctatggcagctaaaatagacttttaaaagcaaagcaatgaggttggaagcctatttatgtaactttgagtaggataatggtacattagcttctccagagagagattaaaatatataactcctactctaggaaatgaccatcactctgaattgatgctgtgattgtgggatttattatctgtacgtctcagtaatttttcaatgctg

SEQ ID NO: 53643 - DNA, 543 bp, Homo sapiens
cccccctcgaaagtcttctagaattaattaacgcggggaaccctttgctcccagtcctataagatttggttcttgatatttaaatccaagcttttggaactttttttctctccagcagctggtacttgcaattcaaaaccatggttttaaagacgattgtctgcactgttgacttacaagggtcaaattagttgctcaaaggccaaaaatgtgcatctttgttctctctgaatcaaccttaccctgaggcataaagtcctttttgctgcttatatatggtaaaaaaaacataactaaaataaattgaaaaattcttcacttagtttaatatcaaaataccccgctacagaacaaacccacagtggaataaaatgatagttgtcctgtatatttatctaagtttgcctgtatatttatctaagtttagcttatctccataagctaaaataaaaacaaaacaataaatgttttaattatatacctctgtagtctaacttaaataatgttcctccgttaaacaaaattaatgctaaaatgttttgc

SEQ ID NO: 53644 - DNA, 566 bp, Homo sapiens
cgggccccccctcggaagtcttctagaattaattaacgcgggccacaagaatggatttatattattcatcaagtgactatgtaaaataaagatatcaaaagtgaaaactcctttactaccatatattcctaagaaatagtatatatgtattaaatcatttttaatagatgattgcggttagatatttcacatttttgagacaataatattattttacaaattattttatcacctgataatattctgagagactatcagttttgtactacttcctgaatcatcctttggtgccattattaatgagagtttaaaattacactcaaaagaaatgtgacatttaaaaattatcaaatgggttttgcatttggtttatcatagtttctaaattactgggcttgcatatcacaaacaagtctgtacttgtcctcctactctacaaatataaatatagtatgtgatgtaggcctttggacaataagttatcagttcataatttactctgtttattaaactgaaatatggtttgataaaagtatgtgcattgaaatatcaggcattaaatgagt

SEQ ID NO: 53645 - DNA, 594 bp, Homo sapiens
cgggccccccctcggaagtcttctagaattaattaacgcgggtcgatactaaaatgccttctcctcaaagagctcttcctgtttccaaagcagcttttcctctccatgcagtccctctctctccccttacttgttttacttttcgcaaattgacaagtgttaagatcgcattgtgaaatcattagtttatttcattacgttcgctacttcattacaataccaagacaggtggttgatgctgctggctgctgctgtaagaaaggaaagtcttcttccatgctagcggcaaccagagccattccaggcaggagctcaggttggttccccacattttcgggcttactctgacgtgtcctgctgtgatcatgggctttgtacgctaaggctcagaagaatgggagatggggagcctggggcgggggaggtagtgttgacaaatctagataagagccagtcaaaatcactctcatgcacacacaatagaatacattcataaaatgaatatgaagcagatggaaatgatatgaggccagcggagcagtggatttagaatataccacatccgtcacgaagctgtaatatgtgagatccaca

SEQ ID NO: 53646 - DNA, 448 bp, Homo sapiens
ccgggccccccctcgaaagtcttctagaattaattaacgcgggatcttcatgttactagtcagagaagttttaacttctatttatttatttttattgcggtaaaaaataacatgagattgggtcgtgcgtggtggctcatgcccaccgcgttatcccaaaggtgggattacgcctgtaatcccagcactttgggaggcagaggcaggcagatcacgaggtcaagagatagagaccatcctggccaacatggtgaaaccccgtctctactaaaaatacaaaaaaattagctgggcatggtggcatgcacctgtagtcccagctactcaggaggctgaggcaggagaatcacttgaactcaggtggcagaggttgcagtgagccgagattatgccactgcactccagcctggtgacagagcgagactccatctccaaaaaaaaaaaaaaa

SEQ ID NO: 53647 - DNA, 528 bp, Homo sapiens
ccgggccccccctcgaaatacttctagaattaattaacgcgggggaaagagctagcattaagtgagagggatgtctagatggggattaattatagaagtggtctgtttgcgagtgaatttcttatattacaactttcgctgcactaggcaatctcatcaaccacaaaaactcagacagtaaataactggataatgcaaatcctttacgtcactggccaagtccttagaacagtactgcccacctacgcgtttcatttaacttcccaagaatatgcataataaatctaagaagagcacaagaaaccagcatgtttgattgcagatagtttgtttcatttgagcaggcgagaaaatactgtatgctcatggagtgaggagtctacaacatccctcccgcctttctaaaagcatagtgggatcaggaagcactccatcaggaatcaagaactggttctctatgttattcaagaactggttgtgttatgataaaggctgaaattcttaactagacccgagatatcccgccag

SEQ ID NO: 53648 - DNA, 586 bp, Homo sapiens
  misc_feature 34, 536: n = A,T,C or G
gggtaccgggcccccccctcgaaatacttctagnattaattaacgcggggccattatgctaataaagcaaattgtaggacaaaagacaatctgttctctaagaacatttcacctatccaagagcttataagctagtgagagttaactttatttcaaataatgagctacctgttacatggttgtaaagttgaatgatgaatgttgtttttgaaactgagaacttaaaggattacatatacacagtaatatttcatacaatttgatttagatgataaatatacatattgccaagatatatgctatccagaaaacgtagtttttttatataagagttggaaaatataaagaagttaaaggtaatatttaagccaagtcttgaaatcaaattgacattttctagatgtgtttgacttctttctctaccaagaaaactattgagttcaggtacatacgacctcttcagctctccacttcaccctcgccacttcaatttttagccatactctacctctccctgcaattacaatgttaaactntctttattgtcctcaagattcacagccttcctgcactctcaatgtcagta

SEQ ID NO: 53649 - DNA, 544 bp, Homo sapiens
cggggccccccctcgaaagtcttctagaattaattaacgcgggtatctaccttcaaatatctcattaatatcataactttagacatccatgtgtttgagttcatatgtaggctctgtccgcaaacattcatatttattttgctattctttcttctccatctgtaagatacatccccatgttatttgtggacatataagacccttatctgtggcaaagcttgtgccacgtgaggatagagtcatcagaaaaacattttgaggattcaaggttggtgagtggaaccctggaataaagtaagaggttgtggctgagctgtgtttaggaaactggtgcactgagcaccagccacagatttcccaagggtagccagggctgacagctcagcacagggaaattaaaaacagtgaaattttaaaatacacatcaattttaatgcaatctatatgtttggcttgtcttcatttttggcatttgtcagaggagaaataagatatccttgtaggaaaattaaataaataaattgtacccaaaaaaaaaaaaaaa

SEQ ID NO: 53650 - DNA, 613 bp, Homo sapiens
  misc_feature 495: n = A,T,C or G
cgggccccccctcgaaagtcttctagaattaattaacgcggggggctcatcattagcatgatcacagacctaggatttttctattcctgctctgccaattaatgctactctcttcccacaattctcctcccctactctgtactgtcaataaaagtacctgtgagaactctatgcaaagaacaacaaccaagtaagtgtaaagttcactcccatcaatagctacacacatatccactattcaaatgtagagctctctggaaggcaaagattgaagtaaacaattgagaattaagttctgagcagaacttctaccacttcttatattgtaatcttggggtaaatgcatggagtaagaaaattgagagaaggaaggagtgagctttcaggttctgtggagcagcttctgattcatgttgagagaaatggtcaaaatgtcacagaggataggccatggccccactaagtctcatggattgaaaagtgagtgtggattanggagtgctgtcttacctgaaggaacaatacgaacactcacaagtcaatgttgcccaagttgaccagtcagatcatcaactcctcttctttgaagtgtggaaagaaagatggtaagtcc

SEQ ID NO: 53651 - DNA, 600 bp, Homo sapiens
cccccctcgagagtcttctagaattaattaacgcgggggtgagcattgggaggcctcccaaaacttaggtatgggggatgcaaattcaaagagactattgggtattacaatgggcatttacttttggagaacaaaaataaagttttagacaaacaaccaatagaaagagtacacgtgtttggggttatttgtataataagtatcaaaatgggacatgattatgacacgtctgggaagtaggttgggtgctgtttttctagaaatgtgagatgccaagcggagacgcctggaagccaggatgggaaattcacgttgatctctcggccagggaactttttaccagggatgaggccatcttgtctggggatgctccgagctggagaaatcaaagatgcaaagacagagggtacagctacaatggactgcacttctttccaaataagaagggaatgtggggagataccatcaggttgttcccgtcaattccagccccacccgactcctccgaattcctgactcccctgctgtgtattcagacacctctacttgtaaagactagacaactacgccagacattgtaaaacacatgttgactatttc

SEQ ID NO: 53652 - DNA, 529 bp, Homo sapiens
  misc_feature 31: n = A,T,C or G
taccgggcccccccctcggggtacttctagnattaattaacgcggggcgtgaatatcagttaccatagttaagcttaataagccaggcttctaacaacacagttaaaatttcaattgttaccatgatacattaatttgtgagtaattttataaagtactgacatcactgccaggaatcagttcacagatcattaaatgaataacgtgctcatcctggtcagtgaccgatcacatcactcctcacctctctgccataagtgaaacccccctgtggaactatggtccctatagctctctcaggaacatcattcactgtggttcagcaggactgctgacattctcccagagtggactccaggccaagctttcatgaactttcctctattttttcagctgtgaagtagagagatgtggagatgtagaggttgaagacaggtgggctctgatgtgtgtgggcaaagcccttttcctttctgtaaccctaccctgagtgcaggttaatcaagatgttaagggtgctgacctgctt

SEQ ID NO: 53653 - DNA, 512 bp, Homo sapiens
gggccccccctcgagaatacttctagaattaattaacgcgggttatattctaagactacctaattaaaaactacaaagatgtgtgaaaatcatgacaattttatgacaaattcataaactacttaacataccaatcttagaatatatatcgagaaaaaaatgtgaaaaatgagaccttacaataataagatgttgggacaattcactgaggaaagaacagcttcttcaataaaggtactggaacaactggatgtccacatgcaaaagaatgaagctggaccccttcctcaaccataaacaaaaattaactcaaaatggaatcaaagacttaaatgtaagagctaaagctattaaactgttagaaaaaaaactaggtataaaccttcatgatcacaaagtaaatcttcatgtctttgatataataccaaaatcacaagcaataaaagaaaaaacagataaattaggcttcactgaaataaaaatttgagtttcaaagaacactatcaaatgag

SEQ ID NO: 53654 - DNA, 596 bp, Homo sapiens
ccgggccccccctcggaatacttctagaattaattaacgcggggtgcccaattatttcaaccagtttccactgacctgtcaaaaatccttgtgtataataatggtctgccagcagcaagagtggacagaaatactgtacactaattgattttgttgaacatctggcagaacagcctggatatttacttggaaggaatgttccccaactggactaagtttgctattgggttttagggcattaacatgccagattagggttctctgggcataaaacacatagatgacaacaggcgagtgagtcataaaagaaaatgaaaaagagatgagacacttttcacatatgcaccgaagttagaagaccgttttttccccccaggatctccttactggagttcaaaatggaaaccaagcaacatacagtagaataatcattttacttcatagaatttgtaaatagccattctttttcttaaatggagttttgttttaataaatttcagtaggtaaatctccattatgagaataaataattcattaccaataactgtaatacttttaaattgcttctgtggtagaagatcctgtcgattggaatg

SEQ ID NO: 53655 - DNA, 604 bp, Homo sapiens
  misc_feature 17, 28: n = A,T,C or G
cgggcccccccctcggnagtcttctagnattaattaacgcgggggacaaatctaaagggccataggagttgaatcactgctatgacttctgaatggatctgcttctggagatgagctctccgcctgttcccaggaggtctgagagataccctggacattatccgtgagagccacctgccaaggcaggagatattgcccattcgtccaactgccgctgtcctgccagtatatcgtctgagattaccatcagctaaatattgcattgtctttggacaattttcctacattgtgactcctcactacattttcaatgcttttctagtcccagacaagctacagactgttaatttacacttgcttttgccttgcctgaggaaattgaaaataaattttaatttcctagtcaagggctacgggtgctttgtgtggtttggaggaaaaaaaaatactgttagatggaattagggaatattaggagagtttctgaagttagtgaaggtacacagtaattgatcacttgccctcatagtgagaggtcattccaatgagcagaggttctgtcaatatctgagatctgtttgatacctgggcctcatctgtcgat

SEQ ID NO: 53656 - DNA, 608 bp, Homo sapiens
cccccctcgagagtcttctagaattaattaacgcgggctgtaaatacagcatgaataccctcaacctcctgcaataggtttcaaatatcttccatgttgcaaaatatggcaagggcccaagcagtctcctatttaagtaatgtatatcagaggaagcgcagcaaagataacccactgtccttacatttttatctacttattctgcacctttccaaatagatatatagcatcatttagcctaaaatcccaggcaactggacggactaattaaggggttagagaaaattacctcacctcactgctaaaacagctaaaacattatgccaccaacaactcgagtctgaattccaatacccaataataattaattccaagtattactggtaaataattatcatcttggcaagtgtgctttccaggtggaagtataggactcaaaatgaatacagtctgggctgggtgcagtggctcaacgcctgtaatcccagcactttgggaggccaaggcaggtggatcacctgaggtcaggaattcgagaccagcctgaccaacgtgatgaaaccccgccactactaaaaatacaaaaattggccaagtgtggtggtgca

SEQ ID NO: 53657 - DNA, 602 bp, Homo sapiens
  misc_feature 28: n = A,T,C or G
cgggcccccccctcggggtacttctagnattaattaacgcgggtaagaaagttgatttcaacctgttggtctctgttttgctatagcatatttttttcccctcttgattccttcccatctctactttacccttctcttccctagtcctatcttaagaactggatgctgtcccttagggatgttaggaggatggcactgaaagaggatggcactgaaacaggggtcagatggctcctttgggttggtacactgattgaattgcgcaactggtgatatcactgctgtggttgaataactcatgccagtatttaccactcttttaatcttgtttaccatttaatcacttcataaagttaagcgaaagctgctttgtacataatgaaatttacatacatacattttctccagtaaacgtgtatataagcagtgctcctttctttttccttattaatcccatcatttccttttgcatctctcctaatgtctgcaatatgaggggagtattttgtaaaggagcaaatacttgttagtgttggattcttttggtttttcagctatagatttcagagtaagttaatgacaagctggaagatttctggttc

SEQ ID NO: 53658 - DNA, 581 bp, Homo sapiens
  misc_feature 28: n = A,T,C or G
cgggcccccccctcggaagtcttctagnattaattaacgcgggggtgggggaagacatgtacagaactggctttcctgaacagtgtgagcaggctccagcatgacactcgttgtatcagccagaatttctttagtggcaagtaacaaaaaacttgttccaaattcttgtatacaataagatttacctagaagacccagggtttagtggctccagatatggttaattcagcagctcagaatcatcatcactgacccatgttctgtctcttttgctactgatgtaatacaacatgtcagtagaataaaaaaagccatgtgctcatcccagtagatgcaggaaaagcatttaacagaatctaacaccattttatgataaaaccatccagaaaactaggaatagaagggaacttcctcaacctgataaagggcatctacaagaaacccacagctaatattgtgcttactggtaaagactgggtgttttccctgtaggaccaggaacaaggtaagcatgtctgcttgtgttacttgtattcagcattgaactaaaggttctagccaagtcagttaggcaaaaaaaa

SEQ ID NO: 53659 - DNA, 554 bp, Homo sapiens
  misc_feature 45, 453: n = A,T,C or G
cccccctcgaaagtcttctagaattaattaacgccgggccctggnagaatattcaagggatgtttctgggatctgcaattctatccaagggaaatgaatagcaactcttcagcatgctcatgtctgactgtctgtcacagagcttatctggagtgtggtaataagaagaagctgttctgttgttagagtgcattatacaacacagaagggaatctaggtcacatattttcatgggtactgctaaaaaaaattttgtcacttttgacaataaattggtactttctataatggttgtttatcttaaagcattttttttcaagtcacttactgtattatgaagcctaataaaatagaaatgatcatgctttagactgcattatgcaacacagaggggaatccaggtcactatgggtgctgctaaaaagcattttgtcacttttgacaataaattgngctttccttttgattccactgaagacttcaaaactaaattacatccatactgtccacctaggctatgcttgagctcatctgggggagcatatttttatcga

SEQ ID NO: 53660 - DNA, 513 bp, Homo sapiens
cgggcccccccctcggagtacttctagaattaattaacgcggggtgaaagtgaaacagaactgttctttacagctcatctacagccatgtggcctaaactaccaaggtccagctatgctgtgggaccgcccattccacactcatttcagcagcacagtcaacaaaatattagaaatcaatttcagtgagctcctctgtacatctcatcagagctagtgtagcacttgatagtcattaaaacaattttaagtctccaaatctaaacatctaagtcttccattttcttaatgtctattcctaagaattaatcacaaaaaacgactccaaaaaactcttcacacatttccacattaatgcagaatgcacacaagtacagaattttctgttgaaaaacacaaataacaataagctggccatgtgtggtggctcacgcctgtaatcccagcattttgggaggccaagatgggaggatcacttgagctcaggagttcaagaccagccctacacacatgg

SEQ ID NO: 53661 - DNA, 597 bp, Homo sapiens
  misc_feature 573: n = A,T,C or G
cgggccccccctcggaagtcttctagaattaattaacgcgggcactctatcctgtctcaaattcatgtagtcatcattaactcctgctagcacatcatcagtatatactggctctactaaacattaaaaaatcacatttgccatgttttttcttcatatttcactagttttccaaaacatatactgtattgttaagtatcagtttaggccaaagtttattttattcttaaattcccaaaagagatcattaagagcatacattgaaaatgtagtttactgtaattctttccaaatacataaataggagctttttggctaagatcacaggtatgtattaaaaaatgattaataataccatataatttaaacaaagccttattccttttggaataatgttaataggcttttctgaaaacatttaaattataatttttctaatttacactgatgtatttacagctgtatatcaggatttactgaaaaaaactgtgagaaagcaattgaccactgtaaactgctcagcatcaactgtctgaatgaagaatggtgtttcaatataattggaagattcanagtaagtaatttaatacatggcaa

SEQ ID NO: 53662 - DNA, 473 bp, Homo sapiens
  misc_feature 27: n = A,T,C or G
cgggccccccctcggaagtcttctagnattaattaagcgggtggagcaggtaagggcctaaagtctagagtgagtttggaatgaaaagtggttatatcacacaggcttaagttatccaaaacatacaaattagtactttccctttgtaattgacacatttggccagattttcttctccagatctttcttctgtgcctagccactagttgctttttaaaaaatacattttttggtcaggtgtggtggctcacatataatcccagcactttgggaggccaaggtggtggatcacgaggtcaggagatagagaccatgctggccaacacggtgaaaccccgtctctactaaaaatacaaaaattagctgggcatggcagcaagtgcctgtaatcccagctactcagaaagctgaggcaggagaatcgcttgaacccgggaggcagatgttgcagtgaaccgagactgtgccactgc

SEQ ID NO: 53663 - DNA, 520 bp, Homo sapiens
cgggccccccctcgaaatacttctagaattaattaacgcggggtggggagtatactgtaactttgtattacctttacaacttttctgtaagtctaaatttatcccaaaataaaaatatttacttaaaaaatgtcaagtccaaaagaactttaaaaaataaataaatgaatggggggatttttagggcagtgaaacaattctgtatactactacagtggtagatacatgtcattatacatttgtcaaaccccataggatgtacaataccaagagtgaaccctaatgtaaactatggactttaagtaacaatgacttttcaatgttaggttcgttgactatataacaaagtttaacactctggtgtcggatagtaaggaagctatgcatgtgtgggggcaggggatatatgagaactctatactttcttctcaattttcctgtgaacctaaaactgctctaaaaaaatgatattttaaaaaaataaactaaaaaactggatgtggatcaatgaaacaagact

SEQ ID NO: 53664 - DNA, 607 bp, Homo sapiens
ccgggccccccctcgagaatacttctagaattaattaacgcgggtctgtcctaagagatatattagtatataataatactatctaataataatactatattgctataaataatattatgttgatgatatattaaaaatataaataaagcacaccatagtgtaagcccaatgaatttaattctgttttatgcctacagtaaaaatgtacttattataattgctttatgaatacttttgatgtttatcatattttaaaaatgaagagaattaagttttaaggacatgtcagactacttccaataataaatatgttgattgtctaagccctggatctgttttttggagggtgatggttagcacacgtagagaagaaagcattttataaaaattatttgctatgatatcagaagcacatatttcaggatttaaatcagctaagtttaactgaaaggcatatgttaatattgttgatagaaacattttacttggattttagattgatgaaaaaattgtttcactgttccatgagtctttctcctatattgtgagcattgcgtattccaaaataattttttcagataaatgcaactatattcattttaaactg

SEQ ID NO: 53665 - DNA, 534 bp, Homo sapiens
  misc_feature 503: n = A,T,C or G
ccccctcggaatacttctagaattaattaacgcgggtagcaattcaagcagcgctttgggcctgcagagcacttagctcagtacccaaagccccttagtatttatatcaacataacttcctggagggtgacaaaaatctgtcctggattactgggtgatttctaatatgtaccatgaccaacactaagtcaacattttaaggatcaaatttcctactctgcagcatgttggaatgcattcttggcattagacttcttcccattccagtccacccttagaaaatgcagaagccactgggaaatagactcaacctgtcccaagataatattccagctatgcacaagtgactaacaaaaacaaacagaagttcattcagatgtcccttcacattcagtaaaaaactaatttcatccatttaaatggagaggaggggtaatttcaagaagaatactcaaggctactaagtcaatattcacccgaacttggattcctctaaaacctgngaatgatcagagttcaagccccctaacacct

SEQ ID NO: 53666 - DNA, 582 bp, Homo sapiens
cgggccccccctcgaaatacttctagaattaattaacgcgggcacacttttctttataaagaacagcttttgggtaagcagcattgtgaaagggactgaatttataaatccacacaaaagccatgtatttcttttgagacagatcaactcacacactttgtcttctgattcactgtgtgtgctatctggtctacaatgcagacagttccctaggtcagaaaatgcatctgctcatgaacagacagaaatggcaatgttcttaacacttgtcttagatgagaagtctgcttacatgctcacaataaaacaaggaagcaatttttgactctagtcaagaagcttctggaatcttttttccaacacaaatgtttctcatttagtccaagctctgtttcaattacacgccaagaaaagacaaagaaaaaccccctctaccacctactcctgccttcacgaaaacattgtaaattatctttattacatcatatagaaaagtcatctcacatagggtaaattgttgacaaatggttacagcagccgttttctgggcaattgctgtattcgtaggtgttcttctgctca

SEQ ID NO: 53667 - DNA, 594 bp, Homo sapiens
gggccccccctcggaagtcttctagaattaattaacgcgggcggatcacgaggtcaggagatcgagaccttattgaaaaatgtgagtttcaatataaaatccatgaaaagagatggcgtttgggttttgactctgagtgttctcttctttagtaactcatgcaatgagtgtgcatatggctttcttcattacgattcagattcttggactggtttggtctaattaaaatagaattcaacagcatgtctttttgtctagagtttactctctgagtgtggtggtatgcctaagtatttttattgtagaattagatcatttcacagcctaaatattgcttttgcaatcatatagcactcttacgtgatgtctcgctcttcaggagagtctatccctgttttaatcaagtcatctaaaaatgaaagtcttgaattttagaaatctaaggtgtatgagcattgtgaccattgctgattaccgagaataattagattcatgttctgtaaactcacagaaaattatatgaaacccaacgggtgctgacaaattatacgtggaaaatgtagttccatcaaacttggtcccagcagctgtgac

SEQ ID NO: 53668 - DNA, 373 bp, Homo sapiens
ccgggccccccctcggggtacttctagaattaattaacgcggggggagaaccactgtatctaagaagcataacagttttaaagtcagctaatacaagaggagtaaaataaaaatggattcatttaaaatcagataaaattcagagcagaaaaaaatttgtttgattttgtctcagttatttgagtttgagatttccagtaaaaaatgacttagaatcctatgactatttctattggtccacaatccaaatttccagattgttcagtctactaagcttcaaccaaatcatattacctctcagagcagtagaaaccagatcaattaggacaaattctagaggaaacctcatcacacttcccaaaaaaaaaaaaaa

SEQ ID NO: 53669 - DNA, 363 bp, Homo sapiens
gggccccccctcgaaagtcttctagaattaattaacgcggggccttaagtcgctctatgtactgtctgagatatcagaacagccggcgaaattggggtagggtcagtgttgggacaaattacagttccagagatccgttatctttacatcctttgctacacgtccacgcctcttctgaatatcttggcatctcacagagagttgaagcagttacctggtgtaacagcaacatgaaagagtattggctgtggaatctaatgaccttggctctgctagatactaaaggtgagatgcttggcaagagtatgtatcaatctcagtctctgtaaaaaaaaagaataagcggccgccaccgcggtggag

SEQ ID NO: 53670 - DNA, 558 bp, Homo sapiens
  misc_feature 9: n = A,T,C or G
acttctagnattaattaacgcggggcaataaaagaaaatattaaaaatagtaatcaaacaaaaatgttagttattaaactttagaaaacattgtgcctactcaagactctgattttgagatttgctctagctctgttaataaaaacaagctatttatcatctaactgataaagtttaatactaattaactagcatggctttccccttcattgaactagaggaaatgacccaaaaaatcaaaactaaagactatctgattgcaaaatgtcaaaagacaagtgataagtaaaagaacagaaagttctggtaaaaataagcaaatgatatatcaaaaataggaaacagaaagttagactactcaatagcaacaatggacctaggaggtgatggggcaatgctttcttaataaggcataagtattttcatcccggtgttcgatgtctagctaaattctgaatcaggaattcagagagaaaggtatttacaaatatgcaaaggcttaagcatgtttttttaacatgcattcatttttaggaaaccaaaaaaaaaaaaaaaagc

SEQ ID NO: 53671 - DNA, 601 bp, Homo sapiens
ccgggccccccctcggaagtcttctagaattaattaacgcggggatataacaaagtattgaatttattccttgtcctcaaggcacttgaagtgttattgattccaaatatttcagacatgaaagaatttgggaacaatataaaactatgtgatttaaagctaaatttcatagtatatataaatataagaggaaaacgttattataggctagagaaattaaccagcactttatttcaaattagtaccctttatgtttaacttcagtttagctgactctccccccaccatattcgtaatgattattttctcccctttccctttctttaatgatttatttttataaatcttagagataaagaactctttgttatgaacattttgtttctttatggaattgaaaacatgtcacagtgataggagtagtaaatacatattttttagttacttaatgaatgtaattatttgccccttatacaaacttagctgaatctcagaaaatgacaggctgaccttggaaaaatatggctcttggtatgtgagacataaatatacgaatatctgaatggtatatatacgtagatgaatagctgaaaaatgtgtg

SEQ ID NO: 53672 - DNA, 549 bp, Homo sapiens
cgggccccccctcggaagtcttctagaattaattaacgcgggaggatagaaattttccagtatgtgtctcattcattcacgtttcagaaggagaaaaacaaaaattaggggagtggtgatatttgaataccaaattgttgataatgtttgaaaactgaaagacatctatccccagacttgagaagccaaatgaatgctgagcataagaaaataaatccacacctaaaaaatcttagcaaaatgaaatattaacaaagataagagatcttaagcatgtgatggtggctcgtgccagtaatcccagttctttgggaggctgaggcttcagtccaggagttagagaccagcctgagcaatatagaccctgtctctacaaaaattaaaaaaattagctaggcgcggtggcacacttctgtagtccgttagcctcaggaggctgaggtgggagtattgcttgagcccaggaatttgagattgtatagggctatgattgtgtcactgcactccaacctgggtgacagagcgagaccctgtctccgaaaaaaaaaa

SEQ ID NO: 53673 - DNA, 505 bp, Homo sapiens
  misc_feature 12, 23: n = A,T,C or G
ccccccctcggnagtcttctagnattaattaacgcggggggggttctaagacaactggggcatcagccttaaacatgaggcgataggagcggctcttgtatttctgtctttagtcccttggtctgcccgttagtccttctagaaggagtccacttgacagatcatgatgcccttcagaagtacccaggtctctcacagtatctagcagggcctccccaggctactccaacagactattgaaattagtcacgcgccccaccatattagaaccactttcctgggcctaggcaagtccctagtgctggggaataatcactggactagtgatcaagagatctcgttcttgtctagattgctgctggcttgctcttgggcaagtctttttctcatctggggctgattttcttgcctaagaaatgttgagctttatgatttctgaggttggctatatgtgaattgccctagtaagtacaaatgtgtttccataggtaaaaaaaaaaaaaaa

SEQ ID NO: 53674 - DNA, 481 bp, Homo sapiens
cgggccccccctcgaaagtcttctagaattaattaacgcgggcctgtgatagcctcacagttgttgatgtggctgtgggaagatagaaggcacttaatttttttttctagaaataaaaatgcctggttctatttaatgcatttttgtatttatgaggacaattgaatgaaataaaaagtagtaaataagaggccgggcgtggtggcttacacctgtaatcccagcactttgggaggctgaggcaagcagataacaaggtcaggagtttgagaccagtctgactaacatggtgaaacccgtctctactgaaaatacaaaaattagctgggtgtggtggcacgcgcctgcaatcccagctactcaggaggctgaggcaggagaattgcttgaaccgggaggtggaggttgcagtgagctgagatcgtgccactgcactccagccggggcaacagagtaagactccgtctcaaaaaaaaaaaaa

SEQ ID NO: 53675 - DNA, 579 bp, Homo sapiens
cccccctgcgaaagtcttctaggattaattaacgcggggaagaacacgaggttgacattaatttagaattgctatccattatgaattgctcacttactctgaatcaaaacagccacaatttacctatagtataatttaacccttcacctcttattttgataacgtgtgaactgtttttgtcactatggattgactgactactgctgtgtacttagatgtagcattatttaaattaataataatcaagatattaaactagaactctgatggaggcagatacccaaatgtaaaatgaatacagcagaaaagatacccctttttgtttaataaatttgaagatgcagaatagtgaaataatagagagcagcaactctctatttgactatgacaagtcacgaaacatatctaacacatattctagactcactatttactagcaataatgagtgaccagtgattgtataaactatttattactttaatttgttcatatttaaatgagaggcacatagtatggaaatatgtaagtgaaataatgcttattagatatgcattgagaggattattaaaatgttctat

SEQ ID NO: 53676 - DNA, 257 bp, Homo sapiens
ggggtgggggagggtggtggtacttattagcatattaaaggtgctgaggagcctgcttcatccagtgttaaaaaacttttgattacagaatttttttctccaggaacaatgattagcatttcaaggaaggttcaaattgtctataaaggtgcttaataaacattatttcaagaaataactccttattccatcataatatagtatctatcattctaccattagaaattattcccaaggactgccaaaaaaaaaaaaaa

SEQ ID NO: 53677 - DNA, 542 bp, Homo sapiens
  misc_feature 18: n = A,T,C or G
gggtccgggcccccctcnggtctttagaataattaacgcgggacacctacccctggaacatgggagactgggaccaaaagcttccttgaatagaaaacaaatcacagggggcagctgacctcttcccagtatagccagtcaagggaaagctctgagccatcccatgatggctacagaggtcataaagacccctgaggactaaacaaacacaatttacctagagaaaataaaccgggctgggtgtggtggctcacacctgtaatcccagcactttgggaggccaaggcgggtggatcacctgaagtcaagaatttgagaccagcctggtcaacatgcaaaaacctgtctctactaaaaatacaaaaagttagccaggcgtggtggcaggcgcctgtagtgccagctactcaggaggctgaggcaggaaaatggtgtgaacccgggaggtggagcttgcagtgagccgagatcgtgccactgcactccagcctgggtgacagaatgagactccatctcaaaaaaaaaaaaaaaaaaaaaaaaaa

SEQ ID NO: 53678 - DNA, 396 bp, Homo sapiens
ccgggccccccctcgaaagtcttctagaattaattaacgcggggggcaagagcaagactccgtctcaaaataataataataataataataatagccttataattatgtgtttaaaaacacagagtgaaagaaaattccaaaaggcattccctatctctaaaataaatcaaatttggtggcattaaacacctccagtaacagtgctcctgaaccatctccaattatttgggaaacaccactgaggccaattctgccccctattctaggttctgcagactgaggtcttcttaagttttttaaagcaggcttacaggcttgaaatgtaatctcctttgtacttgtattctcccattttatcctcacaattcagacataagttggcaaaaaaaaaaaaaa

SEQ ID NO: 53679 - DNA, 605 bp, Homo sapiens
  misc_feature 565: n = A,T,C or G
cgggccccccctcgaggtacttctagaattaattaacgcgggtatgtcttaaccttgaatttgcatctgagtttatcagtaatcatttcctagtgtttggagaaaacggggcagttttgttgggtgcttttctacagcaacctgtatataggttatatattttgagttaaaagaaaaagaccatttgctgacattcactgccttttattcatttatattcaagaccttaagagaggaatttagttaaaacccttctacaacaagtatatacagctaatcaatgctgtttattgatccctcagctccataatcctgaatgatggtttagcccatttttacttgcagattcaaggcaatatccggttttttagaggacgcccttcaggcaatgaatcgcagcacaggctggactttcagctgatgttgaaaattcgagacacactttatattgctggcaggtaattttcctctcattggtttattagattaaaattcttttctcttgtggtgcttgcattagtgtgtctagttcatgaaaaactaatatgtgattgtgatcaaaaanttgcagtagccagaaatattcactgagaagagtcagtgtt

SEQ ID NO: 53680 - DNA, 575 bp, Homo sapiens
  misc_feature 23: n = A,T,C or G
ccccctgcgagaagtacttctanaattaattaacgcgggatgctttgtcctcactacaatctaagttctctctgtaaaaggcaaatctgatcaaaacttcctttctaaagttttcattgatgtttttaaatcatctggagcaatttgggagcctcataaaacaacttaaaatatgacattttatatataaacatgcatgttaacttactattttgtcagttataatgtaaaatgtaaacacttcccttcactattgcacatcattttgtaaaagaaagaaattgttgaatcaaagtagaaataacaagatctcagaatatagaatattctccaagtgaaaacacaatatactttcagagatatgtatataaacagaaagacagaaaatagaaacagagagaagacaggaaggacaggccagacacggtggctcacgcctataattccagcacttttggaggccgatgcgggcggatcacgagatcaggagatcaagaccatcctggctaacatggtgaaactccatctctactaaaaaatacaaaaattagctgggcatggtggcacgtgcctgt

SEQ ID NO: 53681 - DNA, 478 bp, Homo sapiens
attaattaacgcgggtcattttaaaattctcttctctgtattttgctcaattttcaagttttccccaatggccatattttataaaactaagaaaaggtatccaaataggtggtaattttgaaaagtagagaaatttacgtctaaaataacaatagcctatgctgtctcatagagacaatctctactggcattgtattctatcttttcctagtcttttttcagtgcacatgcatctttttcactcgttaagccagtacttaaaaagggcaaaatagggtccagtgtggtggctcacgcctgtaatcccagcactttgggaggccaaggcgggaggatcacctgaggttggaagttcgagacaagcctgaccagcatggagaaaccctgtctctactaaaaatacaaaattagctgggcatggtggcacatgcctgtaatcccagctactcgggaggctgagggcagagaatcgcttgaa

SEQ ID NO: 53682 - DNA, 487 bp, Homo sapiens
cggggccccccctcggaagtcttctagaattaattaacgcgggagggatcacttaagcccagcaggtcgaggctgcagtgagccatgatcctgccggtgcaccccagcctgagtgacaaagggagacaatgccgcaaaaaaaaagaaaaaagaaaaaaacctgtgacaatgaacctgtttgtagagcacccctgtttgggacaacctatctatatacctcattcatcctttcatcctttctcctcaatctaactcaaattcatttcatatgtaggctttctaaaattgacaaaaactcagtcatcacacatgcagatatcaaggatgatttttttttttttgagaccgagtctcgctctgtcaccatgctggagtgcagtggcgcgatctcagcccactgcaaccagcctgggcaacagagccagatcatcaaaaaaaaaaaaaccaaaaaaacaaaaaaaaacaaaaaaaacaaaaaaaaaaaaaa

SEQ ID NO: 53683 - DNA, 486 bp, Homo sapiens
gggccccccctcgaaatacttctagaattaattaacgcggggagacacagcctgtagttagccaggcagggaggaggctgagcaggaaacagatgtgcctggctgcaaaggaaacccacaagcaatcaaccccatcttcattcataaaaaagaaccaaatcaagtgccacccaatacaggaggcaaataccagggtggaggataatgtgaacaaataaaacagctcacctgagaggaaatagaagtaataataataataaaaatccaacttgatactgagagattagagaggaaattgcacccataaaattagaattagctacaattaggaggaggaggaggtagggagggtaaggaacagggaataagaagataacagcacttacgaaaaaggaagaggtatggtaaataaaatttaactgacaaaatgaaaattaaatggaactgccaagctggctgtccagaagaggggctgttccaccatgg

SEQ ID NO: 53684 - DNA, 598 bp, Homo sapiens
  misc_feature 28: n = A,T,C or G
cgggcccccccctcggaatacttctagnaattaattaacgcggggatcaatattttatatctaaaagattaaagatcacaccctgggtttctgcaaattaccaaaataaaagcctctttgtcattcctctctgacaactagtcagtctccacacatttctgggaacttgggctatcaccaggcaccatcggtatagatagaaaaagagcatatataaatgcttttactaacttgataatagagttgttgtgaggccttaagattgtcacttaatatgattactccaatcatttttcagttttccatatataaaaaaaagccaaaaaacttcagtagaagtggattgccataagcacagcatctttactgaactttactttttacagtaagaaagatcaccgtaagtgaaacctcatctctactaaaaatacaaaaattagccaggcacagtggcaggtgcctgtaatcccagctacttgtgaggctgaggcaggagaattgcttggactcgggtggcaaaggttgcgcgagccaagaccgtgccactgcactccagcctgggcaatagagtgagatttcgtcaaaaaaaaaaaaaaag

SEQ ID NO: 53685 - DNA, 351 bp, Homo sapiens
  misc_feature 51: n = A,T,C or G
ccgggccccccctcggaagtcttctagaattaattaacgcggggggagagnagagagatccagagagggaaggacagtgagagagagaacatgttctttctttaactgaggtatttctcattgtgaagtggagaatagaacgtagtttttaaaaattaaataatacaactctgattagaaaaactaattatggctttgaaagcccagtttaaagttttcaaagcctctagtatttgtccatttgtttactgccactttcaaaatgtctcattgcaaattcctactcaaatgttatacccataatttacagctagaaatcatactcacagctttgtaaaaaaaaaaaaaaaa

SEQ ID NO: 53686 - DNA, 545 bp, Homo sapiens
acttctagaattaattaacgcgggcacccaagcacacatgcagaatgacactgaagtcactcaaaactgctagagatatttacccctgatctgcaaaccccctaacttgccaatgatctttccatcccagcccctaactctaatttgcttccaaattccatcctcagcacagtctgaaattgtcactcccctccagcccactgcctgggaacttaccaattagaggttaatttgggtactcattaaaagatgcaaacaggctgggtgtaagggctcacacctataatcacagcactttgggaggccgaggtgggaggatcacttgagctcacaaggggttggagaccggccaaggcaacgtggtgagatctccgcctctacaataaaaaatattttaaaattagctgggcatgtgcttgtagccctagatactcaggaggctgaggcaggaggatcacttgaacccaggaggttgaggcagcagcgagccatgattgtgtcacttcattctagccaggacaacagaagcagaccctgtttcaccc

SEQ ID NO: 53687 - DNA, 380 bp, Homo sapiens
cccccctcgagagtcttctagaattaattaacacgggacatgtcttgctttggcaagacaactgcagctaggtttcttccaggcagttctctacgcctacctgcggtgaagaatcaggttttgggtttttgtttacatcaccaatctgtcaggaacgaaaatgtggtcctaccttgcatgattagctcacactcacaccataggcggctctcctggtaactcaccatgagagtccaagaccatgcaaactggtctgtacctagttaatgaggggagcccacggatcatgctgccaaggcagtgttgaatgcaatcggagtttcttttttttttttttctttccttttttgagacggagtctcaaaaaaaaaaaaaaaaaa

SEQ ID NO: 53688 - DNA, 393 bp, Homo sapiens
  misc_feature 19, 32, 383: n = A,T,C or G
taccgggcccccccctcgngggtacttctagnattaattaacgcgggccggggacacagggatagataaggtatgaatctctgcagagagatggtgaatcgaatgtcaccccggaagtttctccagcattcccttggatttcatgccagactgagaggagggaccatctagaggaaaaggtccagatggcttttgctaaggcagagttagggagaaggcagcctcaagaaactaaagccaaggtcagaaacccactgggggctgggggcagtggctcacacctataatcccagaactttgggagaccgatgtgtgcggatcacttgaggtcaggagtttgagaccagcctggccaacatggtgaaaccccacctgtactaaanaaaaaaaaaa

SEQ ID NO: 53689 - DNA, 618 bp, Homo sapiens
  misc_feature 575: n = A,T,C or G
cgggccccccctcggaagtcttctagaattaattaaattagtttgcccctcatgtggcaagctgtgtttagtgtttgtctggtaggctaatttataaggataaaattgtggcacagtctctgccttgcttgtttttatcaaagagatgggctaatttgtaatgaaactttatcaatcagatcatgcagtgggtccgccccaccctccaggctctgactaatgaatgcaggctgtttgagttctttcatacacagcacatcctgttgctgctgaggaggggagggtgcattggctatagattgattataagaccgatggtttcctttctagaaaatagataaccaacttttctgtttccagtttcttggcatgtttatagctttattattgtctttcctttttatacagggcatgaatttgaagtggaaagtgtgtaaaaatgccggtttatatttgtttgggagaagccaaagattgtgcattgcatgttggaacagcggtagctaagaactctcaacaatgggagaaggaataatagtacaacaggcagagaaatggagcgttttgaaaggcantattcttcaatgttgggaaagtaatgaaaggtcaaaatgaagc

SEQ ID NO: 53690 - DNA, 606 bp, Homo sapiens
ccgggccccccctcgaaagtcttctagaattaattaagcggggtgggggcaagaacagcaacattatataaagaaccccattctcttcctagctgtgccacgcataccttctttagcctaaattttttatcagtaaagtgagagttggggtataaatgacttctttgtgttagagggcaatttaaaaaattaattcctctctgcattctaaaggatggtgaaaaagagctgaattacataggacaataagtttttgagaagccaactgggaaacagaagaaggaagatgtcaccagacaaaagaagtctaatgggaggaatccgtggaattttcttttgcatgcttgtgtgagtgtcccaataagccttgcccattctttgggagttagaatattgggacagattgggaaggtaccagggatgtattgcaaagtacaactaagtccatctaagggatctaatatgcaccaggagtgagaagagaagctgtccaaaaaaggccagttatcttgggttccatgaggttctttgcgtgtctcaaaatctctggctgtgaaagctatccctccttcatagcatttatcttaaataatagcttgctttttt

SEQ ID NO: 53691 - DNA, 468 bp, Homo sapiens
attaattaacgcgggacctgctgtgctaaaccttgcattttccttttgagaaaattaccttaatatcagctcattctaacgacctttatccttttaataaatagcaatattttctattgtagggaaataactctgttcatgaatgctactgctatttactatttctttttttattttatttttttcacttttcttgttttatttatgttttctccctcttctggggtcagttttgtgccttgtattttccttgaaaatgctctactttttttctgttttgtatttctttcattcctttattatcctcttccatgtgttatgtgagtttattttatttttgttttacttaacattttgaactggatgtttaactcattaattttttcttatttaattatgtaggttttaatgccatgaatcgaaaaaacacatttttttcttgctgttctgccttaaaaaaaaaaaaaa

SEQ ID NO: 53692 - DNA, 611 bp, Homo sapiens
  misc_feature 28: n = A,T,C or G
ccgggccccccctcgaggtacttctagnaattaattaacgcgggggggtagtgtgagtgtgggtggagtatagggagtactggacccagaggtggtgctgcaagaggagggatggagaagaggaacagaactatccaggcaccttctccctccctcaatcacttggacttccacccttgacaagtacgtcctgagggtctgcttgctacagtctagcacaatgtggccacacagtggcccccaagcccaaggccacgccttgtacagaagggagaaaccccaaccttccctgcactggccagaggatattctgcaaaccaaaaacctgagcctacctaagagaagttggtggaagtggagagggaagaaaatggttcaataatggcataaacagtatttaagtgtgaggcaactgtagaagtccaagaatttccgaaggaggctgcacaaagcccatgccttcccacaggctggtatgagtaagtagggatgaccacttaacaaaacatacagtcaggcaatgctatggtcaccaaaacaacaactacattaaaaaaacccttaaagcccaggaagaaatactctatagtgttgtccagtggaacttgctg

SEQ ID NO: 53693 - DNA, 338 bp, Homo sapiens
cccccctcgaaagtcttctagaattaattaacgcgggcttctgtttctaacattttttcaaaatgcttctgaaatagctagctttattttctcttcctttgtaacagttctgtagagttggcagcacatgtattatcccatttgaaagccttgatttgaccaagggagcacaaacaataagtgatagggcaagaataaggattcaggctttcttataaaaagtatagaccacttggtgctaaaccacaccgccttccatgctaggaacccaatgtttgactttaatcactccttgtctgcacacaaaactatagtttgatattatccaaaaaaaaaaa

SEQ ID NO: 53694 - DNA, 613 bp, Homo sapiens
  misc_feature 43, 51, 60: n = A,T,C or G
cgggccccccctcggaagtcttctagaattaattaacgcgggnatctacanaaaactagnaaaaattaaatgagtttggtggtgcctgtggtcccagctactcaggaggctgaggtggaaggatcacctgtgcccaggaggtcaaggctgcagtgagaaatgatcgcaacactgcacgccggcctggacaacagaatgagcccctgtctggaaaaaagaaaaaaaagtaagctgttagccatgtgaaatcttaggctataaatctacttcatctagattaaataagattattgataaacttttatttttctgattgagatatttgaaaataagcatgttcatatttgaaaatacatttgtttttgtataatattgattttccttcagaattaaatatctggtccgagttgactaaataatagaactatcatctcttcattttcatagtaaaaatactatgctaaaaagagacaattttcccaaatgaccttctttgtcaggaagctttctgagtgtccaaccattgttgtccattttttaacggtatcaccttttgttgggacattttggcctttcgccaaaagctgaataccatcattctttgttgtgttct

SEQ ID NO: 53695 - DNA, 489 bp, Homo sapiens
ctaatgaggacgtcctgaggtttggtatattaagcaaatggcagctgcagagaataataaaaaaatgctttaaggagtggatttcatattttcttgctttttttgtatgtacaatactagcaggtaaacatcagcttttggacttagtactatctgcagtatgccacaggagcattagaaggatcaatgcaaggattctctcaagaccaatgttacggagcacaacgatgaagtagaattttagctttagttccttgcttaaattattaatatataatattggaaaattaatatgtgtagtacaataggatgactgcagtcaataataactgaattgtgtattggtaaataacttaaataatataattggattgtggggaactcaaaggataaatgcttgaggggatggaaaacccatgctgcatgatgtgcttattggacattgtatgcctgtatcaaaacatgtggtgtgccccataaacatataca

SEQ ID NO: 53696 - DNA, 431 bp, Homo sapiens
  misc_feature 27: n = A,T,C or G
cgggccccccctcgaaagtcttctagnattaattaacgcgggcctaggtgaaataaaaactatctataactgagcagaatcccattcagatttttagcccaaagtaaaaaactatgtgaaaagaaaaacccatcctaaaattcatatggcatctcaaggaagcccaaacagccaaaacaattttggaaaaaaaaaaaaaaaaaaaaaaagaacaaagtcagacgactcattcttcctgattccaaaacttactacgtaactacagtaatcaaaacagtgtggtagcccggcatagtggcacctgcctgtaatcccagctactcgggaggctgaagcaggaaaactgcttgagcccaggagtttgaaaccatgcctgggcaacatagcaagaaccagtctctcaaaaaaaaaaaaaaaaaaagcggccgcca

SEQ ID NO: 53697 - DNA, 353 bp, Homo sapiens
  misc_feature 27: n = A,T,C or G
cgggccccccctcggaagtcttctagnattaattaacgcgggaatgactcgttctctggggcatggtgctgggactttgtagacaggcgtctttattgcatggggaggtgcactggggcgtgaaggatggatgtgtcaccacgtctgctactgactttgaaagcgttcagcaaaatcgggttatctataacacatgaaaagcacacatggggccggtgtggtggctcatgcccgtaatcccagcacttagggaggccgaagtgagagggtcacttgaggtcaggagttcaagaccagcctggccaacagggtgaaaccctgtctctactaaaaaatgcaaaaaaaaaaaaaaa

SEQ ID NO: 53698 - DNA, 437 bp, Homo sapiens
  misc_feature 16: n = A,T,C or G
cgggccccccctcggnagtcttctagaattaattaacgcgggatcgggctgtggaatgtccaaaattatgaagattaaggaaacaggctttaggattcacttgaaaagtgaaatcggcgaatgaaagttttctaacatgatgagatcttggaaattgtccactccatttttgggaggggtttaataatcactgcccaaccagagcagctgtttttccccttccaacgccccattttgtgaattgatgctgaaataactggccaggtctttcctttgggcaccctggaatgttgggaatatgaatggcctcttagtagagttggagctccaaaggaaaggaccctttagaaacaaaaacttccatggcgccaccgcactccagcctgggccacagagtgagaccccatctcaaaaacaaaacaaaaaaaaaaaaaaaa

SEQ ID NO: 53699 - DNA, 613 bp, Homo sapiens
  misc_feature 602: n = A,T,C or G
cccccctcggaagtcttctagaattaattaacgcgggcagtaactgagaatgcatagcacatccttcagtcatgaaaaacaacagaagaaaggcagctacgttcctactgccctcagatctcacagttttagagtgttttccctattctttatcctatttccataaaattaaggttcgaaaggtagacgtcatgatatggctgttagaatacgaaaatggaattttatagatctgattttgtaaagtttttgttttttggggggctacaaattacaggtttaaagatagtttctgaaaagtaacacagtaaaaacaagaactttgaaaattcatacctttaactcagtaatgccacttcttaggagtctgtccaaacaaattaatcaaatatggacaaatgtttatttataagaatgttcatcgtgaaggtaatagctaaatactgatacaaatttccaataataggggatcttacacacaatattctgtatcattaaaataattttaagactttttaatggcatagaatgttatatttaaagcagaagtcaaactttataaacaatagtacctcaatttgggaaaaaatattcacatactncacactggaaa

SEQ ID NO: 53700 - DNA, 427 bp, Homo sapiens
cgggccccccctcggaagtcttctagaattaattaacgcggggaattgcctttcatcaaagcaaatgaagtccttctcaaccttgtactttgcgcataggttgaagataactatacatcattcatttttgaaatataacttttgtttaaagctactggagattttgctatttatttgagaagtaatttgaaagtgaggagaactcagcatatgaaggttgaacatgtcatcaactagtccaaggaaattcaaagtcaaaaatcaaatccttacgtttatgaaagacatcttcgaggctgggcatggtggctcaagcctgtaatctcagcacttttggaggctgagacaggaagattgtttgagcccaaaagtttgagaacagccttggcagcatagcaagaccccacctctacacaaaaaaaaaaaa

SEQ ID NO: 53701 - DNA, 605 bp, Homo sapiens
cggggccccccctcggaagtcttctagaattaattaagcggggacagatggtgggaggtgggaggctgagatcaggaagactgatttctggggtaggtggaggacactaaaaaaaaaacctgtaaaaattcaagaaaagaaaataacagaatgatgcagaaatcaactgaataaatttagctttatatttaatacaacattcacttcattttcttaggtttctcatcgcactgccctcaggtaagggcttggttttagtctggggactgaaaatcgctggtctggattaagattcctacagtgccatcaaattctaaaaacttgaaattctacaattctgaggcatagcaccatctcaccttctccaaagaaaagcctcaacaatgagggggaaaaaaagaaggaaggggccaggtgtggtgggtcatgcctgtaagtccagcattttgggaggccgaggcgagaggatcacttgaggtcaggagttcaagaccagcctggccaacatggtgaaaccatgtctctactaaaaatacaaaaattagtcaggtgtggtggcgggctcttgtagtccaaactactcgggaggctgaggcaggagggtt

SEQ ID NO: 53702 - DNA, 379 bp, Homo sapiens
  misc_feature 37: n = A,T,C or G
ctgggttaccgggcccccccctcggggatcttctagnattaattaacgcggggtctgtgcttatgtttgctttcaatcccatattgttaatgagaaatgatttcgaacttttaaagattatcccgagatgtagtttctttagcactttgactttttttctctatcagtccataattctttcacatctgacgcgagtggctgttaactacaatgatatttttcatgacactccttttgctttcattcttctcgttacctagatgcaatgccttctatactctctctattcttgtttactctttattaacagtagacagtaaactttgaattgttcttgtttactgtctattaacagtatctgctcaaaaaaaaaaaaaaa

SEQ ID NO: 53703 - DNA, 607 bp, Homo sapiens
  misc_feature 486: n = A,T,C or G
cgggccccccctcggaagtcttctagaattaattaacgcggggtgggtggtgctggatgggaataaattctaggcagattctagcatgtccactgacctgtcgttgtggaagaccaggagagatgagatgctcaaaatgaagaattaattgtggtgagtggatccaagtggttctgccacaatgccttctctcatcgattgtctcacccatggccccatctaagggagcatgagggataagcacctgactcaaagatggcttatttgtaggctaaccaggagcactaaagcagcttggttgtaaaggttttacctattaagaaccaatctggcttgcttcttgaaagacagagaagggagcagtggagagggcagtagtaaactgtggccagagaagcctatgtaggtcattagaagagaaattgaggatggctgttcccttgacatgctccaaatcctgaggactcccaaattccaggccatgtnttaccttatagtaagctctcttttcataaagcaacctgtgtgaatttcttcccgagagtcaaaatggcttacccaactgatcaaagggatatggaagagatgttaatctgaaaatttattc

SEQ ID NO: 53704 - DNA, 599 bp, Homo sapiens
gggccccccctcgggatacttctagaattaattaacgcggggacaccctatttctcatgatcttatagcatattttttgaaattctgtattttacaaaatatatggctttaaattaaaaaaaatctctttctcaatttacttgtatcttcctgagggtcaaagatgaaatgtttttgaagaatattaccattatatttcaaagcagcacattttcccccaggagtttggttctacatggtttccaatgtgccaaatttttaaaatatttgcatgtacattctattaaaaacctattacatacctctcacatagtgaaactaagaaatattcttattcctcaaggcaaaattgttacatggtaatttaaaaaattgctgagagtgatagtaagaaattatgtatattacctactcgttcttttctttgagtgaagggacacaattaatttggcccacggtcccattgatgataatgtatatggatctagaaagtcaatggtcaaggtttaataagtgagcctatttgtaaaggcaataagctaatagactgacttaaaatacagaacgtctaacaaagagatggaagaacaaaaattaga

SEQ ID NO: 53705 - DNA, 506 bp, Homo sapiens
  misc_feature 336: n = A,T,C or G
ccccccctcgaggtacttctagaattaattaacgcgggtcctgtgttttactgtagatcatttttatgtttattcttcttttcctcccatatccagccctcaaagtcgcaagttcaagcatcaagcttcctaagtggtcaggataaaattcaaattattttgctgaatacacaagtctctttatgaaagaggtgttgtcggccgggcgcagtggctcacgcctgtaaccccagcactttgggaggccggggcaggcagatcacgagctcaggagatcgagaccatcctggctaacacggtgaaaccccgtctccactaaaaaatacaaaaaattanccgggcgtggtggcgggtgcctgcagtcccagctactcgggaggctgaggcaggagaatggcgggaacccgggaggtggagcttgcagtgagcagagatcatgatgccactgcacttcagcctgggcaacagagcgagactccgtcttaaaaaaaaaaaaaaaaaaaaaa

SEQ ID NO: 53706 - DNA, 443 bp, Homo sapiens
cccccctcggaagtcttctagaattaattaacgcgggatctaaggattcatatagagaatagtagcaaagaatgtagctctaagtcatgtggtaaaaagctgtgaatgccaggctaagacatttgaattatattccatagacagagaagaggaaacactaaagatttctataaagaacaatgttggccgggcatggtggctcacgcctgtaatcccagcactttgggaggccaaggcgggcagatgacaaggtcaggagatcaagaccatcctggtgaaacaccgtctctactaaaaatacaaaaacttagccaggtgtggtggcatgcatctgtaatcccagctatttgggaggctgaggcgggcagatcacgaggtcaggagattgaggaccatcctggctaacacggtgaaaccccgtctctactaaaaaaaaaaaaaaa

SEQ ID NO: 53707 - DNA, 549 bp, Homo sapiens
cgggccccccctcggaagtcttctagaattaattaacgcgggcgtattccgagggaggggtttataggtctgtgctgggacttgttctgcacttctccaccctttccagggatgggaaagtcaagtatatgtcataacttatccctggggaaccccggagccttacttctgactcttctgcggcccattgcaggaaagcctgactaattaggaactggattgaatgtggggtggggtgggtttcagttcttagttacctgttcacagaagtgggaaggagaaatctgtctacattgttttctttgctggagcaaccatccaagggaaaccttttaaaatctttcccagaaaaagattttatttatgatggagaatactgatatttgtcagcaatttatgtttacataaaaataagtttaatgattaaaatgattgtcttctcctaatccagtcatccaatctttctgaagtttcagtaccttggggacagattgaccaacatttgtatctttgttcttaacgttccctaacggggaaaaaaaaaaaaaa

SEQ ID NO: 53708 - DNA, 584 bp, Homo sapiens
ccgggccccccctcggaagtcttctagaattaattaacgcggggagcgtttcagacaaatagcaaactgatagaattaatcattactaatctagagtatttagtaaatagcctctaatctttagtactctagaaatactaacaagattttttctggcagaaagaaataattctaaatagaagcataaaatgtagtaataagtgaagaattccaactcaatgtataataaacataaatggataacattatatttaaaaataagaatgtctacagagatttaatatatttatggaaattaaatgtatgagaaatatagcataaaatgtgggaaaatgtaaatggtgcaatgttattgtattgtccagaaaatgaaaaggtttaaatgtagccagattaaaataagtcaatgtaatggcatgcaatctgtcagttaaccactagaaaaaaactaaaagatattactaataggtcagtagtaagaaataaaatgatcacaacagtcatgcaaataacaatagtgaattaatctatataattaagccaaaaaaaaaaacaaagcggccgtcaccgcggaggagctccaa

SEQ ID NO: 53709 - DNA, 588 bp, Homo sapiens
  misc_feature 562: n = A,T,C or G
attaattaacgcggggacgttgatttttttttttcttttggtccaaacaacattctcatctgtttctttccccaaagtccctttgtatccatttttatcccacagacatgactttcaaaatatagattgtgatcttttcaaggtagtaagtcaaatcaccttttaataagctctaagggatttatgaacttactgtaagtcaattccttcctccctcccttctttaccttccttccttccaaactggaattttattatctcagatatattgcttgaaaaaagccaggcagaggctgtgggtgggaaatcatttggttataaagagctactttctgtaatgggatctgacctgtattatagcgtgtctgaacatacaccaggctttaactctcttctgctctagaattcaagcttgctccaaaggttatttgctacccacggttgactctcatgcaatttctttggcccctatggtcttctcattaagaaaaataatgataaaaataattctttacattcgtctttcttcaactggtatttacaaggatttactgtgtctcangcactctgccaaaagttggggtatac

SEQ ID NO: 53710 - DNA, 610 bp, Homo sapiens
cgggccccccctcggggtacttctagaattaattaacgcgggtgatcagcaaaaccaattattttggcatgcaacggcaattatcacaattctctttcaaaaggatctgcatggctttatattaccattttttagacataaaatttttatgataatatgcatcaaataattgtaccccaataggccagttttctagatgccagagatttattttttatcatctattattcacattctcctcacacatgtgccattagcttcactttgtaaaggcttttctcaatatcatgaaaaataaataatgtgagaaatgtatgaagatttgggagaccattcccagtaattcaataggatcaacttaatgaaatatttcatcataaagtgtgtttataattggtacattttccttggagaggagctttctagctcaaatatctatcatctatgatttatagcaacttggcttaaaatgatccacagttacattcatattagcacttgtaaacagcagtttacaaattaaaataaatcatcattcacttttgaggaagttaatctgggcacaaatgcagctaaagggtgagcaacatgatctctaattctcacaccc

SEQ ID NO: 53711 - DNA, 595 bp, Homo sapiens
  misc_feature 22: n = A,T,C or G
attaattaacgcgggtacatgngtcccttataccttaagaaatatgagccaaatttatgacgaaaagatgacaatttttctaagtgtaaaacatttaaagtgtaaaacattcaaggtaaaaaggtcaataatggaatggaaataaaaatttatttagaagggataacatttttttgtttgtaaattaattgaaaactactgtgtgctcttagaagcaagaaaacttccctcagtctaataaaaatgtttaaatttggtgtgatcaattgttttatagtactttaatcttattttagttttaattatgggagtgtattctagaaatagttattacactaaaaatttcataggagaaaggaatatctcaagttataatttattccagtagttctaataaatcatagatgctaagccttcaagttttcacccaaattcaaaagaacattttcctgctctcaaatagccttttccaaaaaagcaattatactttgaaaccttcaaagattgagacttgcctcatgttaaaaataagctatttacatttgtaagctgaataggacatcatcagggatagaacttttccttcccctactta

SEQ ID NO: 53712 - DNA, 584 bp, Homo sapiens
ccgggccccccctcgaaagtcttctagaattaattaacgcgggtacccatttattttaagtggtttgcttgcttgtttcccctttgatgcggatataaccatgtagcatgcaaaaatctactgggagtccaggatacaccaatccaagggcgtagcaagaggtatggtgtgaagacctgtttactctcttctgatcagatcatttcaacatagaattttctttccttgaggcccctttagcccactttccattctccagcccatggccctaatcacttaattttcctgcctcccgtttagattagtaaacctgatcaaagaccatctgtctactggctttcaactgaggttagcacacatcagaatgtgattaacgtttgattgtatattaatatcattctaattatgaaaatggaaagttaaataaagatacccaatttaaatctctcctatactcagccttctctatgattctctgggagagaaggaaagaggattctctgacctaattcaatgggaggagtgggggaccttgtgcccccaaagacctggttttattcctttttgaatatgacaatgacatc

SEQ ID NO: 53713 - DNA, 609 bp, Homo sapiens
  misc_feature 23, 36: n = A,T,C or G
tgggtaccgggcccccccctcgngggtacttctagnattaattaacgcggggacagatgatgaatatcctttaagtttgtgaatctttaaatgcaagctggaaaaataagcctgcattgaatttttatgatattctctgcttactggatccgataaagcataaaatcaatattttttcacagaattcagttattattgtaatttcgagttagaacttgataattaaataaatgtaagtgcttttcttttctagaccatttggaaaaattattataaaaaccttatgcagatatcgattgagacacatagtaaccatacacataatcttttttagtacatcactagattctccactggtaacattaatagagactaagatgaatgctaatttagatacatttggtggaaaacagctctttcctccattgagatatgattaataattataatacataatgcctaaacactgtctaatgagcctgaaaacactaagttaaataaacacattaaccttgtagcctgagttagagttagcattctatagaaccagacatttccccatggcacatgcaatattaatgagatttcacgcctggactaagacaaaag

SEQ ID NO: 53714 - DNA, 449 bp, Homo sapiens
  misc_feature 418: n = A,T,C or G
ccccccttcgaaatacttctagaattaattaacgcggggattacttttgcaccagctcagttaaaaggggtccagggctgcaaagggaaattgtgttgaactttccattacttgttgccaaacacactcacgcacctgactatcctgtcagtaagggattgttttttggtgtttgtttgttttttgtttttgttcgtttgttttgagacggagcttcgctcttgttgcccaggctggagtgcaatggcgcgatctcggctcacctcaacctccgcctccgcttcccgattcttctgcctcagcctccggagtagctgggattacaggcatgcgccaccacgcccagctaattttgtatttttagtagagatggggtttatccatgttggtcaggctggtctggaactcccgacctcangtgatccgcccgcctcggcctcccaaagtgc

SEQ ID NO: 53715 - DNA, 395 bp, Homo sapiens
ccgggccccccctcggaagtcttctagaattaattaacgcgggggggtgaggacccaactctaactcactgactcgtatcaccttagtctccagtacaaggcagacaattttttggataccccagagctggagaataaccaagtgatatgactatctctcaaaacttacagtgcgccagatattgcagaggtagtttgctgagatagtattcaaaatctgaagcttatagtcttacttttcaaaagtactcaaataatattagaaacagaattaagcaggattatttaactctatggtcttctgcctgaatactatgcccaaattaactgaaaggtaatgcctaaatgcgattgttaacttctttttaagatggagtctcaaaaaaaaaaaaaaa

SEQ ID NO: 53716 - DNA, 596 bp, Homo sapiens
  misc_feature 58: n = A,T,C or G
cgggccccccctcggaagtcttctagaattaattaacgcgggggatgaaaggatatantttcccaataaatatcaaagaatttaaaagtctcctactttaaataaattagttattagaacacagaatacacatgcaatatttagttctaaattacacattttagaaatagaaaggaacagagtataaaaatatatacctttctgcttgtggctttttaatttgcgtcttaatttttaaagccaagttcttgctctgttgcccaggatagagtacagtggtacaatcacagctcactgtaaccttgaactcctggactcaagcattactcctgcctcagcctcctgagtagctgggattacagatgtgaggcaccatgcccagccttatatgcttccttatttatttttttagagatagggtcttgctatgttgccgaggctgagctcaaactcctgaggatcaaggaatcctcccgcttcagactcccaagtagcagagactacaggttgttttttttcctttggttgggggcgtgggtgttacacatttttttttatttcaataggtttttggggagcaggtggtgttacatgaa

SEQ ID NO: 53717 - DNA, 585 bp, Homo sapiens
ggccccccctcgaaagtcttctagaattaattaacgcgggtacacacgcatagcaacacatataccctaacacactcacacacagcctatggcgtgatgattatcttagcaatgtttctactttgatttatctctctgtttttctgattgggaagaaaagggaaaaattttctcactcttcaatttataataatggccccaatataatgaatcatctaatctaatataggaagatgttattttagaggagttgaggtacatattttatatgattgaagccaatatcttatctgtgcaattaatttcatggagttctcaaattattacaactctgattttgtaactattggcaaacaatatattttatttcaaacgagtatgtagtgacttaatatagaatctatgctgtcttctaactcagaacaaatgaatgacattttttactagcaataacttatttttgttgcttagtcatcttatgtataatgattacctatttacagatatcagatatttgatgcttattttggttttaatttatttttattgtttaatattgtctttttgtgattataatttgtttaa

SEQ ID NO: 53718 - DNA, 481 bp, Homo sapiens
  misc_feature 34: n = A,T,C or G
gggtaccggggccccccctcggggtacttctagnattaattaacggggcttgctagcttcagctgtggggtttaagcatttcagagggaagaaatggtcagcaatagcgtgggaagttctctcagaatgaagaccaatatctaaataaaagttttcttccttagtgaaaaataatgacgtttttactaccagtcattaggattattacttggcattttctattcagaaaggtaaaactagaactcataaaatgattcagtccatcaggatttaaattcagtgtgtccaagacctgcaaggggacatgtcccttctaaatagcattacaactctttaaagatattaacaaatgtttaaatttaaaaaatagcaaattcctatagaagttattgttaccagcagataagcagcctaggtaagatcagccccagcaaggcttagttggcaatcatgaagctgatctcacaaaaaaaaaaaaaaa

SEQ ID NO: 53719 - DNA, 488 bp, Homo sapiens
  misc_feature 457: n = A,T,C or G
cccccctcggaagtcttctagaattaattaacgcgggggatttgggcacctcactttctaataagatggacctatactaatgatcttgtttggtaaagtattatttgtagaacattcagtggggcttaatcctttttatcttttagcattttgaatttctaaatgctaatattccatttacctgctgcttgctgttggtgaatatcttagagttgatcattaataagtatgaagttttggaaatttataattgggttaagagatcttacagtaatctcagttgtatgtcttcagtatataaaccactggtaatgtcagtagcttttacgatatcctttagtgataatctgtcaaacattgtaagataaagcatcatgtgtgacccaaattctgcttttggaatatcctttcacttgtccctcctcctggtcattacagatttttcctctgaagactntcatttttacccatttttcctcacaagcctc

SEQ ID NO: 53720 - DNA, 413 bp, Homo sapiens
ccgggcccccccttcggggtacttctagaattaattaacggggacacacacacacacacacactgatttcaaagtccttcctttgctctctctttctggttaaaaatttgattcaccaagcacagtggctgatgcctgtaatcccagctctttgggaggccaaggtgcgcagatcacctgaggttgggagttcaaggccagcctgaccaacgtggagaaaccccatctccacaaaaaatacaaaactagccaggcatggtggcgcatgcctgtaatcccagctactcgggaggctgaggcaggagaatcacttgaacccgggaggcaaaggctgcggtgggctgagatcacgccactgcactccagcctggacaacaagagcaaaactccatcttaaaaaaaaaaaaagcggc

SEQ ID NO: 53721 - DNA, 559 bp, Homo sapiens
cgggccccccctcggaagtcttctagaattaattaacgcgggcagttggtgcaaatgaggatgattctccattaactgagaagggaaaattaataaaatcatctatcaagtaatgataaagcaatcaattacctaatcaattgactacacttattcagagcctaatccagactaagcaactacaatccattctccaaacagcagacaaagtaatattttcaaaatatgtaacataaaataaaatggagattttatttttgttgctcaaaatttcagggatgaatatgtaaatgataaaaatttaagtatgtataataataacaaccttaaggagagaggaaccagcattaagataaccagtgttttccctccaaatcatcaattctgagaggaagtctgtatgggccatctaaactctgaaaaatgatccctttcaatcgcccttcccttgtgtaagtggtagctaacatcaaacgaactgttttgccaatagtaggaactgtatgatggcatcagttcttaagatagtactataggggttgcaagaacccattctaca

SEQ ID NO: 53722 - DNA, 454 bp, Homo sapiens
  misc_feature 27: n = A,T,C or G
cgggccccccctcggaagtcttctagnattaattaacgcgggtactcaggtgagcatactttctaaggcagcccatttggaacaaatgagctttagccaagagtttaatgataaaaatatattgcttgcaaaagctctaatttagcactctggtgcctcctacatggttttgccaacaaactcatctttgcctggaatataggctcttcgaaggcagctgccactctctcttcaagatgtgagggggaagagagtttgaggcttttcattgtgaaggaccctccacccccgtgttcctcctacaggctcctgattcacacagcacaagttgagaaacagggaaatggaatcttcttgcccaggcatgtagcagctaactcctttgaatccgaaaaatgtgtgttcataatcaccaagtttgaaatgcagagtcatcactgctgctggaaatctg

SEQ ID NO: 53723 - DNA, 587 bp, Homo sapiens
gggccccccctcggaagtcttctagaattaattaacgcggggcccacttcaccaagcagacagggacaggcagcttaagagtgcaggaaggggctgcccgtgggcaggaggacgttttaatgagaggaagcggtagcggcagccgggagaaggcaggcagggccctgcacaggaacgggaaataacactgccttcccaagtgccagagcagggcccaccctggggcagaggatgatgcttaagacaaagagagggtttccctcctgccctaaagttggcaccatcatagtagctgtcggtggggacaaggaggccgggcactgctgtgtttagcaatgagctgagtacatgatcagcccagggcagggccaggatgcaggcccaggtctgtaggaccatgaagaccatgcccatgccaggacgatgtcagcagatagggaggctagtgggggagaggagagaacagagtgctgggagagggaacaagctctcccttgctggtccctggccctgagtggggtcagtgaagggcctgtagctgtctcccagccacctcccacagccccttgtggcagagactaatggcc

SEQ ID NO: 53724 - DNA, 390 bp, Homo sapiens
  misc_feature 264: n = A,T,C or G
actatctacaattaattaacgcgggtagaacatttagccatatcactatttataaaagtgaattcaagtagtaactatgaagggaaaatgttttatttatagaaaggaatttattctgttcccttaaaaataatgcaacctatgtaattatacttcttattctctctaccttaagacttttttttgacacttgcttcctagaataataaccattatccccctaccttgtgtcagcatttgtgaaaaaagttattggcatgattntaaaaatgagactcagttaaatgcgtaaacatttactagtcttctactttgctaggcactatgaggaaagaggaatatgggtaggatattgaattatcctgaaaatctgtaatgtcccacagagtg

SEQ ID NO: 53725 - DNA, 320 bp, Homo sapiens
ctagaattaattaacgcgggggattatataggtgtgagccaccacacctggcctatagttgtatcttgaatgcttccccccttcacactctcacaccagccattatgaaatttttttgttctccttcaggcctctacatatgccaagttgcctctgccacaatcattcttcctaaattttagcctgtcccctttatgttctttaggacttagctggagtgcctttactgatgtaagctggactaggtactcatcctttgtaatttcatagtactttattcccccagttcccatcgcattatcaagctaaaaaaaaaaaaa

SEQ ID NO: 53726 - DNA, 598 bp, Homo sapiens
  misc_feature 24, 89: n = A,T,C or G
gccccccctcgaaagtcttctagnattaattaacgcgggtcattaagttatagaaataacaaaatttaaaatgtaacagtttatatggngaaaatttagtttccataaaaaattactgcatgcaaagtcatttaacaattattttaaacttagtgatattgttagtactagccatttttaaaaaattgctaatggattcacaagtgacttagatttcctaaatagatcttagaaaggctacactgcccataagtattttgaaactcaactgaacttttcaaaatgtataaagaccaaagagctttattcaatatattgcagttcaatggcctattcttattcatgtttcctgtgccaccatcaccttcagccatattgctttgtggttttctccctgtccccaatcactaccctcaaccaaaccttttttctgctttcactccttctttcctcctcccttctcacaatttccttcattgagcttgctttaagccttttctttacccttggcttttgcaatccaactttgaattttccaacaatctaaccatagcatcaaaaaccacattccagaatataaaaatttttgtttggaatg

SEQ ID NO: 53727 - DNA, 417 bp, Homo sapiens
ccgggccccccctcgaaagtcttctagaattaattaacgcgggaggatcgcttgagcccaggagtttgaagtttcagtgagctaggatcacagcactgcaccctagcatggacaacagagcaaggcccccatttctaaaaaataaataaataagtaaatgatgtttcatggttatattcaatatcaatattgggtattctaatgagtctaattatctttgtataagtttatataaaccatttatttagtggttaagagcatgggatttggagtcatgcaattttagccccagatcatctctttatttaatctttctgaaacatattccttaactctaatgtggaaatggaagcacttacctctttggattatttagaggactaagtgacataatacatatgaaatgcagaacattct

SEQ ID NO: 53728 - DNA, 596 bp, Homo sapiens
cgggccccccctcgaaatacttctagaattaattaacgcggggaggagaaggaagatactgaccctcagtgtaaattggtgaaaacttttctaaaagtaatgagaggaacgttacatttgtaatttcctaaatagatacttactggtaaaatggatccctctttattttatagttaaccagactatgggagtgtcatgtgctttttccagatatctatattttagcaccccctcccattcatccattttaatttcttataaacttcatagttggagaaactccaaccaaaactcctgattttgacagcatttcatgtaattttactcctaacaatacacgtctgtttctttcatatgtagacatactaatacacgcacatacagtatttgaaaaaaagttatgtaggaaggctaattatatgtttcatctaaccataacactttcatgattacattcacagaaaaaactttaacaaaataaaagtgaatagcaaccatctccttgcttagtattttttttttactgttgaattatcctaactgatgtgcagtgaggttgctccaaatacttatctgtagaaaaaaaaaaaaaagcg

SEQ ID NO: 53729 - DNA, 614 bp, Homo sapiens
ccgggccccccctcgaaagtcttctagaattaattaacgcgggggaactaaaagcaatcctcaattatctgcagcaaatgttcaggtctgggacagcttatttctgagcctgaacacattctaggctagccacttctaatatggactccaagtatattaaaacatttttttcagccttgactaaataaaaattaggaaggataatctatgttttagaaatgacatccagtagatcattcctaaaccaaatgtgggttgtagatatctggggtttaggctttccacagcattgcttcccatctgttagtggggtcataatagtatcaagccaggctgggaggaggtggcatgggaacactgtctattgacaaggcagtagatgctgtgggctaggcaaggccccaggtgtgtcttgaattcaagtccatgggacttgcctccagaccagaccgtcagcctctctttcaaaggtcactgcccccgtccccaaaacatgtacttaaaattctcatgtcactgaagacacacaagccagctcacccagatgaggcaagcccaggaggctggtgagagctccatggtgccacagcagtacccccagagtcccaggacca

SEQ ID NO: 53730 - DNA, 513 bp, Homo sapiens
ccgggccccccctcggaagtcttctagaattaattaacgcgggcacctcactctctctttttctgcttctctttcagtacattatcacactaaatacattatccttctggcttgctggactctctaaacttctgtgccaaaataatctttctttcgtacataaaactttctacaaagacttcagattttactgcagagcaaaagccacatattaatcattatctccacacatgattcagcaggcctttatgtagctctattatttctaaatttttgcccaataagatggtgctatggcatggaaaagccttcgtttatctttactagaactgaaccccagttcttattacacaaatacattaattggtacaatttcattagcaatttccacgttgttgataagttgtccttagatttgccattcaattattaggcaaatatgtgcctaaaattgtacatgcctggtcagaatgaggcactgatacagcatcactcaccaaaaaaaaaaaaaaa

SEQ ID NO: 53731 - DNA, 584 bp, Homo sapiens
ccgggccccccctcgaaagtcttctagattaattaatttacatttaaatatcccatgtggctagtgggtatcatattaaacactgaagcttatagcaattctatttttattataggaataacttgtgagggatcagtataactacatattgatggtccatcccatcaatcaactttctactacagatttgaaaatgctacatgtgaaaaaggtatttggatggtatataaaacaagaaaaaatatttcagatattacatgtgaggaagtcctattaatacacagagtgccttgaattagagaaagaattcaggtcatgttgctttgtcccatgaaattatgggtgttcacatttttaagagtagttaatgccttctaaagagtattttgcactgtcactgatttttgcacctccatcttgtcctacctttttttaaacctcaaataagtactttcaggctaaattaagttattgtaaaccacttaggaaaaatggagatttgtgatatgttaaaaaaaaatgtttagaatgtgtcacccaaggggaaaaggtcctccttatcattgcattctttttaaaaatca

SEQ ID NO: 53732 - DNA, 561 bp, Homo sapiens
ctagaattaattaacgcggggaaagggaagggagagagcgagtagaaacccacatcagagaatattctttagcacatacttgcaaggataccaaatagttaaacacatctatttttcatggctcatcagctacaacctaagctgttttatctaatatgctttaaaaacctgttgtatacacataggctttcagaatacgttcatatggaatttagaatgtttttctaaatatcgcactgtgccctaaaggcctgttggcagaatatcagaatatcagagtcacccactgctggagtccccaactctctctctatctggtagtgggaaattgtagtttaatcagttatggcactttcagtgtgtaacattcattagcaaggcaatttgtcatgactgttaatggtcaggatgcatctgctctctcagttacagagcatgataagtaagaagacaaatatttcaacatctgatagtattaacttgtttcaaatatgtaatccaaggttagttgcttaaacagaccagggccagattaacaagcatcctgtatacaattttact

SEQ ID NO: 53733 - DNA, 614 bp, Homo sapiens
cggggccccccctcggaagtcttctagaattaattaacgcgggtatcagaataagttattaaaaattatccaaatgtgttttcataaaagctgtttcataattagacattaaaatacaatgccaatagtataataacagttatctcaaaaactgaatttgtctatttataatgaagcaccatttttgtgtcccagaaagtgattttcttagatctggtcagtggttagaccacatgcaagaaatattacatacagattcactgttttgaggagagatttggctgaggtacacgtggcggaggactccaagcttgctatagtgttttagggattttactcttaaatttttcataccatgtgtatattgtgaaataagattagaagaattaatggttaaggaggacatatgaaatttcaattaatgttgctttactctaataatccaagttctaaagataaactctcagatagaacatgataagctatccaagagcagaaagtgacgagatacaaaatccttgaggcctaaggtcttggaagtgaagattcattaacaatctgcttgcctctaattagtacgatttttctgttgactgttaccctctaattttttc

SEQ ID NO: 53734 - DNA, 547 bp, Homo sapiens
ccgggccccccctcggaagtcttctagaattaattaacgcggggggatgtctgtaatagaatggaaaaaaaaaaaacttagaagatataatgattaagttggaagaacatatttgtgtcctaacttggaaaaaatgtctaagaaaggtattttgaaaatattcaagccagagcagcatagtgagacctcatctctgcaaaaataaagaaaattagccaggcatggtggcgcacacctgtggtcccatctactcgggaagctgaggtgggaggatcacttgggctcaggagttcgaggctgcagtgagctgcaattatgccatgcactccatcctgggtgacagactaaaaaaaaaaaaagtgagaaaaagaagagagatttcaaataaacaatctaattctaaacctaaaggaactagaaaaagaacaagctaaggccaaagatattaggagggaaataaagattaaagcagacaaacataaaatagagaatttaaaatttagaaaaaataaaactaacagttggtcttccaaaaaaaaaaaaaaaa

SEQ ID NO: 53735 - DNA, 602 bp, Homo sapiens
cgggccccccctcgaaagtcttctagaattaattaacgcggggtagcatatatcagaatttactcctttttaaaggctaaataatatttcattatgtgtatatctcaccttttgttattcattcaccattgatagacatttgggttatttttatcttttggttattgtgcataatgctgctatgaacatgggtgtacaaatatctctttgagatactactgtcaattattttgggtgtgttgctgcaaacagaattgccggatcatatggtaattctatttttaatattttgagaaattgacatactgtttttcatagtggttgcaccattgtacatttacaccaagagtgcacaagaatttgtttttacacccttaccaacacttgttaatttcttttttttttttttaaaggagccattctaattggtcttaggtggtacaaaaaagcattttttaaagttattttttgaccccgaaaccagagcataacaaaaagctacatcctgttaaagactttctcaatcctcaatcaaaatgatttataatgggttaaatgatttatgatgatttatgatgggctaaatcagccctgatttatga

SEQ ID NO: 53736 - DNA, 416 bp, Homo sapiens
ttctagaattaattaacgcgggcagagcaagcatttgacaggcactccatcaattacctacaaggaattagcgcctctggaatgttaagcatcatattctgagaaatccaaaaaaatctaaccaagtttaaattttacactgaccaatgccaacagaaacagctggagtataatcaataggctcagttatgggcaatgatcttttggctctgactgcaaaagcacaggtgacaaaagcaaaaacagacaagtggaattacatcaaattaaaaagcttctgcatagcaaaggaaataattgacaaggcagagtcaacctaaaaaatatctgcaaaccatacatcagataaggggttaatacccaaagtatataaggaactcaaagaactcaacagcaaaaaaaaaaaaaaacaaaaa

SEQ ID NO: 53737 - DNA, 369 bp, Homo sapiens
  misc_feature 43: n = A,T,C or G
cgggccccccctcggaagtcttctagaattaattaacgcgggnaagctgaccacatccagtgcagactggtaagacagtaataataggggttggccttgctttggaagattttatactttgtattagtgttcttttccctatcacatattgagtatttacattctaaaacttccattctgtgaattattcaataaatagtgttgttttgtgtttactggatgactttgaaaaaataaagcaggattccctaccataccctttactatatcaaaattaagtctgtatggatcaaagatgtgagtgtaaaaaacattagtctccaaaggcactgatgaaataaacaaaccaacccccaaaaaaaaaaaaaa

SEQ ID NO: 53738 - DNA, 597 bp, Homo sapiens
cgggccccccctcgaaagtcttctagaattaattaacgcggggagtctggttttaattcctgaattacagagtctggagttctccaccagagtttctcttccctgtgactactcctccctctggggacaatgatgttttctccatgccctttgaacatccgtgagccccattcatcgatatcgagggcacagtatggtccatgcttggtaaggatgtacatctttacaagtaggaagttgagaatagtacacaaccagtccagaaaatgaaaactgtacttctttgtttttagctgcttacatctccatagaggtaagtaggatagaaggaagtcttgccattatttctgttaagttaccaccctttagttagaaaagacctttaacaggccaggcatggtggctcatgtctgtaatcccaccactttgggagaccaaggcgggcagatcacttgaggtcaggagttcgagaccagcccggccaacatggtgaaaccctgtctctaccgaaaattcaaaaattattccggcatggtggcagacgcatctgtaatcccagctactcaggaggctgaagcaggagaatcacctgaacct

SEQ ID NO: 53739 - DNA, 243 bp, Homo sapiens
ccgggccccccctcggaagtcttctagaattaattaacgcggggccctacagggtaggtattagtttgctccgttttcagttaatccataaacttgccagagagttatgccatggcctaggcccctaggccccaaagatgagctggacacaacagatccttgctgtggatgtcagaagagagagggagagagagagaggaagggagagggagagagaggcagggagagaaaaaaaaaaaaaaa

SEQ ID NO: 53740 - DNA, 461 bp, Homo sapiens
cgggccccccctcgaaagtcttctagaattaattaaccgggcatggtggtggaggttgtagtaagctgagatcgtgccactgtactccagcctgtgtgacggagtgagactctgtctcaaaaaaaaaaaaaaaaaaaaagaaaagaaaaaaggaatataaaggcaattagtaaactttacaaatattatcgcctaacagagtatagagttattaatgtttccttccaaaatacaaatttcatcttaccccttaagacttagatactcctgacctcacgtatccacccgaggtaaggagtttgagaccagactggctaacatggcgaaaccccgtctctactaaaattacaaaaattagccgggcatggtggtggaggttgtagtaagctgagatcgtgccactgtactccagcctgtgtgacggagtgagactctgtctcaaaaaaaaaaaaaaaaaaaaa

SEQ ID NO: 53741 - DNA, 230 bp, Homo sapiens
ttaacgcggggctgtagtgctaaggttcattcttcattggagcaacaaaatatatttgcttagagaaaagagtgggctttgctttagtagctgattttttagagaaaagtcattttacaaagtagcaacagctcttgcagaaagctatgtgttgattttacaaacaggaacttgatgttaaacctgaaatgcttattgagagactgatactactattggcaaattttact

SEQ ID NO: 53742 - DNA, 566 bp, Homo sapiens
  misc_feature 13, 544: n = A,T,C or G
ggccccccctcgngaagtcttctagaattaattaacgcggggttgtcctgttctttccccatggatatggcaggcaaggggaaaaataaaaggaaaccgactgccctgacactaaaactgacgttgtatggcctcataataacccaggcctggaaaacaatagaccaccaacttcccctctcattttggtggattataaataaagcctggagggaaagtaatgaaattagtttaagaacagtgataggattcctctggccaggtgcagtggctcacgcctgtaatcccagcactttgggaggccgaggcgggcggatcacaaggtcaggagatcgagaccatcctggctaacacggtgaaaccccgtctctactaaaaatacaaaaaattagctgggtgctgtggcgggcgcctgtagtcccagctacttgggaggctgaggcaggagaagggtgtgaacccgggaggcagagcttgcagtgagccgagatagtgccactgcagtctggcctgagcgaaagagccagactctgtctcaaaaaanaaaaaaaaaagcggccgccacc

SEQ ID NO: 53743 - DNA, 560 bp, Homo sapiens
cccccctcggaagtcttctagaattaattaacgcgggggaggacggggagggaatgccctaaaaagtttcataagtgatctgagagatatagatacagggactaaagataaatctgtggtatgaaactaacacttcaacaataaattgaaaagaaaacttggtagtgccagaagcagataacataggtttattccactccctcgacatcccttagtgtcaaaccatagtacttcaagctacaaagtggttgtaaaaacttaccacactataattatcacactattgcaaggactttgttatgatagaagtacaaaaactataaagaggtctacagccaaaagaaattcattgaatacttgcaacttcttgggtatgcctgtgctgaaaagtaccactgccgtctgtaatatctgtattactaaatgttcccttcagaaagatgtttttaaaagccccttccataccttactcacccaatatcctctccacagatccctttcaaaaagacacagaaattcagtggagatatagcacattactttcatgttagtgtgaaatc

SEQ ID NO: 53744 - DNA, 325 bp, Homo sapiens
  misc_feature 27: n = A,T,C or G
cgggccccccctcggggtacttctagnattaattaacgcggggttgggggttagggaggttcttgacaggctagacacaaggagcagatctttgctgcagaagccttggaactgccttgggatggcactaaggtacccagtgtctgctattccagcctctcccattccccatgccctttcttttttgaaaagagccatgagcggaggcgcacgcctgcaatcccaacactttgggaggccgagccgggcagatcacgaggtcaggagtccaagaccagcctgaccaacatggtgaaaccccgtctgtcctatgactacttagctt

SEQ ID NO: 53745 - DNA, 423 bp, Homo sapiens
  misc_feature 24: n = A,T,C or G
gccccccctcggaagtcttctagnattaattaacgccgggaaatcgggggaggggagacgtgattcagctcataaccgtctgcacctgtttctgaggctgcactcacctgtatgtcttcctatcattctcattgtcatttggaaaaaaaaaagaattataaggtaaaaaacatacttcataacgccgcacttagaaataagcactaatagtttaatcacttttcttttttacataatagttccatgcttacataatgttttacatgggtggtatactattgcatttgtatcttcatgccttgcttttaaggttatatcacacaagcattttccaacatattgaaacgtttttgttgcttgccaaatgttcattcaggtaacttggccagaacatagaagagcatcccaaaaaaaaaaaaaaaa

SEQ ID NO: 53746 - DNA, 595 bp, Homo sapiens
cccccctcgagagtcttctagaattaattaacacgggaagtgctctattgatctccagatagtacagccagactcccagctgccctgacagttgcctctgctcagagccccaggagccgggtgaacatttctgccttggtattcactgggaaggtcccttgttcgcacagacactgtccaatcctgcgcaacatggagtgaataaaaaatggcttctgaacaagagcttgcaattgtgggaggagtgagtggagggaggaacagcggccatcttatccaagggtaaatgaatttaggatttatttgaaccacttagtctacctcatgtctacatgatcttctgtcatgctgaaagaaacggatgcttattaattccaacaatgagaaggagcttgactttaaattagagaatccacagagcctcttttcattcatttggtagctttattctattatttcaggcaatgtaatgttgcatattataagatctatatctgtaatttctatatttatgtatttaaaattgtaacttggtatatttagttggtttatgttacatgcagcgtttaagaggaattcttttcattgacatact

SEQ ID NO: 53747 - DNA, 608 bp, Homo sapiens
ccgggccccccctcggaagtcttctagaattaattaacgcggggggaaggaacagagggccaacggtctatcaccccaaattcttcttgggtttctgacctagcaacatttcttaacacaaaagctgcaggggcgaatcaggggcaggagccccaggtacagaaacctggggtgctgatgtctgtgtgcaaatgtcactgccatgctacctggatgcatggatccggtctgaggaaacagagaagacatcaacgttatgcagtgaacaccaaagaagctctgaggtctaaggagtcccgggtcttctgggcagcacacagggtcactgtgatctctcaaatgagacctacggatccagcgcacacccagaggcacagacgcagaatcacgctgcccaacaaaggcagcacagcctcatggaaacagtctctctacaccctcttcccacctagaagaaggacctcagaccaaacagcctgcctgagcctcaattttctcctccattggaaagggtaaaggccaggcgcggtgactcatgcctgtaatcccagcactttgggaggccgaggcgggtggatcacttgaggtcaagagttcaagagcagcct

SEQ ID NO: 53748 - DNA, 459 bp, Homo sapiens
  misc_feature 414: n = A,T,C or G
cccccctcgagagtcttctagaattaattaacgcgggggggggagcttggctcctctcttcccattcagccttgttactctccagaagtaccaagcagcttgtaggttttcaatgccccaaggaatgtgtgcgccattcttcacactgttcttgctcctagatggctccccacatgctgaaaacccccaccttcttcccttaatgggtttcgatttagtcttcaaggcatgtctcaagcatgttcttttcccaaaagttttctgacactccctctgttaaaggacaaggtgcctttcctctgtcttttggaggaaatttaccagtgatcacactgagcatatatccgatagtctcatctcctcagctataaagtctttggttttagaacctgtattaattcatcttaacatccnctgtgcctaacagagtctaagtgctgagtaaatgggggctgaact

SEQ ID NO: 53749 - DNA, 603 bp, Homo sapiens
  misc_feature 549: n = A,T,C or G
gccccccctcgaaatacttctagaattaattaacgcgggtcttccttaggtgcctggtaatgaaagagttaagagtaaagtgtttaacacaggagttccagaaaaacacattttccataaacctttgctgacaatatatcaaatcattggtaaaatgggacaataaaataactgttttagtaacccaatctttgcattagtttgtctacctttgagaaagaaatactaacattaactgctttcataaagcaaaagagtatctcaaatctctgacttattatttaaaatacaataatgccaagttcatcatatattattacagtggattttaaaagaacatagtccggatacggtggctcatgcctgtaatcccagcactttgggaggccgagatgggcagatcacctgaggttgggacttcgagatcagcctgaccaacatggagaaaccccgtctctactaaaaatacaaaattagccagatgtggtggtgcatgcctgtaatcccagctactcgggaggctgaggcaagagaatcgcttgaacctgngaagtggagggtgtggtgagccgagatcgcgccattgcactccagcctgggcaa

SEQ ID NO: 53750 - DNA, 456 bp, Homo sapiens
  misc_feature 25, 38: n = A,T,C or G
gactgggtaccggcgccccccctcnaggatcttctagnaattaattaacgcgggggccatagtattttgcttctattacttctaaatcatttattttaatcaccctgatttaaaaattggctgcatgtccgtcttcccattatatgataacatctgtgagcacatgggtgaatggctagcacaattttggtgcatagtaggtgtctttcaaataacatctgtaaaatcaaactaaactgaatagaaaataaggaactgtattatatttgtgactcatctgaattttgcaatcttatgccatcatttaaaatcaaacctataagcagatgtgatgattagggtatctgagcacattgaggaatgttataattcaagaaaagtttagaggaagtaattttattgactgaatagcaggataaactcacttatttttaattgagggaaaaaaaaaaacaa

SEQ ID NO: 53751 - DNA, 558 bp, Homo sapiens
ggggggggggtcgagaggcggggaggccgggaccccccctcgggatacttctaggattaattaacgcgggttttggctaaagacagggttatttatagcatggcctgaatccacctgctaaaaatgcaggatttgggccccaaatctcaatgaatctgaattctctggacctgagcccaggaatctgcacaaactttgtaatattttactggtatttatgccttttgcttttttttttttttaaagaaacggggtgctgcgtgtggtcgctcaggtaatcccagcgctttgggaggctgaggcagaaggactgcttaagcccaggagttaaagactagcccgggcaacacaccaagaccctgttaccaaaaaaaaaaaaaaaaagagcgagagagacagatggggtcttgctctatcacccaggctggagtgccatggcatgatcatggctcactgcagccacaaactcttgggctcaagcaatattcctgcttcaaccttctgagtaaccgggaggctgaggtggaaggattgcttgagccgggaggtcaaggctgc

SEQ ID NO: 53752 - DNA, 530 bp, Homo sapiens
  misc_feature 488, 515: n = A,T,C or G
cgggccccccccttcggggtacttctagaattaattaatctagaaattgtagaatttcaaaagattcataatgcatattagcatttaaaaaactctggggaaggttaaagaaaaaaaaagctgttcaactttttttgtatgcagatttccaaaattctttatcatataagttctcacgttttaaagttatacttattaacattattagctagtgttgtttattgagtgcttattctttgcctaggatattgcagtacaaacattatcttgattaataatcttattatttagaaattatcatactcttctcatttgagaaattctcagcttacataaggaactgcctgaagtcacataagtggtaagtgatattgaatctaggactgttgaattcaacagctgtatttttagacattaagtgataacatgtacaaggaatttctgtttttaactcacttgaaaaatgctttcttagatacttaatgtanaatttcccagtcattttattattattnttactactaatttca

SEQ ID NO: 53753 - DNA, 591 bp, Homo sapiens
  misc_feature 22, 577: n = A,T,C or G
cccccctcgaaagtcttctagnattaattaaacttttacactgccctttcaatcacaaatctttctaccaggatggtaaaagcaaataaaatcaaaatcaatgtgtatttttaaagcagctcaatttaattattcacaataagtgcttcaaaaataggacccaaatttcttctgctgggagaaactggtaaattgacaaagctttatcgcaaaaatccctaacttttgagatgtccagactccccagaggcacagaactaagtcagaaactcctttcctggtcccaattctgttagtgctgtgcataactttgtacagctccttggatctcagtttcctcgttttcacaaggcaggtgtgcaagtagtgcattcttcttcaaagtctctaaacacaaagctaaaaaatcataaactccattcagatgagaggcagagactcactatcatggcaaaaaccaagaaactgcaagcctcagtgaatgactcaattttaagataagctgtctctgaatacagtaatgacactctccatagatgaatgctgaatgaaaaaaattaggaatgctgactaattntctaagtgctgctc

SEQ ID NO: 53754 - DNA, 579 bp, Homo sapiens
ccgggccccccctcgaaatacttctagaattaattaacgcgggaaatagaaatggacaatttcattaaaatgtaatacaaatggacaatccaatttgaccggaaattaaaatggatgattcttaatagtatctcatttactctctgattttcctgtttacatatttttttctactatattttaaaggcatggataccaatgtagccatctctgcatgcatcgaacatccttcaatctttcatacttaaaaagttcgcaatacttaatagaaaaattttgatttactaaagttagtattgaaaatatatttcaaaatttaggttcgttaagcaacactttagcatacacaacatttaatttgcaatgaattatggatagctctcgcttccattggtgtttgatgtataaagccttgaactccgtgaaattttacacattaaagtccataaggagtcagacgttgtctggcaaaaggatattgtgcctcacctctgttgcgtgaattatttcataaaatgaatacaatctgaatgctgacaattaatatgtaaaagtgatatgcgtatcattttcactaat

SEQ ID NO: 53755 - DNA, 449 bp, Homo sapiens
attaattaacgcgggggttcatataagtaaacacatcctttggaaatgacagttttgaaattgtcaccagttttgaagttgtcatcattaaataatatttgatacaggattttttttatagatatactttatcagggtaaagaaattgtttttttttacaggtggctcacgcctgtaatcccagcactttgggaggccgagacgggcggatcacgaggtcaggagatcgagaccatcctggctaacacggtgaaaccccgtctctactaaaaatacaaaaattagccgggcatggtggcgcgtgcctgtagtcccagctacacaggaggctgaggcaggagaatggcgtgaacccgggaggcggagcttgcagtgagtcgagatcgcgccactgcactccagcctgggcgacagagcgaaactccgtctcaaaaaaaaaaaaaaaaaaa

SEQ ID NO: 53756 - DNA, 506 bp, Homo sapiens
cgggccccccctcggaagtcttctagaattaattaacgcgggggagcggtgttctgtgcctttggcttaaattctgcagcattattgttattacttgttttttcttgaaataaaaaaaaaataagttgccctatgaaaaaagatacatttctttttcagtgacgtaatgtgagaaataacatttgtaattgggattttttaaaagcacttctgtttttgtaaaacaaaacaattttttaaacatttgtaaaaaagtagaaggaacagaaggaatggtgctactatgcttttgctctcaccttagaaaagggcgaatgatatttcacttgctccccaaaaactgttcttaaagatcatggtggttttctggacttctcacgttattgatgaagttacattaaaagagagacttgtctccaaatttatgaagtgtttcttaaatttccagagagtctttcctttctttcacacagatatttctcacactttcaggaaaaaaaaaaaaa

SEQ ID NO: 53757 - DNA, 487 bp, Homo sapiens
  misc_feature 447: n = A,T,C or G
ccgggccccccctcgaaagtcttctagaattaattaacgcgggggttattaattttggggggatgacccatgggggaatgacccatgacccatcgaccgtggcaaatacaatgcattttgaaaatgttgaaaaggttgttgctttttagcaacaacctttatggcctaactcctctatgtcttggtttcttcttcatctatatgataatggagataataatttacatgccaggataactgtaaagatatttatttatttatatatgtttgtagtatacctgtaatgtgcccccacacagtgctagatgctcaggatacagaggtcgacaaaactcttaagatacagaggtacccatctatgagggacaaagccaataagtaaataatgatatgagataatttcttcagtgacaattgctatgcagtttagaaaactatggtacatangtgtattacaggtggcatgcaagatgattctaaatgggaa

SEQ ID NO: 53758 - DNA, 609 bp, Homo sapiens
cgggccccccctcggaagtcttctagaattaattaacgcgggctgccattggacattttacttcatgtaaaatgaaatcatttatgcaatcatattatgccaaacctgtaatcacgactgaccacggcatcctaaatttaccttccttctatgtcactccaagcctttaataaatcaaaaaagccaaagaaataaagtaacttagctaaggtaaaccagaaaaacaaagtaaaatcataactaggatagttatttgcgtatattcaagaaattgagagtcaaaaaaagctgaaacatgtactctcttactatagaaaggaaaaaatctcagccagccatggtggctcacacctgtaatcccagcactttgggaggttgaggcgagtacatcacctgaggtcgggaattcaagacctgcctggccaacatggtgaaaccccatctctactaaaaatacaaaaattagccaggtgtgttataatcccagctactcgagaggctgaggcaccagaataggttgaactcaggaggcagaggttgcagtgagcggagatcgcgcccctgcactccagactgggcaacagtgagaccctgtctcagaaaaaaaaa

SEQ ID NO: 53759 - DNA, 555 bp, Homo sapiens
  misc_feature 9: n = A,T,C or G
acttctagnattaattaacgcggggcaataaaagaaaatttaaaaaatagtaatcaaacaaaaatgttagttattaaactttagaaaacattgtgcctactcaagactctgattttgagatttgctctagctctgttaataaaaacaagctatttatcatctaactgataaagtttaatactaattaactagcatggctttccccttcattgaactagaggaaatgacccaaaaaatcaaaactaaagactatctgattgcaaaatgtcaaaagacaagtgataagtaaaagaacagaaagttctggtaaaaataagcaaatgatatatcaaaaataggaaacagaaagttagactactcaatagcaacaatggacctaggaggtgatggggcaatgctttcttaataaggcataagtattttcatcccggtgttcgatgtctagctaaattctgaatcaggaattcagagagaaaggtatttacaaatatgcaaaggcttaagcatgtttttttaacatgcattcatttttaggaaaccaaaaaaaaaaaaaaa

SEQ ID NO: 53760 - DNA, 599 bp, Homo sapiens
  misc_feature 34, 71, 72, 109: n = A,T,C or G
gggtaccggggccccccctcggggtacttctagnattaattaaccggggggctgttacagagagaatcatnngttgtttattttttttctcttttcagggaattcactngaaacaaacaaaaaacaaaatagtaaactaggcaaagtgacaatgtagatgagataccattatacctgcaaaacaacccaaaaagtaaatgtcttttcagtaaaagaatgccactactttcaaccttacttcctatccttggcacttcagcttaacatgtgtctagaaccagactacccacctatatatttcatggactattaaaatatttgaatgtatgtgtctgctatccaaaattaactaatggtaagcaaaaaataataattactataattaatttgttaataatagtcatcactatctttccccttctctaggcttgggtatttacttttgtattttaatctagtttctctctccttaaggcaagaggaccacttgaagccgggggttcaagaccagcctcagcagcatagtgagaccccttctcttaaaaaaaacttaaaaaattcgccggtcctagtggcacacaccagtagtccaagctact

SEQ ID NO: 53761 - DNA, 498 bp, Homo sapiens
ccgggccccccctcggaagtcttctagaattaattaacgcgggtgtttacccagacagaagttaagcaaagtgttcattacactttgttaatctacttggaatgactgttgtgtaaaaattttaaatgatagttttaatagaactttttgtttgtcatgagatttgtttttaaagttcaacatctagttttttggccgggcacagtggctcatgcctgtaatcccaacactttggaaggccgaggcaggtggttcatttgaggtcaggagttcaagatcagcttggccaacatggtgagacctcatctctactaaaaatacaaaagattagctggatgtggtggcacacacctgtaatcccagctactcaggaggctgaggcaggagaatcacttgaacctgggaggtagaggttgcagtgaacccagatcatgccattgcactccagcctgggcgacagagtaagactccgtctcaacaaaacaaaaaaaaaaaaaa

SEQ ID NO: 53762 - DNA, 585 bp, Homo sapiens
  misc_feature 38: n = A,T,C or G
ctgggataccgggcccccccctcggaaatacttctagnaattaattaacgcggggtatagtatgtcacttgacctaatataaatcattacgtgctcttaaaactttccttgtgggactatccattagggtagcttgattttaacctctcccttgtgtgaatgagaagtcaaaactttttaaacctcctctaacaataatctagtcatcctgtatccgggcctggcatacacagaaaaatgatagcattgcaaaataatgacctatgctttgaatgtccttattgtgttttccctccaagattctgcctctctcaaatacctctgaaactaaaaaaaaaaaaaagtcttggaagtgtagaaaaagagtaaaatatctgcagtatcaatgcatgcttaaagagtttacacatgtaaaaaaagtttaaacatgtgtatagtagaaatgtctacatgactttattatgtttctgtttatccaattccacacacgattcaaatcacaggcctactatgaagggcatatggaaagtcaacaagaggttaggtgatattatattgacatggcaaatggtaaagcaataaatg

SEQ ID NO: 53763 - DNA, 558 bp, Homo sapiens
cccccctcgagagtcttctagaattaattaacgcggggacttctaactttaaggagcctctgctaccttagaatagagaagaactggtagcactttaattggaggcaacattgaaggtaaggagaaactatttgcagtaaattgaaatggagcaggagtagaaaagaaagaggtttgaggatagaacaagcatgcttcatcctcctaggattcctctttttataataacaatactgattattaagtgcttctatttaccaagctctgtatcataattttagcctcactgatgataaccctgatacagcaacaatcagaaagccccacttcatacaagttgaacttgaaaaaaataaaggaaattgattttaaaaaaacatgttggcaagctttctgtgacactggcatgctcgtgtgtggaacacaaactgaacgcaaatggaaacaatccctttggagagctgtttggcaatacctttcaaggtcataaaactcagctaataatctcagtcccagggatttactctaagtaaaacgcctcttaaaaaaaaaaaaaaa

SEQ ID NO: 53764 - DNA, 608 bp, Homo sapiens
  misc_feature 28: n = A,T,C or G
cgggcccccccctcggaagtcttctagnattaattaacgcgggggcataatagactatttccttctcaatcctccctgggaagccctgtaaaacatcctgatgtggccacacagctaaggggccacacagctctgccacataaacaccctaaacaggatgggacggtggttggctgtgtgctgttagaggctgccacagccaggacctcaggctgatttctgaattcccacagatctgagtgtgctaaacattgcaaaagagagaaaactgcagatttttatctagtcttcagacaccagatcaaacactcatgaatttgttcttaaaaccagtaattggtatggtgaaaagtggaggaaacccttcctttttgcatttaaggcatagtttttgaaaaccttatggcatgcaagaaattagttcagctaactcatggaaaggtttcataaaaagaacctttgtattttgcaaaaataaatttcatattagggtaatgcaaactagcatttaatacttgaattaacgcctgttgtcagtgttggtgttttactattaacctttcactgattaatctcttccttccaaggcacacagctatctgagccaa

SEQ ID NO: 53765 - DNA, 604 bp, Homo sapiens
  misc_feature 25: n = A,T,C or G
ggccccccctcgaaatacttctagnattaattaacgcgggggtggatggacagaaaagagagtctgagggctggactaggtacagagagaaagcaagggttcctgagtcaaatgatgtgactagacccatgtgtctgggtaggtaactctggcagcagagttatggcaataatgaaggggggtaaaacaaaaagttactgcaatggccaagatgactggtaatgagagcttgaattaagggaatgactatgaacagtcaaaggaggaatggatttgagcaacattttaggatacaaaagttttaaaagagagaaagaagaaaagcgggtaagaaaaggtgttagcataccataaccagcatagacatatcaaagaaaagagaattataagggaactttcttcatatttcccatcaaaatatccctatattccttacaattcaaaagtagtttctcataaatataagaatttcctggtatctccaaaaagccaaaatttgataatccatttactattttactctataaactgtactgttgagaaataaaatgtctttcaatttacaacaaatgtccattatcagcaggagttgcagcctcaggcc

SEQ ID NO: 53766 - DNA, 564 bp, Homo sapiens
  misc_feature 16, 33: n = A,T,C or G
gtaccgggcccccccnctcggggtacttctagnattaattaacgcgggcacttttctggtgtcctgagtccctcggttgggggtgaaattcacctaagtacatttttttcccattttggcaatcaaatatcaatcagatctagaaaagtaaattggcaaattccagagtgtttgcaaaactattattatattacagaaagtgtatttgtatttttacaacttgaaccagtttgcccaaattgtttaaaagtgaaggatgccaccaagggatgcattatttacaggagttgtgaaggcattaggaaaacaggcttgcattaaagcacagctttacggccgtacaaacagtgtctctcttgaaatggaaattgttaataaatctagcactttatagctttgccttgtaaaaagctttttgaaaggaggagggatcattttcccttgatggaacagtgctatcattgttcagctacagcaaatggaagaatgactagggaatcagcaacgcactagtaatgtttcagactgatgtgttttatcacccgtggaacttggataaaaccc

SEQ ID NO: 53767 - DNA, 584 bp, Homo sapiens
  misc_feature 28: n = A,T,C or G
cgggcccccccctcggaagtcttctagnaattaattaacgcgggctgcctcccctcattgtaggattaatcattgttctaatgctagaggacataacactatctttcccatattgaaaataaaacatacttaacagtgtgcttggcatatagaaaatgcctaataaattaaataatggttcttcttacaaaaatgagactagtcttagagaatgtgtctataaaacatttcccaacttctcccaggcaaagcctctgtctcaaatgtgctcctttgtgccttatacaagtacacaaaaataagtgtcagcaatgtgaaaagtgacacgtaactaccatttcccctgcagaaaactgtaaacccttaacagcaggaatttacctatttttatttccaccagaccaatttaaaatgttaccttttatgaaaaacttcctgcaggctaacatttactatagattgtatcattagtgcttagcccaattttaggtgttgttgggtattaccaaaatggcactgtcaagaagctctgggcactttctacttaacagaaatgtagctgaaaatatcgggacatacaaagg

SEQ ID NO: 53768 - DNA, 272 bp, Homo sapiens
cgggccccccctcggaagtcttctagaattaattaacgcgggtcaaaaattgctacagttattttaagaaaccaataatgttatttaatgtgacataattaatagtgaacaaacctatacaaatcattttcagttaatatatacagcttaacagaaacacagaaacatttgcaggcctttctccctcccattgacttaatgacatgattctgcatttgtctagttttactgcagagaagaggcattctaaaagggactcaaaaaaaaaaaaa

SEQ ID NO: 53769 - DNA, 612 bp, Homo sapiens
gggccccccctcgaaagtcttctagaattaattaacgcggggatttagtctatataagattccttccggctgcaaaattcactacttctgcacctcccagtccactcccttctaccgctgtgaagttcaccaaaattccactggcaccgtgctccagccctgaacaggctggcttttgtggacttccctcagtgcatggtaaccacagaaataaacccaaatacaccaaaaaatgtaaaggggtcgtgagtgctgttgtacttatgaagtcagcagtgtgaaatgtataacaagattgtctacagatcttttgttgacacgtggtaagaaaaatctcctcttcagtataaaaaggcccatttgtttggttctcaaccagataggtcttgagtcagcggcatttgaaactggagccccagtcataactgtgggctgcccttacccgacacacacataggaggaaaatttggatttttcacagatatcctctattctgccatgggagcctaggaaagcaggggaagttgcccttggcattgaccagacaatgaactcatcatcctgcttcacccagaaatagaaatgaagtgttaaacgtagctcactagtgtc

SEQ ID NO: 53770 - DNA, 442 bp, Homo sapiens
  misc_feature 319, 320, 339, 340: n = A,T,C or G
gggccctccctcgaaagtcttctagaattaattaacgcgggtactcattacattctaacattcttttctcagagtgcctataaaacccaattcttcaaaatactctttggaccaccttattcatctgagtacatctgagtggttccctcattaatgtgttaataaacctctgattcatgctattctatatttgcatgagaatcctgaatttttttaatttttgaaaattatgcataaataccatcatttggaagtactttgtattattcctattaattacataacacccacttcattcataattttctgtgccacacannttttgttaaaactattcanngctcttgaaggggcaggggcccccagaaaaaattctcctttgtattctctagagactctatacagtgcccttgcaaaagtagatacccaaaaaaaaaaaaaa

SEQ ID NO: 53771 - DNA, 321 bp, Homo sapiens
ccccccctcggaagtcttctagaattaattaacgcggggggggccaccaggcatttgaagaatgactccttgcatggccccagtgtttggaaaaaaggcatgaggctgcagctacagatgctcgccaacccctagagttgaccaaataaacatctccccagctcttttatgccaccctcattacgatcctactgcctgctgctgacatcaatgagaaaaaccttctttgtgaccagacttacctgacgcctaagcaaaatatggaatagactgtttgcatggctcctagctgattttgtcagacactagcgtacaaaacaa

SEQ ID NO: 53772 - DNA, 569 bp, Homo sapiens
  misc_feature 32, 414: n = A,T,C or G
gtacccgggccccccctcgaaatacttctagnattaattaacgcgggcagtatcttggccctcggtgcctaggttgggtgaggagggatatgcattagactaacgcatacaggaaacatttgtctaaatacttgctctctccatcctcagcttccaaagttcccacctcttttgtttggtgtttttggtttttaagacaaggatctcagacaggcagtggtggtgcaaaactttaatcccagcactagggaaggcgaaggcaggcagatccctgagtcctaggctagtctggtctacagaatgaattctaggacagacagaattctagggctacacagagaaaaaccctgttcttaatactcccccccaaaatcccccacagagacaaaggtctcgctatatagtcttggctcncacacttggccgttgccctctctttcagcaccgtatacatgaataaagaaatatacttttggggttggggatttagctcagtggtagagcgcttgcctagcaagcgcaaggccctgggttcggtccccagcttccgaaaaaaaaaaaaagcggcc

SEQ ID NO: 53773 - DNA, 620 bp, Homo sapiens
  misc_feature 586: n = A,T,C or G
ccgggccccccctcggagtacttctagaattaattaacgcgggggttgagtgaaaaatcaagaagtagagttacaaaaattttttctatagcactgggtgctccagtgaagaaggctgagcaggagaaaattgtgcctctatgtcttaacagaaaataccttacaaaatagtgatatattccgatgaagaatcaaagcagttacttttgaggttttaaggtattcttgagagtcttcttgagattctgtgaatacatccctccaccctagaggaggcggtgtgtctcagtagacattctttccaacagaagaaaaccctctcaagtttgccccataagtcactattttacctcactgaggatttctccaaaaatcaaatcatggagtttagcatagggtataacagtagcagtttttctgcaccaacaaaatatcagatgtctataaagacttaaatatcactatatgagcagattacatccaactagacccaaagctatcactgttttactttacaatggttagcaaataagatcattttatgctaaaagctgaaaaatgcttgttgctattgttttttaaactntcaaattattcaattattgaggtttatataatat

SEQ ID NO: 53774 - DNA, 604 bp, Homo sapiens
ccgggccccccctcgagggtacttctagaattaattaacgcgggtggggtggtaggaagagggtcacactctgcaatgcatgtttatccctctcaggcatctggcggagcagccgaaatggggcagaatcccaggggcagctctctaagacatgggtataacatgctggaaaccctgtgcttagcagtgggcttactgcatggcctcttaatgctgggagggtgcccgcctctagcagcgggaccatgactcctttctgacgctggggacccccaatcctggagctagtctgtctagagaaggggaaatggtgcctggaggcccctgtgccatgagtacatcccacggcttttctggcttctccctgggcagtccagaggcctgttttgctccttctcttgtcctggttctagtggctttcggaagagctgagtgagtggggggcctccatggatggggaatctaggctgtggactgcagtaggcacacagctgtgttgttgagactcgaggcatcttccggtgctcaggtggtttgtttttgtttttgttttctttaaaccaatgtttttcaattgggggatgcgttgtaagaattactgaag

SEQ ID NO: 53775 - DNA, 597 bp, Homo sapiens
  misc_feature 15: n = A,T,C or G
cgggccccccctcgnaaatacttctagaattaattaacgcgggccaccagtcctagaataagtcacatcctttatttgattatctgtggcaggctagggagtaaactgcagtaaagaaagaaaagagaaattcctgtagtcacccatgttggctattttaacgcagccattcacatgaatgcaaatgtaagcaaactgccctattttcatcagtggagacagaatttggagattagatcagataactgatatttgcaattccagcctctgaataggaaggaacaagaacattttcatatagaggtgtaaggaaatgttagtctcaggttaatggtcacatgtgtgggtgaaaaagcaatcaccaaagaaacaaattcttgttgatgaaaatgaaaaaatctccccaacaacaaagttaaaaaacatcttcattaagggttttcctatgacggggagttaagaactcatttactcagtccctggttaaaagtaggggctaatctcatttgctgtatcacctgttccttcaggttggtccattgctagggaaagtagcaccagcaagacagccaactaatatttcctagtgctcattct

SEQ ID NO: 53776 - DNA, 578 bp, Homo sapiens
  misc_feature 49: n = A,T,C or G
ggccccccctcggaagtcttctagaattaattaacgcggggtacccctngaacttaaaataaaagtttaaaataaataaatattgtattagcatttgacagatgaagaaacagaagtttagagacataaaataactgcctaatattatgccttaatcaaactgagaatcagtatcacaacccagttttcattcaacagcataattatcatcactgtgcattctagctagaaacttcgtatcatattgataaatttaaattatttaatatgtattaaaatattgtttgtgtttttatggaatcttgaactttgctctaaactggaactacttcctgtgattaaacttttgtttgcaaaaggtgaaaaatgaaaaggggaatggagaggtgaaggggtggaaagcacaggtttgttgtggttttattaattttagcaatttatttttaagatacattatgtatttaatagatttaaagtgttgattttctcccaaactatgcagagaatagtaagtcagtcattgcttttggcttcatgtaacagatattcaacaattttgttaattgaactatataagc

SEQ ID NO: 53777 - DNA, 359 bp, Homo sapiens
cgggccccccctcggaagtcttctagaattaattaacgcggggcttgcaaacattgccagatacatcgtcatataaaatataatgtatgaacagtgttttcagcagagcctacatttattaagttcagtgctcaaaagaaaatgaaggttttgcattacaaaaatgatatgaactattaataattagcactaaaagcagaagtggttacattgtaaaaattcttattgctctgctcattcccttgcaacatgatgttacaaactttcccatcaagaaatatcatctggacagcaagactacatgaggcctatcacagggcaatttactagagatattggacatcaagcagtgctgaaaa

SEQ ID NO: 53778 - DNA, 605 bp, Homo sapiens
ccgggccccccctcgaaatacttctagaattaattaacgcgggggactacattcttttttctagctttgacaaacatttgtttctttacttccttaaagcttctaagtgggcaaacaggaaaaatgaagccgctgaaattcaaattcatcaaaattaggtatgggtacttaccacacaaataacattaaaaactggatttacacaaaggcatgtattatctgacttataagtaatttaagaacaggattcttctctcctagtgaattaaaagttattttcattatataatcacggtaggaacatattatacaatgcaaataaatctggactgattactgttttaataacacacaaaactgtatcgcatgttttctggctaacttaaaaggcaataggaagagtagtaaccagcctccatggtaatgtgagattgtaacagtgttgagacattttgcatataataccaacgatcaatcaaaagaactgaaaagttactgacaacactacaagttggcgagaaactaaatagcttctgagaatattttacggatctgtgattttctgcatcatatgaacccagttagataaaataatcctttaagca

SEQ ID NO: 53779 - DNA, 480 bp, Homo sapiens
ccccctcggagtacttctagaattaattaacgcgggttccgtccatagatgattgttacattcagtgggagaggcagggctctgtatggcgcctccatatcacctggatggaatcctagagaaatgtcttacgatttcatttagcattagagaaataaaggctatacagaaacaatgtaagtgggcagcagagacgaagaaaaaataatgtttctgtttctatctcataatatattctatatttaaaataatattcatagagtatgttcaatatatcaaatgtcctattttatatttgtaatcataagccatgcatctcacatcttgtaaatagctggttttttttttgaaccagcctttatctcaaccaacagaaattaatttgaaacttgattctgtcatccaagctaccgtaatgaactctggagatgattcgatcagtgtatctttggtttgtataccagggtcatagtaaaaaaa

SEQ ID NO: 53780 - DNA, 481 bp, Homo sapiens
ccccccctcgaaagtcttctagaattaattaacgcgggcataccgttgggttctccgttcttctctttaagccttttataatgtatgacgtaagtattttctgtttacttctttttttctattacttttgtcctcctcttattattctaactttattcatcaataaccttatataccataatatatctaatatgtcatatttccatgtggaacatgttctgtttttcaactcatctgccactctcaccagtcatactattgaagtgtgcacgtattccaaatgtttcattcgctttcagagagcatccaatgtcaaatgaagcctcgaaagaatgatatggcctaacaattaagacaaaattctttgaagacttaaggtaaccttcctgaaaacgttgttatagaacttttaagtcaatttgcagctatagattttaaaagatttaaagtgaggtgcttttttttttaagttgaattagtt

SEQ ID NO: 53781 - DNA, 612 bp, Homo sapiens
  misc_feature 583, 590: n = A,T,C or G
ccgggccccccctcggaagtcttctagaattaattaacgcgggcatctcactcttctgatacagattatgtcctttacttcttaacagatacagagccaatcagaacagtttcaagaagtaatgacagatgagatccggcatcaagaccgtgcttaataagtggcagaggttttaattatctaatgaaaactccattagtgttccagatttctaggaaagaaatttacctctgttttctaatttaaggtacaagaatgactcaaagagctatcagaaattttgactggttttttgctttttctcccttttcttcagtgaccattataaaaataatgtgtgtatacatatgtatatatgtaattatgtatatgtgtgtgtatatatatgcatgtatatataattgtattctggaaatataattagcatgtgtgtgctcttatggtatatttaacgtacagatagaacaggtaaaattctacttacatcactttcatttatatattacttcctaagtaagcttgtatatactttaagaatattcatgaccaatcaataaaatcaatcacttggaatactgtaaancacatanaaatatccaaaaaatgcagact

SEQ ID NO: 53782 - DNA, 571 bp, Homo sapiens
  misc_feature 9: n = A,T,C or G
acttctcanattaattaacgcgggcttggatggaggacttcctcttgtgcttccctgggagatctgcttcatagggcctgatgggtttgtgctgtgctaacctgaggcaggtaggtggggaggcctgattctggattaactttgggaatggtctcttctactatcaaaccattcccaaaagataatctgacaaggaaaaaagtgactatagactggatgaactgatcaagagacctttgtgcagcacactttggtttatgtgtgggccaaaacaaccctataagattatccttatcttatgagtaaacttagaactaagtgaaatcacctgcctaatattgcaagcaaacaaagcgacaggcttaggtttttattataatacaggactgacttcaaatctaatgcttcttccattaagccacaatcacctcacgtgagttactcattgcctattttttctatagaaacttcagataacaccttcctattaaaaaggactatgtgtttatattcagggaagcaaatcagataaaactaaagaagttccccaaaagaaaaaaaggtatgtaca

SEQ ID NO: 53783 - DNA, 492 bp, Homo sapiens
ggtcattagttaagggatggggggtggaagcataaattcaaaggcacttatggcccccgatgtgcataaatgaagcacattccagtaacctgagggtcatttgctcataaagtgatgcagggctgggctgttgggaggataactacaccaggagttggagtgcacagaaatagtgaagagatctgaaggggtgtgcatgcaaccatcattgctacattttaacaaaaacctatatatgcacatcatgcaagagcatgaaaaaagatgaacaagaatcctctgagggaggaacagaagagaaaatggctggaggggtgggaaaggagtttattaactttatgtttatgtatgtgcatattatggctatgaaatattaaacattgtaataaacattttaggggaaaaggttagctagaaactttgaatagatgtaccattgccaaacaaaactgctgctgaacacacgaattgggcacacacattgcttaaaac

SEQ ID NO: 53784 - DNA, 443 bp, Homo sapiens
cgggcccccccctcgaaagtcttctagaattaattaacgcgggagtcacagtgctgctagttacataatttatgtaccaccattttcctttcttaccagcatttccatcttcctttggatgcctttaaaagcctgcctcccagctgggagcagtatcacacacctgtagtcccaacactatgggaggccgaggcaggcagactgctgtgctcagaagttcaagactagcctgggcaacatagtgacacctgtctctaccaaaaaatgcaaaccttagccaggtccacgtggtggtgcgcatctgtatccccagctacttggggcgctgaggtgtaaagatctcttgagcccagaaggcagaggttacagtgagcaaagatggaaccagctgctgcactccagcctgagcaagagagacagatactgcctaaaaaaaaaaaaaa

SEQ ID NO: 53785 - DNA, 596 bp, Homo sapiens
  misc_feature 23: n = A,T,C or G
ccccccctcggaagtcttctagnattaattaacgggggggaaggaaacggttcaagctcacgctcgataggtcttgcactgtgacatggataataattgctggtgataagtttgtttctttcgattctgccacagaccgtgttgcatctgaggaaagagaaccggatacttgatcgagatgatagataatgtaagcacaatagaaagtagcagacggagaaaagaagttgattgcggaaaatatgaaagcatgtgaaaatgctttattcttctattatcaaagtactgtatatgaaaactaagactgttcatgaccagaaacacttgcatttcactccgtcttaaagggaacagaatgagttttcaatcttaccagtaactttttacatatgttgcaaaactcaatgatttttcatggtgatggaatcttcacagatcagattgacatatgcaatacagataatttatatattcatatatcctaaatatatttgcagagcttaactcaaaagcagagtcgccttttcatttctaattttatttctaattagaaaacaaacagaacacactctaccttccactcggggtcttgcttt

SEQ ID NO: 53786 - DNA, 616 bp, Homo sapiens
  misc_feature 44: n = A,T,C or G
ccgggccccccctcggaagtcttctagaattaattaacgcgggnaattaaatgtaaaacaaaacagaagccatgtgcttagatcataactcaaaccctttttttagccttgaggttcaacctagtctgacctctacttacctcatctctaccatgcttacccaagttcagagtacatttattttcttcccttttttttcagatataccaatttcattaacactttagggcccttgaacttatggctgttctctctatctggaaactttaccctttagatcattagtgtttatttctcgatatacaggtcttatcttaaatgtcatctcagaagagcaggctgtcaccatcactatcatcttatcttattttcttcaaaatgctcatcatgatttgatgtctccttttatatttattgatagtttccatccattagagtgtaagttccatggtggtgatgctgtcttcttgactatcttgttcactgttaactttgcagtacttcaaacaagtacttggcaaatatggtactcaatgtttattgagtgaatcaattaaaagttcataaagctgtttaattataagacatgattaatcttttaatatataatatcagc

SEQ ID NO: 53787 - DNA, 276 bp, Homo sapiens
cgggccccccctcgaaagtcttctagaattaattaacgcgggtaggaataccaaccgggaccacagatcacttaagtattaaacccaagtacctatagaaaaaaattgttcttaatctgtttgaccttcctcctaatattttacttgccttccctcatttttttaatccatgtattccctattcctatcaaaggggctgtcataaggaaaacgttcggcattgtttcaaacagtataattatattcactcaatcactggcttaaaaaaaaaaaaaa

SEQ ID NO: 53788 - DNA, 589 bp, Homo sapiens
cgggccccccctcggaagtcttctagaattaattaacgcgggttttgtccaaaaagcagctcctcttctggaggaatgagactggcctgaatttgtacatgtttccttcaactatctggaaccatttggcaactacctttgagagggcaggtctcccatgcacagcactgtctgcttacgaaaccttctccttgtgagagtgagttgctccaaaaattgaatgtttattttaattcacgtattctctctgcctagcatcgtgacttctcatttttactttctctaggtttcatacctgtcttgatttacccttatgaacctcaaacttaaccttgcttttccttctcttcattcttagttttgttattttccatgttgcaccctattcatttcataattctatgttcctctatttcaaatcgctttcattatcttcttcagcttcctattttgtttctttttttgtttgtttgtgtgtgtatgtgtgtgtgttttgttttgttttgagacagggtctcttgctctgttatccaagctggagtatgatcagggctcactgcagccttgaccatgaggggctccagtgatc

SEQ ID NO: 53789 - DNA, 608 bp, Homo sapiens
  misc_feature 10, 517: n = A,T,C or G
cccccctcgngaagtcttctagaattaattaacgcgggtcactggcagttacaaaagccacaaaaaagtagaaaatattacaagtgagtggttaatgaagggcttaactgattagatttcaaacggattagatttttatttcagaaaaccaaaaacaaatcacaggctgggcgcggtggctcctgcctgtaatcacagcactttgagaggccgaggtgggtggatcacctgaggtcaggagttcaagacctaactcctggccgggcgtggtggctcacgcctgtaatcccagcactttgggaggccgaggcgggtggatcatgaggtcaggagatcgagaccatcctggctaacacagtgaaaccccgtctctactaaaaaatacaaaaaattagccgggagcggtggcggcctcctgtagtcccagctacttgagaggctgaggcaggagaatggcgtgaacccgggaggcggagcttgcagtgagctgagatcgcgccactgcactccagcctgngcgacagagccagacgctgtctcaaaaaaaaaaaaaaaaagaagaaaaaaaagacctaactcctgatggtgtttcaatatggtgaaacccc

SEQ ID NO: 53790 - DNA, 462 bp, Homo sapiens
cgggcccccccctcggggtacttctagaattaattaacgcgggtgtggagagccaaaagttaactgtgacatcaatgatatacccagctggcacccccttcctcccttttcaccctccccaccccccaagattatttttattcagttagaaggtacaggttgctcaacatctgacccttgccataagccacagattagtgtctatcagtgggttttaatggaaagtcactttgcatggtgtgaaatctttcagttcaactagacaaagtcattgtatctctgggtaacattcaatccaaggatagaaaatgagcaaaattctactgggagttggtaaagccaacccaccctatctctgaggcctgcccacttaagctccctactcctccaaaaggcaatgaagccaatccatcccacctttttctcctttgttgaatgtaattaaaaaaaaaaaaaaaaaaa

SEQ ID NO: 53791 - DNA, 586 bp, Homo sapiens
  misc_feature 23: n = A,T,C or G
ccccccctcggggtacttctagnattaattaacgcggggagctcaaagttcagaatcttgtgatctgtatttggtctgattgtagctcctcttgacatggaggcctctgacctaaaaagacaagttgtctgtcacccatataccctacctacaatagtaaggcagggcagaataaccacaagagatactcccattcaaaaaagtgggaggattaaaggcatataacagtcatggtccatagacattataaaattcagccaagcaactatttctactcagaggcagtaatgttccttgattaaggcccagcttgaatcccaggaagtggcttcccaataaattgttctccatgacccgtggctcctctcactagctgcccttcctttataatgctgtcaagtcaacttgagtatgagcctgctcaatgaaatgtggctcagccgtccctttgccaccatggctgacaaccagccaaccccagaagcagagctaccctactctgtgcatgcaggattccaactgagccattgaaactcaccctaaattgcaagcctactgaatccgagttaaataactgtctttgttt

SEQ ID NO: 53792 - DNA, 600 bp, Homo sapiens
  misc_feature 28: n = A,T,C or G
cggggccccccctcggggtacttctagnattaattaacgcgggagtcagtggagacagctgttctcagctatcctgaagcttaagggtcgatactttggcacacctatagcccattcacatcatacagctgagaagctgtgaagaggacctaagttgcccatattacacactcacacttccaaagtaaaacagaaggccaaaccaaagtctcactcatttaactatgaacttgtgattatgatagagaactccagcacctacttctgtaggggcattctgttctagatgccaaccagatgcctgaggtgaagtgcaactggagctcagtgtcagatgcaaacaggtttcctgaagactgcactttttctagctcatttatgcaacttaacaagtacaaaactacaattagacctagacaatatgcttattcagcaaacccaccctctagtgaatcagcattccaaatctcttctaggggtatggccaactgaatcgaccctgatttagaggcaccatattgcgggaggctgaggcaggagaatcgcttgaacccgggaggcagaggttgcggtgagccaagattgagccattgcactcca

SEQ ID NO: 53793 - DNA, 493 bp, Homo sapiens
  misc_feature 28: n = A,T,C or G
cgggcccccccctcggaagtcttctagnattaattaacgcggggtcatttggaccaactgtcatcgttagcattacatttcaaactactcctcaagttagaaatattactgccatactagagaagaatggttcgttctgtagtttaataaactcgtatttattccaaaggataagaaaattagtatattttggccgggtgcggtggctcacgcctaatcccagcattttgggaggccaaggcgggcagatcacctgaggtcaggagttcgagaccagcctggccaacatggtgaaagcctattgctatttaaaatacaaaaattagccaggtgttgtggcaggcgcctgtaatcctagctactcaggaggctgagacaggagaatcacttgaatccgggaggcagaggctgccgtgagccaagatagcgccactgcacccagcctgagggacaagagctagacttcctctcaaaaaaaaaaaaaaaaaaaaaa

SEQ ID NO: 53794 - DNA, 463 bp, Homo sapiens
cccccctcggaagtcttctagaattaattaacgcggggtgagcggggtgcgccgtcctgggtcacggaaacactcctctcctgcaaaggagaggagattcactcccccagtttctgtgaccccaaaaaggaccctgaacccgacggtgaactcacagcttgctcttactcacgagaggagacgtggaggggaaacaaggtcgtcccactgacagacaccccctgggccttgtaataaagaccgaggcgggcggatcacaaggtcaggagatcgagaccatcccggctaacacggtgaaacccggtctccgggcgtggtggcgggcgcctgtagtcccagctactcgggaggcaggggcaggagaatcgcctgaacctgggaggtggaggttgtgagctgagatcgtgccactgcactccagcctgggcgacaaaacgagactccatctcaaaaaaaaaaaaaa

SEQ ID NO: 53795 - DNA, 578 bp, Homo sapiens
  misc_feature 538: n = A,T,C or G
aattaattaagcgggggtatgtaagtgcttaagactgaaattgtaggatctaaggttagtatgtacttaactctgtaagaaaatattcatgtcttacctcacatctctagggaatgaaagattttagatcagaatggtagggtagaggaaaatccattggggaaattgttcctttggtatttacttaatctgaacattttttaaatgcaattgtaactattgatgaaatgtgaatattgattgaaaaaagacgttgatgttaaataagactttacaagcttgtaaaagaaaatatagttacagaaggaaaacaagtttttaaaaacagctttattgtgatataatttatataccatagaattcacccatctaaagcgctcaattcagtgaattttgtttatttacagagttgtacaaccaccaccacaaactaattttagaaaatttctatcactctcaaataggaagtacccatttacagcatagaagataaaaacaaaaacaaaaccatggttttagagttaggaagagctatgtnttagtctggattttactggtgtagcaactgcatgaccttg

SEQ ID NO: 53796 - DNA, 606 bp, Homo sapiens
cccccctcgagagtcttctagaattaattaacgcggggatctttctcttttaataatgagcattaattgtatatatatctaaatttcttgaaggggctgttgctatgttgggattctagaaggcagcagttaatctctttttggtgtcattatttaaaaatttctacattgttatcttaaacattatttgggaatttttaatgaaaattcagaattaagtaaaaataaagtaacccatctgataatttcactcacatatatttcacccttggatcactcgaagggaagcctaaggaacattaaagactgcacattttcagctctatagtctcaaatatttctttagtatcttcagaattatatgttttaaagtagagtagaaataaaagagtttttcatcctatttttcaaatggtcacagcattatgtgtatgtgtttgggtgttaaaaaaagaaactttctttgtaatcactcaaaatatttttaaaggtattgaaatacaaatttttggactaccatgggcttgtcagctcagaatgcaagaagtattcaaatcttgcaatttaatagattttttaaaaaaaaatttaattacacatttgaag

SEQ ID NO: 53797 - DNA, 585 bp, Homo sapiens
ccgggccccccctcggaagtcttctagaattaattaacgcggggtaggtaattgacaaaaactactttcctctgtgcctctggagctgaacttggaactctcctgggtgggagaggccctgatcaatgcaaaaataggcccttaagtggatcgggtgctccctctagtgacagacacagcagtaattaaatgcattacccggggccaatcctgcttcgcaaatccctgagcacaaggcagagacttcttgagtgcactaggaatttcttgtaatgactgtacaaccaacactggtgacgcacaccaagcttaaacagaaaaatgcccagtgctggggagggtgggagcacacggacattttcacatacatggacttggcacaggccctctgagtcgtagttggcattgtctagcaaaagtcttcaaaatacacctgccactcatctcctgagagctcatcctaaagaaaatggagggagtggccgggcgcggtggctcacacctgtaatcccagcactgcgggaggccaatgcgggttgagggagtggccaggcgcggtggctcacacctgtaatctcagcactt

SEQ ID NO: 53798 - DNA, 478 bp, Homo sapiens
ttctagaattaattaacgcgggttctcactctaaaaccttacactcagtaatgatctactatatgcaaagcacctcttacatccttcaccaccccattcattctgagattgactcctcccctttccagaaacaggaccacctaaacattccctattccagtcccttatttgcaagtcatcaaaagaaaacagagatttcaaaaagaaaacagagaccttatctgtaatccttggtaaggatcttccaaatttaagcctatgccagttttcaggaggaaacatgaatatgaaacagtctgacctttagacataattttttgttgactttaaattcccttggttaggccactgtaaccagtaaaataaattttattttagaataaaaattataaaggggaaattgagtctagccatacaacctactactagttactatctttgattcccaagtcatcctagagcaaaaaaaaaaaaaaaa

SEQ ID NO: 53799 - DNA, 424 bp, Homo sapiens
ccgggcccccccctcggggtacttctagaattaattaacgcgggggtacctttgctgttgcacacacattgcctaataggttagtggatttattactggaagctgggagtcaagaatgttatagattatttcagaacctgtgttcaaatacagacgataaagatagaaagaaaaggaacgttgagttctccctcgccatggaatcattatataattgttaattactctccacgcgcactggcttatgcctgtaataccaccactttgtgaggccgatgcaagtggatcatgaggccaggagttcaaaaccagcctggccaagatggtgaaaccctgtctctactaaaaatacaaaaattagctgggcgtattggcgggtacctgtaagcccagctactcaggagtagggaggctgaagttgcag

SEQ ID NO: 53800 - DNA, 618 bp, Homo sapiens
cgggcccccccctcggaagtcttctagaattaattaattcttttactgtatcatgagtttattcctagactcctctgactagggagagatcctcttggtcagctcctctataaggacagaccttgtttacaaggcagctgttctccagcacctggcacatgttgagaatgaatgaatcagtaaatcatccatgaggctaaagattttaatacattcttaaaatcaattttatcatttggctaaaaatattaatgctgtggtcctaactttttctctggtaaatttagtatttatcaattgtattatgacctattgctgtttttaccaatgtgcatgagaaaaaataaatcctgcatagttttatcaggtggctacatttattttatttggtttccgaagcattctgagtttgaagcaggatatgatggaacaataatcttaaataagtcatgacatgtttgtttattctcagggaaaaaccagaaatgttaccactctagcaatccattgattagcacctatatcttctttagctgaactgacacacacataattctaagccactcctttatttgcaaccaagtataagcagttcctgaagtaaaatgctacagttgt

SEQ ID NO: 53801 - DNA, 604 bp, Homo sapiens
ccgggccccccctcgaaagtcttctagaattaattaacgcgggtcaaatctacaggacgtgttgaaacaaattccctaattaagcattacaacagaattaaacttcatttttacaaatgcattatcttcatgaaataagactgcccatccacgaatttgaatgcactaatgcttttcagctaaggaaaaaagtctagtacatacctggtacaaaaatatgtcaatgctgggctgaattcaaataactgattttttttctatgtctttataatcatagacttacgtccaaagagatgggaggaaaaaaacctgaacctacatccctattactgaaaccatgccagctactcaatcataagggagaagcagaactcacgatcttttccataggatgatgtgaaataagaaagccctgtcagaaaaattccccttgtgttgccaagactgacaaaaaataaaaataaaaaaggctccagttggacttttaaatgtagtgggttttttttatctttaattccattatttaaagtccaggttagaacttgggaaaatgttcaattagaccaccactaccatccgaaagctattaataggaacttaaaac

SEQ ID NO: 53802 - DNA, 426 bp, Homo sapiens
  misc_feature 9: n = A,T,C or G
acttctagnattaattaacgcgggtatccttgaaggtgcttcagaaactctatatagggtagtttccacttttgaaaaaatttaccattttgcatatttatgccttatctgcccaacctaactgagtttctaatgggcaagatctaatttgatttctgtttactccctcccctcttccttccctcacctagtggttaggaacttctgagctaacaccccctcattctgttgcttcttctccctactaaactctctcccccagtgactgagggtgagctgtcctttccatcctgaaataaattggaaaaggtagtattttaaatttcttagagaaacttagcaagaatttcccatgaagactggtcattgcacatcctgcatttgtattccagaacttaaattaaatttaacaaaaaaaaaaaaaaa

SEQ ID NO: 53803 - DNA, 604 bp, Homo sapiens
  misc_feature 27: n = A,T,C or G
cgggccccccctcggaagtcttctagnattaattaacgcggggccgggcaacactgaagttaatatcttcatctgtagctgatgaagatcagttagggaacttatttgttcctttcttgattttaggataaaaattagcatgagcaccaatggtgagcatcccaggcatcttgcagccagctcctgctcatctttacagccctgcaaagtaggtaactgacatgtgggacctcacccacagtccctgagccagaaagacacagatgggattctgcgtttcctcccaagcccgggttctttctgtgtaccacattgtcttccacttgcctgttccaaggagcaatttggaaaccctttttattttgcgcccacatcgttggtgagcctctggggcgacataagaatgactcagggaggtgtgcgatggggtcctagccaaaggaggcaggcattttgatgaatcccctctgcctgccctgctctgactaagtgggaacattgcgtgagttcatgttccgtcccttagacactcctctatgaaatcatctttaaagccttaagacagatcttctggtgctctcagatataattaattccaaacact

SEQ ID NO: 53804 - DNA, 319 bp, Homo sapiens
ccgggccccccctcggaagtcttctagaattaattaacgcgggagtgagaccttgtctcaaagaaaaaaaaagaatatataatgaatgttaaaaaatgtcttctctgggaagatttattataaaatatgtgattatgttatatatttcacaagtatctgcaagtaaagtgctgacctgtggccccagatagccaatattaagtttgagtaacttcatgaagcagagtgcaccaggcagagccacttggacccttaagcatgttaacttagcggtttacagtattactttccattggtagaattaggaatctacaaagag

SEQ ID NO: 53805 - DNA, 321 bp, Homo sapiens
ccgggccccccctcggaagtcttctagaattaattaacgcgggatggctatataaatacagcattaaggcaaatcctctagtccgtcttcaactgcccttttcccaccatcttgcttactctgtttccatatagaaattctgaagcctctgactgaggctgagaaacattgatcctgaagccttcagatgcctttaactatgcatagcatcatgctttctccatcctgtagaccacaattttgagtcttccttaccctatgaagaccattcaaacagaaggaaattgagtgaggaaaggaggggggaaaaaaaaaaaaaaa

SEQ ID NO: 53806 - DNA, 543 bp, Homo sapiens
  misc_feature 16, 45: n = A,T,C or G
cgggcccccccctcgnaaatacttctagaattaattaacgcgggnaaagaaaatgacacactggaatgtcaaatgtaatcattctgacattgcttcttcaaaagcaaactgctgaaatgagaaaacctcaaggcctgttctctttccacacatatagtgtgtatatggatatagcttcaataatgtcagattacaaagaacccaaaaggtcaaaggacatctctctcattttacagatgaggaaaccaatacccaaagatgatttataatcagtggattagttgagattagaacacagtgctcttacatcctcagtaagttttacatgattttgaagaataattgtggcaccactgcctataatctaaagagaaagtgcatctaaggaggccctcctaaaacacacacatcacatggcttacaaagcagacttagtttagtgctgctctagcagttatctgacagttaagctcccttctgtgattgtgccactccactccagcctgggtgacagagcaaaactccatctcaaaaaaaaaaaaa

SEQ ID NO: 53807 - DNA, 586 bp, Homo sapiens
  misc_feature 287, 288, 289, 290, 291, 292, 293, 294, 295, 296, 297, 298,299, 300, 301, 302, 303, 304, 305, 306, 307, 308, 309, 310,311, 312, 313, 314, 315, 316, 317, 318, 319, 320, 321, 322,323, 324, 325: n = A,T,C or G
cccccctcggaagtcttctagaattaattaacgcgggtaagaactaaaactggttttggtcaccataatgcagaactcactggctcttactagatacatttttaataaataaatgactccaatattctaactcaactactgcttagccacagacagcaagcaagggctctgctgcaaagcttagctagtgaagtccccgtgacagaaagccagccctccaagcaaaattaacttaaacgtaggtttgattaaactgcctaacaggaacaaaattcattattcaatcnnnnnnnnnnnnnnnnnnnnnnnnnnnnnnnnnnnnnnngagatttagtcaacttaaagttaccacttccatattcacacacaaataaatacaaaggccaacacaagaacttgtccaaaatccaaaatcataaaattctaaattttctctgtggaaagttcctgagaggccattgatccaatcttctagcttaatagaagaaatcaaggcctgaggaaagaaaagtgctcttttaaggggtcacactgagttaattactgaagaagactccaggccacaccggcagctctcccacagggt

SEQ ID NO: 53808 - DNA, 610 bp, Homo sapiens
  misc_feature 36: n = A,T,C or G
tgggttaccgggcccccccctcggaatacttctagnattaattaacgcgggctttcattcaataactaatattaccaagtcaattgttcctttacagaagtaatgacaaggtgaaacaatgaggtgtttttgtgtgttcctgtaagatgcacaattgcctaatatgaaaagagctcaggctttatgtctggccaatgtatatttccttttatcaaactatggtacaaagccctaccctacaacatgcttccagtgtgactaagtcaggatataaatgtagtgataatacaggatacaatcccagttaactgttagcacaaaccattctgaagctatgttagcagaggctaggtttaacattttgtcattataaagagggatataaatgggactgatttacaggtagatgattatttcctaaggaaacaagtgttcagaaacataataaagttgatacataatagatacaggttctagaaaaagggtatctttatctggactcttgcttcatggaagatgctacaatgaaagtgacgtaggctcaaaaatgcaaagataggagaggttaaaacaaagttaattcactgtgtttgtggagaagggcaagggc

SEQ ID NO: 53809 - DNA, 554 bp, Homo sapiens
cccccctcgagagtcttctagaattaattaacgcggggggaagaagctaattcacaatgtggttgccactgaagcctcagctgatcctatggggaattctggagccaagatggcctctcagagttgccccaaatcagtgatggaatcagacctttggatccctgtatcagctcctcattggttgtgagccgctccaagaaggagctgtaaccttggtgagacagctccctgtgtcccagggcaacaggcagtgaggaattcagttgttcatcaaatattaatttttctttcctgttcatgaatttctgactttcttgttcccaggagctcattctccatcacagttcaaccacttccacagatggttctctcatttcatccagggaaataatgttcttggtttcttagcagcacctgaaagaagattctttttccatacaagtttggctgaaagccttgctttgtctatttcttctatgcctaaaccgaaatcttggatattattctaatgagaggagagaccagactcacctgtgctagaaaaaaaaaaaaaa

SEQ ID NO: 53810 - DNA, 293 bp, Homo sapiens
  misc_feature 24: n = A,T,C or G
gccccccctcgaaagtcttctagnaattaattaacccggtggtgcgcctaatgcaaaatgatggccttctttggtgacccagacaacatacatttatgccttgtccactggtgccaaatgatggctgccttttatataaattataccatgccaccaaagggagctgtaagtcataagagcaaaactaatgctgtaatctgaatacattccataaattgaaaaaatcgtgcacaagaaccacgcaccattaattacaccaacactgcataccaaacacccaaaaaaaacattta

SEQ ID NO: 53811 - DNA, 335 bp, Homo sapiens
cgggcccccccctcggggtacttctagaattaattaacgcgggcgcccggccctatctttttatttaaaaaaaaaactacctaatttatgacagtaggaaagtaggatctggtgttctcctaccttctttgattagcgggcaggtgtctagctgctcacattttaaaagttctcatccatcctttttttcttttcacattctgggtgaatgcagttttcatagaaggagctagatttgtgcgaccctaaagataggtgactcctctgactcacagatccctgggagcctctcccgaacagagtttctttatccacacaccccaaaaaaaaaaaaa

SEQ ID NO: 53812 - DNA, 494 bp, Homo sapiens
cccccctcgagagtcttctagaattaattaacgcgggcatttccttataggcatgagtaactttctgttttcatctattccttaaactttggaatttttagaattatggcagtaatactagtcagctgactaaagtgtatggtcaaaaaggattattttagcttatgtgtctcagataagtctgcacaaatataacagcaaatcataagagaatacaattatttttcagcacatctgtcttgggacaattaattgcagaaatgtagctaaacatgtaccatctgtgaaggaatctgccaagcagaattagcaatactgcattttaataaacacctagtaagtttggtagtttcttcttacagttaccatacctaaaaagcttgccaaattgctatagttttaagattctaattaagcctcattttctgtagtgtggataattatttctgcttatatatgaaagttttggtcatttatcttgttggaaaaatagc

SEQ ID NO: 53813 - DNA, 446 bp, Homo sapiens
  misc_feature 9, 25: n = A,T,C or G
acttctagnattaattaacgcgggnaagcaatatggcaagatttcttaaaattctcaaatgggtcgtctaatcaaatttagtgtgatggggcaaattgtcttctgttttttttttacagttttttttactgtaaaagttttaaaagtacaatgaaaacaatcaaaaaacagttcaagaaacttggctttgtataacaagaatgttaatgatttatcacttactgattctactctagtcaatgaaaatggaagggttttgtttaatttttatttgtttgttttttgagacaggctttccctctgtggcccatgctggagttcactggtacgatcatggttcactgcagcctcaacctccagaaatcaagtgatcctcccacctcactctcctgagtagctggaattacaggttcgtgccaccacgcctggctaattaaaaaaaaaaa

SEQ ID NO: 53814 - DNA, 432 bp, Homo sapiens
  misc_feature 28, 45, 46: n = A,T,C or G
ccgggccccccctcggaagtcttctagnaattaattaacgcgggnngcagaaaaatatatttatatgaccatggaatattagaatataataaaccttgaataaactttatttatttatttatttagaaacagagtctcaggccgggtgcagtgcctcacacctgtggtgctagcactttgggaggccgaggcgggcggatcacgaggtcaggagatcgagaccatcctggctaacatggtgaaaccccatctctactaaaaataaaaaaaaattagccgggcatggtgggtgcctgtggtcccagctactagggaggctgaggcaggagaatggtgtgaacgcaggaggcggagcttgcagtgagccgagatcgcgccactgcattccagcctgggcgacagagtgagattccatcccaaaaaaaaaaaaaa

SEQ ID NO: 53815 - DNA, 516 bp, Homo sapiens
  misc_feature 24, 35: n = A,T,C or G
tgggtaccgggcccccccctcggngtacttctagnattaattaacgcggggtgatgcccgtagggggccctcccaaccgttcatttcactttgttcctctccttgtaatgactgttgcgctcaaatatctctctgattgctatgctaacatctctttcgctgtcatgagatttgtttttaaagtccaacatctactttattggccatggcacagtggctcatgcctgtaatcccaacactttggaaggccgaggcaggtggttcatttgacgtcaggagttcaagatcagcttggccaacatggtgagacctcatctctactaaaaatacaaaagattagctggatgtggtggcacacacctgtaatcccagctactcaggaggctgaggcaggagaatcacttgaacctgggaggtataggttgcagtgaacccagatcatgccattgcactccaacctgggcgacagagtaagactccgtctcaacgaaacaaagaaaaaaaaaaagcggccgc

SEQ ID NO: 53816 - DNA, 484 bp, Homo sapiens
cccccctcgagagtcttctagaattaattaacgcggggggggggagattcttaatctcatcacaatactgcatgtattacaatataaattttaaaataaattctagcaagactaaataaaatgccatatagagtaatattacctgaattacaggagaacaaaagacataaaaagtcacaaagaataagaaaagacacatttatttaaaatgtatgcaaaaaatatcccaaaccaaaaaatgtaaataacagtcagaaaaaaaatgtttatcacacttgacaaagattcacatcaatatacaaaaattctctagaaaaataaagtcacatctcattagcaaaatggctaaagggtatctataaactttttttactatagggaaattggaaataacccagttatgcaacaacacaaatgcacagtaagttatattcccaagctagaatattatacaatcaccaaaataatgattttcagaaaaatt

SEQ ID NO: 53817 - DNA, 440 bp, Homo sapiens
  misc_feature 24, 37: n = A,T,C or G
tgggataccgggcccccccctcgngggtacttctagnattaattaacgcggggtggagtttctgggtcatacggcagctcaatgttttgctttttgaagaatccattgacttttaatacaacttctaaataggaagcagtcaaatatatgcaagattttggaattagatcattcaggatgagctacgtattgctatgtctatcttaaaaatcttatcttagtacaacattcttattttgtaattatagagaatttaggcaaacttaagttatctttattaaagaaatagattatcatgtctgtttaggccagttgcggtggctcacgcctgtaatcccagcactttgggaggctgaggtgggcggatcaccggagatcaggagtttgagaccagcctggccaagctggtgaaaacccgtctctgctaaaaaaaaaaaaaa

SEQ ID NO: 53818 - DNA, 573 bp, Homo sapiens
tcttctagaattaattaacgcgggatcttctttttaccggaagacaggtaggccagtctgataagaagaaatgggagactatgtatcgacagtatggagagtaatggcatctactgatttccataaatgacaccagtcacctcacaccatctgtatagtccttaacagtttatagagcattttcatacagctattaatttaatcctcagctaactctataagaaagtcacctgtattccctttctgtcaaggaagaatcagaatcagagacttaagtaaactactttgctcacgataacacaaagttagaattctccaatctaggttttaactttaaattcagggcccttactgtacataaggcacatactatatgtacattgcaggatgtcttcctgtgcctttgtggtgtccttgccgtgttcaaatcattatactgcatgctaggatgggaaaaggtggggacaaagtatccaccctctatttacaaaagatctatatatacatatatataaacttatgtatataaatattgctgacctacagcagtatatagcattaagacacacatat

SEQ ID NO: 53819 - DNA, 348 bp, Homo sapiens
cgggcccccccctcggaagtcttctagaattaattaacgcggggttgagcatatggacttctcatttgctgaatactacgtttgagtcaaataaaaaaaataaaggaatagagttaatatagggaacattctgaagtataaagccacttccttgaacttcacagttcaaatgaaaccttgcaattgaatcttttttccttgtagcttcactgagacataatacagacacaataaaattcacccatataaagcatacaatccaatgtttttagtatatttacagagttgtgcaatcaacaccactatctaatttcaaaacattttcaactcctcaaaaaaaaaaaaaaa

SEQ ID NO: 53820 - DNA, 453 bp, Homo sapiens
  misc_feature 23, 436: n = A,T,C or G
ccccccctcggaagtcttctagnattaattaacgcggggatggtaacaagccatgtgagccccagtgagctcacgaggtaacagggtgcacactcacagggagcccgctgggtacacatgccagttgccgagggacttcctatgatgccagcgctgcacacacccctggagcccctgggcagaagcaggcaccagagcctctctactgggccaggccctagcttgctttgagacgtacagtaactagaaagcaggttttaaaccattatctgagctccagggttgagctctttctacgtggactgtggcctccattacgcagaaagcattgggttttcacccaggctatcataaaggtctatcagtggtctccaagacaaagaggactggcgggaaagggtcttatgctagaaaccaggaatgtggcaagtatttntaagatgtagggcaata

SEQ ID NO: 53821 - DNA, 614 bp, Homo sapiens
  misc_feature 55: n = A,T,C or G
cggggccccccctcgaaagtcttctagaattaattaacgcgggattaatactatngtctcacaaaggtgaatatatattgagtggtgatctctttatagtggctaaaggtattttgtttttaaaaatgattatctcaaggtttcattcattatggatataacttttgataaagtaaaacatactatataaggtatatttcagtgataatatgtccaattttaatatacaacactatgcaaaaacaccttaagtcagcattcatgaatagtagaataaattaatttctgataatgtgtgtagtttataaaatctaaatatctgaaaactacatactttcatgtcaaaaatggggtcatttatatttttgcctctataaatgaaagtgtttttttgaagcttattgattaaacagatgtaaaaattaactagcaccctgactatttttaaggtagttcttctggttcttcagaattttctcttggcaaagaggttatgtaaaattagaagtatttttgaggtcttaccagaaacttattttagttgtaaatcaactataattcaactaaaaaattcaacattccaagaattgcacattttatttagtcctagattt

SEQ ID NO: 53822 - DNA, 453 bp, Homo sapiens
cgggccccccctcggaagtcttctagaattaattaacgcgggtcactgatgagaacatgaaaacacccctggtagggcacaggcacagcaacaggggctggcaaggatgaggtccccaggaggcaggaatccagacaaatgtgaaggcattagcagcgagtggtagagccctcttctggagtcaggagggatgaaagagcaaagaggaacagtggagagggagcacaagagaactcgtaagttggatttttttttttttcccaaagagacagacagagtcttgctctgtcacccaggttggagtatggctcactgcagccctgactttccaggatcaagcaaccctccgacctcagcttctcaaatgctgggaccacaggcgcgcaccaccacaccatgctaactttatttttttttttggagagacggagtctcaccaaaaaaaaaaaaaaa

SEQ ID NO: 53823 - DNA, 572 bp, Homo sapiens
taattaacgcgggttagcaggtggtagaagatgctacagtaacatagcctggaaaggcaggaaggtttccagggaagtaacataaggtttatgaagtctagaatcttttctctttctcactgagttcctgtaagaattcagtacttcagttctggctacttttttttctttttctttttccctaccatcacttcctccatagtgttgttttcaagaaatgaataaaatataattttgtctccttactttctaatttgttttttttctatagtttttttgttttacctcttaattccttcactcaattcaggtgattaggatggagcgtacttttcatgtttaggtcagtttaggaatttccaagtgtagagagcaccattttttttttttttttcgttgtccaacactaaaaaacagtgagtcatagagactggatttagaataacgagattaaagactacctgagctggaagagaccttaagggccgtctcactcattgcctgcatagatcatagatacatgatggatttgtggtccagagaagcagatccctgctcaagccactttcttt

SEQ ID NO: 53824 - DNA, 576 bp, Homo sapiens
  misc_feature 27, 43: n = A,T,C or G
cgggccccccctcgaaagtcttctagnattaattaacgcgggngaatcagtactatacaggcagttagatgacatatataattctgcaccattttattttggtccacaattatatcactactgtattatattttgctgttttaacaaatgagctctgatgaatttgccagtatttaacttttcctgggtctctcattttcattctacttatcctagcttctccactcccccactaacttctataatttttcctttattggaaagttctcagagccttgggctcttcagtagaaagtatagtatgaagctggaagataaataatacatcagatcacttctactcaatctgggcaagtgacatttacaattttaacaaactggaggcatgatggcaaataagagaatatttggaacagagtaaacttcagttacaatacagactaaaattctaagagtgttctttctcatttggctaatatatgtaattcaagtttactggaggaatgttctcactcagatgctaaactgcacatctgcaaactattcccacagaaacaatctgagcaacgcccaccc

SEQ ID NO: 53825 - DNA, 606 bp, Homo sapiens
  misc_feature 23: n = A,T,C or G
ccccccctcggaagtcttctagnattaattaacgcggggcagtgaagttagccaggggaagtaacaggcagtcatgggagaggagaagtgctgatggaggcatgagaatactgtaaatagactgagctccagtgactgagtaggactgacgtggttgatatgtcatatctcaccatttaagcagcagcctgaaaatccaacctaactctgtaggctttctccaggtaaaagcactcaaatcatggtacttgctaccagccaggcatccacagggtgaatactgggaatgtccatgttctaattataattgatttttatagtggaggatgttgggataaagtgggaaaatggcagggcagatggttgatgctcttatctttagctatcatatctggtgttataatgctcaatctaatcggcccatgtggatggattagagagagtcaatattaactacccccatcattaacttatcacagaacagaagcatcagattatgtcatcgtccattaaaccaaaaatccttctgactccctggttctgattccatgttcaacattataaactatttcctacttcacatctggatatagagcaaaaacgtac

SEQ ID NO: 53826 - DNA, 601 bp, Homo sapiens
ccgggccccccctcgaaagtcttctagaattaattaacgcgggcaaacatagagtaaagaccaatgatgactagatcttaaatgatcacctagcttaattattattaaccaaattcatcagaaagccacttagtgacattctgatatgatttattttcaaggtaacactgagttgatgtgttatttgtcaacacccaattgtataagtacaaaataaaaacctagtaaatacagagcaaccaaggctgtgtctgagagtataaaagcattgagataaagggtaaaaggttcagttaatccatgaaaatgtcaccatccactagggatctctatctgaaggttaagagtcacagactaagtgtcagatggtgcgagcagccagaatggctaaatcaactcgggtgatgaatgtggtaacagatgctacaatcacattgcttgcatagccaagacagaagatgggaccacattaaaatcaaaatatacttccaaatctatgtatctatccatatctattagtcgtccccacttctcttaaaaacaacatattttccttcaatttgtacagtggttgattaaccagcttttccctattacaact

SEQ ID NO: 53827 - DNA, 538 bp, Homo sapiens
  misc_feature 28: n = A,T,C or G
cgggcccccccctcgaaagtcttctagnattaattaacgcggggcatcttcgactgaaaattttctgaactgctggccgtcatgaatcacgatcttggcagctattttaatttctttatttaacacaaataaaaggaactctgctctttttctagacaggtctggatgtcaaacaacaggtataaagtggtgagacagtatacgcttcacatataggaggaactcagaatacttatttttacttcctcacctaataagcctgtacaaaggtttactgaaaagattctatttttccacacaaagcagaaccaaaaataaaatggattaactgattcaaagccctcagtttcctgatcctttcctagctgacaaaatacaaaatatcgcttcttccaacttactttgctacttcctggcattctttaaagagtatcttcctgtcaggcactaaatctgtcatcaacatatttgacatggtcatttgtaaatgaaagccttagatttcctggtgaagaggaagacatgaaaaaactaaaat

SEQ ID NO: 53828 - DNA, 337 bp, Homo sapiens
  misc_feature 16: n = A,T,C or G
cgggccccccctcggnagtcttctagaattaattaacgcgggggtagccaaaagcaaagtagtttacaccaaagaacccacaaaggttcaagatttggtggccccagctacctttggaaggggaggagaaaggggaaggtatggctaagaatagaataattgttgaagaaattgttagttctcctgactccaggtaaaacactggaggtcgattcatcagaaagagtgaaatcaaggatctcttgactggggaataccagaatcagttaaaggctgagttatagcatcagtctgggtccattcaggagacagaaactacacggtaaaaaaaaaaaaa

SEQ ID NO: 53829 - DNA, 487 bp, Homo sapiens
  misc_feature 53: n = A,T,C or G
ccgggccccccctcggggtacttctagaattaattaacgcgggtcctccacanaagcacttggggtcaatgatggagtttaagtgtctggaagacactaggctgatgagggggctgtctcatacagtcagcctatcccaattcctggcactgtgtgttcctaaaagtactttatttggggctgggagcagtggctcacgcctgtaatcccagcactttgggaggccgaggcgggcagatcacctgaggtcaggagttcgaacccagcctggccaatatggtgaaacgctgccactattaaaaacaaaaaaaaattagtcgggcatggtggcccacacctgtaatcccagctacttgggaggctgaggcaggaagaattgcttgaacgtgggaggcggaggttgcagtgagcccagatcgagccactgcactccagcctgggcgacagagcgagactctgtcttggaaaaaaagaaaaaaaaaaaaaa

SEQ ID NO: 53830 - DNA, 603 bp, Homo sapiens
ccgggccccccctcggaagtcttctagaattaattaacgcgggggatcccaattataaaaaaaaaaaaagacttatgggtttccttccaaagtagaaaggcagaaatggaaaaatgagttttggttgctatggaaataggagttggctgggcctgcaggagcagcagctggaggggaacaagtggccgggaagttggccctgtgacagaggggggcttccggctggggataagacaacaacagacttcagcagggagagtaggaggtagaaagaagaaagaaaaggagacagagtctgtctctagacactggcgcctatgaattctgcagacatttggatacagaggtgggtgtgcatgcatgtgtgtctgtgttgcacatgtatccccagaggccagaaaaacaagatgcacaataaactcaatgcctgaaaaagaacacagtttcaccagctgtcctgagggtaagaaagcccccaaaccgttgagtgacagaagaggaaaggcctgccgttgaaatgctttctggggtatggggaaatgcctgagtagggctggccatcacactgtgttccctcacctttgtcctcagcacagttcttca

SEQ ID NO: 53831 - DNA, 302 bp, Homo sapiens
gggccccccctcgagagtcttctagaattaattaacgcgggtactgttgtttgatttcccacccgacagcaagggttaccagaacagtgactagaacacgtctgtgctgtgcactaatgcacttcccattgcctagcatagaataggaattcagaaaatacttgcccagtgggtgagtgagactggttggtatattagtcacctgtgagtgtgcttagcatgaataaatccccagagcctatttatttactaatcataggggtcatagggagtttctgaatctgggaaaaaaaaaaaaaaaa

SEQ ID NO: 53832 - DNA, 160 bp, Homo sapiens
cccccctcgagagtcttctagaattaattaatcttttttactgtcataactagtaaatggcagagactgaatccaacctaggcaatctgattccagggtctatgaccttgaccatgagtttcctctactgctctaaaaaacaaacaaaaaaaaaaaaaaa

SEQ ID NO: 53833 - DNA, 593 bp, Homo sapiens
gggccccccctcgaaagtcttctagaattaattaacgcggggtgggtggagtgctccccataaactcactaagtttaaggtggacagcacaagtgaggcaagaccatcaaacagaattacaacactatgtatgtaggcaggtatatctgtgtacacatcaaacataaatgacacacgttctgtacagtacatatgcatgtaactcttgtagcgtgtaaccacacaggggtagagtaatgcctacaagtcacaaaggaggtgctctgcagcagcagctgagtgatctgctctgagaaaacctgatagacctacacccaatcttacaaaatatttacaataaggggcaattacttacactatagaaagattcttcaccttattaaaggatttactacaaggtcccactaaactgcataggctctaccggacttagaatagggtttgatttgcctaagacttcacaggcaactacataaatcaactacaaaaaaccaaggagccacacctgaactgaatgttttcagctatataatatgatgtacaaaacgaggtaattttatttgtatcaatattactgattttccgtgtgagta

SEQ ID NO: 53834 - DNA, 602 bp, Homo sapiens
cttctagaattaattaacgcgggggaaaatgattttctgttttctactatgagggtgtatagaaaatatggtacacttaagagttattgtacaagtcactgtagaccactgtatgttacaggatagctatattgtgtatgaagcatatttaattactaaaacgttgaaaagaccttattataatgatgctatctaaaatatcatacatattatggtgaagctttcaggaatcataagaaggagtgcattaagtggttttattgtgataaaaaaaggaaagacacaaattgctctgaatcaccaaaaatcattaagagcatgtaagaactggagaaaacctctaaaattctgatatcaaatatttgaatatatacattcaagtgaatttattaatttggggataagtttgagagaattagttttttcagggaattctaaaataaacttttcaaaaaatattaagttatgtaagcaaattaaactcttagaaccacacaggttgtcaatggatatgtttaattcattgaatatttcctgtaatctaacatgaaggtttaacatgttaaattgtcataatatatgaaaaaaaaaaaaaaagcggc

SEQ ID NO: 53835 - DNA, 587 bp, Homo sapiens
ccgggccccccctcggaagtcttctagaattaattaaataataatctattttattttagagacggcgtctttctctccagcctgggcgacagagcgagactctttataaaaaaaaaaaaatgcaaatattcattgagggtttgctatgtgctggacacttttataatattatctcatttaacttttacaacattcctaagaagaaggatgtgttactgattttgggtttttatacgtggggaaacaggcacagagatgataaataatttgctcggtggggcgtggtgtctcacgcctgtaatcccaacactttgggaggtcaaggcaggcagatcacgtgacatcgggagttcgagaccagcctggccaacatggtgaaaccccatctctactaaaagtacaaaaattaactgggcatggtggcaggttcctgtaatcccagctactcaggagactgacgcaggagaatcacttgaaccctggaggcagaggttgcagtgagccgagatcgtgacactgcgctccagccttggtgacagaccaagactccatctcaaaaaaaaaaaaaaaagaaaaaaaaaaaaaaa

SEQ ID NO: 53836 - DNA, 614 bp, Homo sapiens; identical to SEQ ID NO: 39677
  misc_feature 16: n = A,T,C or G

SEQ ID NO: 53837 - DNA, 579 bp, Homo sapiens
  misc_feature 10: n = A,T,C or G
cccccctcgngaagtcttctagaattaattaacgcgggcaaaacactacagattgaagactggtggaaggcagaagggacagaagtagacagggaccagccttctctagagagcaagaggccttgaccacctaatgcttccagagtaaggacaaaatctccagggtttaaagaaagaacagaaacactaccaactgtgggctttaattacatcatagatgttagatcaaattatgtttcatttcttggagaccagtagaaaaaaaaatattagctgagccatttactcgctatgtggtagtaacagctaccataatgagctgcaattagatatctgtgcttccttagtttttgaaggggagggaacctgcccaatgtctatgactgaagaatcctccacaatgcatatggtggtggatagtaaagtccatcttgtacaaatcttagccaagaagtccaaacacactcttccgggctctctcatgcagctagatccgaggcacgtgaaccaggttcggccatttatatgcacctgcctcacattttcaaattgtccttgattttcctttaagcactttct

SEQ ID NO: 53838 - DNA, 600 bp, Homo sapiens
cccccctcgagagtcttctagaattaattaacgcgggtttcccctattacattcatgcttcataattgaagaaaatgttcctatgatcttgcagatacataactctagctgagagggctacagatggatcatctggcacaagatgggagacagcatcaactgagttctagtcatagcactgccttgactgacagagacctcgtcaataagatatatatcagacacatgcctcagtttacaatggcttgtcatgagttttctatgctttgtagtccctggaaacactttacagtgtcatctctctgaatgcaggtttccaaagacatccatagcctgcttcaaaactaaattttacaagaatgaaaagaaaggaaaaacatataaaaatcttcaaggtataaccagcagagaaaacctctctttataatttggtgctgtctagtaatttttatatttatattctaccaaacagaaattttaaaattctttttattttaaaataaaagaggccggccgtggtggctcacatctgcaatcccagcactttgggaggccaaagtgggtggatcatgaggtcaggagatcgagaccatcctggct

SEQ ID NO: 53839 - DNA, 285 bp, Homo sapiens
gggccccccctcggaagtcttctagaattaattaacgcgggggagagagagagagagagagagacacttcaagaagtctgaagtttacattttaatttagtggcctgcagggctcagtcatttctttataagccaaggaataaccagtacagttatgagttgtcagaatccccaactccagcgacacaaaccatactcattagagtggcgtttctagctggttcattcaacttggcaattcagggaaataatccagaaaaagaacgaaaggaaaaaaaaaaaaaa

SEQ ID NO: 53840 - DNA, 327 bp, Homo sapiens
  misc_feature 24, 70: n = A,T,C or G
gccccccctcgaaatacttctagnattaattaacgcgggggatatggattaaaggaccaaatttattgcntgaaaaagaaatgctggaatgattctaaatatccatgagtattacttaaatggggtaagggctgctgaaaatgataacatcaatgataataatgcacctcttagactgttgagctgctgcttcgttttctaatttattccacaggcatttataagcacctattgtgttccaggccctattttacatattcctgttggaactgatggactcttaccatgcatttgttcactcgccattaaaagaaaaaaaaaaaaaaa

SEQ ID NO: 53841 - DNA, 567 bp, Homo sapiens
  misc_feature 26, 39, 86: n = A,T,C or G
gactgggtacccgggccccccctcgngaatacttctagnattaattaacgcggggtggggctttggaaatgccaggggcacgtggnccgaagacaacagcatacctagctcaggtatatgctgtgtgtgtccaggtcggctgctgctgggagcctccagagtgaaactgagatggaaatatgttcaaggaggcatgctgtttctggaatccaaggcaactgacaaattctctctcttctctacttggagaagtataaaaaaaaaatggcttcgggttagctgctttctttcttgtatctctggtcacagagcctagtggccctcgaggacttgcagttgggataacaacttggagccacagtgcaggcctcttcgtgactcctgtgaagggtacaatccgttcagctctgaaaagctgcaccccactcccccaaggagccacttggcagaacgtgaacctttctgtcctcaacccaggaaaaaaaaagtacaaaaagaacaagtctaggaacaaataagggaacaagtcttggattctacccaaaaaagttaaaaaaaaaaaaaaaa

SEQ ID NO: 53842 - DNA, 552 bp, Homo sapiens
attaattaacgcggggtgggtaggaggcaggactgcccaaaagaattagggcacccaagaggcaggactgcatggtggctggtaaaattagagcacctgaaagacaagagtgtccagcagatccccacaatcttgtctgggggactgggtgggtggcatacccagggagaggtgagagttccctaagatggctgtggaaactgattataaatggtacagtcctactcaaacagtatttccttggcattttgctttaaagatttcctttgcacctgtaattcagcactttgggtggctgaggcgggaggatcagttgagtccaggagttcaagaccagcctgagcaacatagcaagacctaatctctacaaaaagtcaaaaaaattagctgggcatggtgatgcatgcctgtagtcccagctccttgggaggctgaggtgggaggattgcttgagcctgggagattgaggctgtagtgagtttgataacaccactgcactcagcctgggtgacagagaccctgtctcaagaaaaaggaaaaaaaaaaaggaaa

SEQ ID NO: 53843 - DNA, 266 bp, Homo sapiens
cccccctcgaggtacttctagaattaattaacgcgggggctggggttgaggtagcagggaattggtcctcacacttgagcgggtttaaaaaccacacgaggagtttgttaagaaggatgctaggctgggcatggtggctcctacctataatcccaacactttcagggctgaggcgaggggatcacttgagcccaggcattcaagaccagcctgggcaacatagcacgactgcatctctatttaaatttaaaataaaaaaaaaaaaa

SEQ ID NO: 53844 - DNA, 605 bp, Homo sapiens
ccccccctcggaagtcttctagaattaattaacgcgggtgcctttgctttccgactattttgaacagggaaaagaacaactaatggtctggaggagaaatcaaggacactttttaaaatttactcattcagcagatattgactaactgatgagtaccaaatgtgctagaacccagggttctagagatgattaaggaagtcaacggtcttggcttcatggaacttatgtctagtagggaagaaagatgttggtctagtgataaaaagtagcaagagatgcttattccctctataataagaataacaggaaggatctagaaataggctcatgggtttgtagctataaaggcaagaatttgaaaactcttctggccaaaagctctacttattctgaatcatgggaggagctttcatctgcaaggaactgccagatagaggagctttggtggcacatacacaccatggaatactatgcagccataaaaatgaatgagatcatgccctttgcatggacatggatggagctggaagccattatcctcagcaaactaacgcagagacagataaccaaacaccgcatgttctcactcataagtgggagctgaa

SEQ ID NO: 53845 - DNA, 415 bp, Homo sapiens
  misc_feature 39: n = A,T,C or G
gactgggtacccgggccccccctcggaaatacttctagnattaattaacgcgggcggatcatctgaggtcgggcgtttgagaccagcctgaccaacgtggggaagcaccgtctctgctaaaaatacaaaatcagccaggtgtggtggcacatgcctgtggtcccagctactggggaggctgaggcaggagaatctcttggacctgggagacggaggttgtggtgagccaagatcgcaccattgcactccagcctgggcaacaacagtgaaactcccatctcaaaaaaaaaaagaaaagaaaaaaattagatgcaagaattttcataaaatgaaaatttaaaatgtaatcataaaaatatattgaactaaactactttaaaaagtgttccaaagtgctgggattcaggctttgagc

SEQ ID NO: 53846 - DNA, 609 bp, Homo sapiens
gggccccccctcggaagtcttctagaattaattaacgcgggatcattcttttgtctaaagaatgacaggtgataatttaaaaataaaaacatttacaaatgctttgggactttaaaattgtattaatttttatcttctgtttccccctaattcttgcttattttgattttcttcattaaaagagagataaagttaaatgtttgggggcttttcactttggggccattataatttatattgagggaatcgtgtcaatgcttaattcatatctgttttatctttacctagtttatccatttctgatcataatttatttttccaatagtcttttttttttctatccttaatccctatactctcatttctctaagtaaaatagatttggaaaaactactgaggtcttggtagtttgctttagcaggttaactccaaacttatcaaaactttttggacaattttaagtgactgtttattaatagctatgtcaagaaccttgaatgtaaacctaagatttttgttaaacactgaaacagcccattattcaagcactgtagttaaacttaggtttcattgcagcagccactgtgagactgagagcagaactgtgag

SEQ ID NO: 53847 - DNA, 372 bp, Homo sapiens
  misc_feature 27: n = A,T,C or G
cgggccccccctcggaagtcttctagnattaattaacgcgggaatttatttgtgggatttatcaaaaataagatgcatgactcttcatttccctccattagatctggtaaaaagcattagagctaattcagtggcccaaatttggttccagttcattagtctgcctacctctaagataaaacacactaaattttttattttgtagtgctaaaggaaataatcccaccactagaggagccacagcattgaattattcataagcttcttatttcaaagactattatagctcagggtgcctctgggactcaggtacttcattaacaacttggatagggcttctgtacctcagctataggaaaaaaaaaaaaaaaa

SEQ ID NO: 53848 - DNA, 342 bp, Homo sapiens
ccccctgcgaaagtacttgctaaaattaattaacgcgggcaatattttctgtttggtcactgtggccaatgggctacacttagaaaccaccgctttgttcaactgaaccagatagcatatgacaaagagttttccagcatactctcctaacttgacctgcctcataattgtattgttgatacaaaaaatttaaagaatctctttatttattgactgaacaagtattttatcccaggctctgtcctaagctttggggataaactaataggaaaatacaagtgataggcataaccaaagattcacacagtaactataaaaaagtgatataaaaaaaaaaaaaaa

SEQ ID NO: 53849 - DNA, 231 bp, Homo sapiens
cgggccccccctcggaagtcttctagaattaattaacgcggggtggacccagggttaaagagaagccttaagatggtttctgaaggaggtaaatagagccctgctgtcacgaatgcctgatgtataggaaaatcgtgtagtcttctttcttccccaattgtttccatggatttagacactagaagtgtctctaaatttatttcattctcataccaaaaaaaaaaaaaaaaa

SEQ ID NO: 53850 - DNA, 544 bp, Homo sapiens
taattaacgcgggagatttaccagataaatcagttaacaccgttgttttttttttaaaccaagaacaatgaagctattcatacattttttttatttgaagtttgaataatcatttattcttagtttgcaaagacttcaatacagtttattacaaatacaagcaaaataaattgtggttattctgaaatttataggtcaatctaattaatgtgcatcaaacacttacatttattacagtcaccacgtccaaggcctgttcattctttatttttatttttatttttgagacagggtctcactttgtcacccaggttggaatgcagtggcgggattttggctcacttcaacctgggctcctgggctcaagtgatcttcctgcctcagcccggcaagtagctgggactgcaagcatgcaccaccacagcccgctaatttttttgtattttttatagagactaggtttcgccttgttgcccaggctggacttgaactcctgagctcagctcaggagatctacctgcctttggcctccatagtgttagga

SEQ ID NO: 53851 - DNA, 334 bp, Homo sapiens
cttctagaattaattaaaaataaaaaatagcatagactctgtatatgtcatcagaaagccaggatcagatagggtataaactttgttttttcgttggatggaagtcagtgttgtccacaaaggagatgcagcttaaatgatgaatttaaaagaattctgagccaagcacagtggtgtgttcctgtggtcccaactactctggaaagagatgcaagagtatcacttgagtccaggagtctgagtagtataatgaatataatgtgaccacacctgtgagtagtcactgcactcaagcctgggcaacatagaaaaaccccacctcaaaaaaaaaaaa

SEQ ID NO: 53852 - DNA, 466 bp, Homo sapiens
cgggccccccctcggaagtcttctagaattaattaacgcggggtggggcaggagaatcgcttgaaccaggaggtggaggttgcagtgagccgagatcatgagatcatgccattgtactccagcctgggtaacagagcaagacttcgtctcaaaaaaaaaaaagtttctaaatccatttccttttcctgagtttttcactcttgtactaataggaaatacttcatatacttcaccaagtgctaattctgtagacagtgggtgtctacttctccatttctccatttgtgccaggactgtgacttaaagattggatattcctacagtagtaatgaagaagagtaggattgggtgggttagcaccatttgaatactgaaaaaagtcctctagcagtacaaagcattccttttttttttttttttaaccacccaggactccaaaccttgggtggttaaaaaaaaaaaaaaa

SEQ ID NO: 53853 - DNA, 601 bp, Homo sapiens
gccccccctcgaaagtcttctagaattaattaacgcgggtcaaatctacaggacgtgttgaaacaaattccctaattaagcattacaacagaattaaacttcatttttacaaatgcattatcttcatgaaataagactgcccatccacgaatttgaatgcactaatgcttttcagctaaggaaaaaagtctagtacatacctggtacaaaaatatgtcaatgctgggctgaattcaaataactgattttttttctatgtctttataatcatagacttacgtccaaagagatgggaggaaaaaaacctgaacctacatccctattactgaaaccatgccagctactcaatcataagggagaagcagaactcacgatcttttccataggatgatgtgaaataagaaagccctgtcagaaaaattccccttgtgttgccaagactgacaaaaaataaaaataaaaaaggctccagttggacttttaaatgtagtgggttttttttatctttaattccattatttaaagtccaggttagaacttgggaaaatgttcaattagaccaccactaccatccgaaagctattaataggaaacttaaacc

SEQ ID NO: 53854 - DNA, 303 bp, Homo sapiens
  misc_feature 15: n = A,T,C or G
cgggccccccctcgnaggtacttctagaattaattaacgcgggcgatttaatgtgacaatttcaaaaatattcatgccaatatttttaaaaataaagatactgctggtatgaaaatgtcctctcaatagtacagacattaacttccagtgaggtagagaagggttttttagggaaatttccaaagaaaataacctgcaaggttattacttgactatggtttttgaggatgttagctacagagcaagacttatcacagtgtgaagaatttgggggctggaagggttaggctaaaaaaaaaaaaa

SEQ ID NO: 53855 - DNA, 187 bp, Homo sapiens
  misc_feature 33: n = A,T,C or G
acttctagaattaattaacgcgggagctttgtnaaaaaaaaaaaaaaaaaaaaaaaaaaaaaaaaaaaggaaaaaaaaaaaaaaaagcggccgacaaccgaggaggaaactacaataaaccctataaaagaagtaaaataaagcgacactaaatggccaggggggctccaccccgggggagcgggcc

SEQ ID NO: 53856 - DNA, 603 bp, Homo sapiens
cccccctcggaagtcttctagaattaattaacgcggggtcctgaaaagattattatttctgctttacaaattaatattttgggtggttaaaccgaagttttccaaatgtggccaaaaccaaaagattaatatcttccaacatcctgatttaaaaaaatgaaataagtatatcttgttcattttccttactcctagggcacagaaattatctaggcaataagattaatatggaaaaagtgattaagaaattcaaaagaacagattacattttcatgtgtgaactgcctcaagataaaactacatagactaggtatgtgtttgcatttcactatgttctacctccttcaataattgggggctttaagattcacaagctaggtgcaaattattgctagtgtgactcactattagtgatggaaatgtgtcatacccttcagatatgctgggaaagaaaaaaggtcaagaactattttctttcatatacccaggtaaatcataagggaaaaaaattttttaaccttatcagctttcaagaaggaagcagggatagaaactccttgagaattcatcatttattaccacatagctgagacagaatgtgag

SEQ ID NO: 53857 - DNA, 204 bp, Homo sapiens
gccccccctcaaaatacttctagaattaattaacgcgggaaagttcattttgagaaaaacaaaatttgaggtaatccaatgattcacagcacacggaaactagacaaataaaaataacaaaattctataggaaacactttttgtctgctatattgcattcttaaaatttgaaatggtataaaaaattagagaaactcatcactc

SEQ ID NO: 53858 - DNA, 372 bp, Homo sapiens
attaattaacgcggggtggggtgggggtggtaacataaaaaataaagaatttgaactatgagcttttctcaatacttcaaaatgtcaatcatatcaaaaattactgaagaggttctatttatctatccttcaggctttactcagagtcaaatgaatgaccaagtatgtgacgcataagagcagattttatgaaacgcttttgcaactgcaaaaaatggctctaagtcgcaaactgttgaccatcaggcccaacctcactcaattggaaacaaaaatcactggggtcaaatagtgctaaaacacaccaaaacctaatgaaatggggctttcttctttttaagagatgaactctggctggcacccatgctggag

SEQ ID NO: 53859 - DNA, 607 bp, Homo sapiens
cccccctcggaagtcttctagaattaattaacgcgggtagagacaacgcacaaggtggtgatcacaaggacatggacttttgagttactgaagtcaacagaatgtatttgatagccacagactgatgaggtctggtgacactgaagtcaggaaatgcatttgcaagtaaagtcagtgcaattcagtcaacacttgtgggttggtgtggggagcaagtggtgtgttatgtgctggatttgaaaggggagacaagattgctgcctccagatttctggctgcgcagagctctgtaggatgatcatgaaaaagccgatgttagaaatcacaatgatggcaatggctggccttcgaggcatgctaactacttgacagtcactgttctcagccccggatgtttattacctcatttggtcctcgcaacagactgtgaggtagtcactattctccccgctctacacatgaggcatctcaggctcagaaagataaaataacttacccttcagcaaacagctagaccaggaggagctaggtttcaaatccagattggtgggccccagagtcctgctcctaacctctgcagtaagtgtgaaaagaaagcagggtcaag

SEQ ID NO: 53860 - DNA, 609 bp, Homo sapiens
cgggccccccctcgaaagtcttctagaattaattaacgcgggccactgagaaaacactatcattgaatgatttttcttcataaagaaaggaagcagcaaaacagtccataatgagagctcagccaagggaaacaaaaatcattgaaatttcttaatatattctttaatactgattattagatagaagcatgttttacactgtgggaatccataaaatttcaaagaaaaagatgctgttttactttaaaatgttgaccttgaaaggctgtaactttttaaactctacttttgttcactttctttctctttcatttagttcttggttgtctgcaagaaacttggatgagaacctatcacatcaaaggatttagtatacaaaagggtagcttgtaagtcagttaacaaacaaagcattttccattaaatgcttctaggataactcactatttgagagaaaattatcaagttaggtaagtatgcaaattcagctgcgttatgaacttgattgagaaaaagccatgttagtcatctagaaaacaaatacgtaaatagaagattgcaaaatggcagagaagtttataagcataagactaatttttaaaaattcta

SEQ ID NO: 53861 - DNA, 456 bp, Homo sapiens
attaattaacgcgggtgaccttagctattgtatctcctcctcaaatcttctcctttcagggttatgcagtgctagttctcttaactgatagttctcatcctgttaacattcctctaggcacccactactctatcaatgccatcttaaaaatagtgcatctggccggatgttatggctcacgcctgtaatcccagcattttgaaggccgaggtgggcgtatcacttgaggtcaggagtttgagaccagcctggccaacatggcaaaaccccgtatctactaaaaatacaaaaattagctgagcatggtggcgtatgcctgtaatcccagctactcaggaggctgaggcaggaaaattgcttgaaccccaaaggtggaggttgcagtgagccaagattgcgccactgcactccagcctaggtgacagagcgagaccccacctcaaaaaaaaaaaaaaa

SEQ ID NO: 53862 - DNA, 531 bp, Homo sapiens
  misc_feature 494, 495: n = A,T,C or G
gggccccccctcggagtacttctagaattaattaacgcgggttaggattggatgtcctgggcctactgagactcaatttccgcctctgtaagaggggggatgacagtgtcttttctgaaacctcatgggaatggcatggaagataatgtgcgcgaaccttgtcatagcattcaccatcctgtgccccggtataaccacattatcctcaagcccatcttccatcttaattgtccaacttgcttctgcctgacttctggcagtttccaaaagcaaatgtttctcaaaagacaaagatttgccactactgaacatattcgaatatttgctcagatggaaacaagtgtgtgaaaaaaagaacatgaactcctcttagaaagaaaatctaagaccagaaatgtggcttttccaagattaaaagtcagcccgtctcagtaagaaagttttccttgccagctacatttggaaagctgaaggaaatcttgaacaaatgaatnngtactgtgagtggacttattgttctcaagctcaccc

SEQ ID NO: 53863 - DNA, 603 bp, Homo sapiens
cccccctcgagagtcttctagaattaattaacgcggggagctattaataattccttcagggcaacagatagaacaagggactgtccttgtaaaccagaactatgatcatcttatctgtagggcatggatcaaaattgagattaaaaaaataaagcacttaaagacaaaatatgagggccccacctgtaacaccatatataccagttgagaccaaaatatcttgtgaccaaaattagaaagcgtatggtctctacagcttgttcatggagtagagcataatctcatgtacacggcaaggctacttatcttttttggcttttacgctttcagggggaaaaaaactcttaagaatatactataaagtctctggatgctaaataaatacactcttgaatcagataaatattgtgaaaaaagaaaaaaaaaatccagtgtccttaatagagacataccttgtaccttggattctaaaaacagagctctccattatattgtaagggctcgtcgaactgacaaaaggcatattcccagtgaggggggcagctgttcccctcaaactccttgagaagcatgacagcaaccacttctacgttctacataatg

SEQ ID NO: 53864 - DNA, 589 bp, Homo sapiens
cggggccccccctcgaaagtcttctagaattaattaacgcgggagttaaaagacttgtctgtgtttagaaaaatgagatttttatttgggattccccagtatattagaaagatgattctcagtaaattgtgggcaagaaggaaataatatacatatttgtggctatgagagctaaccagaaaaaaaaaaaagaaagaaagaaagaaagaaactctctggactcgcacagttccaaaaactgctgaatgttgtctttttttttttttttccaccctactaagcatttctctcttatcgaggaggattcatttcccacctgtttcttttacgttcttgaaatacatataaagttagtgtttattttctacccactgaaatcttgttcaagttattctttctttggtctctactttcaaaagtcacaacttgttttgaaaacattagcatgagagaaggcttctttttatgtaccacaaactctcaactatttagaatgcttgcttcagaggtaaagagatgcctggtggcttttctgctttgtaacaatggccgtgtaaacaacatgactggacaaaaccaaaaatgtgct

SEQ ID NO: 53865 - DNA, 597 bp, Homo sapiens
ccgggccccccctcggaagtcttctagaattaattaaattaatagtttattgtaacttcctctgtggatatgggagataaaaaaagaattagcacaaatgtgaattcaagtattctagttttcaagacagttttatttttcattctcagtaaacatattattattttggctttatatatgtgtatgtttggcatggtgaataagatgctgtttccaaattaaaatctactctacatacgctatactctgtaatatgataaatttaccaataccaaatttatattatgaatttacacatttattatataaattatatcccatttgatcacttgagtgataatcactaaaacttcatataagacacacacctatgcctcaatgatattcttggatttagaatatgttattaatacaatgattgttccagttacgtaggtggaaaaactgaggttcaaagattgataccgaccatcgtatctctggaaaaattctacctattttggaataaatccaagtcatcttgtgaaggacctaggcctagtgtttctttaataaaaatgtaatgaagtgtccttgtcaaaacagcaaagaggttct

SEQ ID NO: 53866 - DNA, 607 bp, Homo sapiens
cgggcccccccctcgaggtacttctagaattaattaataaaatattgtcgttgactccttccaccttgggaatgaatctcaggcagtggcaacttttacatttactatgtagtttatttttcttcgcttcattgcccaattaacatatcttctttctgattgacacattctatatttggatggttaatatattcatcctgtaactttcaagttttgctggcctaagagtatttctgtcttttgtgactttgcatatctatattttagtccactttgtggtaatttaactctctgaaggacaataattttctttgcataaatttcaagttttggataaagtatcactccagctaccatgtgctaattatctatatcagtaccagagtgccatgtgttcctttagccagctaaaaagatatatgactacatcatggattttcatgtataatttaaaaatgagtaacccaaatgtacataaattaaattaaattaaattcgtagttccatctcacgggtttagtgacagtaacaaatccctccagcctctacaagcatcgctccttgttctatttggaggtcttaagcactttgtgatatttgttcttta

SEQ ID NO: 53867 - DNA, 613 bp, Homo sapiens
cgggccccccctcgaaagtcttctagaattaattaacgcgggccaccagtcctagaataagtcacatcctttatttgattatctgtggcaggctagggagtaaactgcagtaaagaaagaaaagagaaattcctgtagtcacccatgttggctattttaacgcagccattcacatgaatgcaaatgtaagcaaactgccctattttcatcagtggagacagaatttggagattagatcagataactgatatttgcaattccagcctctgaataggaaggaacaagaacattttcatatagaggtgtaaggaaatgttagtctcaggttaatggtcacatgtgtgggtgaaaaagcaatcaccaaagaaacaaattcttgttgatgaaaatgaaaaaatctccccaacaacaaagttaaaaaacatcttcattaagggttttcctatgacggggagttaagaactcatttactcagtccctggttaaaagtaggggctaatctcatttgctgtatcacctgttccttcaggttggtccattgctagggaaagtagcaccagcaagacagccaactaatatttcctagtgctcattctccacacaaaacaaccaa

SEQ ID NO: 53868 - DNA, 392 bp, Homo sapiens
tgggtaccgggcccccccctcagagtacttctatattaattaacgccgggcgagctggttctagcttgtggaaaaacaggaagcagacacacccaggaaaccctccgaacagaagagcggtgagaagcccccaccatgggccgagggagacgccatgaaacccccgaggaggagagggtgcgtcagcacggaacactcagacggcccgcaggacacgacgagtacagaaacgagaagaccatgtccaagaacatgtggaaatcaaggattttaatgataatggcctgaggagtgccatctcggctcattacgaaaagatagactttttaaaaaactgatatgaagagaagtagagagtcacttggaaaaagataaaattgattccatgcctt

SEQ ID NO: 53869 - DNA, 608 bp, Homo sapiens
  misc_feature 587: n = A,T,C or G
ccccccctcgagagtacttctagaattaattaacgcggggacagattcaaaccatagcatttagctagattgagaaaggaaggacctggatgtagatatcatgaggcattctttctctcttttccctctctaccacaccaggaattttaaaggcatagaaatgctaaagtttcctacccttgaacctcaaagatcccctgatgatgcagctgcaggcatcctggataacaatccatgagcaagacaagaaaaccatggccaattgctgatcccacgtgtgtactaactatcctgtaaggtaagggtttcttccttcaaccttacctccttaattagaatgactaccagaaaactaatctacaggaacacattttagcaccactaaacagcagattaatgagccagtctgttcacacgagcttaaaaatgttttccagtttgcctctagcaatttctctctgaacatcaagccatgtaggatggatgctgcgaatccccagctgtgacccattttaacccaggtattgaacgtgtttgaggaattggattaactgccttcacatgacaagacaggaaagaaaacattnttcagagttgcattttcttac

SEQ ID NO: 53870 - DNA, 586 bp, Homo sapiens
cccctcggaagtcttctagaattaattaacgcgggcttatgatattaatacagaaaaaagcggtctcaaaatatatatagcatgactccacacacagaatacgctaaaagtaactgcttatgggtagtaggattattgattatttcaagttcctcctttggcctatccatatttaacaactttgttacatgtctaataaataaaaaaatcgatcacaggcatgtataacttcatgtaactctgaactatatataaatcattttttgttaaatcaagcacacataggaacatatgtcaaaaagtccttgcataataaataacacacttcttgacatacattttaaaaaactgttttctaagagtaaggtctgattgtattattaatagcattaagtagtaaataatatggttagtaaactttaatgataacagaccttctgaaccatctagtctaaatacacttcatgagagattgtcccaccaacaaacttcaacatgtcagagaatagaccttatgagtccatgtttttctcagaatcagaaataaaacatatgtacttctggcacttagttcagtctggcttca

SEQ ID NO: 53871 - DNA, 506 bp, Homo sapiens
cccccctcgggagtcttctagaattaattaacgcgggacacagttgcatggaaatatagccaagctatgtatccagaaagaagaaaaaacaagtgtggtaaagagctatcagtctatgcctcagcttttcaaaatccagtcttacggcgcacagatctagagagaatatgtagaccttatattatgtaaaggcattcacagaactatttttgttgttgttaacatacttgagcttccctacggcaatgttcttgtaggtttcccagactaatagccttcaaaatggaggtgaatatatacatacaagaaaaaaataagtaacttaagtcttctaataagatatgttttataaaaatatgaagaagatatagtaacagctccttacagcagtgtaagacctttctttcatccatctcctcacctatggttactatcctcacaatcccatttccctctatgtacattttactttataacattatgttctcatacccaaaaatacaata

SEQ ID NO: 53872 - DNA, 597 bp, Homo sapiens
gggccccccctcggagtacttctagaattaattaacgcgggtattattagtcaatcagtaaacacttatttaattatggaaaagaaggtcgctctttcattgaccaagggtagcaaaaatttactaaaataggtgaagacattagtgtctgtgggaaatagaactatctggaaattcaatttttattattatatgttggttttggacatgagaaagatgtatatatatatatatatcaatacagaagattacttgcagattttttcttgggggaaaagaaagaaaagtcatcttggagtactgagaaaactaagcacagagagaagctctagttatttctagcattatctaagagtggtcctgatgagatgatgtaagtattgtggtctgtatagcaagaatttacctggtgtgaagacagccctgtagcaaatattcttacagtgtgctgagtatacatccacttttgttttctctgtttctatgcagtgacattcaggcaatatttgatattaagattcttgcttttttaagattgctctttgctgtcaagttaaatattttgtgccgcttgatatttttctcattatggatcaa

SEQ ID NO: 53873 - DNA, 495 bp, Homo sapiens
attaattaacgcgggtgtggtggtgcacacctgtaatcccatctactcgggaagctgaggcatgagaattgcttgaacctgggaagcagaggttgcagtgagccaagatcacgccactgcactccaacctcggtgacagagccagaccccatcttgaaaaaataaataagtaaataaataaacagaaaaaatgaagaaatgggagttcttagagaagttgcatcttggtatcctccctttaaaattctgactggataaattaaagctattcctatgtctagctctaattcctgaccaatagactagatatttgaccctggttggccaaaagttctgtattatcatccaggcatggtggctcatgcctgaaatcccagcactttaggaggccaaggcaggcagatcatttgaggtcaggagtttgagaccagcctggcaaacatggcaaaaccccatctctactaaaaataccaaaaaaaaaaaaaaaaaaaaaat

SEQ ID NO: 53874 - DNA, 595 bp, Homo sapiens
cccccctcgagagtcttctagaattaattaacgcgggggagtcttttgatagtgtggatggatttgtagaccaccccatgtacatttccttcacctccattgtcctttgttagtttccactccttgtgaattgattttccaattttaacttttaattttatattgtgaatctacaagaatcaatgggtgatttggggcaagtactttgtcctgggtgagcattattccctacacctacaaaaggttaaaatgagattatgatgtgtgagtgcctagcacaactcctggactcaggacccaggccaaatcgataaggctgaatttgaaggatcatcacttgtgttggccataagtattttactatttagtaaatgcaatttataaacctaatgaagattttctcctgtcttgcagatttcgtatctatctccagcagtttatggaattaagctacatatatttggctttttgctgtcaattcctctagtggtactgtattcaaacacatcatttatataattcattacgctacgttaccatactctgaggatttttagaaagaaattccatgctgcgtgaaaggtctaatgctgtg

SEQ ID NO: 53875 - DNA, 603 bp, Homo sapiens
  misc_feature 28, 585: n = A,T,C or G
cgggcccccccctcgaagtacttctagnaattaattaagcggccgctttttttttttttttggttctttacttttttttcttactctggctataggtttgttgattttgtttaccatttcaaaaaaccaacttttcatttttttgccctttcacacttttttaaattttatttatttatgctctgatctttattatttctcttcttctactaattttgagtttggtttgctcttgcttttatagctctttatgacacattgtttcgttgtctatttaaagtttttctacttttttatgtatgcatttactgctataagcttccctgcttttgttgtatcccgtaagttttggtatgttgtgtttctattttcatttgtttccaaaaataatacatttcctttttaattttttcattgataaagtggttattcaggagcatattgtttatttcccgtgtgtttgtatagtttccacagttcctcttgttattgatttctagttttatttaattgtggtcagaaaagatacttgatttcaattttttaaaaattgaaatgtattttgtatcctaacatatgatcttnccttaataatgttccctg

SEQ ID NO: 53876 - DNA, 483 bp, Homo sapiens
ccccctcgggagtacttctagaattaattaacgcgggttgtcagatgactttttgccaacatgattggtaatgggatgtggcagtatctttgctgtcaaagaagagataatttctcaggtttttcttgtaagttttaaaaattgtccttatgggtttttttttctctttaaattggaaataaaggaactgaagggtaaaacctgaagactagtcatgtttctttaataaaggttttatagaagtagccatttgcaaacgtcggtaagacagatttttaaaaaaacagtttaaacttataattattgaaaatattctaaattgtttatctcctgtggaatgatctcattagcttggtagacattttatgtgtacgcctgtggtctttctatatcttatgtcattactgtaaataaatattgtgcatgcaactttaatagattggggtggttggaagtacttagcaaaggtgacatttatcaatc

SEQ ID NO: 53877 - DNA, 582 bp, Homo sapiens
ttctagaattaattaacgcgggttaagcataatattgtaaacaaacaagttcttttgcagtacttgaagatctttttttgtgactatcccccttatatattatgaagatacattttttgtgactatcctctttatatgtattgtgaagataaggttttttatagtgaatatcctcctaatgctactagtattgtttgcaatctgtcattattcttagtgtaaaattaaacttcaacagagtacctgtgtgaactcttaacaatttttgaattagtgaagccccaaattaatgatgctttactagatataagggaactggaaaggctgaaatctcaaggtagagtcaaggcagtaattcctagcagcctgtgtttctcggtgttcttcatgcttcacagaggttggaattcagcttctggtttaagttgtcttaatcttgaccacagtggtaattttactttcccactcttttttcctcaactagaatgactcggagagttgagctaacagaggtagaatattgattcgtgagataggttcttagagatataagtgtgcgcatggaagaaggaggaatggcgt

SEQ ID NO: 53878 - DNA, 595 bp, Homo sapiens
cgggccccccctcggaagtcttctagaattaattaacgcgggcttccataaatgatattgggaaaactgaatattcacatgcagaagaatgaaattagactcttaactcacagcatgtgcaaaaacctactcaaagtgaattaaagtaaatgtaaagcttgaattgtaaaattaatacgagaaaacagggaaaaatcttgaagacattgttgttcagcaagtggtattacccaaactgaaagccatttcatggcaaacgaaatagtcaacagatagaaaagacatcttaataaatgagagaaaatattaccaaataatacatcaataaggtgctaatattcaaaatatgtaaggaactcaacaagctaaacagcaagaaaacaaataatcagattttaaaatgagcaagagattgaacagatgtttttttaaaaaggaaacatataaatggttacaagttatatttaaaaaatgctcagcatcactaattatcaggaaaatgtaagttaaaatcacaatgagatatcactttacttctgttaaaataattattatcaaaaatatgaaaaataacaagcaagggtgtggagaaaag

SEQ ID NO: 53879 - DNA, 602 bp, Homo sapiens
  misc_feature 27: n = A,T,C or G
cgggccccccctcggaagtcttctagnattaattaacgcggggatggaaggcttaaaaactttttaaaagtgtttaaggtcttttctgagttttaaatgcccttaccaaaatgaaatcgggtaaccttacatcaattcccagcaattattttgaaattgtgatgctgtgtggaacccagaagactgagaagtgctgaagtgacaggccactttcctaggagctgggaccctctcgggccccttcgaaacctgagagcttccagcttccaagagggtaacgcaggagggctgacgagtccagtgggtcagtgtggacatgcccacgtacccttctccctgctgacagggcccccatttccaatctcacaggaaaaccttgatagaggaaaaacatattttgagtgtcagggtttaactttgaagagtggttacatccaaaaagagaaattccaggagtttgacatttaataggaagtaacaaattccaatcagtgacacctacatgacagctgccttttctgaggtggatacaactttctcagagactggaatcctcgtgttacaacacagaagcaaccgcctgttgtccatgtgtgaggctg

SEQ ID NO: 53880 - DNA, 603 bp, Homo sapiens
cccccctcgagagtcttctagaattaattaacgcgggtcatggggtgaaattcttattaggtctctacacagaatctgaataacacaggtgtgtatttttaatgaattactccaaaatatctattgagagagtacgctgttctttactagatattgaggaaagtcaaagaatatgaaatggactccttcctactttcaagaagttgataatctagacgtaaaaagaggaaggccttataaattagagatgacaatttaaaagtcacagtcttacctacattgtgttccactacccagttgtgaatgttaaataggaagtatgtcttcaccacattgattgcaggcaaatcagattgtatgcaagggaggttttcctaaagaggtatttcaaaccttgcaaaattcaagactaattttctcaaaggaataaatttaaataggatatttcattctctgagtgaataccactacactcatgatactctgggggcacattatagggagttcatcatacagccacatctccacagtcttacccattttttcccattatcctcagctggatatatgatgactttaaagaatttgaaaggaggactgctt

SEQ ID NO: 53881 - DNA, 461 bp, Homo sapiens
ccccccctcgagtgtacttctacaattaattaacgcggggtggggggaaatttgtggataaggcaccagggctttcactgaaataaccctgagtcagtggtctgcctcgtccctctgcttactatgtagcctagccatcagcacagctgatcttagctggtctctgattgtccctcatttcttccctcaaaagctattcatgagactgggtacagtggctcacgcctgtaatcccagtactttgggaggactgcttgagcccaggaattcaagaccggcctgggcaacatggtgagacccccatctctacaaaaaaatgaaaaagaaaatagccaggtgtggtggtgcacacctgtagtcccagctacttgggaggctgcggtgggagcattgcttgagcccaggagactgagactgcagtgagctatgatcgtgccactgcactccagcaagaccctgtc

SEQ ID NO: 53882 - DNA, 595 bp, Homo sapiens
gggccccccctcgaaagtcttctagaattaattaacgcggggctgccctgaacagaccattaaagaccagaggaagtggctttaagaacaaatttgaaaggaaagtgaattttatctatttttttaatttataaaatcagagtttttgttatttgactgtcacctaaagaatgaggaagaatttgttataatttagggacaggaacgaacaggtttttaagactcgtttgtgtgtctaggtttttaagtctagtttgtatgcaaaaacctggagggaagagatggttatagacagtttgaaaactctcaggagttcattgtggccaagttagagaataaagtaccaaaaagatactctgggcagagagaaatgaagctggaaaagtaaataggtgccatagtgttcagatccttgcatgtgagttctggcaggtggcctcgaaaaagcacttaacctcccagacgtagttttcttattggctggtaaaaggatacactgggttgagtgcagtggttcacagctagtgagcactttgggaggccggggccagaggattgcttgagtgtaggatttcagaccagcttgggcaacata

SEQ ID NO: 53883 - DNA, 461 bp, Homo sapiens
cgggccccccctcgaaagtcttctagaattaattaaccagcagtatgccagcaaagcttatgataaacatgatgaatctttctggttataattttactttaaaacaaatcaaaaaagaatgtcccactgtatcttggagtcagatgcttctaagcttttgaccctcactggcgtgtatatacttgttctgctattttttggagtacattggcacagtttgaaaaacattgcttacagataatgttttaatttagtattatgtaaataccaaaggctttaaaggatataattcagactatatcagtctttcgtgtaatgagaaattacacaaaatgctaatagtacttattttatttaagctgatttattataaacactgtagaaacccagctaaaagcaaaaacactctgttcttctatgtttaaaaaatatatatatttttaaatggcagatggaaagcc

SEQ ID NO: 53884 - DNA, 606 bp, Homo sapiens
ccgggccccccctcgaaagtcttctagaattaattaacgcgggtataaaaaagtcaataaaaatgaaaaaatggaaaagaagaaaaagttctcttaatattagaattttttaggcattaatgaattttatttatgatgtataatgcttgactcaaaaattgactggcttttttggttggttttataatattaaattagtaatataaaaaacattcaactgggcgtggtggctcatgccttggtctcccaaggtgctgggattataggcgtcagccactgtgcccaccccccatcccaaactttaaaagaatttttgtaaacatggagatatggtctcacactgttgtccaggctggcctcgaactcctgggttcaagcaatcctcctgccatggcctcccaaacttctgggtttacaagtgtgagccactgcacctctcatctagtaggtgttttgaggtttttctacatcataggactaaataatgggcaatagttcttccagtaaggtttccctgaggtgtgataaagcaagaaaactaagctagctgatatttaagattcctacctagttaaatttctttaagcattttattcaatatctttt

SEQ ID NO: 53885 - DNA, 576 bp, Homo sapiens
cccccctcggaagtcttctagaattaattaacgcggggtggggaaagtggctggaagggggaacaaaaggtatttccatttttgttgctttgtcctagtctcaaaaatataggctcaacacatacagcctcaacatcagattccatccatgagacttccctgtccatatttaatgagttagcattctttataagtctcttttatatattctctttgaaactctttaaagtctggctgggcgcagtggctcatgcctgtaataccagcactttgggaggcagaggcgggcagatcacttgaggttagaagttcgagaccagcctggccaatttgatgaatccctgtctctactaaaaatacaaaaattaggccgggcacagtggctcacgcctgtaatcccagaactttgggaggtcgaggtgggaggatcaggaggtcaagagatcaagaccatcctagccaacatggtgaaaccccatctctactaaaaatacaaaaattagccgggcgtggtggtgggtgcctttatcacagctactcagaaagctgaggcaggagaatcacttgaacccggga

SEQ ID NO: 53886 - DNA, 215 bp, Homo sapiens
ccccctcgaaagtacttctagaattaattaacgcgggtgatttattaaactaccctctcccccaatctgatggatgaaaaatggcatctcatttgtaattcacatttctctcatgagtgatggtgagcaacttttcatatgcttaaaaagccattttcatttcctttcaaagaccacattttaatgtattttaaattggaaatattctaagtgtt

SEQ ID NO: 53887 - DNA, 400 bp, Homo sapiens
  misc_feature 72, 181: n = A,T,C or G
attaattaacgcgggtgaccatgtagtaagactatgatctgaaatataaggctctgaaatgggggtaagggngaaaatatatgtcactcattacaaacaatatttcaaaatgataatgataaatgaaatgatatttttgtagagtaatcaataataaaaatgcttgagggaagataagtcngtaatttgtggtctatacagtttttgaagttcatttaacaattttaaaatgagaaaaaatagatgtagattctgatttcatgcatctaccaagtatcaaaagttagtgggaattaaaaatgctaggatggttagtagacaaggaagcactattaacagtgttgctagagaactaattgtctgaaaacccagagtggtagattgacagaaaatagaagtg

SEQ ID NO: 53888 - DNA, 614 bp, Homo sapiens
ccggactcccccctcgaaatacttctagaattaattaacgcgggcagtatggaagaaatgataaaaagatgtaatccattgctttagaccaccaaagaggcctaatatgagtcattagcagaaaaccgttaattttcttttttccctattctgactgttgtttgtagaagtgctcaacctcttaggaattggaacatttaactgtttcttgctattttgcaagatggaggccaaagcattaagagaagggaattaagcaatatgccattacatagtttaagaaatctgagtgatatagataacattttagagcctcttaggttgaacttgataatagctaatgagaagaattaacactagtagagcactttaaagattataaagggccttcacaaacaatatctaatttcctggacatcctcccaaaaatccaactctcagaaaatctatttccttgaacatagagaactaaaacccaggtcctcctatttcaaattcaagactatgttaatccacacaaactaataaaaatatgatgatgttccaatctaatatggatgaaagcagtcactttccccaggtttgtctggcaaaacaccagttctccatgatgc

SEQ ID NO: 53889 - DNA, 614 bp, Homo sapiens
cgggccccccctcggaagtcttctagaattaattaacgcgggaactctgaaatgtaaggattaggactggattttgccgtggagatttcaaacaaatccaatagcaaaaccaaagtgaagatgctaacagaggagctacctgaaactatgatccctcagtgtaaaggtgaacaagaaaatgggcaaagagacaacaatgaaatttgcctactttaaactgaaaaaaattctcccctgaaatttcataacctcaacccacatggattcatagcctgaattcctgctacctgagaacattaagcaaggatttaataaaaagtagtccaggaagtggtggcctcaaggcaaccagcagaaacgaacacaaatataaatcctggagaaatccaagttctgtcctttgaggcaacaatttcactgctcagaatcgtagaaagatacatataaaatagcttcactgtaaacaaaatctagaaatatatatccatcaataggtaaattatacaaattatagcatagcaaactaagactatgcaaccgttaagaatgacgtggggccgggcacagtggctcacacctgtaattccagcactctgggaggccgaggcgggtgg

SEQ ID NO: 53890 - DNA, 354 bp, Homo sapiens
acttctagaattaattaacgcgggtttcaaaaaacttgttggccagccatctatatagaaagtagcaaatgattctatttatttggtagctgccacgaataactgctttagaaggggatttgtaaaagcacctgtaaccacagtgagttacctgcgcactcaggacctacagcattctgcaagccccaacgcgagcgcttaaaccatcagccagctgggcagagtggctcatgcctataatcccagcactttgggaggccaacggaggtggatcgcttgagcccaggagtttaagaccaacttgggcaacacagtgagaccttgtctctataacaaataataaaaaaaaaaaaa

SEQ ID NO: 53891 - DNA, 392 bp, Homo sapiens
cgggccccccctcggaagtcttctagaattaattaaaaaaaactataatatgtgtgctcttctttactctctttgtctcttgaagaaggcataaaattggccaggcacagtggctcagcctgtaatcccagcactttgggaggccgaggtgggcagatcacctgaggtcgggagtttgagaccagcctgggcaacacagcgagaccccatctctacagaaaaatgttttaaaataaaataaaataaaatggcagacataagtccaatcatatcaatagtaacataatatgtgaatggattaaataatccaatcaaaggcataatcaaacttcatgctctccacaggaagcacaatttaaattcaaagatacaaaaaagaaaaaaaaaaaaaa

SEQ ID NO: 53892 - DNA, 432 bp, Homo sapiens
cccccctcgggagtcttctagaattaattaacgcgggtatacttttggtaaatatagctaaatatttggctataaaaatttttctgccaaagatttaggtttttttaaaatctactacatattgctaaaacactatcagagaaatctcagcactataaattcatatagatataattgaactttccttagatttacaattagtaatggtgaagaagatacttttaaatgcttatctgaattctgctctctcattattttgggtacagtggacattaaactctcactacctgttcataaaggaggctgggcatggtggctcacgcctgtaaacccaggacttcgggaggctgaggcgggtagatcacaaggtcaggagatcgagaccatcctggctaacacggtgaaaccccgtctctacaaaaaaaaaaaaaa

SEQ ID NO: 53893 - DNA, 583 bp, Homo sapiens
gggccccccctcggaagtcttctagaattaattaacgcgggagagtactgctcattaaatatctgtttttgaagtaacagagtaagaataattggatggtcgtaatgtagaataaaacacatactgtgacttaaatgaatgttttgagttgcttaaaacattcattaaaaaatttccaaaagttacaattaagtaagagcaatatttgtggtagataacatttaaaatacagccttttttattttcaagtactaatgtccctggtgttgaaaagagatcccattcagaaataaataatctctctactggagctcttcttgaagagtcctcaagtacagcccaacaattgaactgtgataaattcccagaaaaaaattttctttgttactttcagacagtctccctctgtctctactaaaaatacagaaaattagccagatgtggtggtgtgcgcctgtagtcccagctactcgggtggctgaggcactagaatcacttgagcctaggaggcagaggtggcagtgagccgagatcacaccactgcactgcagcctgggcgacaaagactgtcaaaaaaaaaaaa

SEQ ID NO: 53894 - DNA, 556 bp, Homo sapiens
  misc_feature 548: n = A,T,C or G
ggccccccctcggaagtcttctagaattaattaacgcgggtcatagtcaagaataatgacaaatcagtttcctagtagatggatagataagtagaataaaacctagtacccaagaaatacacaaagaaatataatctaactaaatgttgagggagtcatcctgagcttaaaataacgaatagtaaaagaatgatttaacatcacccagaattttagatcttactaaaaaggaaattaattatttgaatacctgaagtatatctgggctacattaggcttcataaatgttttaagttatttaatctgatttaatagtaacatgatttacctgaatgcagttctttctctcttaccaacagaagtgaggttcagggccggccgtggtggctcacacctgtaatcccagcactttgggaggccgaggtgggcggatcacgaggtcaggagattgagaccatcctggctaacacagtgaaaccacatctctactaaaagtacaaaaaaattaaccgggcttggtggcaggctcctgtagtcccagctactcnggaggctg

SEQ ID NO: 53895 - DNA, 613 bp, Homo sapiens
  misc_feature 573, 582: n = A,T,C or G
cgggccccccctcgaaagtcttctagaattaattaacgcgggtccaagaaaaaaataaagtctgaatataccatgttttataaactttaaaaacaaaattacatgtcacacagtgcttaagtacatttatgtttgtgataaaagttattttcacagtatttagaatgattcaaaattcaagatgcttagtgctgggaaagggaaagtgagagaagatatggaaggaacagaatgattcaaattattggtaatgttctaatacttggttcaaattaaatacataacctgcattaagacacactataatacaataatgaagagagcggaacaaaaaactaaattaaatgcagatgggattataaaaaaccccaaaatgcaaggcacgggaagctcacgcctataatctcagcactctggaaggctggtgtgggaggaatgcggccagcaattcaagaccagcctgagcaacaaagcgattctcgtgcctcagcctcccgagtagctgggattacaggtgtcagccaccaggcctggttaatttttgtatttttagtagagacagggtttcaccangttggccangctggtctcgaaactctgagctcaagtgatc

SEQ ID NO: 53896 - DNA, 501 bp, Homo sapiens
cgggccccccctcgaaatacttctagaattaattaacgcgggattagaaaagagtaacattttccctatgggcatgtgttactcttataacttaaaatggaaaggcaaaaaatgaaagttttcaaaattaaaggcagtaaataatctgaagatctcccctcctccaagttcttaacaaaaatcccatgtcataagcacccttaatcaaacagtggtgcttctgaagagtcaagtatcctgtggaccagataatgtaaactttcttaaaaaagaaaaaatttgccaggcatggtagatcatacctgtaatcccaacactttgggaggctgaagcgggcggatcacctgaggtcaggagtccgagaccagcctggccaacatggcattcatggtggcatgtgtctgtagtcccagccacttgggaggctgaggcaagagaatctcttgaacccatgatgcggatgttgcagtgagccgatgtcacaccactgtacttcagcct

SEQ ID NO: 53897 - DNA, 617 bp, Homo sapiens
  misc_feature 16: n = A,T,C or G
ccgggccccccctcgngaatacttctagaattaattaacgccgggtctcaggaaaaaaagaaaaaaaaaatagaagacagtaggtaaacactaagaaaatctgaatcaacgatatggacttccattaggagagaggaaggagagaatgaaagctatcactttgcctgcactaaaactagcaatatttgactggacccaaaaggctttgtactgttattaaataaaatttggaaaaagtatttcatcttttttatgccttccaagtttctatttataatacatgcagataattttaaaataactatacatagtttaaaataactgtatatatagtacacactataaatgttttattgatggagggcactgctctaatcggaaagaggcagggacttcaaaattttaagttcaaccaagctgggcacagtggtttatgccttaatcccagcacttgcaaagctgaggtgggtggatcacttgaggtcagcagttccagaccagcctggccaacatggtgaaaccttgtctctactaaaaaacacaaaaattagccaggtgtggtggtgcacgcctgtaatcccagctactctggagactgaggcacgagaatcacttga

SEQ ID NO: 53898 - DNA, 602 bp, Homo sapiens
cccccctcgagagtcttctagaattaattaacgcgggggggggagcataacacttaacagccgaatgttaagactaccataaaaggaggaagaatctcaaaacccaatgcaggaaagccctttaaagtctacagttcctagtttctgactccatatatgtcaaagcagcttctaattagaagtttgtttctcaaggggctgaactacaaggacagaatgaactgatctggccaatatggtatcctgtctacttgtcaatatatttctcactgtgaattccctaattcatgttcttgctcttgcataaagttcatgagttctgagtgtcagtgacagcacctgatctaattgggttctgagaaaatcaattctgaacctgaaaaactaaaggtcagtctttgaaatttgtatatattacaaagacccagtccaaaagggcccagaacatacctaatactcatttaaatggagtatttaccaggtcaagagaagtgaagaattaagggcaattaggtcaagattgcaagctggcaatcctcaggccagatctggtccacagatgtgacttgtttgggccacacacgttgttcaaaaatgggaag

SEQ ID NO: 53899 - DNA, 409 bp, Homo sapiens
gggccccccctcggagtacttctagaattaattaacgcgggactctagaacttcatgtgaataaaagtatgtgtgtttcgtattgggtttcttttgtgcaaaaccatgtgtttgagattcccctagttacatgtatcagcagtttcttcatttttattgctcagtcgtattccattgtgtgaatatattacattttttttaatccattctcctgctaatggacattgaaattatttccagttcttggctataaagaataaagctgctatggacactcgtagagtccatttgtggacataggtttttatttctctttatcaatacccaggcataaaattgttgggtcttaaggtagacctaaccacatgagaaagtgccaaatggttttccaaaatgagagtaccatttt

SEQ ID NO: 53900 - DNA, 383 bp, Homo sapiens
ccgggccccccctcggaagtcttctagaattaattaacgcggggggttgagccagttaagttacagtgagtttcagtttacatgataaatgtgccttaaattacatttggattagaatattattaaatattaatatggggacaattgcataacctccttgccatagtagtcattcgacaaaaatgagttgctgcttcaaatcaaacgaaaccaaaccaaacacctctaattaccatgatatgtgcacgcccctgtttcccaacttcagtctcagtgcagaagcaagggttttatctaaatccagacaattatctgtgaatccctgtcacttcaagtgtctcagtcatggatagtagccctcctgacaccaaaaaaaaaaaaaa

SEQ ID NO: 53901 - DNA, 610 bp, Homo sapiens
cgggcccccccctcgaaatacttctagaattaattaacgcgggttcttcactaaataatttgatatttatgcctaggtctgtacaagattttcccaggattgtgtgcccatttttattctaggtgttgcctatcatactgagatggaattgtgtttttgcttgtctgtacatttctgatctttgctggaaatagagatccctgtaaaaagtaaaggttgactagaaaaaaaaagctctcttctgaactgagaatggccactgaaatagtatgattttctaaagaaagcaagttagttccacaaaaactggcagtaaaatatcttttttttttttttttttgcatataccaaatgtatcaatatgaagaaagcttgcctgtctgtaaactcattgagtgccacctccagtgctcgctattccatatggaatatcagtgaagtatgttataatctatacatttgtgtttagtgaacgaatattattaagtaacttatttgtttctttaaagtcactgctgttaagtacaccaagtcttacctcattactgtattgctggtgaagccaacatagctcttttcataaatccataaccaatagagttcagaatct

SEQ ID NO: 53902 - DNA, 601 bp, Homo sapiens
  misc_feature 546, 558, 571, 573: n = A,T,C or G
cccccctcgaaagtcttctagaattaattaacgtggggaagggcaaacgattccaatctcaaaagcatttttatctgtgtcattttttcatccagtctaacatgctgtttaagtgggtatacaatggaaataaaggcttgatttatgtctctttcctaaagactgctctactgtgtctggactttcttctacagcaattaaaggttatcctgggaaataacaaattcatttcaaagttggtacagtaatccttttttttcttgagatggagtctcactccgtcgcccagcctggagtgcagtggttcacacctgtaatcccagcactttggaagcctgaggcaggcgaatcacttgaggtcgggagttcatgaccagcctggccaacacagtgaaaccccatctctactaaacatacaaaaattagccaggcatggtggcaggcaaaggtgtcccagctacttgggaggctgaggcaggagaatcacttgaactgggaggcggaggttgcagtgagctgcgatcgtgccactgcactccagcctgngtgacagagcanaactccatctcananaaaaaaaaaaaaggaaaaaagaaaaaaa

SEQ ID NO: 53903 - DNA, 367 bp, Homo sapiens
acttctagaattaattaacgcggggggctcactaatacttaaggtaaaacattgaacttttaaacgcacaacaccaagctgtggtacgcacttgtctcttctgctggcagtgggcctgcaggaagggggacaaactctattctgcaccccaagttctgtccacctgcaagtggcctgctaacataatctgattgtcataggctgcacctttgctggatttcaatcagaaacactctttgcatgagttctctggctcttctccggatgtggaaaaacgtggctgtagccagagtaccctatcatccacagaaatcttggcactgcctccagtgccttagcagtattgtatgccaaagaaccactttcc

SEQ ID NO: 53904 - DNA, 361 bp, Homo sapiens
aattaacgcgggcccaatagctgggatgccaccatgcccagctaatttttgtatttttagtagagacagggttggcctggcaatgttggccaggctagtcttgaactcctgacctcaaatgatctgcctgcctcaacctcccaaagtgctgaaattacaggtgtgagccaccacgcccagcccaagcaatcttttcttagggaaactgaactaagtttcccaggggtgaagttttaaaactatcttgaattgcctttgtattttatttttccaggcacacaatggtttggaaaataaaaaaatgagaaagtgaaatgcttatgttgcactaatgcccatttgacaactattgtgtaacatt

SEQ ID NO: 53905 - DNA, 598 bp, Homo sapiens
ggccccccctcgaaagtcttctagaattaattaacgcggggaggattagacatcttgtttcaagtggcatttatttgtggaatgcgagatggttcaacatagggaaaatcaatcaatataatataccacattaacagaatgaaggtcaatagccacatgattatctcaattgttgcagaaaaacatttgacaaaatttaacatcttttcaggataaaaatgctcaataaactataaatttttaaaaattgccccaaataataaagttcatatatgaaaagtccacaagtaactttatagtcaacagtacaaagttgaaagcttttcctacaaagcaaatgatgtccactctcatcacttctattgaatataatactgaaagttctattcagagcaatcaggaaagaaaaagaaattaaaagcagtcatatagagaaggaagtagtaaaatgatctctgttctcagatgacatgatcttattaatagaaactaatgatcacacacacacacacacacaaccaaactatatgttgcttaaaaaagacatacaacagttaaatttaaaagagtgaaaaaggatataccctgaaataaatac

SEQ ID NO: 53906 - DNA, 575 bp, Homo sapiens
  misc_feature 25: n = A,T,C or G
ggccccccctcggggtacttctagnattaattaacgcggggagtttttaataaacatttgaattatttacagtgatctacaaaggcattttaatagtgcatacggtagagggaagagagtgaaaaatgtctttgtttcactctgacgggtccgatgaaccatgacacaaatgattgcttgcctcgtttgtaattattcatggtaaagatcatcattcagtggcagaaatattcttgctctgggtcttagcaatcttgagagcataagcattatttgccacaatctcaccagaggacaaactgtactgtacacaaagttaggggaatggactttggagaaacaaatgcagatgccgccaacagttactgcctgttaagttacttttagccagtctcagagagataagcatttagattttgctttttccagcccatagagagaccatggtgtggccactctgatagcattgtttatatttatctttgattatattgaaacaaattcattcagctgctcttagccatattacatactttgtgtgtgcaaatggaaccaagtgcagtttaagtcaatgc

SEQ ID NO: 53907 - DNA, 514 bp, Homo sapiens
  misc_feature 450, 494: n = A,T,C or G
cccccctcgagagtcttctagaattaattaacgcgggctgtatatcccatatatcccactacaacagggactcactgtgagatcctggtgtcctgcatatcagtgtcaacttgaaatttgtgtctaatagtcctcaatatacatgaccctttcctctctcatacatttaattgaatacatactttaagtatctttgaagaataatcattaccatgtacagaagacatggtattgcagtttttcctcctggagacctagactctcctttattcagtgtgttctaaatatgaattctaacaaacttggaaaatagcaaggaattatgacattttttaaagctagtgccttcaatcttctgattgtctatatttgattatataaatggaatattaccttgaatgactgtccatctaatttgcccttatggaagacgtgatccattaaacattntcatctgctctttgggcctgtccttcacttcaaccttgtcccanattataatgattttgtttac

SEQ ID NO: 53908 - DNA, 613 bp, Homo sapiens
  misc_feature 28: n = A,T,C or G
cgggcccccccctcggggtacttctagnattaattaacgcgggggtgtgtaagtgcttaagactgaaattgtaggatctaaggttagtatgtacttaactctgtaggaaaatattcatgtcttacctcacatctctagggaatgaaagattttagatcagaatggtagggtagaggaaaatccattggggaaattgttcctttggtatttacttaatctgagaattttttaaatgcaattgtaactattgatgaaatgtgaatattgattgaaaaaagacgttgatgttaaataagactttacaagcttgtaaaagaaaatatagttacagaaggaaaacaagtttttaaaaacagctttattgtgatataatttatataccatagaattcacccatctaaagcgctcaattcagtgaattttgtttatttacagagttgtacaaccaccaccacaaactaattttagaaaatttctatcactctcaaataggaagtacccatttacagcaaagaagaaaaaaacaaaaacaaaaccatggttttagagttaggaagagctatgttttagtctggattttactggtgtagcaactgcatgaccttggtaaact

SEQ ID NO: 53909 - DNA, 458 bp, Homo sapiens
cccccctcgagagtcttctagaattaattaacgcgggctataggtaatatataaagccaatcattggcccactagatggaaaacttctatagctagcccatgtgaagtttcagtcctgtcctaatttattaagtatcactgaatgtacactaggaaaatataaacgtatcaatcagaaatgttttaatgtcttttcattctattttggacgtgaggaaatcactttttagtgagttgcaactatactaaagtcatagattcagctattttgcactgaaagaagtacacagttctatgacaaaaaaaatttaaattaaattgtatccgctgggcaaggtggctcacacctgtaatcctaggactttgggaggccaaagcagattgatcacctgaagtcaggagtttgagacaagcctggccaacatggtgaaaccttgtctgtactaaaaatacaaaaa

SEQ ID NO: 53910 - DNA, 579 bp, Homo sapiens
ccccctcgggggtacttctagaattaattaacgcgggcagcattatgaaagtaagaaatttggctgggtgtggtggctcatgcctgtaatcttagcactttgggaggctgaggtgagtggatcacctgaggtcaggagctcgagaccaggctttctttattgttattattttttcccaatggggatggactaaagaccttctttagcaataaagtttggcctaaatttggatgcaaactaaatattatttgagtgctcaaggaagttaatttaattgtaactatattccactgagagaattatacatactgacagatttgggtaaataagcacagatattgtatacttaacaaagttagttaatctcttatagtaaatcctttgaacagttgggaagataatttaggttcctgaaaatttcagaactcagtgcttttattcatccacttcatgatgttggcctgttactatacttcatttcatttaagtagtgggaattatgattcccaagactgtgattttgctcaagttgaggaaggctgccattactgggtcatgtgatagtaagtatctatacat

SEQ ID NO: 53911 - DNA, 602 bp, Homo sapiens
ccgggccccccctcgaaagtcttctagaattaattaacgcggggggtgatttattaacaagtgactctgtgtagtagctatgcaaagtgttaaaagactaggaaaagtcattcctatttctggtgaaagaagataaggagaaatagatatttgccaaggctgatgtttccccaaatccttgccagcaaatcatggatcccagtatcgctcctctaactttaaatgtgtatttctttacttctgtgtgaacagacagggggatagatttaaggtgaacagctggaaatatgggaagagaagatattccaaaaggaaggtacctgaatggacaaaggcatcgttacctccaacagtactgatgccatcatctacccttttgtggattttactatgtttcagacaatacagttttatttattctgcacagaaaacctaaaaaaataagcacttctctaatcattttgtaagtgaaaatccaaattttcaaagaagaatcttgatttacttcattagggaaatgcaaatcaaagccacaatgagaagtcacttcctacctactaggatggctataataaaaaaaaaaaaaaaagcggccgccaccg

SEQ ID NO: 53912 - DNA, 583 bp, Homo sapiens
ccgggccccccctcggggtacttctagaattaattaacgcggggggctagggaattaagtaaattgttcaaggagacaaagtagaggagctaagaattgaacccagacggtctgctccagagtccatactttttactatattattatacagactcctgcctgccaagcactatccttaagacttgaaattgacagatcaaacaaacaaatcagttactgttttcaaagagttcacaactatcaacacacacacacaatcaacaaaccttctagtaataagagatcttccagtaatacaatccaattgctaatagagctcaaaccagcatgattaattcttaaagtaacacttcacaaatttggcctgtgcctcaggtctcaaaaggtaggaaagggaaagagaaaggaaaaaagtaaggcttaaggtcaactggaacaagactataaagttctagcgagtgacattctaaggaatttagattcgactgtgtagcacacagtagatagccattaaagaatctttaaaatgaccagccaagtgttctagtaggaaaattaaacaaaaccaaaaaaaaaaaaaaaa

SEQ ID NO: 53913 - DNA, 430 bp, Homo sapiens
ccgggccccccctcggaagtcttctagaattaattaacgcgggggacataaatattcaaaccatagcaggacattctatgagtttaggtcattcataaatgtggaattgtttgtatcacttcactgcaatgttagaaaatcagatcacatcaaaactttagaaaagactcggagaagtccacaagagtccataattagctagctctcttttttcaggcagggacacctttaaattctagaatggacaaagaagctacataacatcattaaaaaaagaattcgtggccaggcgcggtggctcacacctgtaatcccagcatttgggaggctgaggcgggtggatcacttgaggtcaggaattcaagatcagtttggccagcatgatgaaaccccatctctactaaaaatacaaaaaaaaaaaaaaaaaaaa

SEQ ID NO: 53914 - DNA, 440 bp, Homo sapiens
cgggccccccctcggaagtcttctagaattaattaacgcggggagagaacagtatttcttagggacaggaatagcaatatactaaaattctgagcaaactgcaaggaaggacaaaacttaagacaagaatgagggaatagttgtgcacacatctacttttatgtggagttgcttacactttttcccttaaggattatgcgtttgtatgtgtgtataagcatcaataactcaactgatgtttacttttacagtttttaaacactcttaaagcagttatggtatcccaagtcttcctcagtcctctcggtattatatacaatcatacaagagggttctccaagttctgttcctgatttttttacccaagaagacaaaaaggctggatgcggtggctcatgcctgcaatcccagcactttgggaggccaaaaaataaaaaaaa

SEQ ID NO: 53915 - DNA, 600 bp, Homo sapiens
cgggccccccctcggaagtcttctagaattaattaacgcggggtatgtgtggacatcttttctcttcaaggaaagaatccatagctttcatatgatgctcttaagactctcagactgaaaacagtttaagaactattgagtttctgtggcttccaaagtgtttagctccttctatttatctatggaatagctctgtgaatgactctcaaaaccaagcttttctgtgcctcctcaagaggcctgcattttatatgcagcagtacaacttccttccataagacgcttttattttctggcagcagcagtatcacaggaagatgactggaatttataagtaagaaactgatcttaatttcaacaatagtactggagcccttacctctttaaatacacctttttccatagttttttttttataggattgatgaccaaagaaggcagctataatgttttattctcaagatgatggttactcatcttagaataaaaacaacaacaacaaaaaataacagatgaatgggaagagcccaatcaaagctttattctactcctcaacaactcaggtgagtgtctggccacttggcagtcgccaggaggaag

SEQ ID NO: 53916 - DNA, 572 bp, Homo sapiens
  misc_feature 28: n = A,T,C or G
cgggcccccccctcgaaagtcttctagnattaattaacacgggcagtattgaacacagcatctttacgtgaccaattcttctctaaatggccataacccaactttaaaattataatttataatttgaaaacatgcaaatctagaaacgactttttccatttattatttttagtcataaatttcaagttttgaaatcatattaatcttttataaatgagaaataaattaatgttcttattctaagtagagtggaaaattggatgaatgatataagatttaagtgacaggtcgggcaccgtggctgctgcctgtaatcccagcactttgggaggctgaggcaggcagatcacgaggtcaagagattgagaccatcctggccaacatggtgaaaccccgtgtctattaaaaatacaaaaattagctgagcatggttgtgcatgcctgtagtcccagttactcgggaggctgaggcaggagaattgctttaacccaggaggtggaggttgcagtgagccaaggttgtgccattgcactctagcctggtgacagaacgagactctgcctaaaaaaaa

SEQ ID NO: 53917 - DNA, 186 bp, Homo sapiens
  misc_feature 21: n = A,T,C or G
gtacccgggccccccctcggnagtcttctagaattaattaacgcgggagtatcccaggtagagagacccatatattaagaatttggccagatgtaccaaattgtttttaaggaatggggaccagactattaagagaacatctattttcacagaatagatgtttctctcctctaacattttaaacct

SEQ ID NO: 53918 - DNA, 411 bp, Homo sapiens
cgggccccccctcggaagtcttctagaattaattaacgcggggtggcgctaaatcctaaccttcctcagattggaatagtagaaacaggacaagtcagggacttactttttttggtaactgaatgtgttacatcacatttggttatgataaataataaaaacagaaaactcttaattcagtgagtcaaatagatttgagaataaaaattaccttgtaagtcatctatatagtatatacagtatatgtagtgtgtgaatacatgtctgtgtatatatatatatgtgtgtgcctgttaaatttgaatagtcctcatgccttttttattttttattatttttatttttatttatttatttttgagacggagtctcactttcttgcccaggctggagtgcaaaaaaaaaaaaaaa

SEQ ID NO: 53919 - DNA, 377 bp, Homo sapiens
  misc_feature 16: n = A,T,C or G
taccggcgcccccccncggaggtacttctagaattaattaacgcggggagggagggaaaggaaaagacatttgcagaataaacttgaacaataactttaatggtcttcatccatccctataaatcaacaaatcattttcccacaggtcagactgttacagtagaatttggactcattctgctcattttggagatggttacaagtgctcggactggtgccttgttatgcatttggaagaatgattgcattataaaacccattccaagcttcccactgtttcagcaatggaaatagtgaagaatgtttggactgatttaaaatgtgaagatctaattccagtattgtagaagctttctgccactcaaacattcccccca

SEQ ID NO: 53920 - DNA, 593 bp, Homo sapiens
cgggccccccctcggaagtcttctagaattaattaacgcgggtggctggaagaatattagactctccaagtctagcatgccagtgctggggctacttcttagcctgacccaaggaagatgcatacgtaaactgacttcttttctgggcaacagacgagagaaaccctctcttttctggaaatggagatagttctaagaacttatctccacagcaaaaatctctagccatgaagggtgctgcaactcagcattatgaaataaatcatgctggctaataaaaatatccattgggactgtcacaaaggagactggtaagcatgctggtgccagctcagtagatgggctgccagggacatcccagcatggtgcatggaaaccaagtctccaggctactaaaaaatgccctccgtccattccgtctttcatccaaatcaacccaagtcattaattatttcaagaaacatttactgagtacctaccataggcaagtccctaagtgtacaataaaaaacaagcctgggcacggtggatcatgcctataatcccagcactttggaagcctgggtgggaggattactttaagccaggagttt

SEQ ID NO: 53921 - DNA, 609 bp, Homo sapiens
  misc_feature 28, 591, 593: n = A,T,C or G
cgggcccccccctcggaagtcttctagnattaattaacgcgggggagctaaacaacgagaacacatgaacaatatgaggtgaacaacagacactgggtcctacttggagtggagggtgggaggaggaagagatcagaaaaagtacctcccaggtactatgcttgttacctgggtgatgaaatagtatgtacaccaaacccccaggccatgtagtgtaccaatataacaaacctgcacatgtaccccttcactgaaaataaaagttaaaaataaatatatacatacatacataaaaccataccaattgaatcaaactcattcatgatgcttaaagtttagggcagataaggatacactaaatttaaaatggtgtttattataccttcacccatttttgttttaaaaaattcttttaaaagaagtgagaagattcccttaagtatgttacttgtgtaattctctgccacaagttacagagaagtttctagcattccagaaataatttaatggcttctcttaagagtccagaattctctatcaggtatttttatcccaagcatgtctttataatttcgagctgtaagttgactntntttcccatcatgttct

SEQ ID NO: 53922 - DNA, 514 bp, Homo sapiens
cgggccccccctcggaagtcttctagaattaattaacgcggggggtttggtttggttttttgttgttttaaaatagaccaacgctaataaaggcaatagcaactctagtcccaggaacatgggaacaacagagcaaatccttcaatcttagacttgttttgttttgtaaaagaaaaacaaacacctttcactatgttgtgttctttaaaaatacccacaataggccgggtgcagtggctcacgcctgtaatcccagcactttgggaggacgaggcggcggatcacgaggtcaggagatcgaggcaatcctggctaacacggtgaaaccctgtctctattaaaaatacaaaaaattagccaggcatggtggcgggtgcctgtagtcccagctactcgggaggctgaggcagaactgcttgaacccgggaggcggagcttgcagtgagccgagatcgcgccactgcactccagcctgggcaacagagtgagactccgtctcaaaaaaaaaaaaaaa

SEQ ID NO: 53923 - DNA, 403 bp, Homo sapiens
ttaattaacgcgggggggtcgaatacctggtttcctctcctgcagtcagaatccaacatcttccactgtacattcctcatggcatctgcccagtacgagtccataactggcaccaaataagcacttaatatgctataaagtcgagtaatcccacccacccatgccatccttgaatccatgtgaaaagcgcacgtatattaaaacactaccctttccaataacatccacaaagaggcccatgtctggagaagccaaccgacatgaagcagtgctggagaagtacttagcactgctttcttggtaagaactttttttatttttattttgagacacagtctcgctctgtcacctaggctggagtgcagtggtgagactccatctcaaaaaaaaaaaaaaaaaaaaa

SEQ ID NO: 53924 - DNA, 617 bp, Homo sapiens
ccgggccccccctcggaagtcttctagaattaattaacgcgggcctatgaaaatagtatatcttcttatcagcagtttcagaaactaaacttaattatatattgaaaagctgcaaataaaattaaaacatttcagaacttttagtagttgcaggaattactaccagatctaattcctaaatttatcaatgtattttttataataaatagattttcatacatttagcagtattttattgtgtaaaagacagatttgagttcaaaccttgactttttcacataaaaaatggaggtgctagtaaaaaatgaagacattttactgttaaagtaaaattctataaatactataggtagataggtagctaagttcctggcagaaacttggtatgcaatacgaggaacttattgctagtactaaacttagcatatagtatgaaggattagggcattgagaaatgaatacaatttcattactatcatcagcataaaatatagggtaacaggcttaaaatcttgtcttcttgatgggaaaaggataatatcatttaacatattaacagcaatatttattattattatcatatcttttgtatctgttttggttataaaattatttct

SEQ ID NO: 53925 - DNA, 595 bp, Homo sapiens
ggccccccctcgaaagtcttctagaattaattaaaaaattaattcatttgttataaatttaaaaatcaaaatagtagaccaaaaataaagggaaatttaatgtttgagtggagggatttctttgtcaaagcatagtttacttaatttgagatggttctttaggtagcctgctatatctaagtacaaaaacctgattcaagccaggagcatctaggttacttatgctcagtttcaataccaaccattaggacttaggatcacagaaacagtattttaaaaaccagcaaagctatctttagcattttagaaagattgtcatgtagcaatctctagagttctatatcagccaccaaaagctagaaaatatttagtaataattagcctgcaatgaaatatatttttttttaaatggaaaggagaaaatcaggatcaggagcaaattggttaaaacaggaaaaggatcagaataagcataagcacagacttccaagtactataaacaatctggtaaggaaagagatgaaaactataacaaagaatcaagttaagaatacaaaaaagaaaattagaatcaattacagaggaatatatgtgt

SEQ ID NO: 53926 - DNA, 580 bp, Homo sapiens
ccccctcgaaagtcttctagaattaattaacgcgggtatcatcatatctggctgctaaacatttaagtccgatgaattgaagaaaaggaagaataattaccacaccccagcacctttttctatagctgttcttcatggcaggattacatctcatatttctcaagccaaagtcacatcttcactgccacctgggtcatgactgtgaccagcagggtggattttagatctttgccacaacctttatcaaaaaaatgctgaaaaaagtcttcatctctcatcgtgaccagagaggaagaacatgttgcacgtggttcacatgaacattttaaaaaattaaaggaacatctgatctcccttcagtaatggggtggtttcttcaaatcagatgctaaaccactaaggtaactttatttcttacgaaaaggggctagcaatggagggttatcagagtagtctttaccttgttatgtaaacaaaattgcagcagcaactccgctgtctctgacctcgattcttgggtctgaagaaccagagatgatgatgtgacattggtgaatggagctcacagatctacccatga

SEQ ID NO: 53927 - DNA, 423 bp, Homo sapiens
cgggccccccctcggaagtcttctagaattaattaactctgtaaactaaaagtcaggagactatcaaagcaagagcttctcaatctggcctcacacatgtctacgtaacagcgggctcctttcagggtgtagtgtccagaagttaacacagactcgaaaatctacccagaccagagaactacaggatgatcatgcccttctttccaaacattcaatatggtttggctgtgtaagtgtaaacatccattattagtttggtgttccttttttcttttttcttttttttttttttggagacagagttttgctcttgttgcccaggctggagtgcaatggtgcaatctcggctcactgcaactgcagcctgagcagactctgtctcaaaaaaaaaagagactctgtctcagataaaaaaaaaaaaaa

SEQ ID NO: 53928 - DNA, 561 bp, Homo sapiens
  misc_feature 24, 524: n = A,T,C or G
taattaataaaacatgtacgctgnggtcttaatgaccttcaaacatacactcttgacattctaaatttttctaaactttattttgagaaaatgtattaatagaggactgactaaaggttggcattctctgcattcctctgaatatttcaaattttacttttatgttaaacctttttgttggagatctgtgtgcatggattgcatgattttgacctcttgttaactttgcatttgctggattgtactttcaggatgtgattttttttttcccaagaaaagagaagaaaaggagaagttgcctaaaacagatctttagtttttttaggaatgctattaaggaccttctccattatgtcatccaacgtctttctgaggacttactagtgaaattactctcagatttctgcatcttggaaatgctgtacttctgaacaactactaattcacttttattttatacacatattttcttctttgccttactaacaaggagacttaagccttattttaggaccaactcttgnagtttggagaacaatgtgtgtttctgtgtgccatttt

SEQ ID NO: 53929 - DNA, 515 bp, Homo sapiens
ccgggccccccctcggaagtcttctagaattaattaacgcggggtagagaactggtataaaagaatcttttaagtgtggtaatgggaaactagggaatagaaaaattttagtactggcattactctcttttcccttttctttttttttttttttttgagccagggtctcactctgttgcccaggctggagtgcagcggtatgatcagaactgcagcttttaacttctaagctcaagcaatcctcccaccccgacctcccaaaggctgggattacaggcatgtgccacctcacccgttgtactggcatttatcaataggaagagtttattgctaaatttagctttaacaaacaaaattaattacgttaaaaacacctagttgcatcttctttcaaaatgaaaatttagaattagcttttcaaataaacactcaaagtagaagcaggctgggcacaatggctcacgcctgtaatcccagtgctttgggaggccgaggcaggcagatcacctgaagtc

SEQ ID NO: 53930 - DNA, 541 bp, Homo sapiens
cccccctcggaagtcttctagaattaattaacgcgggctgtctctaatcccattcattccccactcatcttttctccctactttatctcatcacactagtccccacaccagaattaaaattttcctttaaagagcattcctctgaagctgacttccttcaagcctgcaacatgtgagcaaaaatgacaaaacaaagaggggaggactacttgttgttaaatataagaaaggaaaggaagaaaagtaccaagccaatgagttggagtttgccagggaggcttctaaatttattctgctgtgaattctaagtggggcattggaaacttcatatcctggacattttcttaagtgattagtaattaaatgtgcatccaaaaaaaaaaaaaaacctgcagatttgcgctcaaccccaatttggttcatctgaacacaggagcacttgagaaatgcaaaattctttaatcactccaaattgcccaagcacaaaccatgccaagagcgtcaattgcttctaaaatagatgcaagtgttctgaaaatct

SEQ ID NO: 53931 - DNA, 497 bp, Homo sapiens
ccgggccccccctcggaagtcttctagaattaattaacgcgggtccatagatgtggtagtagtattttcagctataggactactcacagctgcaagtaacagaaacccagcacagcattccacacattgattctgccctgtaagaagcccagagcagggcaattccaggtttgatcggttccgcaggtcagcattattagggttctttccatttgccctttctaccatcatcagattaagaagcctcatttcccctacatggtctcaaaatgttcacagtttcaggcatcacatgcagaccaacaggaagcagcagtatgaaattacttcagagccagataatctttcccaaaatgctgggtgcagtggctcattcctgtcatcccagctacttgggagactgaggcaggagaatcacttgagcccagaagtttcaggttagtctgggcaacacagcaagacccccatttctaaaaatatggaaaaaaaaaaaaaaa

SEQ ID NO: 53932 - DNA, 448 bp, Homo sapiens
ccccctcgtagatacttctagcaattaattaacgcgggtagtggtaatgtagataaaatagcttgtagtgcactggagaaatctcattattctttgaatgatagataatatcttgatgaaatttcacatattcaagtttaaatggcaaaagcatttcaaaagttggtatttattggtctgtctcttcctttgtgcttctgatgcctagcagagtactgaataattactcataaaagttattaatgtatttgttcatttattccacaaaacgtacatctttaggtggttactgagttgctaaggatacgcaatgcattcttgcctcatgattcagtggggtctatttagatttcttgatgggagaacacttgctcctacccctgtccccatctccatctttttgtagtttcttactggcttcactcaaaaaccaaaaaaaaaaaaaaaa

SEQ ID NO: 53933 - DNA, 399 bp, Homo sapiens
  misc_feature 28: n = A,T,C or G
ccgggccccccctcggaagtcttctagnattaattaacgcgggtttctcttctcccaatcggtctcaagaaaactaaggaaatgtagaaaagaggtgatttcatagcctcatagctatgctaccaaatatctctgaaaaatggagagaaaaaatccccagtcctgcaaaagatcctttggtgtcctgtaccaaggtgcccagggtgaggacaagtcctagtaagttcgctcccttttgaggtcctcaactttgaaatgtgaggactggctgggtgttgtggctcacgcctgtaatcccagcactttggaaggccaaagcaagcggatcacgaggtcaggagttcaagaccagcctgaccaacatggtgaaaccctgtctctactaaaaaaaaaaaaaaa

SEQ ID NO: 53934 - DNA, 198 bp, Homo sapiens
ggtggtgtgtttaagagaggaaataatataaatatgaataatagccaatagtaacaaatgttgaaaatttagtttactgtaaataaaaggcatgtaagggtagtctgtactatagtaacaactttactggaattataaaattattccaaaataaaactttttaaaagcattttgaccaattttaaaagatgttataat

SEQ ID NO: 53935 - DNA, 612 bp, Homo sapiens
  misc_feature 27: n = A,T,C or G
cgggccccccctcggaagtcttctagnattaattaacgcgggataggtccacagatgccaaaactttgaatcacatactatggataaaatgtgataatgcattttcaactttaaaaaagaaaatataggccagtagtggtggctcaggcctgtaatcccagcactttgggaggccgaggcggacgggtcacgaggtcgggagatcaagaccatcctggccaacaaggcgaaaccctgtctctactaaaaaaaatacaaaaaatcagccagatgtggtagcgagcgcctgcagtcccagccactcgggaggctgaggcaggagaatggcgtgaacccggaaggcggagcttgcagtgagcccagatcacgccactgcagtccagcttcggcgacagagcgagactccgtctcaaaaaaagaaaaaataatacaaatatgtaccatttatgaagaaaatatatatcaccaggaagagaatacatagtcaacttgtaaaatgtaaaaactacctttatgttaaaagccaggtgccgtggtgcgtgcctgtaatctcagcgctttgaaaggctgaggcaggaaaatctcttgaggccaggggtttgagagtagctt

SEQ ID NO: 53936 - DNA, 598 bp, Homo sapiens
  misc_feature 29: n = A,T,C or G
ccgggctcccccctcgaaatacttctagnattaattaacgcggggtgggtgggtgtgggtttgtgtatgtgagagagacagaaatctgccacaaataagtacattttaactaatatactcaacaaacactgacacaaataattaacagcacaaaaacctattttccccaggcaactggggagcacaaaaatcaggaagcaataaagtggatcaacagtgtcagagaacaaagtaataaacggctaaggacccattctctcagtccctgaatcatctggagctaaccgtaaagcaaacaacacacaaactaaaaatcaaatgtgggttgttttattctacaatccagactttggagtataaaagtctcatatataactttaaaagatcatgagcagtactctcagctgtgactgactgtacctgcttaacagatgatataaagattattaggtatcaaaagttttccactttttccagacctcctcataaatatataggaacactattttagtttactattcacagagtgaggaggccgactgcctactttagagaggacttagaggtaacagcaatgacaagaaagggtcaagacttg

SEQ ID NO: 53937 - DNA, 574 bp, Homo sapiens
ttaacaattcaaagtttttttttttttagtgtggaaggatttgatataatcatggttttatttgtatattcttgctgggactttgtgtgattttagataatccatataaaaacctgtttctcaggttgagaaaacaatctaaacttgcctgatgtctgtgtagttatattgcagcagcagccttcaagtacagttttcattagaactagtctgttgttatcaagcatgtttcctattaattgaacataaaaaacaagatcaatagctacagtaaaaaacatacattcttagactatctccgtttctagaagtagtagtttttagaagtagtcttgagaatgctgtttgaaatttctgctgaataccctattgttgtcatagattaataagatatttcctcttagaaaatctaccacacagaccttatggaacacggatattcccaatgtgctaaggaaggcaggtgcttttcttgggtgctttatataactgactggttcttcctttgcaaatgcatctactttatactaggttaaagagaacactataaagaccagcctggccaacatggcga

SEQ ID NO: 53938 - DNA, 511 bp, Homo sapiens
  misc_feature 28: n = A,T,C or G
ccgggccccccctcggaagtcttctagnattaattaacgcggggaggagactgggagcaaaaggttctaggtaaggggcagcgagagtctggatgtggcctggccatggtattataaaggctggagacagattgtgatctacattctaatgagtgaatacataccagtaatgacattatatgaaaggggtctgggtggaaaccaaaagatgggtgaatttaatatactacctgaagagagaaagataatgatctctttggaggtttatggaacaaaagacgtaaggcagttttagttaaacaataatagtaaagccaggcataaaatgttacatactttatgattccattcatactacatataaaacttggcacatttatagacagtctgttcgcggttgccataggctggggggatatagagagtgactgcttacggatagaatttctctgacgatgatgaaaatgctctggaattactagtgatggctgcacacttttgcgaatgtact

SEQ ID NO: 53939 - DNA, 598 bp, Homo sapiens
  misc_feature 43: n = A,T,C or G
cgggccccccctcggaagtcttctagaattaattaacgcgggnagatatacttctacaacgaaataaattaatcttacaagcatataaactcagtgtttgaaaatttagggtgtaaattaagaaatacttctataatgatctaagcattaaaacaacaactgaatagataaacgattagcaatttactttgagtcctaagttggttaggactcatactaaatcaagttaccttaccaaatttttcatatatcagggagcaaacacatttaaaaagtattatcaacaggtaaatatgtttactttttacataatagtgttttctaatttttaggatgagaatattttaatatatacttgtagataatgttttatatattaaattgaaaataaaacattaaatatcttcaagtgactatcacagcatattttacagagtgtttctaaactttaggtgtgataaatgtttatccagttacagtggaaaaatacgatatattatttttaactcaaaagttaggctctagccttcctttatataaattttctttatgaaaaaacaatgaaaccatcaatattgattataacacagggcaatat

SEQ ID NO: 53940 - DNA, 526 bp, Homo sapiens
  misc_feature 462: n = A,T,C or G
accgggccccccctcggagtacttctaggattaattaacgcggggtgttctaacaattgcatataattaaccacttctagatgtcaaacagtacgagcagagccacagacacagaaggataaaccatcctatcacttcacaagagcctcatcccagagtatgccaccagagaagtgaataacaaaggaatttcctatatcttctaaccgtaacgggtaaaacattaaaaaaaaaaaattcttctaatgcaacaataatgggacaaaaaacaatgtatatttatggtgtattttcaggaactgggagagaaaagccttagaaacacgtcaagaggaaagtctctggattaaaccatctaagtttagcatgacatttcaagctttttgactcctttttttggtttttgaaaacaatcctcagcggcagaatagtatctaacgaaaaataacattcaaaactttntggagaagtgccaagagtttcacaagcatctcaaggccaacacgcctgctgtagcatcattcta

SEQ ID NO: 53941 - DNA, 527 bp, Homo sapiens
  misc_feature 500, 505, 510, 523, 524, 525: n = A,T,C or G
cgggccccccctcggaagtcttctagaattaattaacgcgggggaggggtgtggggagattggattaaaaaaacaaatcaagctgcacaatgttgctggtaactgacaggagaacaaaataattaccacattgcaaatcttacagtctttttcaatagaaaacactgttaagtagatactaaagtgtaaatgtgataagctacacctcctgctgcaaagttcaggagaactaaaagacagatctagatcaaaatggggaatgaaaaacattatttgaaacaagaagacagatgacagtacctagacagaaaacctgttcatttgttttggacacaggatcatattctgtcacccaggcagagtgcagtggtgcaattacagctccctgcaacctcaacctccttggactcaagcgatcctcccagcagacagaggttgcagtgagccgagattgcgccaccgcactccagcgtgggcgagagagcaacactccatctcanaaaanaaaanaaaaaaaaaaaannnaa

SEQ ID NO: 53942 - DNA, 583 bp, Homo sapiens
cgggccccccctcggaagtcttctagaattaattaacgcgggtgtgatggcttgagcctgtagcaccagctactcgggaggctgatggggaggaccgcctgagcctatgagattgaggctgcagtgagctatgattgcaccactgcactctagcctgggcgacagagactgcctcaaaaaaaaaaaagggatagaaaaaagtaagcgttaagcaacaccccctactagctctgagtttttatggcatgagaaattaaagtttaagatgtgtgctttgaattgtcctaatactacataaaacataaatttttgttgatttcaacctaggttgccccaagacttctaattaaggagagaaatctttatcaacatgcatagtttttgaatgtcagtaatacctcaaaaagctgttttgcaaaaaaatcatatattgggataatataagaaaatgaactttgggaggccgaggcgggcggatcacgaggtcaggagatcgagaccatcctggctaacacggtgaaaccccgtctctactaaaaatacaaaaaattagccgggcgtggtagcgggcgcctgtagtccc

SEQ ID NO: 53943 - DNA, 435 bp, Homo sapiens
cgggccccccctcggaagtcttctagaattaattaacgcgggatgcagcagggatacagggaatggggagcgacagctaatgggtggaggattcttttgggagggaccaaaatgccccaaatttgatagtggtgatggctgaataagcctatgaataactaaaaaacactgaaaacactaaactggcgaattgtgtggtatgtgaactatatttcaataaagctgttaaataaaatcacagtattatagtttatattctttgtaattaattagcttaataacttttataattagctaataaaaatcttgagcccaggctgcagtgagccatgactgcaccaccatacttcaccctgggtagcagactgagactctatctctgggaaaaaaaacaaaaaaaaaatctttatatttagcttcaaaaaaaaaaaaaaa

SEQ ID NO: 53944 - DNA, 617 bp, Homo sapiens
cgggccccccctcgaaagtcttctagaattaattaacgcgggctttatgactattagtcataatagttacaatatgtagctgccatttattaaaaactaacaatttagcatccattgtatagatgaaatattgtagttttgaaggttaggtaatttgcgcaaggttacacggatagtctctaagactctgtagtctatattttaaactgatctgttgaattgcccattcataagggcatttcagacatatatatgctactttatcccaaatgcttcttatcttatatattgttgatcctaaggaaggtaagtagggtgctaacaaagtgcttaaatgggaatctgaaggtatacagtttagttaggaatctgctaggagtcttttatttaagtgtctccttttttcctattgcagaacgtgttggtactaactaagcatttggaggaggtacttaaaaggaaaaaccaataaccataacaaaaaacataatccactgttatatacagtgattaattccttccacaatggtatatatgtttttctttatcggctcttagagtaagaattaattgtagaaatgacatattatatagtgtgtataaataagattgcctca

SEQ ID NO: 53945 - DNA, 545 bp, Homo sapiens
  misc_feature 517, 536: n = A,T,C or G
cccccctcgaaagtcttctagaattaattaacgcggggtcttgcaattaaaaaaaatacatgctgtgagttaaatagagaataaagtgattttgcaatcaagtatatacctgcctacctaacctagtctcttgatatatattgtacaaacataacaaagcagtcaaaatatgtccactggccactaatctgctggactcattttttaaaatcaccaagtgataatcaatagaagatgaagagcaatcctagcaaggtgttttttttaaatgtcattttcacatgagatgtgtagggttgaaaccagttaccaatgagcaaatgaataaaatattgatatttttatggtaactcctttacttttgccccttatatacaaaccttgtagcaataataaactctgcagaaaagtatcatttagtattgactgttttctacttttatagttagcatttccaaagatgcacttgaagggtgaatgtacgcaagtctaaaacagacttcttacctaacagatntacatgcaatagtggtggntatgtactc

SEQ ID NO: 53946 - DNA, 592 bp, Homo sapiens
  misc_feature 27: n = A,T,C or G
cgggccccccctcgaaagtcttctagnattaattaacgcggggttttcatcaacaaattgtataatgattcaattttaatcgttaaagttatacatgtattataatacatagacttcatctgtaagggactgcatctatataatttattaggaaaagagaaaaaacatttttaggttttgtacttatttttttcaaaaaaactattatcagtttgtgtagaaaaacatttaaaaattgctataagataaaacacttaaaaattattgtgaacttgagacctggtctacaggagataaattctactagattttggcatcctggaaaaaaagccaaaagctctagtcttacacaagatgttaaattaaaacagcgatatatcatctaaatcacaattactctcattgttcaatactgacaacaaaaaactacgtatatcttttgttcttgattagtttcatctaatatttagactatataaataataatctgtatcctttcaaaaaccttcaagtctataaaagaacattttaattaggtagttttattgatcaatcggagaaatattttaggcactaagtaagatgctgaatt

SEQ ID NO: 53947 - DNA, 447 bp, Homo sapiens
gggccccccctcgaaagtcttctagaattaattaacgcgggtctatgggttgtattcttttttgtttttttaactctttgagtcttattcaaatttatttctggcttgaaatgagtcaacttttagatacattgtcaattgaagggtaaaagagtgtttaatggccgggcacagtggctcacacctgtaatcccagcactttgggaggccagggcaggcagatcacaaggtcaggagattgaaaccatcctggctaacatggtgaaaacccgtctctactaaatatacaaaacattagctgggcgtggtggcaggcgccggtattctcagctactagggaggctggggcaggagaatggcatgaacccgggaggtggagcttgtagtgagccactgcactccagcctgagcgacagagcaagactccgtctcataaaataaaaaaaa

SEQ ID NO: 53948 - DNA, 550 bp, Homo sapiens
  misc_feature 512: n = A,T,C or G
ccccccttcggaagtcttctagaattaattaacgcgggacgttacctgaggacaagggcctaagatatatttatccatgttggctacagtgtctaccaaggtccatgcatatataggtccttaattttcaaataaattaatctgtgctgcttggcttgagcccaggaaactacaggaatttgtagctatataggctgaaattggaactacaagttcttggattattgattatctaaggttgctaaattgatgctatgaaggacttctgaaatattaggatatttactgaagtacataactatgctaatgttacagacttcctaaaaccatgttatgatggaactgtatgggaactttgcagtctctggatttgactatttaatttttttgataagaaaacggggccagggaggtgcctgatgccatcagccatcactgttagagcgaggcatgggtcgaaagtctgtgcttctggtccagggctcaattgctgcaacttactgtcttgattntctcagggcagtccctgttttgatcctttataattaaa

SEQ ID NO: 53949 - DNA, 444 bp, Homo sapiens
  misc_feature 28, 41: n = A,T,C or G
agactgggataccgggcccccccctcgngggtacttctagnattaattaacgcgggggttcaggtctgatagtcatattagaaagttgatcaagaagtctgagaaaaacatatcacattgctatttttggatcagtttaatttacaaactagactttctgctctaacttgtttccatctttcaacatagtttcttttatttctgatataattaaaatccttaaaatatgatatggaaaatattaaataaagggggcaatgttttttcttttggaatatgggtttctcattttggtaatgcagggtaaagaaccttgaggtacagatatctgacagaaaggaggcagatctcagctgtgttagacgggagagaacagtaagtttccggtattctcttaatctctttgcagcagattctctaccctttgccaaaaaaaaaaaaaaa

SEQ ID NO: 53950 - DNA, 491 bp, Homo sapiens
cgggccccccctcggaagtcttctagaattaattaacgcgggctccttcttagacatgcatcctgattatttgtctggagaagaggtgtaccatgttttggagatattcatgacatacttccacttctctgggaaatcaaacactacagaaaaggagttccagtgagggccaagatcaagcaacagtttagtttagaatatagttcctaggcctccttagaatctactgattttgccttattctctttctgcatttctatttgttttgtttttccagagggagagattcattctttttctctctgtctcttaatcctctacagttagagatgaaagatagtttattgtgttacttttgctatcctgggaaaaccaaaatgtagataattgaggctttggggaatgcttttctattttccctgatgtttttttctctctattgaggttgcctctcactataatttctatgcttcttttacatctgtaaagac

SEQ ID NO: 53951 - DNA, 592 bp, Homo sapiens
ccccccttcgaagtacttctagaattaattaacgcgggaagaggcaaaaagaggccccgtgctgggtcacgtggaagcaccaaagtcgacgggcaaaggggaacccacagggaaaggaggagccaaagaaccagagctctgtgttctgaccctgactgcaacctgccagccacaccgccacccagtctgggtctcactctcctggtttgtaagagtacagactctcggccgggcgcggtggctcacgcctgtaatcccagcactttgggaggccgaggtgggtggatcacgagtcacgagatcgagactatcctgcctaacacagtgaaacccgtctgtactaaaagtacaaaaaaattaaccgggcgtggtggtgggcgcctgcactcccagctactcaagagactgagtcaggagaatggcgtgaactcgggaggcggagcttgcagtgagccgagattgcgccactgaactccagcctgggcgacagagcgagactccgtcttcaaaaaaaataaaaagagtacagactctctgccctgctttatgaagacaatgagattgcatcaaaatgcctggccaaactagggca

SEQ ID NO: 53952 - DNA, 610 bp, Homo sapiens
cccccctcgagagtcttctagaattaattaacgcgggggtacaaaagagaaaggatcagaaaagcaaaagaaaaaggtagaacttagagagatatacaagatgcatagaaggcggatgcaaactgaagtgtccacagcgccaggcaggttaatgtaaatcaatgaagcaagccacaaaatagttcctttttcatttttctgtaacatgtggctttctccatgtagtttctgttttcctatatgtgagaaagaaatgagtatacagcactatttctgttctattaaaataacagtaaaagtgcaacagtaaatagtaagtggcctgggccgggcgcggtggctcatgcctgtaatcccagcactttgggaggccgaggtgggagcatcacttgagcccaggagttcaagaccaacctgggcaacataatgagatcccatctttactaaaaaaaattttaaaacagaaagaatacacaacaaagcagagacatggggaatggactgagaaactccaatattcatggaataaagatttggaatgtatgaagggggtcagatttggtactattctctgagccccaagctggataaattaaatctattcacaaaa

SEQ ID NO: 53953 - DNA, 576 bp, Homo sapiens
  misc_feature 28: n = A,T,C or G
ccgggccccccctcgaaagtcttctagnattaattaacgcgggacgtagtggcgggcgcccgtagacccagctactcaggaggctgagggcaggagaatggtgtgaacccgggaggcagagcttgcaatgagccgagaacgcaccactgcaccccaccctgggtaacagagcgagacttcatctcaaaaaaaaaaaaaagaaaaaagaaaaaagaaaaatggactgttaaagtccacggacataggaaacttgaatccttcaagtttataaagcactctataaacaccacctgaggctactcttgaggtcaggagcagcatcactatgctcttcctgtgagaggatcttggggatctccggctaccctactcctcacacaatggcctgtgattaggcatctctgtgcaggtagccttgtaaccttcaggctgagaagatatcttcccaaagaccagacaatgacactggttaatgtgagctaaaaaggaataaaagtagagtccagctcaactactccactgaaaacagacaccaaaacacagaaaggattccttaccaagggcttccaagcgttc

SEQ ID NO: 53954 - DNA, 473 bp, Homo sapiens
cccccctcggaagtcttctagaattaattaacgcgggcacctacttctcggtgccagggaactaacatttaagggttttgtgcaggagctttcttaacctgcagtgctgtgagatgggttgatcttcagaataggaaggcagttcaggaggttaaagaatttggccagggttgtacagagagtataacaggcaggcttggttgagaaatgcgccacatcaggaaaagacaagcaccgactgcttttatatttccaaataatgaatatcaacagttttgaccagtgtctaccttagacacactagctggaggggaaaatgtaaaactgagttttaacagtatctcaggcgcagtggctcacgcctgtaatcccagcactttgggaggccgaggggggtgggtcattttaggtcaggagctgaagacaagcctggccaacatggtggaaccccatctctaaaaaaaaaaaaaaaa

SEQ ID NO: 53955 - DNA, 569 bp, Homo sapiens
cccccctcgagagtcttctagaattaattaacgcgggggtaagaaaaaatattcaaaacagaaattaatttagttccaggtttgtcagaagtgatacaggagtatagaaaatttgtaatataaatccccattacttttttaagaatttttgatggcagaatgttaaaacaaaaggggatggactttttaattgaagttataaaattcattagaaacatttcaggaaatctaatatcattagatcaacatattctaaattgtttcaaatgttaaaataactttcctcaaagtagagtaagtaattgattcctccacaattgagttttaaatgcccctttccattcaactgctatatatatctctctactcatagatctttctagctgggaggggctttctttactgtaaaacagatagcaggctacttttgattgagctttgatagtgacatctttaaagaaatataaagaaaaaccatgagttcttatttaaaatgaaagagttgaactagccactcttttagacatttaactattttgctgtcactgaatatgctgtttccttttggt

SEQ ID NO: 53956 - DNA, 497 bp, Homo sapiens
  misc_feature 453: n = A,T,C or G
cccccctcgagagtcttctagaattaattaacgcgggtactatatttatttgtagccattttctatcttgagacggtctcctgtcttagaattgtgagaaggaagtctctcttccttgcaaactgctgtaattgctaacagaagtagccctcttctacttttggttatttctatcaaggatatagggtatagtttttaagtatcctgacaagcattttgaaactatgctcctcactgtaaggtataaggacaacagccacagagttccctgattaatctaactagagttgtaactagatagtaaattaccttctatgccagccctcatttctactttttttttcacttctgattttgcttgagattacttcgagatagctgaaaataaatatagaagggtttcagatacacaaaatgtataatcgtagcctaccctatgagtgccaatggctntgaaagaatagtcagcgttatttattccaagactggattatact

SEQ ID NO: 53957 - DNA, 461 bp, Homo sapiens
  misc_feature 21: n = A,T,C or G
ccccctcaaaatacttctagnattaattaacgcgggggtcctttaccctgaagccattatataaaattgattcttgtttttggagtcacttcgtttagcaatcttatttccacactggtaacaaaggttatatattaaatttgaacacctgaagggccatgtggtagttcaaggtataatttttaaaaattagtggactatttggtttggtaaagggctaggataagatttgggtaccactttatgactcatctttatttaaaataatgtgtccttatcgttagtggtgctattcaccaatctgtcagaatacagaatatgaaatgaaagcattttacaaatattaatagtttccttccttccttccttccttcccctccctcccttctctccttctctctctctctttttctttttctttccttttttttgagatggagtcccaaaaaaaaaaaaaaaaa

SEQ ID NO: 53958 - DNA, 515 bp, Homo sapiens
  misc_feature 16: n = A,T,C or G
cgggccccccctcggnagtcttctagaattaattaacgcggggggttaggtggtatacttctccattgaccgacgaggcatggcctttaacggattaggacgaattaatcaataatattattgaaacattcattgatagtggatacataatctcacattcttatctactacgcagagcgaaactctagatctatgatctactcaaccgtcaatagcagactctgaaccatgttcgagacactacctaacatctttctctgactataggccccaccacacatgacccgactataagcattataactaatgccttcaggaatcttgtgcatgcccaaaatagaaaagatctgactatcttgacatacctactaacttaggctatattaaagctcgagatgtcttacaacaaacgatcgcacctatccagtgcaaagaatgaaagtccactgatcatgataagacactgtgctgcatgtgactaggatccacggagaatgacaaaaaaaaaaaaaaaa

SEQ ID NO: 53959 - DNA, 478 bp, Homo sapiens
  misc_feature 50: n = A,T,C or G
ccgggccccccctcggaagtcttctagaattaattaacgcgggtgggggngaagaatataagttcatttacagatgtgtatggtagtaggtatctctggaacatccaagaaaagaggttgtgtaggaagttgagttgtagcaattgcacatacaggacttgctttagaagaaaggagtaagtttgaaataaaaatctataactggcatatagatggctctggaaacatgagcatgtttgagatttctcaaggaaagcatgcagagtgaggggaaaagaaaaagccaagagcaaccccggagaattgctaacatttatgattagaaaggaattcatcaaaaaagactgaagaaaattatcacagtggcaaaaaagggggaagagagtaagatgaatcccatcgtgtcaaatgttcccaagaggttatacaagataagaaaaaattatagcttctggatttacctacaaaattgtcattg

SEQ ID NO: 53960 - DNA, 610 bp, Homo sapiens
  misc_feature 45, 593, 594: n = A,T,C or G
ccgggccccccctcggggtacttctagaattaattaaagatgagnaagaaaactaacttttattgaactactatgtgccagacattgtgacctccccttcgcatgttctacttaaactggatcctcaaagcaatactagaagatatttaaaaaagctttctccaaaatgaaactagttttagcaacttattagtaacacaatgcacacacatcttcataattacattaatggaagatgtgagtctgattctacctacaccatctgagtctgaaatcattaacaaaatgagctaaaaagatgatctatctaggctgggcgcagtggctcacgcctgcaatcccagcactttgggaggccgaggcgggcggatcacgaggtcaggagatcgagaccatcctggctaacatggtgaaaccccgtctctactaaaaatacaaaaaattagccgggcacggtggcgggtgcctgtagtcccagctactcaggaggctgaggcaggagaatggtgtgaacccaggaggcggagcttgcagtgagccgagatcgtgccactgcactccagcctgggtgacagagcaagactctgtctcannaaaaaaaaaaaaaaaa

SEQ ID NO: 53961 - DNA, 497 bp, Homo sapiens
cgggccccccctcggagtacttctagaattaattaacgcgggaccgttttaaaacaattatctttctcagaatacttgcttctgctctttactctttagcaggaatttaagactttccttagatatctctactaaactcaccattacaagaaaaatagttgtttatatagtggcaatagcaatattaattacagtattgctcttgcaagtttatctatactgcaaaaaagatagataatatttctaaagctattattgtagtattttcacgctgtaaaccttaacacagttgcttttgtgaaacagccccttgggtttgtccatagttataatgggtagaaagcaatgaattgggtaaaaggttttgcactgagaaatttccagaatctctggcctatggatttttctttaagccattaagatgcttatgcaaatgtaaatggattagcatgaatgagtgctaatggattccttaataagataacactctagtattc

SEQ ID NO: 53962 - DNA, 473 bp, Homo sapiens
cccccctcgagagtcttctagaattaattaacgcagggctgaggagctcaaactcagatttatatattgccaaggctgggaagaccctttgagatcatctagcccagtggtttttcaactttttaaaaaatgtttatcaaatgtctgccctcctccccaaagaaaattcttagggatacccaaaacatactactaacaagttagcatgttagtagaacccagtgagttaatattaagaacttaaaggtgggtgagcacatttttatcactgtattaacgtcttaatgttcttttaaatgatcatttttattagatattcaaggaaaccctaaagcatctctaagaaagcctgaggtttcaaggaccgcaattctagccccccctcaacctcacttcacagacggggaaactgaggccccaggataggaatatacctgctttggaaaatccacatgagtcttgagttaacttca

SEQ ID NO: 53963 - DNA, 417 bp, Homo sapiens
cgggccccccctcggaagtcttctagaattaattaacgcgggggatatgctatcactgactttgtgatagcaagtctaggtaaagcttatatttcaaaagtaatataagctttacctagatataaaataagtgcagatggcaaaataaattgccctcatccacacctgcaagctgacaaacgaaaaaaagagtacttatgacactgatataggcattcgattggggattagtcctgaattccaaatgcattgcaaaagaggaggtctccaataacaagttcttaaattgaggcagtgattaatagcctaccaaccaaaaaaagcccaggagcagatggattcacagccgatatctaccagaggtacaaagaagagctggtaccattccttctgaatctattccaaaaaaaaaaaaaa

SEQ ID NO: 53964 - DNA, 557 bp, Homo sapiens
  misc_feature 543: n = A,T,C or G
aattaacgcggcccctgcctaacacaagcatttagaaaagttggtaagagaccctgagaaaatctttcttctttcaaataaatgccatcttgtaaggagaacttctccttccatcaccaaactgtgcagtaaattagtgcatcccgagttcaagttacaaactagatgatgcaaacttgttataaaatagtgatataaatttaggtgctaatactatgtttgaatctttaagaatgtggtagtaggaagaatttttttctaaaagttaagcctacagatttaactaccagattacagaaaacttgggggtctagggacaagccgagcaacaccttgaagaatcaataagccaaacccaaaatagggagcacattattggacaaatgacccaatttgacaatagatcagcagcccagaagtcagtagctaagctagtactgagcccaggcagtctgtagtttgctctaaaatctgggcttgtaacctctacactgtgtataatgttgtatttctcccttgacggtagtagagtccttagcccanaaaaaaaaaaaaaa

SEQ ID NO: 53965 - DNA, 543 bp, Homo sapiens
cccccctcggaagtcttctagaattaattaacgcggggtttctctagccaccttggctctgacgatacaaaatgtctttgtagataacaacaagatttcaacttgcttattagaaaaaagagttacatgctcttcagaagtttttttaatatataaagaatatgttaacaaaaagagggttcacacttgtaagagcgtcacactctgtggtgtgtagaataagaaataacttccataataagaatttatgccaggcaaagtggcttatgcctgtaatcccagcattttgggaagccaaggtgagaggattgcttaagcccagcagttcaagaccatcccaggcaacatagcaagaccccatctctacaaaaaaattttaaaattaactacccatgctggtgcacacctggagtcccagctacctgggaggctgaggtgggaggattgcttgagcccaggagtttgaggctgcagtgagccgtgattgcaccattgcactccagcctgggcaacagagccagatcctgcctcaaaaaaaaaaaa

SEQ ID NO: 53966 - DNA, 617 bp, Homo sapiens
  misc_feature 605: n = A,T,C or G
ccgggccccccctcggaagtcttctagaattaattaacgcgggtctattaaaaagaaaaacattagccaggtgtggtggcgtgagcctgtggtcccagctactgggaggctgaggtgggaggattgcttgagcccatgaggtagtgagccatgatggtgccactgcactgcagcctgggcaaaagagggaaaccctgtctctaaataaataaaataatatatgaaagtacaacaaaagaataagaaaaaatgctatttttccaacataagagaatatttccaaaagactactatatttacacatttaggtccctagattaaaaaggctagaagatttgagttcagttacctaggtagctgtccgcagctgccagtcaagtaagcataaatcctcaacgtttctgcttaacaactgatcttcaatcatctaagagatgagagtgttgaattatgtcctagtataaatatatatatatattttacaaaccgtatttcagaactcctttttgtcttcaaacggctgcctttttatgccagatttagatcatacctgtatatgcaaaatatctaaacctcctattagacgattataagaaaaatatatnttcccctattat

SEQ ID NO: 53967 - DNA, 293 bp, Homo sapiens
  misc_feature 16, 27: n = A,T,C or G
cgggccccccctcggnagtcttctagnattaattaacgcggacgtgttgggaagtgcttctaactccccttacatatgatgctttggtagtagaacttacagaactctgggaggcggggatgctgcagaagagccgagattgtgccactgcactcaagcctgggcggctgagcgagaccctgtctcaaaaaacaagccgccgtcactcggtggtgatatcttctcacatatattgtaaaataattactaacgcctctagtttcataggctgcatattgcaaaaagaaaaaacc

SEQ ID NO: 53968 - DNA, 597 bp, Homo sapiens
cgggcccccccctcggaagtcttctagaattaattaacgcgggccctggtctttctgtctctcagacttgcttggcttggttttgtctcaccctttggccctcacgcctgttcttcgtctgcacaatctgtcttctgtcttcacaattcttgcaccatcacactttatctcagggtcatttcagagattctggaagaagtccttcacctcttaactaggtcagattcaggtttgttggcgtttcctacgtctgcttcatcgcatttgttacagttgcaattttgtgtttatttacataatttgattaatgtacactccaactaaattgcaagcaccacaagggcaggaaccttgtctgcttttacttgatgcttatatccctgccatctggtgcagagcctggtacatattagcagcttaataaatatttgctgaatacttgaatgaaagtttcacaaaaggcattttctcagcagtattatctgcagcctctcggttatgaagatggatgaatagaagcatactttgttattagaaagctcacttacagccgcgagaacaagatctgtaccaaaaatataagttagattgcagtta

SEQ ID NO: 53969 - DNA, 564 bp, Homo sapiens
  misc_feature 28, 543: n = A,T,C or G
ccgggccccccctcgaaatacttctagnattaattaacgcgggtcccgctgaattagaaatgatgcttagatcacaggttaaaatctctaagtgaaataaaaacatctccaagggctctaggacatgggctcaataaacaagcacatgtttattcctacagcttgaataacagcacttctgcccagataaggagaaacttggaaaattagcctaagcaggatgtgagaccgagagacagttccttcagtcctaaagattgtctaatgagggccgggcgtggtggctcatgcctgtaattccagcactttgggaggccgaggcgggtgaatcacaaggtcaggagttcaagaccagcctggccaagatggtgaaaccccatctctactacaaatacaaaaattagccgggcgtggtagcgggctcctgtaatccgaggcactcgggaggctgaggcaggagaatcacctgaacctggaaggcggaggttgcaatgagcagagatcgaaccactgaactctagcctgagctacagagcaagactncgtctcaaaaaaaaaaaaaag

SEQ ID NO: 53970 - DNA, 350 bp, Homo sapiens
cgggccccccctcggaagtcttctagaattaattaacgcgggggtcccttgagtgcctatgatgagcaaagcccccagctacctgatgttaagtataaaacatgaacaagaaattaatttctgtcatttaaagtaatgagatattggggttgttactgcaacataatttcctggaacagtctggctagaatgtttaccaatcattcttaatattacttgatacctggatatccagttttagatatgtatacatgtatgtgtctgctgcatgttaatttggaatatctttgctaccgttttaacttcattttcaaaaaagatgttggcctaacccatcatgtttttcttct

SEQ ID NO: 53971 - DNA, 600 bp, Homo sapiens
  misc_feature 27: n = A,T,C or G
cgggccccccctcggaagtcttctagnattaattaacgcggggataaaattagattctcattaaatgattacaatttagactgtgaaaatctgagttttatttattttgtcttgttttatttttttgagacagagtcttggttgtcgcccaggctggagtgcagtggtgtgatctcggctcactgcaggctccgcctcccaggtttatgccattctcctgcctcggcctcccgagtagctgggactgcaggtgcccgccaccatgcccagctaatttttttgtatttttagtggagacggagtttcaccgtgttagccagggtggtctccatctcctgacctcgtgatccacccgcctcggcctcctaaagtgctgggattacaggcgtgagcttttatttttaaaaacgttgtccattttttaagatgttttatgagccaaaatataaaacagaaaaccctgcaagttatcatcagataaaacaggacatcataacttaaaggtttcgaatgattattcttttagtggaagtttgtgcaggtaattatgtttggaactagaatttctgacctcaggcgatctgcctgtcttgtcctccc

SEQ ID NO: 53972 - DNA, 585 bp, Homo sapiens
cccccctcggaagtcttctagaattaattaacgcgggtccttaagaacacaggtgtaaggcagacttgacccaatagatgtcaagataaaattgaatacaaaacaatagtaaggctccgtttgtcagaatgagtagtctttttaattgtgatgcaaaaacatgctagaggttatcattgccccacttaccaccagcagtggaattcacattgccattttgtcagcaagttattcaattacagaaatccatcctgagttccatgtcctaggataactcctgcctttgtgtgcttcccaataaactgatccagcaaaaaaagcattcaagtttaattgttttatttgaaagatgattctagaaaacacaggtaggagagtaaaaaaaatgagaagggaaggggaagacagacaataaaacaggtgcatcaatgaagctatcacttacagaaacatagcttaatcccactagagagttgtgggggccactgtacaaagttttatctcagagataccccatcagagaggagaaggagctggtgcatttacacacaaactaccattagctgaagacctcaggaaggaaag

SEQ ID NO: 53973 - DNA, 317 bp, Homo sapiens
cgggccccccctcgaaagtcttctagaattaattaattttttgtctctgagctaactcggagttccaaaaatgtcagcatatgtcagctcccctacacgtctcttcttaatttaaaacctgaaatgtattttattgtcaaaaaatgcaacacccttgatgcacctgcctgtcaagagctaagagttaaacaaggttggtcagctcacggcaatgtgaatgtaagacttactttcacaataattaagtaaagtctgacttactttcacagtgccagcctttcagggaggcttgtctttttctcaaaaaaaaaaaaaaa

SEQ ID NO: 53974 - DNA, 549 bp, Homo sapiens
  misc_feature 486, 506: n = A,T,C or G
ccgggccccccctcggaagtcttctagaattaattaacgccggggggactgaatataggcataatacctaattttattgctttaaataattatagaaatatagacttatatattttttctttcttttctgttttgttttgttttgttttttgagatggggtcttgctttgtcacccaggctggaaagcagtggcacaagcatgactcactgcagcctcaacctcctgggctcaatcagtcctcccacctttgtctcccaagtagctgggactgcaggtgcacaccaccacacctggctaatttttatttttttatttttgtagagacaggatctcaccatgttacccaggctggtttcgaactcctgacctcaagcaatcctcccaccttggcctcccacggtgctgggattacaggtgtgagccacgactctcagccttttcctttctaatattgttttggttataatacttgatcctaagactntgattaggaacgccaccccnaattataatgtttacatttgaatttatgggaaatcattaatcc

SEQ ID NO: 53975 - DNA, 462 bp, Homo sapiens
cccccctcggagatactgtctaaaattaattaacgccgggtggcaggacaggcgagaggcggaaggcaactaaagcaaacaggcgatggaatatctgtaacatccagaatctgacttctttggtctgctcacgggggaatccagggagactgggtataatctgtattatctatgtccctcagaccacctgcctaatctatggccctgtgggaactcaggatattctccactgcacctattccagaatcatctctgtctgtgtcaggtgcatgctaaaatcattgacacaatatcataccactctctcctgacctgattctatcgggctagcattacctttgatgttacaaatcatggtacctgaagatcccccgcagcccacacaaaaaaaaaaaaaaagcggccgtcacctacgtggaccttcaatcttccctatacgctgtccaattacacactctcact

SEQ ID NO: 53976 - DNA, 568 bp, Homo sapiens
  misc_feature 28: n = A,T,C or G
ccgggccccccctcgaaagtcttctagnattaattaacgcgggggacagtctttcatttgtaggacataccagcacaatgaaggatgtttagcattcgtggccaccatcactaaattctaatactgttttcaatgcctttaggcaatcacaaaacatacccctcatttccaaatgtcctctaggaagtgttactgcccttgtttgagaaacactgagataaagcaaggaaaggctggacattgagagccagtttttggaatcagagggatttggatttgattcttggccatttgaatttattagctccataatcctaattacttaatctctctgagcctcagttctaggctcaaagaggtttagtttagcaggttgagttttaacttctctgagcctccaaaatggggataataatgctttctcagaggctttgtaagttaataccagtaaagtccttatcactatgcttcatatagaagaaatgcttgataaaagggtaactagtacagtcaattgtggtattaatagtggtcctggaagaaatggtgctggtggtagttgtggtac

SEQ ID NO: 53977 - DNA, 210 bp, Homo sapiens
cgggcccccccctcggaagtcttctagaattaattaacgcgggccctaaatgtcactatcttgtgctgggagtaagtcccgtatttcttaagatttaagacctgtattacaggagtgtcatttatttgggcctcccactgccttacttcccttacccctaatctccaccttatcctcattatgaggaagtagaagcaaaaaaaaaaaaaa

SEQ ID NO: 53978 - DNA, 546 bp, Homo sapiens
  misc_feature 28: n = A,T,C or G
cgggcccccccctcgaaatacttctagnattaattaacgcgggactactaatagtgtactcatactgcccttctgggtatccagaattaaatactgagttttactcagacatttctccatggaaggacatggcatcttgaatctttccttcttttatccctctttcagcccattctatctgcttggttataattactacagtacactcttcactgaagaaaaaataaaaaaaattttgatttgaactaagtgatttcccgattatttgattcctaatctaagttataattctctgggtcaatagttaaaactatgctcagggttttgtttttatttttttcttataaaagagtgattttttaattcagataatatagacacatgagatataaattaaaaggctgattttaaggccaggtgcggtggctcatgcctgtaatcccagcactttgggaagccgaggcaggtggatcacctgagatcaggagtttgaaaccagcctggtcaacatggcaaaaccctgtctctaccaaaaaaaaaaaaaaa

SEQ ID NO: 53979 - DNA, 588 bp, Homo sapiens
  misc_feature 578: n = A,T,C or G
gggccccccctcgaaagtcttctagaattaattaacgcgggccagcaccatttattgcatagtccttccttttttctctgatccgcagtgcatctgtcgtatattcataggtctctctctgggttctctattctgttctgttggtcaataccacactctcttaattatagtagctttataatgagtcctgatatcatgtagggctaattgaatagttttagttttcaaatatttaatagtcatggtctgggatagaagttcaaggaaggtctttttttttcttgatgggagaatttacatatgctagtaagaatgatccaagtcagaaatgatcacaaaatgataatgtaagaaagaattgctgaagcagtgtcctttagaaagcaagaaggtagggccaggtgcggtggctcacacctgtagtcccagcactttgggaggccgaggcagatggatcacgagatcaagagatcgagaccatcctggccaacatggtgaaaatacaccatactaaaaatacaaaaattggctgagtgttgtggtgcgtgcctgtagtcccaactactcgggaggctgangcactaaagt

SEQ ID NO: 53980 - DNA, 578 bp, Homo sapiens
attaacgcgggctactgtaaaattacacgcaacaaacactgtgtacctcatcccattcttcctgaccctgtttctataaaacatccatccacattagaatcctgccacatgccaacttgattaaacctatacttcccaggacacatgaccttgcccaatacttctccacaataagtctttataaagcctcacaaaacttgaggccagactatgacccagatagtctttcttccttgttatcctatcttatagccttcaattaacagtggcaaagtggcaatgttgctttacatagctaactttgtgatcactattcagattttcaaaattaaacactgattatttataggtggtaaagctctgaaggaaagcaaagaaaagaattagcaaaagccaggatagcacttacatgtctgcaagggaaaggtgcaattgagaaggggcacacaaggcttctgatagtaatgttctatttttaacttgtctgaatattccttaagctctatatataaatacattttatacacattttgggtgtttggtacattacaatgcaagcagtaaatctttgggaaata

SEQ ID NO: 53981 - DNA, 598 bp, Homo sapiens
ccgggccccccctcgaaagtcttctagaattaattaacgcggggagcactgagagagagaagatcactggatcaaaccccgagtgtggcgtgggtgaggtgcaggagcctaaccaacggtaaggggtgctcccaaaggaggtggagggcagaaaaaaatacgtgaaggaataaagcctgaacatttccacattttgatgaaaactgtaaactctagtgatccaagaagctcaacaaatcccaatcacaaaacatggagaacctgaccaaggcacatcacagaggtgaaaagaaaatcttaaaggcagtcaaaggtgagaaactaggtaaagaagaacaggcaaaagggacgacaggttctcggggaaacagtgagcacacagccaggggccagcacccgtaagtcctgcagaaaaacacctgtgaaaatctttcaaaaacaatgctgctggtaatggttgtctaactctggggaggaggttcctggagctctgcgctgctccccacatgccctgccctccgcatctgactgtgcatatcctttgcaaaatcctttccacgacactggtgaacatgtaagtgtcaccctgatttgtgtg

SEQ ID NO: 53982 - DNA, 610 bp, Homo sapiens
cccccctcggaagtcttctagaattaattaacgcggggtgaggttaaatttgagagaggcagaatataaggcttaagatctcagattttggaactaaatagacctgggctcacattgcagtttaagttataatcttaagcaagttacttggcctctaaaactttggtttcatatcagtgaaatgaatatacttatctacttcatagggatattgtgagaattaagttaaacacttggtacattaaatggatctagcagatagtatttaggcaattctaggaaagttatataatttctacgcttcagattttctctctaaaatcagaccaacaatagcagttgactcgtaggattgttacatagattccttcttgtattcgacaagtatctaagcacctagatattgtatataaagtgcttgctaggaaggcaatatgaaagattttaagtgaacgttcatggcatagtatttacactatgtgtgctaggtagtcttgtatcatacatatgttaatttttcttcttcctagaagcatccccagttacctatccaaatcaagtacactcagttcagctcagatactttttttgcgatttttttttttttttt

SEQ ID NO: 53983 - DNA, 511 bp, Homo sapiens
  misc_feature 16, 18, 405, 406, 448: n = A,T,C or G
cgggcccccccctcgngnatacttctagaattaattaacgcgggccagtgttcttttttccccacactgtgaatgtgtaatacttactgtctttggtggttctttatattaatactattaaaaatgaaagttaaagaaattgtgtgctttacacagttagtcgtttctctattcaaggttttttcctagttcttttcattctaatcagtgcttttgaggggttgcatatcactttgacagattgtaagaaaggaacttctgatggaacaggtgggtattttaattgcagagagagaaattagatttcatcagtgatgttacctttgtgggatgcatgatagaactattgacagttggcagagaagaggtccagtgttagaaaatcattgtttttattacatacannactttgaaggtgaaattgttaaaagaataaaagtgttagaanaaaatcattgaataaaaaaatattttgggagaaaattttagcatgaattttgaaaaaatttcc

SEQ ID NO: 53984 - DNA, 611 bp, Homo sapiens
  misc_feature 24, 37, 540, 550: n = A,T,C or G
actgggtaccgcggccccccctcnaaatacttctagnattaattaacgcgggtaactgtagatccatgtacttttagttctttgatctggatgtcctcctctacagtcttttccagtcttatatcctttgaccagttgtctgttatcttccatggtactgttagaggcattggaatactgacactatgtctctacccttggaagactcagaagagggaaacaaggcacttaacttcaacagctttgattcatattcagaaagccaaaatgaaggatccagggattcatacatgggacacatgccatttttcaaactgagtctgggaaatctgaactgaaatatgaatgataacttccaggtcctgccagaaccccacggttacagcatggcctactgatgtatactgctagtttctcaaaatggttcaaagtaaaggtttaatgccgctttaacttgccttgtctgggatgatgtgataccccttattcaaaatgctttgacctctatagagtaccaatcatttccagtgactgcaactntgaattctgntatgcaggcacatagattataaataaataaaactatatttaatttgcagtcttcatctggg

SEQ ID NO: 53985 - DNA, 474 bp, Homo sapiens
ccccctcgagatacttctagaattaattaacgcgggaactcttcaaagaaagttataatctaatctttaatactgttgttgattttaacatagtttcaaattagagcatagcatttcaagtattggctgaaatttcaaccatgtgacttccactaaagacaattaatgaaacagatacttcccaaaataattccttggaaattttctagacttgtacgggtgccagaaagtgccagaagttgaggatctggtaatatcttgcttttcttcatctttttgtcaaagtaggagccctagtaaaggaggcattttttttcccaagggaggtcatcatttggaggaagtaatgaaagtgtataataattacagcctcgtgattagttgcttttccatctgtctgtctcttccatatatgtatacaaatctaaagaaacaaagttctcttgagtagttaaagcgaaaaaaaaaaaaaaa

SEQ ID NO: 53986 - DNA, 576 bp, Homo sapiens
ccgggcttcccctcggaagtcttctagaattaattaacgcgggggtggtattcaaacagaagacatgacagcttttgaagtgtacctacagcataaggtgggaaggccatggactttgggtttagctcacggcttgtacacgacagcagtatgatttgagacagatggctgggcccctttcctcatcctaaggataagagtaacactcacctcagaggtattgcaacagctgaatgagtcgtggatgtaaaaggctagcagttaaaagatgttcaagaatttgtattactttcccttcctctcaagctccttggaagcagaggccatacctttttttttttttttccgcacacccagcccttagcaaatatctgtgaaataaactctgccgtgtccagtgttggtgacagctgatgtggtgttttcaaagcaatactagcaacattatgcccgcaacattaaaattctcatttcaacagattgcttgcatgaaatatcccaaatgacaatgcaaacagagtaggaaataggtgggaaaagaactttaaaatgtattaaaccatcgcttccagcatc

SEQ ID NO: 53987 - DNA, 558 bp, Homo sapiens
  misc_feature 28, 505: n = A,T,C or G
cgggcccccccctcggggatcttctagnattaattaacgcggggggaggacactgtttaagttaagctttagaaagtttgagagctattaagtataattttttattaaaaagtagttgaccatgaaatctcagggcaaggtgagattggagagaatagtgcgtgttttatcctgaagaaaagttaagaggtctagtttagaagactgctgaataaggtcaagagtacatggccatcaggactaagaaatgtttgcagtttacttagtttttgtattttgatggtacctggggtgtgtacattataaaacttttaattttatatatgattatttctttataataaagcctgaattttagcaggggtaacgtggggagaaagagagaggagtgagtgtatgtgtgtttgtgttggatggaccgttaagggcatgtactcttaacctattaaaaataaagtttcctttttattaaaatgatcctcagtaacactatgaaaaaggaatnttatttctgctcttacttgttggccaaatgtctgttgttttttatgtactgac

SEQ ID NO: 53988 - DNA, 594 bp, Homo sapiens
  misc_feature 28: n = A,T,C or G
ccgggccccccctcgaaagtcttctagnattaattaacgcggggctgatctgctctggagtactaaatcaagaaaggagaccagtaagagcaaggttgagaagctattgaaatactggtatcatttgtggaatattgttttggcaaaggatgtgatgggtaacatttaggtaaatctcacatttgaaacaatcttcaagacaccttattttgtaaaggttttgactcagaaaaaaaattaactaaaataattaggatttcagtcataactttgctttcttgaaccacaaatcttttcccattggcactcagatttaaatggattatgtgagacatgcttcactgatattctggttctctttaaagtatgcattcttcacactattgcctaggtcctatagttgctgacagcaattttctttttaaataattctatgttagcctggtgcagcggctcacgcctgtaatcccagtactttgggaggctagggcgagtggatcacttgagcccaagagttcaagaccagcctaaccaacatggcaaaaacccatctctactaaaaaaaaaaaaaaagcggccgccaccgcggtggag

SEQ ID NO: 53989 - DNA, 606 bp, Homo sapiens
cggggccccccctcgaaatacttctagaattaattaacgcgggagggagaggttgcagtgagccgagatagcgccactgcactccaacctgggtgacagtaagactctgtcttaaaataaataaataaaaataaaaaattagctaggtgtcgcggcacacacctgtactcccaactactagggaggctaaggtgggaggatcgtttgagcccaggaggttggttaaggttgcagtgagccatgatcttgccactgcactctagccttgggtgacagaacaagaccttttctcaaaaaaaaaaaaaaaaaggaatattttagctagctagctagaaaaataaactctgacagagcacactaggaccccaaataaccaattcagtttctaccaacagttctcaaactaatgtgcataaaatctcttgagatatttgcaaaaaatgaagatccctaagctccactctcaaggaccatatcagagatctcaaaggatactcaagaatcaacatgtttaataagcatcccagacgactgttatataaggattgcgctttgacaaacactggtcaatacaatatttcatctaatgatggtgttaatgatttc

SEQ ID NO: 53990 - DNA, 572 bp, Homo sapiens
  misc_feature 21, 35, 485: n = A,T,C or G
ggtaccgggcccccccctcgngaagtactttctanaattaattaacgcggggtgcctctatcattaaccattataaattatttctttctgaaaccaattgcatatttatagcataatcttgttttttaatgttattactttgtttagtttaaatgtttttacagggttcaaaattataagtgggcttaccctttaagaaaactggcataagtccaggttcgcatacacaggaaaaatccagagagaggttcaacaaagagccatttagtacaaatgatctctgaaggaagtataaatataaattcactttggtagtgtggttcccagaggaaaatcttcactattggaaaaagatcatcacagaagagtcaaactgctgaccaaagtaggttgtctgattctattttccttttctcctcctctctcccttgccatggaaggaaaaagagcaagtagaaaccaaattagaaataaataaggctgangacctaaattgagaaagaaatgaagaaagttagaatccccagaagcagataatgaaacaaaaagttaggggaagtagaattactacg

SEQ ID NO: 53991 - DNA, 486 bp, Homo sapiens
  misc_feature 478: n = A,T,C or G
cgggccccccctcgaaagtcttctagaattaattaacgcgggtgaaaatgcagaggtaagagtgcttggaaagcgttatgtaagtttattttctcccaatgacgattctatgtttatttttgtatgtgatattgataaaaatgtggtatcactctttgtataaatatattagcaaaataagtgtttgaaatatgaaaacagtagcattttcagtttagaagacattgaactcttaagtaaaagtgtttcagtaattttatgatacaaaaaccatgtcactgagagttacagtgatttgtaatgaattttgggaaaaaatatatcacgaagttggaattttttcactagaaccaatgggaagctgatgcatcagttttgtagtgaacattgatctttcatactttgtcttctcatatctctttcattagatgatgtctttgtgttactataggtagtaaatataggtggtcatctaatntataattg

SEQ ID NO: 53992 - DNA, 116 bp, Homo sapiens
tggtttcccagccaaacttaaataaccttttcccagggaaggccatttttaaaaatttaccaatccctgtaaacttattacctcaaatatcccttcccatgtaattcagggggcta

SEQ ID NO: 53993 - DNA, 597 bp, Homo sapiens
ccgggccccccctcggaatacttctagaattaattaacgcgggtgggcccaagttgttccaaatctgaaggaaatactggttcctttgaaacagcttcaaaaggaaatgaaaagctctactccacattaaagagatcctttgcataatatatgcaaactttctataatttaaaattattccaaaataaaaagttcattgagaaaatgttttccctaacaaatctatcaaaatacaacagtaaataatgaaacccccataatcttcacctgattttatttctgctccagtggtgctacttcctcctaggaaagttgtggtctcttaaagatggaaagaaaaccaaaattaattgagtgttaaggaaaaaggatgagctaagtgatatcattacatgagaggagtccaattcagaatgtcttgccacctactaagttagaaaagaaacttttctgactttaaaagtgatgtaaaccttgaatacacaagtgtacttttttaaatggggaataaaataattttaactcatacagttcttaattagactttaggtagttcttaattggaataagatatgtaaacctcttaataaaaatgtt

SEQ ID NO: 53994 - DNA, 590 bp, Homo sapiens
  misc_feature 15: n = A,T,C or G
cgggccccccctcgnaaatacttctagaattaattaacgcggggatgacatgttttaaggtttcagagtgaggagacaagaatttaagtacaaattctgctttctgtagcagaaatgtggatgaataattacatttaagtaagtaaataagctgtgataacctcagaaaaaaaataaggcagtcaatgtccaaggttttcaatctcaatagaaatgaattttccaaagagcatattttatatatatatatttgtaaatctctcaagaaataaccctaaaactctgcattcaatgaaaatacgccagctaagtttgggacagggtctgggctgaatcagattcttcacaggctttaatataaaccctcaaccaaacaatagctctagagaaaaaaaaggcaagttcttttgttttagaccagaaatgcaacagaaacgaaatataataaaaaatgaaaattcaggtagaggaactatgcatttcatactgaataattatttctgtactgcccgtaaatcctctctggtaagctgtgcatctacaactcatcgaactgccaaggggtaaatgcagctccatccatcaagcag

SEQ ID NO: 53995 - DNA, 463 bp, Homo sapiens
cgggccccccctcggaagtcttctagaattaattaacgcgggggggggctgggcggacctaggcgacaccgacattgagttgcatagctctagacaagaatatgggaccacactactaccaaaatgttctacccaatctgtgactctaaccttgtctatcattcagccccactcgtcttaaaaacaacatatgatcctacaataagatctgaggacgattaacaggctcttgccgattgcagctataaagggtcactagatctgaacgccaggcgacaagagccttcctcacgtagaagatattgtttttatgctagaatatatattctcacagcgggacacaccgtgggggaccagaattatactggccaacggggctatgtactcgctctcacatggcctcctatctattccttccactctggggaatccaggtctgatcctatctgggtaatcttgaaga

SEQ ID NO: 53996 - DNA, 344 bp, Homo sapiens
  misc_feature 28: n = A,T,C or G
cgggcccccccctcggaagtcttctagnattaattaacgcgggtttctgttggttttttcatgctgagcaggggtttgaggctctagagaaggacttaactccttcttcgatcttgtagcacatcagagactatcccacccctactttcaccagacacttaaatatttaagcttgttactgaggtcattctaagaaatctcttcttcaattttacagacatgccttcttcaactgcccgtcacataatatgatttcccaattcattggcatcgagtctccattctgttggcgttcctcttagcattctgtgcccaaaactgggcaaaaaaaaaaaaaaaaaaaa

SEQ ID NO: 53997 - DNA, 384 bp, Homo sapiens
  misc_feature 16: n = A,T,C or G
cgggcccccccctcgngggtacttctagaattaattaacgcgggggtgggtgcagagagttgcggggagaactcttcactcattaagaagacaggttgtcagttgagaacaaaactgaaatccagggagaaagagaaccaaccttttgcatttagatttctgttgcccccattccctcaacttccccttcaggtctctcatcccttcaacctccaaaacatttgtgctctttgaccctggcaccttctaatgacagttttgtggagggggtgtggacaagaattccttggcttggaggaggaggtggacgcactggcttttctcagctgatgctatctctctgtgtgtgtactcatgaatgcccacgtgatcaaaaaaaaaaaa

SEQ ID NO: 53998 - DNA, 619 bp, Homo sapiens
  misc_feature 38: n = A,T,C or G
ctgggttacccgggccccccctcggaaatacttctagnattaattaacgcgggtcccattcaggtggtccatgaactctaacaggctcaggagaaagaaccagtaaaacagcgtattgcctttagtgtagcctcgctaggaaagatgtctggatataattccccaatgtcaaaaacgggtttatggaaatagggttacaaatgattttttccaatgatatgaactacatcatcaaatagaactcctgcaggaaattataatgttttccacagctctgccttaggctagaaactaagcaggaaatattgttagacttaaatcattagagaaacgtgaaaaagttttaaagtgaagaatcgcataatttaaaattgggcttctgagttacaaagcaggaaaagaaaagaaaagaaatcaagtgtcgctcatcaccagttaaaaacaaccttatggaaaatgttgcttcataacgacaaaaggaaggagaaagccctaatagtgactctttccagacaaccataatgttagcaattatcttcttctgaaaataaagaaataaaccatcatttaacatttataaaacatcataaaataaataagtgctctaacattattaaac

SEQ ID NO: 53999 - DNA, 598 bp, Homo sapiens
  misc_feature 21, 36: n = A,T,C or G
ccccctcgaaatacttctagnattaattaacggggnaagcaagattatatttgtatgatgagcggtctacagtaatacaagttactgggaaatagagggacgcaacctgttaagggagttttggaaggctgctcataaacgtaatgcttgacattacagactatgattctcagaggctaaagcagtgggtaaatgggggaaaggaagggagctgctcaacacaagaggctgggaaatagctcaatttctacacaaagcctccccacccccgcccccgccaaaaaaaaagcaacagagagagaagctcaaatctcaaggctatattcaaatgaccagtttttgcaaaataaggatgctatacatttattaggaaacattcaggtatgtttctttcgccttatctctaggtggtagcttgttttaatcaactgtcaaccaagctcaaactggatgtaatctgtgtagaccacacaatctaagaaccaccgtcacaccaaagaactttcagccctaatgctacaaataaagtggaatttacacaagtaggatttactcagttcagaggtatggaatctgataaaagccaaaggactgtctg

SEQ ID NO: 54000 - DNA, 604 bp, Homo sapiens
  misc_feature 20, 33: n = A,T,C or G
gtaccggggccccccctcgngggtacttctagnattaattaaccgcgggtggggctgctgttcagtttagaagggtttttcattctcagttctcttagccaaagagcaagttctgacaaggtagctgtttgagtattatcaatcagtgataattttaaaaagcagcggtaagatgtgaatgaaaaccttgacttcagcctggccctaaattgttagtttttgaaaagattttttttttaaattagactttgaaaatatcatccatctgcagctaattctgtataactcttgatgctggatgagcctcaggggtttgggaaacttgttcagtgagatgctaacctgaacctgtcaagattttcttttctcagtacgtctattctcattttcccttgctatttaggtctacttgacatgtatcttaaattagaaacactcagctctttcaaccagattttcagcttacatcagaccctgcagaacttcagccactaaataaaaaactggaccaacttctggtagacttctacatgcccatttttcttcatcgcaacttaaatgatttcatatacaatcatgtactgcataatgatgttttgattaa

SEQ ID NO: 54001 - DNA, 355 bp, Homo sapiens
  misc_feature 28: n = A,T,C or G
cgggcccccccctcgaaatacttctagnattaattaacgcgggcaactgcctcggctgaggccaagaattttcaacaacaggaataagggcctcaatgcaagaatgccaacatctcagggcaggtgggcataagataagaacaacaaaagataaggagaccaggtgtggacaggatacaggcaattgtttcagccacacctggctaagagttctttcaattccttggaaaggaagctgctagacataacaaatcctattccatagtatctactgtttattgcatgtaagttatgcttaatatctccgacatccagaaatctcatttctaggaatctacccaaaaaaaaaaaaaaa

SEQ ID NO: 54002 - DNA, 606 bp, Homo sapiens
cgggccccccctcggaagtcttctagaattaattaacgcgggtaccacccagtaacaccacccagtaacaatctacaccaagctttaggaaattagattaaaggtgttgacaactggataaatcatctccaaataattgagacatagtacaatttaaaaaaaatggaaagaaaatgaaaacctattaaacatctgtccgcaatcaacaaacctgtagccaagtaaaaggtcatggcatttatttccttgctgctcatctatgtcttttggacagtgatacaaatattcacatgtgttttacttgtttgcttagctagatattgaatggcatgtagaggcaaataaataaatttacaaataatgtttaaaaattattatgtaattgaatatacaagttgcttttgtgatttcttggtcaaacataaaatcgatcaagcaaggtctgcaaactagaataatttttatcttgttgtttgagaaaaattgagactccaccatggctgcactaagaggaattttaacatgttgtcactaagccaaagcaacgccggaacagctctgtctgtagtctcaggccagggaacgttttccattctataactaatt

SEQ ID NO: 54003 - DNA, 563 bp, Homo sapiens
cgggcttccccctcgaggtacttctagaattaattaacgcgggcaagtatttcatttactattaacttttcttgggaactctgtgtgggctcatacacattcccatcaatgaattttttttaacttaggtattttatatattcttatttatataaagacatgctacttgaaagttcagaaactttaatttcataaatgttggcagaaaccaattcattcaagtattgaaacagaacatcaaaatctaacaataatatccaataagataagagagtaatagctgggtgcattggctcacacctgtaatcccagcaccgggcggccaaggtgggaggatgactgagtccaggagtttgagaccagcctgagcaacatagcaagacctcttctctacaaaaaaatcaaaaattagctgaagagatagcaaacgcctctagtcccagctactctgaggcaggagaatcgcctgatccctggtggtcaaagctgcagagagccatgactgtgtcaatgcactccatcttgggcaacagagtgagaccctatctcaaaaaaaaaaaaaa

SEQ ID NO: 54004 - DNA, 400 bp, Homo sapiens
taattaacgcgggtcattggtacttatattacaagatagataagaggggaaaaaaggagatgaaaatcttttcagttaaatgtcatcacttgtaaatgattttactggtggctgagtggaaaagtacttttaaatgaatgaacaatgtgaaatttggagattatttttcatttccattttcctttaattttcttctcatctattctaataaatcattgataattggccatgttccaagtgaacagatttgccagaaaacccaggtgatgatgttcattataagtatttcaaaaattgtcaccagtcacatatttttgtctacacaggaattggaaagtggacaacttataaaatcatctgcataattcaagacaagtggtcctaaattactgatgcaaaa

SEQ ID NO: 54005 - DNA, 332 bp, Homo sapiens
  misc_feature 39: n = A,T,C or G
gactgggtaccgggcccccccctcggaggtacttctagnattaattaacgcggggaagtagggagtaatgaggattcgcttggtattatatggtaagaggcaaagcgtagaatggatgaaatccgaaggcatagttgaaaccacacctgatttattccattatattgtctacaatagaaattaaaggctcgggccacgagcactggctaatgcctgtaatttcaggcctttgacaggccaccgcaagaggattgcttaaggccaggagtttgagaccaggctatgcaacatagcaagaccttatctctacaaaaattgaaaaaaaaaaaaaa

SEQ ID NO: 54006 - DNA, 606 bp, Homo sapiens
gggccccccctcggaagtcttctagaattaattaacgcgggcaactatctttacactattttcacccttactagtcatttaacttactagttcagttttcctggtagtgttaataagaaacattttgacctgcacagtagacattaggtttcttactatgactggaatataatccctactgtaaacaaatctccatccgacttacaaatgagtaatacatgattagttaccatgagccagtgccttaaaactgaacgcccctgcatgaaccaatttttaaagcattgatcctttcatgtaaaagtatatgttcaatcacagaaaaaggaaaacgcagtctcaagttcaaagaaatgcctctcatctagttaatccaggcagatcacaatgatttaacatttattgaaggtgtaaaaaaatcagtttcttgcaatgacaaattcacacacaaaaaaatgattttaatggcttatttaatatatcatatttcaacaggtgactgagtctaatatttattgacaaggtatctaagtaaaacttctcataacaagaaagttcatacaaataacgcaccaagtatgtgttacaatgaaaactctaagggat

SEQ ID NO: 54007 - DNA, 463 bp, Homo sapiens
  misc_feature 19, 32: n = A,T,C or G
taccgggcccccccctcgngggtacttctagnattaattaacgcgggccaaataagcactatgtaagtttttttaattttcccaaacacatgcacagaattaatattgccttaaattttgttagcacaagtttgagagagctctttagttcataaaaaaatgttttatggaccaggtgccgtggctcacacctgcaatctcaacaccttgggaggcccaggcgggaggatcgcctgagcctaggagtttgagacaagactgggcgacgcagggagaccctgtctcaaaaaaacaaaaccaaaaacaagcaaacaaaaaaacagctgggcatggtggcatgcatatgtagtcccagctattctagaggctgaggcgagatcgctggagcccaggagggcggaggttgcagtgagccgggatcgtgccattgcactccagcctgggcgataagagcgaaactccg

SEQ ID NO: 54008 - DNA, 391 bp, Homo sapiens
  misc_feature 38: n = A,T,C or G
ctgggatacccgggccccccctcggagatacttctagnattaattaacgcgggtttcctctcacatagtaagttgggtgagtggtctaggactcataccagggcttcacagtgtgaaggaatccaggctccttccatcttgctgctctcttttccttagggtgttgctggcattatcatccaagaggacttgtatactagacacaccttatgcaaagccttgggttttctgtcttcactgactttctaggccctctaccacttactgctttccagcaactgctctgatgactgcctccaggttggagaaaccccatcctggcctgcttggttccaccacctgaggccactatgtggcgtttttggctcctttcaccaaaaaaaaaaaaaaa

SEQ ID NO: 54009 - DNA, 604 bp, Homo sapiens
cgggccccccctcggaagtcttctagaattaattaacgcggggtatgtggtgggagggaagtcagacaggccttgatgaggtcaaggaaataatgtccaccactgagttaagaccaggctttcctctgaatgaatcagggagccattggagagctccaagcagaggagtcacagggacctagcttacttatttttctcaaatagccatcgacatctagttgttttgacttgttattcaaggaggtcagtccaaggaaactagattccccaccttctataatttcagcatcccctctcattgaagacaggaaccacgtttaacatcaatgagtcctgtgggaataaagactgacagggaaccaaacagcaaaagggaagacttacctcagtttatttatggggatttatatactgcaaactaatactctatttcactggaatatttgtgtttatgaagacatcctgatgaacgagactttttttttcagttcatgaaattttcaccataaaagaaccctgaattcctattttgaaatccattgtgccatttttattctgcctgtatttgaatatagcatcaatatttaactactcattaaatgaa

SEQ ID NO: 54010 - DNA, 589 bp, Homo sapiens
  misc_feature 28: n = A,T,C or G
ccgggccccccctcggaagtcttctagnattaattaacgcggggtctaaaatagttaaaataaaagtttaataaaaatatgttgacttgaagtagatactaaaagtgattagggaagttgaactaaacctggcagtcagttgtgccacccactgtcagaaatcttagcaaactcttagatccttcgtgcatagcttaatacctctacgtggtcaaccgaaactagagatacaagtcaaaggagttgggagggagtatgaaaaagggtaagtaggaaaggaaggctttctgcactcagaaaatatctgtagaatttgatctgcgccaggcattcaattcctgtgtaaaaaacaattccctaaggaagttgagtgctttttgttccgaggctagtactttttcaaacttctttcaaaaatctagaataagtcaccagttagtgaaaatacagagaaacgaaaaattgtgaaaataataatgctgggatattatgacagtggatatggtacagaggagtgggcaagacttagaaatttagttttagacagacaataaatagctagcacaagttatagaaatacctaagcttg

SEQ ID NO: 54011 - DNA, 481 bp, Homo sapiens
  misc_feature 12, 25, 415: n = A,T,C or G
ggccccccctcnaaatacttctagnattaattaacgcgggatcatgtctcttaattggccctttgattctgggtggtgggtttatcccagagaaaaacagtctcatccataaacatctaggttaattcccaattccctagcaagtcaagtttatcacgtaaagaaataccaaaggaataacaatgctttttggacatttagtgttgctgggcgcagtggctcatacatgtaatcccagcactttgggaggctgaggtagctggatcattcaagtccaggagtttgagaccagcctgggcaacatggtgaaaatccctctctacaaaaaaatacaaaaaattagccacgtgtggtggcaggcacctgtagtcccagctactcaggaggctgaggtgggaagatcacctgagcctgngaggttgaggctgcagtgagtggtgatggcgctactatactccagactgtctcaaaaaaaaaaaaa

SEQ ID NO: 54012 - DNA, 617 bp, Homo sapiens
  misc_feature 16, 29, 46: n = A,T,C or G
cgggcccccccctcgngaagtacttctanaattaattaacgcgggnaaagaatgaagtgtcatttgcaacaagatggaggaatctggaagtcattctgttaagtgaataagccaggcccagaaagacacatactgcatgctctcactcatgtgtggagtctaaaaagttctcatagaattagagggaagaatggtggttaccagaggtgggggtgcttaggcagagggaaggatggggaaatgttggtccaagaatatataattacagttaggaggaatgagttcaagagagctatcatacagcatggtgactatagttaaggacaatgtattgttgaaaaatgcagagatagttgaatgttaataatgttctcaccacaaaaacaactatgtgaggtaatgctattattaattagctagatttaactattacataatgtatatatactccaaaacatcatgttgtacatgataaatgcaattttttctgtcaattcaaaatgtaaagtaagaacatttaaaaggtacatctccaacctccacatgctttccttgcccagtctttctctcctgcttgtctctctccctgtcagtatgagacaccctctctaggaagc

SEQ ID NO: 54013 - DNA, 481 bp, Homo sapiens
  misc_feature 407: n = A,T,C or G
ttctagaattaattaacgcgggaggaggggtatggagatggatcagtgggcaaaggcacttgctaacaggatgacggagacataaagtatgtgttttcaagtgacggcaatgtagccaacatctgaaaatacagctgatgctacactaggcctgctttctttattccctgggatgaacttccttaataatatttgcacttttgtcttctaaagcttagcctttaatcagttttcctctgtctaatctccattttctactctgtcattaccttctgataacagcagctgcactagccaccaacaaaaattccctctcaacaatttactgattgggttgaaatcaatctgatttttctcacaattataaattaatcttctatactattcaggattcactggaggaattntaaataagcattctgaactttcacagcctggtttccagtggaaggcagattaaaaaaaaaaaaaaagcggccgc

SEQ ID NO: 54014 - DNA, 209 bp, Homo sapiens
  misc_feature 25, 65: n = A,T,C or G
ccccccctgcgagagtactgtctanaattaattaacgcgggcttgctgtgaagtggtattgtggngagcccagaaaaattagcaaaggcccacaggcccaagacctgaaataaatagtggtacatcaaacccgcatgccctagggcacactcaaatgtctggccactttcagtgaacttgtagcaggaaaaagccaaaaaaaaaaaaaa

SEQ ID NO: 54015 - DNA, 502 bp, Homo sapiens
cttgctagaattaattaacgcgggcttcacgtgtagttacgaggccacagtaaagttcacagccacgcttccaaagagactcgttatttgtgcaaacacacactggcttgcagacagcaaggagcccttcatgggcttcagccctatttaaaatatttaccaaaacagatgccaagtctgacaccatgtaaaaagtggatgaggagaaaaggcctggaacactctcctcttggaggggaaagttttgcagaaatgaggatatgagaccaatgcagccaggaagggcccctgggaactctgctacctatgggcatgcatgaaacctacagagggaacagaatctcaccccctcccacccccacttacatttttgctcccaccatcattttcatatgtaaagaattcaaagcatggaggagtgtaattggacacttctccataattaaccaccctagcccaaacccctctgtgctgccatgtgagcataagggactgctctttg

SEQ ID NO: 54016 - DNA, 441 bp, Homo sapiens
cgggccccccctcgaaagtcttctagaattaattaacgcgggcaaattaatttagcgaataataagtcaagtgagttgtatttggacccatatctttggcaaagctgtccgtaaagggtgggcaactcatgagtttataaattctcaaccagtgactgttgatacagcagctcgaaaggtatttatataaggatagtctccaagggttagactgatttcttccaccttcgagattctgagattttttttttttttggtaagtcatatatatgcatgacaggtacacctgcatagctctgattattgacaagtaattttactttccatgagagatcctgggaggtaaaattaactttagttattgtttcgaagaagagctatttgatgacagctggtgaagatatcttcaacattggcagtggtggaaaaaaaaaaaaaaaa

SEQ ID NO: 54017 - DNA, 600 bp, Homo sapiens
cgggcccccccctcggggtacttctagaattaattaacgcgggtcaccccaaaaaatccaactttctgtctttaagagcagcaccaggctttcttgggagtctaacatttgtaaactatataagaaatcagtcacctcactttttctcaaggatgatgaatagaacttttgtgtttctaggagtttaatcccgtgtatctctgaggatggcatactgtgtgcatatgcatgtaagctcatgtacatgtgtttaaaataaaaacacccttcatttgtaggatggccatatattctgttttgcagaggacaatccacatttataactgtttacctggaagtaactaataggatcccttttcactttcaaatatgtcttgattcagatattaaattataaactctccacatatattgacaaccaaactatatttttgtagaaattgagctgaatacttctttacatgaaaatggctgaaaaagaagtttgcaaaaatctaatgatctctgccttagacattctattaaatcctgtgagtttaatatttctatgaggaattacgtggatttgacactggctctgccatataaacctgaataggc

SEQ ID NO: 54018 - DNA, 576 bp, Homo sapiens
  misc_feature 51: n = A,T,C or G
cccccctcgagagtcttctagaattaattaacgcgggggaaataaatttangagaaacacaaagaactcagcaaagatcacaagaacctgaaccttacatgaaatcacacactcagaacactgaactagagtgcttaaagttttataactaaaactaaagttttataactctgtcacaacccagtgtgacagtgggtaatttatttaatctttcttagatctgtttatttataaaacagaaataatatgtatgctaccaaaaatgacatctacacatactatactatactaacagccacagcaaaatatcattattagatgttacaactagaagaatctcttgaagaacaaacttctaaaaacagggactacgcactgtggctcatgcctgtaatctcagcactttggaaggtcaagacgagagggttgctcgaggccaggagtttgagatcagcctatgcaccatagcaagatgtcatccctacaaaaaatggaaaaattagcctgtcatggtgacgtgcacctgtagtcctggcttactcgaaggctcagccaagtgggtagcttgagccccag

SEQ ID NO: 54019 - DNA, 430 bp, Homo sapiens
  misc_feature 44: n = A,T,C or G
cgggccccccctgcgaaatacttctagaattaattaacgcgggngaaaaatgcagttataatcacaaggcaaagaactcatttctcttttctgcaaaaagcatacactaggcagtggcagtccttggcagaatagattcttcaaataatggagaatatttggcttaagccctcaaggcacattcaaaggcataacttagtacctgggcctcagcaaggacacagataactagttcatccctctctgagtccgtgggagcaaaacagaggtcaaatggacaaactcctttttataaatgatcatatgttggaaaagaggccaatgcacatgggcagtgcatctgcctgttttgatattaaaatgatttcctagaataataaaaagtcagctataaatacccttcagtcccaatgaggaaaatgtatcccta

SEQ ID NO: 54020 - DNA, 595 bp, Homo sapiens
  misc_feature 10: n = A,T,C or G
cccccctcgngaagtcttctagaattaattaacgcggggaggccaagtagcttgattgctagagcccaggagttcaagactagcccgggcaaagggcaaaaccccatctctacaaaaactacaaaaagaaattagccgggcatggtggtgcttcccggtagtcccagctacttgggaggcaaaggtgggaaggtcacctgagcctgggggtgtcaaggctgcagtgagctgtgattgcaccactgcacccgagcctgggcgacagagtgagaccctgtctcaaaaacaaacaaacaatattatacttgtagtatttaaaaaacataattatctggtattcccatagctaatggaatgaaaggggagactttatctccctagacaggaagcacggtacctcctacactctcttctccccacatcaactggataggtgtgtgaacgcatttcaaagtcaagtatggttagtaattacttgatctttttccagccccttcagataagctgaattgaacacccaaaagtgatagtaacatcattttcctttgcaattacaaagaccattaacccaacagaatctccatgctttacctgt

SEQ ID NO: 54021 - DNA, 376 bp, Homo sapiens
  misc_feature 9: n = A,T,C or G
acttctagnattaattaacgcgggtacacactgtctgtgatggcctgcgtgtggttacttttcccttatatgttattaaagaagaacctgagctggggaagagactggcaatgtgcgtcccctggttgcttagatttaatggtcacttcagtgcactggccatgtctggaggctgcagtggaatgtcacctggtccctgggccccctgttgccttccgcagagcttaaatctctcttatgagctcattacctggctggatttcacctcaatcagcaaaacaccaagaaaaaattgtaaattgctcccaataggatgttgagaagcttgatcttaatcccttagccccctatcattagtacttaaaaaaaaaaaaaa

SEQ ID NO: 54022 - DNA, 372 bp, Homo sapiens
gaattaattaacgcgggattgaggagtatatttatatacttgtataattcaaaacttttgttttagttttaagttataaaagcatttacaaagttgcttgtttttaacaacaaaaaaagaaaaactatatataaaaatgaaaataatcactttcaatccttctctactccctgcctactagggcactgatgttaacattttgatatatggtattctgtagctttttatattcttacataaacatacaaatatatacacatatgggctagaggcatgtcttcctatttttaataaactgttaaactctttctccagcctgggtaacaagagcgaaactccgtctcaaaaataaaataaataaaaaaaaaaaaa

SEQ ID NO: 54023 - DNA, 357 bp, Homo sapiens
  misc_feature 15: n = A,T,C or G
cgggccccccctcgngggtacttctagaattaattaacgcggggtggggtgcagaggcttttgggaccatgtttgaaacagctatcccaggaaagcattctaaaaatccttgggttttctttggatcaaacaaagaaaatttggccttgccttcaaactgtacagtcatcttaaagctcagaacaggcaaatttctcatggcacctgcacctccaggagtggagattttggggtaactgaggctcttggaacagaagtctgtgtaagatcagcctggcacagtggcagcctggttcctgggtcagacagcctcccaggacagtggcttgcattgccagggccaaaaaaaaaaaaaaa

SEQ ID NO: 54024 - DNA, 593 bp, Homo sapiens
  misc_feature 29: n = A,T,C or G
ccggggccccccctcggaagtcttctagnattaattaacgcgggagtctgtagtatttcattatggcagtacaaatgaactaagatgatttccattaaagtgcttctctagaaaggaaagtgaagaacagacccactgctgaaataatactcattagtctaaatattgtgagatgcttggaaaatgaagcatagcactctaaactgtaatgaaaattagcctactgtaagaggacatgagtaagaatatgctagtttttcataaagaattaccaaaagttaaatcataaagaagactaatcgggccgggagtggtggctcacgcctgtaatcccagcactttgggaggccaaggcgggcagatcacgaggttaagagattgagaccatggtgaaaccccgtctctactaaaaaaatacaaaaaaaaaaaattagccaggcacggtggtgtggtgggcgcctgtagtcgcagctactcaggaggctgaggcaggagaatggcgtgaacccgggaggcggagcttgcagtgagccgagatctcaccactgcactccagcctgggcgacagagcaagattccatctcaaaaaaaaa

SEQ ID NO: 54025 - DNA, 402 bp, Homo sapiens
cccccctcgagaagtcttctagaattaattaacgcgggcttttctggcataaggaaaatatattcacctttcaagggtagaagtctatttccatttccttctggtgaatcgtcctttagaatgttcctaaattatcaattcagtgggttgcattttgaaaacctcctcacctatttgggttaaaaataatatttttaaattttggtgttatctgaaactgcagagattgttcacaaacaacttggtgcaaccatttatttgcttttggtatattttgctgttgcagttttctctaaggaagtgtagaaattattaatatgaagtaatgttagctgctgggcagttcatgagaggaataagctattatgtagtctcccttctccccccaaaaaaaaaaaaaaa

SEQ ID NO: 54026 - DNA, 599 bp, Homo sapiens
cccccctcgagagtcttctagaattaattaacgcggggtacaacatggatgaaccttgaagacattatgctaactaaaataagtcaatcacaagcagatggtcttattgattccttttagatgcggcacctcaaatagttaaactaattgaaacagaaagtagaatgggggttggggaaaaggggaaagtgggtagtttttcaacaggtataaagagtttcagtttgtgagatgaaaaacttctagaaatcagttgtacaacaatgtgaatacagctaacactattgaactatgcacttaaaatggttaagacggtaaattttatattatgatgtggtgtgtgattttttggccacattaaaacaaaacaaaacaccctggcccagagccatcttacaaaagttcattaacattaacatcattcctgtctgactctctccccgacctctccttctcctccattctcatccctccagctccaacttcaattgggatcaaccatcactgtcagagggtggggaaggatgctattagaaagacagaagatacagacagcatccttttatccatgagcaagttgtccatatgtaaaggacctg

SEQ ID NO: 54027 - DNA, 510 bp, Homo sapiens
  misc_feature 26, 39: n = A,T,C or G
gactgggtaccgcggccccccctcgngaatacttctagnattaattaacgcgggtttctctaatttgttgtagtaaacttaactccaaatctccatctcaccaggccggagggaatttcagtcagacatcctggcaatgggtctcctcctaaagatgcaccagaattgagaagccttatgtggtaccaggaatggcagcagggactattagtccattgtgactactgacgctatcctcatctatcaagcccattgtgatcccttgagatatggtggccttctgtgtccatgccacacatggggcccaagaatctttgcttagggtgggacccctggcgcctagattctcaccttcacaggctgactacatggccatcccctctgagctactgcagccttctagggtgctgctctgaagccaggtgtggattcatgattaaagtgaggcaccataattgctggaagcctccctctcccctctccctcccttttcaagaaaaaaaaaaaaaa

SEQ ID NO: 54028 - DNA, 598 bp, Homo sapiens
cccccctcgaaagtcttctagaattaattaacgcggggtggggtgaggggggagggatagcattgagaggtatacgtaatgctagatgacgagttagtaggtgcagcgcaccagcatggcacatgtatacatatgtaactaacctgcacattgtgcacatgtaccctaaaacttaaagtataataataataaataaataaataaataaataaataaataaaataattaaaaaatctggatgttttctatcatcctgatatctaattataattttaaaaaacaatgcagaaacaatgatttagttaagaatcaatagtctgtatcactgattggaaatctttttccttagctactgttctttactgtaagaaagatggtgaataacttaagtaacagtcaaatcgacttcacttcataaagcaaaacttctcaatcttaatggttgcaaaacaaaaatatttttctcaaaagcaaaaaaagaatacgtatttcttattttaagtagtatagtgtttagcgaagttgcttatcctagctgctgcaacgcccacctactttcactttggtacactagaaatagactcaccatttactaaaa

SEQ ID NO: 54029 - DNA, 444 bp, Homo sapiens
  misc_feature 433: n = A,T,C or G
acttctagaattaattaacgcgggaataattgagatttagtcttctcagttcataaaacgtctggaggacagaatttgctagcaaaggtttaatggttaagtgttatcataactctaggtcaccatcttatactacctcaatttgtattgtagtaccctttacactcaacctgcaattagcacttactctgtgccaatcttttcttttaaaatagacaatttttttttcgcatttaatccttacagaaaaactataaggtagatcttgttatttctccctcagatgagtcaatgggaaataaaaatctttaccaaaaatttccaacaaacttcacgttatttcttattggccaacactgagtcacagcttcttcctttgctagggactggatttttatttcatgaaatcaaaagatctgtgtctataccaaanaaaaaaaaaaa

SEQ ID NO: 54030 - DNA, 360 bp, Homo sapiens
ctaatggtgctcctaaatgaaggaattttttttttctgggttcaccctcgttgaacttaattttccgttcgcctgttaacctgaattagttttcagcttaacattcattaagcatcaaaacataacaagaggtgcagtgatgatgaaataaaagtctcaaggccattactcctcccatgaggcactcagggaggatctataagtgaaagatagcttcactcgcttgggttaaagtgagaaatatgaacccactccagaactttgaaaatcaaagagagctttaaaaagccgtgtgtttatgttttgcctaatttttcactttttctcattagaaggcaaggtctgactaaatgtgggtta

SEQ ID NO: 54031 - DNA, 148 bp, Homo sapiens
ccgggccccccctcgaaagtcttctagaattaattaacgcggggattaagaattaaactgatgcgagcttctttcggtaacaataaattagcatgtatcatatggaatggaggacactgtatggatatatggtggggatggatggaaa

SEQ ID NO: 54032 - DNA, 589 bp, Homo sapiens
cccccctcgagagtcttctagaattaattaacgcgggcattctaatgaaaagatgcacgtggcccctcagccgtccttcgtgctgcccacactgagggacaggagtcaggacagaggcctttccctggagggcatggataatgactgggccacaggaagcctggatccttattcaggttccacctgtggaacagggccctgtcggccttcaaggctcctgtaccttctgctgggagccaccctggaagccatctatgccattctcttatttttattggtaaacaaaggagacaatcccagttttgcctctgtaatgcagtacttggtccttttaactttactgttatcctaacatgtgtaaaacagtaagtttcttcctcagcaaaatatcttccaaagtatttttacttatgctttgagaagtgagcctgtgtgtttttttctctagaatgtatttcattgctaatagagttgctaacacttcttgagatattatcatctcatttttgcataaccggacatgttgacatgaactgacaggttctttctagccgcaaaaaaaaaaaaaagcggccgccaccgcggtgga

SEQ ID NO: 54033 - DNA, 603 bp, Homo sapiens
cgggccccccctcgaaagtcttctagaattaattaacgcgggcaggctggtctcaaactcctggcctcaagcaatcttccagccttggcctcccaaatgctgggattacaggtgtgagccaccacgtctggcttggagggcttattaaaacaccgattcttagcctcacccccagagtttctggttagtaggtcttggcagggctggagaatttgtatttccacaccttccttggtgatgtgttgttggtagttcagggagtacatgtgagaggaaccgtttagatagtaaaaactgcaaacctgaagaagaatagaagaatccttattctgtgctctcttagatttagtttcctcatctatgatcaataactattcatttcttcctcatttacaataacgatttgctgcttttaagagcaagagatcacttttccttcatgttgttttgctagtggcaaatcagaaatggtttcgccagtattcactgatcttgtaatcactctcggaatccagctgcgtctctagtgtagagttttgggtcaacaagaataatgctgagcttaaagaattggactcagtctcttgaagtcaggggttgatg

SEQ ID NO: 54034 - DNA, 600 bp, Homo sapiens
  misc_feature 27, 578: n = A,T,C or G
cgggccccccctcgaaagtcttctagnattaattaacgcgggaattggtaagtcatttatgtctctttttatactatttttcatgaagtttctttattttccagttctattgtatgtcaccccaaatatccatacaacacattattttaatctccttccctctaagcattcctgttccacttaatctaacacaatgttctcaaagatatgacaaactgcaactctgttaaaaaagcttcaaagactttccactgaactgaacagaattagaatagatgattatttcagtcatgtgttggtatataacaaaataccccaatcacctattcttcctcctcttaaagtcaatgtattattaaaacgtccaacttccttttatgaaatatttcacacatacccaaaactgaaaaataattgatacagcaacataaccagaaacaagattataagaaattctacaagggataactacaggctaaaattgtttagcatccccttgtatatttctctatttttgagtacaggtctgtgtatagaatattttacacagcatacagtagtgtttgtatcttcaaatntaaataagatgttattgttttc

SEQ ID NO: 54035 - DNA, 519 bp, Homo sapiens
ccgggccccccctcggaagtcttctagaattaattaacgcgggtgggtatagaaaccaacatttttaattggtgatctatagcagtctttagcattggtaagaatttttttttttttttttttttttaagacggagtcttgctctgtcacccaggctggagtgcagtggcatgatctcggctcactcggctcactgcaagctccgcctcctgggtttatgccattctcctgcctcagactcctgactagctgggactacaggcgcccgccaccacgcccagctaatttctatttttagtagagacagggtttcaccatgataaccaggatggtctcaatttcctgcccttgtgatctgcccacctcagcctcccaaagtgctgggattacaggtgtgagccaccgtgcccggcctagcattggcaagaaatcttagccaatccctagtcaaaaaatcctgtgtgttagtcacaatggtcagagtgatgagattgacaaaaaaaaaaaaaaaagcggccg

SEQ ID NO: 54036 - DNA, 190 bp, Homo sapiens
cgggccccccctcggagtacttctagaattaattaacgcgggatgagaagaatcaatggactggcatttcatgggtccagagattgttcctgaacttagatattgctgttcccaatcataattagttgaagagacagagtgttccacttgggagcaggagagatgctattttcccaaaaaaaaaaaaaaa

SEQ ID NO: 54037 - DNA, 577 bp, Homo sapiens
  misc_feature 540: n = A,T,C or G
cgggccctccctcggaagtcttctagaattaattaacgcgggtccctcttagataaatgtcaactgatgtggagaagaaaacatggttgggcaggtgggagaacaccctcagaaatgtacagattttacaggatgctaaagaagtttggcaccttgtcctcctgaggaaaagaagcctagaatgagaagaagagaatcccagaaaatcaaaagatggagggaacgtctgctttgatttcaatattatagtcctgaagtgagactaagccttggggagaagtgtcattttctgtacattgctgggccagtagatttaaaatggctctgtacattttctagaaaaatgggtcagatcctctctgtatgctccaagaaagttgtgaaagttctttcaaaatgagacaaaggattctttaaaagaaggtgctgcacatagattgcctagtgtgaaatcagaaaataacccaatttaattttgcaggtgaccttagaaaggaaaatgactgttttagcactaagctgggcagtgtgtttcagcanaggccaaggaagtttggtgctgatgtttggagatcag

SEQ ID NO: 54038 - DNA, 471 bp, Homo sapiens
cccccctcggaagtcttctagaattaattaacgcggggagagagacaaacatttgaaaataacctcacaaataagcacaattgtgattagtgctatgaaaatttcagttcctaatcagtaagaccacaataacctcaaactttgtgatttaaattaattatataaatatataaactgctttccacagtgctgacacaaagcaagaataaaaaaaacctgccactaagaaataacactcaccgctaactcagcctcagattaataggatgtcagaactagaagaaaccctacaagaatcatctattgcactcactcttagctgagtttgtgtcatggactcctttgacaatctggtaaaaactctatagaatagagttctctttctctaggcaaacacagaggcactcaatattttgagtagaatttcttgatgttcatggactctctgaagccaatcacgtgctggaatcg

SEQ ID NO: 54039 - DNA, 616 bp, Homo sapiens
  misc_feature 28: n = A,T,C or G
cgggcccccccctcgaaatacttctagnattaattaacgcgggcagactcaggatgagggtagagccaacaggctttggtgacagatgacatgtggtaagcacatatgtgtatgtgaggaaggaaagggaggcattgaggacaagcccaaggttagttgtagagcttattacaacaacaatgccagcaggcactggggagggactgaccctggaaccaagagaaagaaggtgctcaaattcccagaggcagtcaaaccaggaaagctcttataaatatgttaggaagcatggaggtacatgtgtgtatatgtgtgaatgtatataaataaaattttaagtaaaatgtgaccaattagttcagtctcatcaaaaaaaattttaatttatataaactgagtaatgatcctttaaaaaggaagctaatgaccaggtatggggctcatgcctacatcccaacactttgggaggccagggcagaaggactgcttgagcctgtgagttcaagaccagcctgagcaatgtagggaggccttgtcactacaaaaattatccaggtatggtggcaggcacttgtggtcccagctacttggaaggctgaggtgggaggactgcttg

SEQ ID NO: 54040 - DNA, 524 bp, Homo sapiens
cgggccccccctcggggtacttctagaattaattaacgcggggacgtaacagggatttttttttatgccttggggttctgtttctgattttctttctgtgtgtttctccattatgttgttgcatttttctctatttacgttatctccctttccctttttctctctgtccctccctccttcttcctctctattcttcccctccccttgtttttatgcctgattatgtggacacagacaaggattaaaacagggcacctgcccttgaggagtttacaatctgctgggctgaggatcaacacatgttcaaaaagagaggaaagaagtcaagggagatcatgccagatggacttaatttcaatgaagaacaggcatttccatggaaagagacaagttgctgcgtgaaaaaagaaggagttgggggaatttgaaaggaagctgaaaagctggcgacagggcttccattacgtagacagtcatcctgacatggtacctgaacaaatcccatcaaggacagattctcagtc

SEQ ID NO: 54041 - DNA, 570 bp, Homo sapiens
  misc_feature 28, 41, 42: n = A,T,C or G
agactggggtaccggggccccccctcgngggatacttctannattaattaacgcgggatcaacacactttcctcacctgcagctctggttggagaatacactaaattcaaacaacaggttgggtttcatcattaagttggcccacgcttgaccgaaccaacagctttttcgtattagctcaataaccgggcatcctggagctttggagtgaggaaagtgtgttgatcccgctctatatcaagcccttggtcaagggctttacccacatgctgccgtgctttggccacgttcccacgcgcaccccggttgcgcccccctctggtgtccgctccactggggactccttcgccccctcggagtcgctgctgcagatcgcatcgccccctagttaaaatcgccccagaatttctgggaccggagtgaggggatccggagcaggttaacggggtaggaggaggccttactggaaaatacatggtaattgtgggaacagatcagcggtcccgcgcccgcgcgtgcccgtggaggttcagtgcccagcactttgcataccccagctcggtatgcaaa

SEQ ID NO: 54042 - DNA, 587 bp, Homo sapiens
  misc_feature 29: n = A,T,C or G
ccgggttcccccctcgaaatacttctagnattaattaacgcgggtctcaatgattcttgaagggaaataaacatacacagaagagcttgaatcaaaaggaactaaaactagacatctaggaaagctgaacaactctgatacaaaagatataatgtgttttaataacaacattttccctttccattagcaggtataattgctgccacttaaggaactaatatgcctttgctacctcctattaccatgataaattgccagtggaatgcattccaaagtgagtaatgtcttgctggacattggtaattcacttaaactggttaacgtaataacagatacaatgacataatctccggattcacattaatatctatagcttggtctgctcttgcagacatgctgctgaatcaaaattaaggatgcttggaggccgggcgtgatggctcacgcctgtaatcccagcacgctaggagagagggcgggagaattgcttaagcctaggagtttgaaaccagcctgggcagtatagcaagccctgtctatacttaaaaaaaaaaaatacagccaggcatcgtggcacatgcctgtag

SEQ ID NO: 54043 - DNA, 477 bp, Homo sapiens
  misc_feature 22: n = A,T,C or G
cccccctcgaaatacttctagnattaattaacgcggggtatactgagtcttacaatgtgtttgtgtatgcaatttaatattttatttttaagacactttaatgccttttaaaacttgtaattcattttcaggtaattatgcctcaatatttaaatataagtccaataaaaactcttgtccatgatagaatggtgatatgattttttttttttttaatttttgaggcagcgtctcactctgttgctcaagctggagtacagtggcacaatctcaactaactgcaacctccacctcctgggttcaagtgattcttgtgcttcagcttccgaagtagttgggattacaggcatgcgccaccacatccagctaatctttcttatttttagtagagaaagcattttgctatgtaggccaggctggactccatctactgaccttaaatgatccaccctcctctgccttccaaagtgctgaggt

SEQ ID NO: 54044 - DNA, 430 bp, Homo sapiens
ctgggttaccgggcccccccctcagagtacttctatattaattaacgcgggtaaaggtgatagaataaatgagtaatacaaaagtaacattttctattctcactttccttgttagttgagttgccaaaactttagttgtctatacctgcaagttgaaaggaacttttagcaacttttctactacatggtttgagtttggtgtgggttatactcaaggtttatctattaaaactgtctttaattggtgtctgatgttatttgtgcttactgaagtaacttgtcatctgaattctcttttcccgaacgccttaattagctgagaacatacttaaaagaagttagaagagaaaagattctctactgcggttcatcattgccctggttgatactgctgatggtgactgtagttgcatatgtctcctgttgttag

SEQ ID NO: 54045 - DNA, 619 bp, Homo sapiens
  misc_feature 10, 49: n = A,T,C or G
cccccctcgngggtacttctagaattaattaacgcggggggcacatggnaagaaggcttttaatgaatgcagaatgaatgaataaatgagagcaaatggtatagaatgagcctacacaaaggagatgtttctcctctagttctaccagttggcaagatccctacagctaaaaacagttccaccatataatctccagacctggcctggccacagagtagatcagactaaaaatagagcctgctaagcttgataaaaaagactgatattggcacaccctgtccttccagactcctgcaagcctcgctacttctactctggtgtctagaatccacctcacgggaaaaactaaagaaatgttttcctttaatgtccaaaatcacaccagcatatttggaagttagttttcaacaaaggttctactgactgagtcagttccctggatttagaaggaaataaatttcttaagccctaactagaacaagaaatcaggagttagttcatacttagttgaagaatgatcatgtatgaattcataaatatagtcaatgactacaacaaaaaaatttcgtgatcagaatgcctatttcagttggatatgagtgatcagatggtagtatgt

SEQ ID NO: 54046 - DNA, 512 bp, Homo sapiens; identical to SEQ ID NO: 40423

SEQ ID NO: 54047 - DNA, 583 bp, Homo sapiens
ggccccccctcgaaagtcttctagaattaattaacgcggaggtgggaggaactcaaccataatgatacaaagaactatttattcttttattgaaaaaaaggtgactggagactggatcacactgtgggaacttgctgagaattttggaacttcctctctttgggtatgataagaagtgagggaattgaaattcaagtcacttgaatttccctcagtcttctataatacctggtttccaacttgcattcatttaacaaactggaatcaatgttccattattaaatcaatattactttttaattttagtgtgacttgtagaatgcaatttgatacttgattacaccctatgattcatagctattattggctattttgattgtttcttactcctaatatgtcccctatcaaactgcaaatgccttgaggtcaaaggtccttttttgtctaattagcataggactgaacacttggaagatgctaacaacattcctctgttaaatttaataaggattttaactttccaagttcaatgggttttgaatgactcctgaatataatatattatgctaggtgtagtgtaata

SEQ ID NO: 54048 - DNA, 453 bp, Homo sapiens
taacgcggggtgggagtcttacatcaaggagaggttagatgaaacacagaaggagggttctagaaacacagaaggagggctttgctggtaaacattgattaaccagcatctgattaaccagaagatttcccaaatcttccttcgtcaaaatatttgtactcattcctgtttaaaaagactaaggcaacaacttaacaacactggatatatgactgctggttaataaattcctgcaatgattttacatattaaaaaatgcattaaaaaaacaacgagtggtggtgcaggtgtggaaaaaaatgaaacctgcgtgtattgctggtagggatataaactggtgccactcctgtggaaagcagtacagcagttctgcgagaacttagacataatgttaccatgtgatccaacaatcccacttgtgggtgtgcacccaaaataaacgaaagctgggac

SEQ ID NO: 54049 - DNA, 478 bp, Homo sapiens
  misc_feature 435: n = A,T,C or G
gtacttctagaattaattaacgcggggaggtgtaaaaactaaagggctagaggaagaaatttttttttgcatatcagacaattacatatgcagtaaaaatcacacaaatgtatcttggtcaacatacattttatgtaagaaacacaactattacaaattattatatattactcaaagtaatgctatataaaattggtttcttacagcattatgatttgctatcactacaatgtggaatctaggccagtaatttgcaagtgccaagtgacagcccctcccctccaagatacctggaaatgggggggaagaggcaggttttggtggccagaacatagcatttagtcagcagagtctgaggatgttcaatgtcttccaagtcaaagcacaatccagtcaaaaataaccaagatgcccctgatgagaaacactaaacanaggaggctgcttcttgtatattaacaacagggttaatatttaa

SEQ ID NO: 54050 - DNA, 533 bp, Homo sapiens
  misc_feature 499, 500: n = A,T,C or G
cccccctcggaagtcttctagaattaattaacgcggggagggttcatagagtttctccgatttttagatacacccagcataacctaactcacctgtgctttttaatattcttctttggcttccataggctcttctgaaaacctaaccactatatgcacaaagttcttaccattggaaaacacctttaaatgatacacagagaaagtttccagaaaaatcatttcaaggttggagaaaacctattatacttttttaaataaaataggaaataataagctggattgaggtaatatatatttggctcctactcacacaaaaattttgaaaaagaaaaaaaatgtttaatttattttttaattcttcatttgtaatcacgaaatatctgaactaaatatttgaatctctgcaaaggctgggagttgctatgtgttgttgggaccacactactctcatatcctgtgtaaataccccatgactgagtaaatattatcatgcaatnntagaattagaagtttagatgttttgacctaaat

SEQ ID NO: 54051 - DNA, 571 bp, Homo sapiens
cccccctcgaaagtcttctagaattaattaacgcgggagaatcgcttgaacctggaaggcagaggttgtgttgagccaagatagcaccactgcactccagcctgggcaacaagagcaaactctatctcaaaaaaaaaaaaaaaaaaaaaaaaaagctgcaggaatggaattccatacacaatgagattgcagtcttgctttgatattacagcttactaaaacacttctaacgatgtgctggacaaattttgtctacttcaaaaacacctagctaggaatgtgaagaccaagtgcaaggaaagaaaacacaaaaaattggttaaacaaaatactgtggctcatgcctgtaatcccagcactttgggaggccgaggtggacggatcacaaggtaatgagatcgagaccatcctggctaacacggtgaaaccccgtctctattaaaaatacaaaaaattagccgggcatcatggcaggcacctgtagtcccagctactcgggaggctgaggcaggataatcgcttgaacccaggaggcagagcttgcagtgagcccagatcgcgccactgcact

SEQ ID NO: 54052 - DNA, 601 bp, Homo sapiens
  misc_feature 9: n = A,T,C or G
acttctagnattaattaacgcgggctgtttttaatttctaggggaaaaaaaacactctatgaaatggttccaccactattattcaccatgttccctaagcaacatcaaggtctgccccatcatagccacctgttattttatttcagcaacagagaaactattatcgaatgacaatagaaaggtgactggaaacagtaaggaaaggttattttgttaaagtcaacaagctctgaatcatgtaatgcgatattgaagcaaggcttctaaaaacaagcaatgtagtacccagacaataaggacctgtcactcctctagctcttcctagctggtcaaagctgtgacttaagtaatcatttctcagaacaaaacaatgtaggtgcttgtttcaaggtaacagctatgctgctgtcagaaaacagtagtaatggcctttagaagaaatttatgtgatttgcggatgggaagaagctcattttgtcaagagacccttaggaaaacatgaccaagagagtcaaaatccagttattcctgcagaaggaaaaagcatagacagtatccagccactagatgtcactctccttcaagtgctgttgatgttgct

SEQ ID NO: 54053 - DNA, 408 bp, Homo sapiens
ccgggccccccctcggaagtcttctagaattaattaacgcggggtggggggagtcaacccaatcttgactttcttcactctctcaccttccaatagcaattagtcaataatttctatcaactccatcaatgaaaatatctcaggctgggtgtggtggttcactagagactaggagtttgagaacagcctgcataacaaagtgagacactgtctctacaaaaaattagctggacgtggtggcgcatgcttatggtcccagctacaaaggaggctgtgaaagaagactgcttgatcccagaaggtctcttgatcctaggtcaagcctgcactgagctgtgttcatgccactgcactttagcctgggtgacagagcgagaccctgtcccccccaccaaaaaaaaaaaaaaa

SEQ ID NO: 54054 - DNA, 406 bp, Homo sapiens
  misc_feature 45: n = A,T,C or G
cgggccccccctcggaagtcttctagaattaattaagccgggggnagtctacttctaaaagatataaaagtgaatatttaatcacctaaatgctttttacaaaacaattgggagttcaattactatttttccccaggattcccgaagagcaggagtctgatttgactaagatttttatggtgcgggatactgcctacaattatataagagtattaatattacaaaatctaagagatcatcattctagactattatgaccatctgtgtattcttacatttgccaagagtatgtcaatcattttcctagtctatatatgtgcgaggtcacaaaagtcaacaccatgtttggagccacatttttaaagaatgtaagtatttgtgggaagaggtccaaaaaaaaaaaaaa

SEQ ID NO: 54055 - DNA, 597 bp, Homo sapiens
ccccccttcgaaatacttctagaattaattaacgcggggtggggtgtgtgtgatttgtaaattcacagttcttaactctaacttaattctctccactccttcaccgagttttgattccttcataatcatcacaagttaaaattgagttttgcccatggtcattgtctacctgtaacccagaatatttcttccaaggggaccagaaatgggatctgcttgtcttcttcacttgtgtgtccgcaatatctagtgcaaagcttatcacataattggttctcaataagaaattttaatgaattaattgtaacaaaattgttcgttttgccatgaggttcaagctaccacacctgtgatttaaaaatgagacctgattattatttctttaagataggtaaaattaaaagaatgttcagattaatgaagagttctgtttccctttgactgttgttgatatcacctcacagtctggctgctgagaataagcatttcagcagctctggcatggccttttcttattgcttaatgattttccaatgatagaggaatgcactgcaactgagccatagagacttgaaagctatctgctgtacccgacat

SEQ ID NO: 54056 - DNA, 605 bp, Homo sapiens
  misc_feature 28: n = A,T,C or G
cgggcccccccctcgaaatacttctagnattaattaacgcgggtatccatagaatatccaggtgacctataggtttcttgaaggcagaccacatccaatctcagcctcaacaagaagggcgttcctaatataaacaatatttatgatatttacattacataagcacaggctcattttggtttccacaaagaataataataaacatagacaatggaaatcctcagaaatcttcaaaatcctcaagcttcactccagttagccgtttcaatggactttgctttcctatcctacacccacattctctcattgtgacatcagcactttgtttttcctccgaagaaccactgctccatactcttagctcctgtggcttccaagaagatgacggtgtccagctcccccactggcatgcctacgtggctacgagcctgggcatgggacccaagtctatccaatgagacttgatccagaaaagctgctgaaacatgcaagaaagaatctctccctcttgaagaggctgagctgtgagaatgtaacttggagctgctgctggacaacttcccactacttgagtacagcctggctgatatgataaaaaaaaaaaa

SEQ ID NO: 54057 - DNA, 591 bp, Homo sapiens
cgggccccccctcgaggtacttctagaattaattaacgcgggactagaacaatcctagaaggtgtttttactttccaagtaggtaatggaatattacatagcagatgactgtttgttacagaagagtcaattatggtaagtgtaaagcaacatagaataaatgaccacaattacaggctctgctcattcccttagtcccttgatcccagtctcattcatctgggaacctctgaattctggaaaattcagcaaagatgttcctatgatcatttaaacccattatctgacatcccactaacttgccaaacatatgttcctttaattttttggctcctgggcaaacaaacttgactgtgctatacttcttcacaattctgggagtgtttattgtacttttaacaagaagctctaggaaaactattgatttttttcttcctaagttcagtataggaactgacccaatcaacaaagcctaattttttagcccaaattactatttaacacctttaaaaattatgcttgaacatttaaaatgaaggattcttaaaatcaactgaaaaaaactcagaagttatccaaagatattataaa

SEQ ID NO: 54058 - DNA, 615 bp, Homo sapiens
cggggccccccctcgaaatacttctagaattaattaacgcgggagatggaggttgcaatgagattgctccattgcactccagcttgagcgacgagagcaaggcgccatctcaaaaaaagaaaaaaaaaaaaggaggtatccaaaataaaactaataccaagtcaggacacagatgggagaagttccttctggtctcatgactaaatttcaagataaaaggcctcttgggtgggcagcaactttggctgaagagtgcctcatctggatttctagaaacagcaacacatgatcaaaatcatcctaaaagtggaagaaaatttctcacaagggccgaggcatcaagaatctggttcacttagatgtgcaggttgtaatgtagagaaaattcataatttctgtcctgaaatattctcccctgtgtttcctatgtttctaactgtagtaataaacttcctggcaaaattctgtggatggaattcctttacctcattaacagagtaacagtaaatccaagtttgagcaggatagacctgatttaagtctgttatttcaatacaattctctctctcaaagagcatcctgttttgtagaattatacaatttatatagtataaa

SEQ ID NO: 54059 - DNA, 518 bp, Homo sapiens
  misc_feature 464, 470, 473, 505: n = A,T,C or G
cccccctcggaagtcttctagaattaattaacgcggggtgggagtgtggaggtagggctggcagcctggggcctggcagcagagctggccctggaggagtgggtatgaggcctggccaagagccaatgcttgcagcttgacaagcaggctgttgctctacctgcttgccttccctttcctcagcccctcagagccactcctattgcctacaggcccacttctgcccttggctgctgctcttcgacctcaggtaaattgttcaatgtccctaggctttcattttaacattcgtaacaaaaatccaagaaagcaaaggaggttttgtaaaaatgctgtaagatgcctggccaacatggtgaaaccctgactctattaaaaaatacaaaaatgagctgggtggtagtggcgttcgccttaatctcagctactcaggaagctgaagcaggagaatcacttgagcttgngaggcngangttgaggtgagccgatatggtgccactgtacntcagtctgagcga

SEQ ID NO: 54060 - DNA, 482 bp, Homo sapiens
cgggcccccccctcggaagtcttctagaattaattaacgcggggtcttgttaggaattggtctctattttcatatccttttctctacagttcttgcgttcttttagattaattggatatttattatttcactgttacattaactttgattaaatattatattattcttttagtaatttcacaagagaagacaacatgcatcctttactcattgcttcctaacagatttgatcactttgaccactttctaatactgctagaaccttaagacctcgaaactctacttaatcccaataacaaggttttgcagctattgatggcatgcacttgtgttattcatgtaatttaaagtctataaacatttcaagcatataatttatagttacccatgggtttactaattccagtgttgttaattccctcttacatttccattttttccatctggaatcatcgtcttctacaaaaaaaaaaaaaaaagcg

SEQ ID NO: 54061 - DNA, 300 bp, Homo sapiens
cgcggggtgacaaaattattagacaaaaaattgatggagtgaccatgtattagtatatgtataaaatgaatagctgtgctgaataccataaataacctactagaacctaaaatggccaaaaaaaaaaaaaaaaaaaaccctaaacaagaaactggctctgaccaggttgcagcataacaagtgaaccgggtaggcacaacctgatagagtcaagtgtgcactctgtggaggagaccatgaattttccttaaaggactaaaggggtacctttaacgtaaagagaggccatctatcgggctg

SEQ ID NO: 54062 - DNA, 575 bp, Homo sapiens
  misc_feature 27: n = A,T,C or G
cgggccccccctcggcagtcttctagnattaattaacgcggggatttcccatttccattaggataaagaatctttcaaatccaatcttttttctcctattgacacctcctacctagtgaatcctccctccatccaggccaacttccctggctgggtttccatgaacatacccagaggactgctgtactttgcttccttcttggcctctgcatcaaaatgtgagggttgcagctaacatataaaatgtgagcttgtgtgagtgtgtaattgaattcatcattaaaaacactctaatgaagaaaatgttagtcccagttgatttcaacaattttgaggaaatttgatatcaattttgtaaaatgtttttttccggaaaacagagcagaaataaagtagatatgtcacttattttatgaggccaacatttcctaataccaaaatcaggaaaagtcatgatgatattctatggtttttttcctaagatttttatagtttcacattttacatgtaagtctgatttctcaaatttcttttttaaaacgtgcagtgatatatagcatgatgctttcttggct

SEQ ID NO: 54063 - DNA, 394 bp, Homo sapiens
  misc_feature 38: n = A,T,C or G
ctgggataccgcggccctccctcggaaatacttctagnattaattaacgcgggatgtcagcagggagtgaggtgggggaggtgaggtaaaggtattatcaaacaaaggattgagcttgctgtgtaacttaaactgtttgctttaagcggtcctgtttcattcttgtgatctcctttatttgatggcacccaagatctctcatacacaataataaattcagtgtttactagaaaacttagcaccccaatccaaacttcagaaatgatattgcatacattattcaatttttatgtctatagctttcacctaaatgggcagttattgtagcaagatctggaagatgatttaactgttatagtccatcttacctgattgtacaaaaaaaaaaaaaaaa

SEQ ID NO: 54064 - DNA, 198 bp, Homo sapiens
ccgggccccccctcggaagtcttctagaattaattaacgcgggagggtaataagtatgatccagactgtataatagctgccctatgaacatgtaaatactgcattgatccttgtagcgtgctcacagaaatatttaaagaaattgatcatatagtgagccacaacgaacatcttaataagttccaaaaaaaaaaaaaa

SEQ ID NO: 54065 - DNA, 594 bp, Homo sapiens
ccgggccccccctcgaaagtcttctagaattaattaacgcgggtgaagatagtagatattttctaaattaaattttttattttttactaaaatgatacaaatgtatgggctgctataaatttacagttaactgatttttttaaagaactatttctttagtttcatttttaagtttttgttcactgttctgttgtataggattttagtttttatacagtgttttattaatcagctttaaattgatgcacatggaatacagggtcgtgtcctgagtgtcttctattcgaaatggttccccttaagcccaaacaaattctgaaacatttctttatctccaggtttccatggaaatcatgttacttttatactctccagtcactcctcagtggattcaaggttttctgttcagactagacatggaacgagtgtgatacaatttttttgttaacaaaacatctatttctagtgtaagaaaaacagttatgggtactaaacctcaaattggttagagattattttttaatgaaaaatgtttcttataatttatagagcgagtaattactagaacttgtgaacaatatgacagcagcagca

SEQ ID NO: 54066 - DNA, 595 bp, Homo sapiens
cgggccccccctcggaagtcttctagaattaattaacgcgggagcacaaaattgcattccttaaaaacctcacattctgcagtattacacaataaaaatgataggatgatgaggagtggagggaatagtcctggaacagaccactgaaaacccaagcaactttcttagaaagcattaataaaaacaataatgatactagcacagttaaattcatgttaaatctttattaaatactccaggagatatagaacttcatttttaaagaaagatttgaaggtaatgtgatggaaaggaaaggttgagactgttgaattaaggaaacatatgcagcatagacgaagatcagagagaatcatacagtaagatcatctaggacaaaatagccaaactgagccaagaagtagtgatgttggagtaaatgggcattgtgtatattaatgtacaagttgattttaaaggaatttcaaaaaattactttttagctaggatagatttgagcgtgtagtcaaaacggttttaaataaatgattacagttatttttatgatcttatgaacgctcagtattcatcccatgtgtttcacagctcacatcag

SEQ ID NO: 54067 - DNA, 380 bp, Homo sapiens
cgggccccccctcggaagtcttctagaattaattaacgcggggtataagctttttttcaattagagaaaagcttgagctataccaagaccctaagaaaaaaaaaaaaatccaatgcaaattctacgttaatgcctggttaatgcctggtttaatgacgggaaaccttctgggagagctggaggcactgatgaagaagttggtgacacttccctgtgtttaaaaaaggcttccaagccgggtgcagtggctcatgcctgtaatcccagcactttgggaggctgaggcgggtaaatcacaaggtcaggagatcaagaccatcctggctaacacagtgaaaccccttctctactaaaaatacaaaaaattagccaggtatggt

SEQ ID NO: 54068 - DNA, 582 bp, Homo sapiens
cgggccccccctcggaagtcttctagaattaattaacgcgggtcttttaaagttttcattgtttaaattttagttctaagtatgttttttaagtttctcttgcttccttctttaacccaagaatgctttagtagtgagttttttttagcttccagcaaatgaacagaagggaggatgttattcttttgtgctttaattattttaattattacattatgatcaaagaactatgatctctatgatgtagattctttgaaagtatggcatttttgtggcttaatacaggattgttgcaaatatatatatgtatatatgctacatatatatgcatatattctatacatgctatatatatgtgtctataaataaactacagtttattgggtagtttacatcttcacttttttcatgctttatcaaactctgagaggagcatatagcattttctgattacaactgctgatgtatttatttctcccttcagtcctgttagtagctactttatgtatttgaagctatgttgatatgtttattattatatcttcttgacatattgttcctcttacaaaaatataatatccc

SEQ ID NO: 54069 - DNA, 563 bp, Homo sapiens
cgggtcctgaaacattcgggctttttactttctcgttttcttggaaaaggacttacatgtttgaatatgtagccattttgtatttatttttacagatattataaagccattatcctttttgtagtttagtagaaatttaattttctttaagtttttgcttgaaagctgtccatatggctaccatattcaaccttgtgtcctggcatctcactaaatttttttttttttttttttttgagacaaagtctcgctctgttgcccaggttggagtgccgtggcacgatcttggctcactgcaacctccacctcccaggttcaagcagttctctgcctcagtctcccaagtagctgggattacaggcgcccgccaccacacctggcaaattttttttttttttttttttttttttagtagggatggggtttcaccatcttggccaggctggtcttgaatccctgacctcgtgatccacctgccttggcctcccaaagtgttgggattacagacgtgagccaccgagcccggtggctcaattttttaaaaattaaatattggaagtcag

SEQ ID NO: 54070 - DNA, 366 bp, Homo sapiens
cccccctcggaagtcttctagaattaattaacgcggggagcaaacacaggccatctgttcatgtagcctaagcttttaactgctacgccaactccactgcctcagggaacaactgggcatggcacctacatttatgtgaacccaaccctccaaattatgaagtctctgtcatgctaattatctgcatgagacatgagacatcaggcacttaaaaactcaccattacagggccgggtgcggtggctcacatctgtaatcccagcactttgggaggccgaagtgggcggatcatgaggtcaggagatcgagaccatcctggctgacacagtgaaaccccgtctctactaaaaatacaaaaaaaaaaaa

SEQ ID NO: 54071 - DNA, 589 bp, Homo sapiens
  misc_feature 28: n = A,T,C or G
ccgggccccccctcggaagtcttctagnattaattaacgcgggggagccaccaaaacccatctccagtctcctcccgggggcccccagcccgcctctgtgccactttgcatcccacgccggaggaggcattaacgagaccgggtaaggtgctgtgctggccattggtgacccaaagatgatgaaaaatatgttcctgcccacaaggagttagcgacctactgggctttcctcttgctgatgacatgattcctgtttgaatctgttgacaagattctgaaagctgaacagagaattctggcactgcactgggtaggaaaaagcatttcaagaaatagataatatcaaggacatcaggacaccgggagtgggagagattggactgggagactcagcaggtcaggacatttacattaccatttgctggtcattcttttgccatcagttttacaattctcaaatctcttgccacttgcttatttcttccatgtgcttgagttgttcttggtttgcaaattatgaataatactctaataatgtaagaagttgagcatttgggcatcttccttttatagtttgaagatgaaaata

SEQ ID NO: 54072 - DNA, 619 bp, Homo sapiens
cgggaacccccctcggaagtcttctagaattaattaacgcgggggagaaccagtttggtgaatacagataatggtttaattcatatatgctattctgttttacatcttctttgagattctctctaactgtattatgtaataatatatacattgtatagagaggaaaaaccatatgttctatagctttagcatttcctttgcctatgataatgctaagcacatgaaaattcttgttgaattgaaaagaatgctgtgctcagcaagaaagatatgtgttttgattccaattcagatgtggtgctcagggtttaaaattaccctgaaggtcaatcaacatagctctagtcaaaggcatatctcttagaaatggattaaagaaacactgatgttagaatttttcttctagcatgatgcattatcttcaatattagggaaaagaaacagctccctttgtattgtgtttctttgattttaggtataacagttaaacagggtggaatttcaaaatctttattgataatctcagaaatagaacaagtatttttgagcacctactgtgttcatggagtttctctgctgcagagatagaagtattattttttattctattaagaactga

SEQ ID NO: 54073 - DNA, 592 bp, Homo sapiens
cgggccccccctcggaagtcttctagaattaattaacgcgggctgctataattataattattctatctttccacctcaagttattcttaaagacttgacttagtctcaactgacttttttttccttttctttagtggcctcacgtggaataattttaactccactgatgcctcctacaatcaagtaatcaaatcagccaactctctggagaaataatgaaaacaaactgttctgttcttattcttaatttaacatttttcatcttatgaattggatacaattgaaggtaaaaagatacaaagtttgctaaagttttgagtgacagaagatagaatatgatctcagcggccgggtgcggtggctcatgcctgtaatcccagcactttgggaggccgaggcgggcggatcacaaggtcgggagatcgagaccatcctggctaacacggtgaaaccccgtctctactaaaaatacaaaaaattagccgggcgcggtggcgggcgcctgtagtcccagctactcgggaagctgaggcaggagaatggcgtgaacccgggaggcggagcttgcagtgagccgagatcgcgccactgc

SEQ ID NO: 54074 - DNA, 589 bp, Homo sapiens
  misc_feature 550: n = A,T,C or G
cccccctcgagagtcttctagaattaattaacgccgggaagaagcaacaggtgtgtggaggcattgactcagctaccagatccaccacctctgcaagcgcagagcagagttcatttctccacacaatgtttgcacgcaggtggatgagggcttctggtgtcttcaagtccaaagggttttctataactactatagagaaccttgtggtggtttcctcagaatcaccaaggttaacttcaagtccctaccccttgggtgcctggtagagacagaactctcatttcctttgtaagtaagagaacctctgtttggaagtggctggcagttttatcattgtggagatagaggctttgacttcccagcagacttcctttactttgagaagattactaaaatgaattccttagattaacaaatataaaatatccatttttttgtttttgttttcattttttgcagagaaaacactgaagtcacaaaaaacttaaatgcagggcagttggttaacctattgtatgatctttgtagtacagtgaacatattgtggctntaatagtactgttccctggatgacatagattaacttttt

SEQ ID NO: 54075 - DNA, 598 bp, Homo sapiens
ccgggccccccctcggaagtcttctagaattaattaacgcgggatcctcataaagctttaatatcaggatcaaactggccttgaaaatgagtttgaaagtgttgcctcttcttaactattttggaaagttttgagaagactgatagttcttcttgaaatgtttggtagaattcagctgggcttaagatactctattttgttgtaattaaatcttggtaggttgtatgtgtctaggaacgtatccattccttctaggttatcctatttgttggtataaaattgtccatagtagtttcctatgatcctttgcatttctgtggtatcagttttaatatatcctctatcgtttctgattttatttatttgaggttttttttcttagtccagctgaaggtttgcaattgtgtttttttttcaagaaaccaactcttagttgatcttttctactgttgatctagtttctattacttttatttctgctctgttctttagtatgtccttccttccattaactttgtgcttggtttgttcttcttcttctagttccttgaggtgtaactttaggttatttgaaatctttctttttttgatgtgtttt

SEQ ID NO: 54076 - DNA, 411 bp, Homo sapiens
aattaacgcgggtgtatatgtttacacagattgtaaagagtcttataactctacaatgccaaatcaaacttaacgaaatagcaatacttatgcgaaaaatgacatgctattttcgttaggataagtagggatttttttagtgatacattttcatcttttaattacgaaaaaatataagggccttggttgcagggcctcaacatagaaggcacatgaaaggaaaagcaaagatgctgtgaaaccaatctgtcatagatcaaaagaccaactgactgtgttagaatttacagtactctctgcaaaatatgaaaggatcctgcaagtgacattaaagggcttccaacaatgaagtatgctaaaaacaggaaacttacaagctaaagctactggggaaaaattatgtgtaaaaaa

SEQ ID NO: 54077 - DNA, 407 bp, Homo sapiens
cgggccccccctcggaagtcttctagaattaattaacgcggggtggggggagtcaacccaatcttgactttcttcactctctcaccttccaatagcaattagtcaataatttctatcaactccatcaatgaaaatatctcaggctgggtgtggtggttcactagagactaggagtttgagaacagcctgcataacaaagtgagacactgtctctacaaaaaattagctggacgtggtggcgcatgcttatggtcccagctacaaaggaggctgtgaaagaagactgcttgatcccagaaggtctcttgatcctaggtcaagcctgcactgagctgtgttcatgccactgcactttagcctgggtgacagagcgagaccctgtcccccccaccaaaaaaaaaaaaaaa

SEQ ID NO: 54078 - DNA, 595 bp, Homo sapiens
  misc_feature 9: n = A,T,C or G
acttctagnattaattaacggggttttgttatacagattattttatcacccaggtattaagcccagtacccaatagtgatctcttctgctcctctccctgctcccaccctatatcctcaaggagatgccactgtctgtggtttcctactttgtgctcataagttcttatcatttagctcccacttatacgtaagaatatgcagtatttggctttctcttcctgcgttagtttgccaaggataactgtctccggctccatgcatgttcctgcaaaagatcggatctcattctttttatggctgcacactattccatggtgtccatgttccacaccttctttacacaatctgtcagtgatgaacatctagattgattccgtcaatttcggttgattccatcaattccatcgtttacgtttgctattgtgaagggtgctgcaatgacaattcacatgcatgtgtctttgcagcagaatgatctacattcctctgggcatatactcagtaatgtagccctaatattttaataaaacactgagattcatatatggtttagaccagtgctatccaacaaaacttttcatgataatgaaaat

SEQ ID NO: 54079 - DNA, 314 bp, Homo sapiens
  misc_feature 37: n = A,T,C or G
ctgggtaccgcggccccccctcggaaatacttctagnattaattaacgcggggattattcaatattaccaaatgttccctgagtctttcctaagtggttgcatcactttatacatgctatcagctataatgagacattcatcatcatatttaccactgacaccgcactatataaaaaatctgggctgggtgcagtggctcacatctgcaatcccagcatgctgggctgacgtgagaggatcacctgaagccaccatttcaagaccagtctgggcaacatagagagacctccatttgtacacaaaaaaaactgaa

SEQ ID NO: 54080 - DNA, 612 bp, Homo sapiens
  misc_feature 549: n = A,T,C or G
cgggccccccctcggaagtcttctagaattaattaacgcgggtctttccccatggggcatggtctctaagaaagcaaaagagacagaacttgagtgtatgaacacatatcaggcctttgttttgtgtcaattttacagatgttccaacgggtaaacaacttacctgacccacctcaaacttggggcaagagggaagatatattacaccctttaggacaagctacaaaattttgttcccatttttgtaatctatcacataaggcatactgtggttcttcctcttaaaattcttttatggcttactgtgactttcaggatgaagattaacttctctaagattgcattcaaggctattcataggcttgatactgatcattaatctcttatacatggaccaaactcctcaagtcatttttcattcaatacattaattaggtccatagttaagaaggggatgactcggtgtggtggctcacacctgtaatcccagcacttcgggaggccaaggctggtggacgacttgagaccaggaggtggagaccagcctgngcaatatggcaaaaccctgtcactacaaaaattacaaaaattagctgggcttggtggtgcaca

SEQ ID NO: 54081 - DNA, 593 bp, Homo sapiens
ccccccttcggagtacttctagaattaattaacgcgggggcatgagcctgtggtcctagtacttgggaggctaagatgggaggatcccttgagttcaggaatcagaggttgcagtgatcatgccactgcacatcagcctgggtaaaggagcaagaccccatctctaaaaaaaaataaaactctgttaacaaagtaggattggaagggtcaatatgatggttcaataccttcacattttataaagccaaaacaaacatttattgcacgccatatacaaagccttacactgtgtagtaaaagaagaaatataaacagaataatgacctagacctcgaatagcagacagtctaaatgggctgtcatgaaaactaagaaatataattccatttatgtaaactaaaaaagatatatatacagacctatatttgtatatacataacaaatttctggaaagagatgtatatactacagtaactgttaaagttactagttgaggagtaggaatagagagaagtgttttattttaactttctaccttctgtgtagcttgtttaaactttgaccatagcatctttcactaaaccatacaaata

SEQ ID NO: 54082 - DNA, 470 bp, Homo sapiens
  misc_feature 14: n = A,T,C or G
gggccccccctcgnaaatacttctagaattaattaacgcgggatattcaagaaacttggtaacagcaatagatgaggtggaagaggaggctaggaagaagatttaattttggtatcatgttcaagtactcctattcaaataagttaagtaactcatttttttttaatttggaaagcaggtctggcgtggtggttcatgcctgtaatacctgcactttgggaggccgaggcgggtcatcacctgaggtcaggagtttgagaccagcctgaccaatatgatgaaaccccgtctctactaaaaatacaaaaattagccgggcgtggtggcatgcccttgtaatcccagctactcgggaggctgagacaggagaatcgcttcaacccgggaggcaaaggttgcaatgagccgagatcgtgccatcgcactgcagcctgggtgacagagcaaaactccgtccaaaaaaaaaaaaa

SEQ ID NO: 54083 - DNA, 573 bp, Homo sapiens
tcttctagaattaattaacgcgggtattacattaaaaataaacttaaatttggagcatcaccgccatctgattttaagacttctatagagctgcagtgtagtactagtataagtacaataatagatgtcaatggatagagtccagaaactggtatgcactcatatgctttattttcgaaaggtgccaaaaagagagaaccttgaccctgaaataatattatattcaaaaattaacaaaacagatcttagacttaaaaggaaatactaaaattaaaaatattctagcagaaaacacgtgaaaaaacctttataacctttagaagattttcttagaacacatatagcctccctccccccaaaaaaataaaaataaaattttataagaatttaaaatttctgctcttaaaatgacaacattaagagagtaaaaagaagttgggatgtgattgctgcgcctgtagtcccagctactcagaaggctaaggcaggaggatcacttgaatccaggagtttgaatcctgcctgggcaacatagagagatcttgtctcaaaaaacaaacaaaagaacaaaaa

SEQ ID NO: 54084 - DNA, 503 bp, Homo sapiens
cgggccccccctcgaaagtcttctagaattaattaatgcgggggagtctttgtgagatcagagcattcagaagctcatcacttcacagttccattcaccttgactgcattgggcttaactttatgcccctaaattttagaatttctcttatgcattcagaggacagaggcaaatagcagaaaaattcaaaaggtgtctgtcaggctgggcactgtggctcacacctgtaatcccagcactttgggaggccgaggtgggcagatcacctgaggtcaggagtttgagaccagcctggccaacgtggtgaaaccccgtctctactaagaaaaatacaaaaattagctgggtgtgatggcacatgcctgtaatcccagctacttgggaggctgaggcaggagaattgcttgaacccggcaggcagaggttgcagtgagctgagatcatgccactgcactcaagcctgggcgacagagcaaaactccatctcaaaaaaaaaaaaaaaa

SEQ ID NO: 54085 - DNA, 453 bp, Homo sapiens
cccccctcggaagtcttctagaattaattaacgcgggtttgcccgttattactaaccttaacactaaattcctgaagcagttacattgccctgtcaatcttcagccaaaaaaaaagcaatttacactctgttacttactcactatattctgctctacttctctagaagagactagatcttgaatattgtgtgaaacataccaagggcactccaggagtatttcctcttgcaatctcccatttctcaaaagatgagggtagtttgatatgcttgttctaaaggaacaacaaaatacaaaactgattgtctaagcagaaatgacgggctagtgacagtattatagacttcagtgacaatcccagagtaatgacactaggtgaggataatagaacacagttaaagctgtgtgtgtgttcaacataaaaatttccaaacttgcatcaaaaaaaaaaa

SEQ ID NO: 54086 - DNA, 483 bp, Homo sapiens
ccgggccccccctcgaaagtcttctagaattaattaaacgcggggtaatgtttacagttaatgtataaggtaaccatcattcatattaaaaactgtcaattcttaggaagatttccctttgcagactgacatgccttttatcactgagactgctatacatagtttttcatcgaatgttaaaggaaatcattcttatcactatttctttatcaagtatgttcacaataccagcagctacgttagggtcatgctgtaggagtagcagaattatccacggcctgatgaggctcatgccataaggagcttgcaggaactgagtgagactcaccaatgttaacgggagggtcatgtttcccatctcatgcctgaacttaactggattgaatctttcgtggttctattcacactgtttttttttcttttttcctttttctttctttgagacggagtctcaaagaaagaaaaaggaaaaaaaaaaaaaaa

SEQ ID NO: 54087 - DNA, 563 bp, Homo sapiens
ccgggccccccctcgaaagtcttctagaattaattaacgcgggggaggacaacagtgtatcttcctattagcagcatcctaaatgcaacagtgtactgggttatttattatttaaaaaattctaattattagcattatcgcaacatgctacattctttccaaaatgtgagaggtatatccgtaaaacaaaagctatggtaataactgttttggtgactaattttaggtcttttatgtgtagattttagaatttcatttgttatctattattatcataattacttataataaggaaaaaacccctcacatttattgaaaccctagtatggggagggaagcgctactaagttgtaaatagacatgctctcacttcagtgttaataattctttacttagttatacttattaaggcaggagaatcgcttgaacccaggagatggaggctgcagggagctgagatcatgccactacactccagcctgggtgagacagagcaagactccgtctcaaaaaaaaaaaactgtgtttcttctgaagtacagcataaacaaaaaaaaaaaaaa

SEQ ID NO: 54088 - DNA, 487 bp, Homo sapiens
  misc_feature 9: n = A,T,C or G
acttctagnattaattaacgcggggtgtgggatcactgcagatggtcaatgggggatgactttctctgaggctttgtttaaagataaggtacataaaatagacatacaaatgttaaaattaatatagaaatctgaaaagtaaagaattccattaacatatacacttcatttttatacatttcttggctgggtgcggtggctcacaccagtaatcctaggactctgggattataggcaccaccattacggccatggtgagccaccatgcccggcttattttttttttttttttttagagacagcatttcactctgtcaccaaaagtatagtccagactggtgatcatggctcactgtagcctcaacctcgcaggctcaagcaatcttcccaggaggtagaggctgcagtgagctgtaattgtgccattgcactccagcctgggagacagagtgagactctgtatcaaaaaaaaaaaaaaaaaaaaaaa

SEQ ID NO: 54089 - DNA, 593 bp, Homo sapiens
cccccctcgagagtcttctagaattaattaacgtgcacaagcatgggatcttaatcagggatacaaactttaagtgagatcatgcctgcctatgtatgcttgtccagtgactcaagtgaacttccagcacaaaattttttattcatcctttcagtatattattttgcactgttagatctcagaatgagtccaacctgtgccacttaccagacagctgattaaatttaggaaaaatacttaatttcttcaagccccagtattctcatctgcattttatacaattcttatgaggatgagtacatagaaggcactaagtaaatggtagacaattcaatctacttttgatatatattttaatgctcctgttataagtgcaaatttagactaagggggtctgcagtgaagataactcataccttagcttttccttttcaggttcacccatatttgtccctcgacctatgactctattgctgtccttctgcaggcaactcagtttaggataattgccttaagatatgtattggctacggagaatctcagtgtataagtgaacaaggcatatattttcacagtggcagaatcctttgcta

SEQ ID NO: 54090 - DNA, 600 bp, Homo sapiens
cccccctcgagagtcttctagaattaattaacgcggggaaggacggaaggacggaaggaaggaaggaaggaacgaaggaaggaagggaaggaaggaaggaagggaggatggaaggaaggaaggaagatagataagtaggtaggtaagaaccaaggatggaaaaaaaaatgtatgccaggaaggaaaggaatttaataaagaaggaaggaaattaggaagaaaaagaagggagaaaggaatgaaacaactaagggaaaaggaaaaaagagaaggaagagggaaagagggaaggaagaaatcaaaggtttttgaccaagattgtatcttagagacattaatttaagcatcatgcaaaagaacgtgtagttgtttcatcctggtgtgcctctacctcactttaggagatcttctaaagtttctgtctttgggccaagaagacattcagttttgggtggcccttaggaattcactctgctaatcgtggagaagacagggctgatggaggaaaatgcctgtacacatttctctcatggcaccccttttcccagtagcatgataaatcctggaagtcctgatggaatattttaatcacagcttgcc

SEQ ID NO: 54091 - DNA, 524 bp, Homo sapiens
ccgggccccccctcgaaagtcttctagaattaattaatcaaggcctaatgctaaaactgttaagtattcatcatgctactgacaaataaaatctgaatatttgcatataaagtaaaactgaaacatggattcatgcttgtgttctagattctttcacataacaactgcattttatgtgtaatgggcatgttttaagggtaatgctttgccacctagtgagaagatcattggctttagaataaaacagacataggctctaatcctgcccacaagttacctaacatgctcctcatttaaacttctgtgcaagtgattgaaataatttctactttacagtgctgtgagacttgagataatgttgaaaagctcctcacgtaataactgatatgtagtaggaactcagtgaccaaaaaatatcacttattaccactaaaattgatctatgtacatatattcactgaaaccttctgtaaatggatggatatatatgtttatatttagtaaacagcaaaaaaaaaaaaaaa

SEQ ID NO: 54092 - DNA, 558 bp, Homo sapiens
  misc_feature 23, 36: n = A,T,C or G
tgggtaccgggcccccccctcgngaatacttctagnattaattaacgcgggttctaattcagaatatgcagactcagtgctttgtgcctaaatattgaggctctaggaaaaccagttccccgctttcaaggcattcaccttctttttggaacttcggcttcagcttatactatgaggggcctgggaatttgtgtacaccccacaaaaacagccatcatcccttggccaccctttgggtccactgcatggatgccgtggcatggtctgccttcgaaaagtggtcccagagaagatatttgcccgcatatgaggaacaggggcaaggccctttcgcagggcaactctgggctctctggtagctgaaatatggtctaaaggggaaatgtgggctctaggtggaaaagttctattggcccctgcacaagtctcaccccacagggatggtgtggccagagaaagtaaaagtaggacctctaaaaaaacagagtccagggaagcactatactcctcttcagtgacctaggatcctcagttattacatattttcccatacttttc

SEQ ID NO: 54093 - DNA, 585 bp, Homo sapiens
cgggccccccctcggggtacttctagaattaattaacgcgggctaaggctcagtcccaagttccagactgtttttcatttctactcaatggttcgttgctgtaaaattctacccaagaaagtctctgtccttaagcaagaaatcacttgaaggccataccccaaagaagagctttcgctgtttagatacgcacccttcaagtcctccatccattaacatgctatggatttatggccagcgctgtgcagtgcccccagcgcgcagacaccactgactctgcaacatgcaatctgctaacacatggccactgggacagccacataacacccaggccctctgacgggctattcggcatctgtggcacacgtgtgccccagtcctgcaccgaccaccacggaacatacgaccagactgatgccacctccgccctgccaagaagcacatactcaattctggaccagggggttggaaccccaaagcatcataaacttaagcaagcgtttctccagagagatcctatgaggctcccggacatcgttctgtgtccacaggatcttgggaccaaaaaaatgagagaagcaagaa

SEQ ID NO: 54094 - DNA, 589 bp, Homo sapiens
ccgggccccccctcggaagtcttctagaattaattaacgcgggtatcaagttgaagaagttcctctctatttctagtttactgagagtttctaccataaatggtgttggattttgtcaaatgcttttgctttatctaattatgcaatcatgtgatctttcttctttagcctgggcgacaagaacgaaactctgtctcaaaaaaaaaaaaaaagtttatagaatataatttctcaatgtatgttccaaaaaacattggaaccttttacatacagaaataaaaacatgccctggtcaaataccgtgggaaacacttcagattatatatccctcctgtacgttaaaggatcagaggcacctttccataaagaaacctgtttaacttttatttaccaaattttatttaagcataaaccttttctccctgttatgtcacctgttaccatcttttggaacacactttgaagagagcactggatggaggaggggtccagccactggccttggtccccagagagcttcccgctggagacctggcccttccttatgtgagcggttaacctggggaaacccagctcccctctctgagct

SEQ ID NO: 54095 - DNA, 530 bp, Homo sapiens
  misc_feature 16, 30: n = A,T,C or G
cgggcccccccctcgngaagtaccttctanaattaattaacgcgggaatactgctgagccccaagacacatttctatagattgtagtgatttcatgcacgtgcagtaggaaaacattttaactatttatgaattctgtggtgagaggaggttgggtaaagcagaattcagttttgagtagagtgaagacactttttatttgggaaaaatgccttaacatggatattgcttatgaaaaggtaaagttcagagtatgttggatgaaagaggtttacacaaagaaaaagaaattgctctgctcagtagtaaaaaggacagcatccattgactaagcaggtggtactgagagattgttaagctaactaactctttgcttcccctgggtgatggctgacaggggcaaaagacaaggtcactggggtatgataagagacagagtaaaataccctgatttgctgaggtctgggattcagccttagggtccaggggaaagagggagatgacaaccagggaacttctgaaaaaaaaaaa

SEQ ID NO: 54096 - DNA, 603 bp, Homo sapiens
cccccctcgagaagtcttctagaattaattaacgcgggccctttcctgtccctggacagtgctgggtaagccttgtcaagtccacagatccccttcccagcatcttgtcaggttcttccctgttgatcagttttcttctgcagaacttggaacatggagggttagactataggctctttctcacttaattctgcctcatttaaatttatgtgcagaaggcaagggagaagggtaaattgcctacctcttacgtatgattgacttattacttagcttcttgctcggtaccaccagtataggaagtaaatacgattattctgtaaggtaaggctctacaaggttatgattggacagtcatgggactaattagtggttaagattcaaacttgggtatctgaccccggatcctatcttatttctactatacttcaggcctccctgattttcttcctttgactagggaaccaccctaacccttaaggtgacttctgtagacatctaagctcatccattcctaatataactctcaagaggccatagactttgaggttcttgctgatcttttcattgtattctcttgtgcaccaataatatacttgaaat

SEQ ID NO: 54097 - DNA, 623 bp, Homo sapiens
  misc_feature 28: n = A,T,C or G
ccgggccccccctcggaagtcttctagnattaattaagcgggggtggctgacccgtccgtctgtgagaacctcagggagcctccaggctccagtgcagtgcaggtatcacagagggcagagtggaaatgggactggaacaggtagaataaatgaagatccagcatggacaattaatgcccctccccccaaatcatggatgcagccagtcacttaccccaaagaaaaaaatcagagattctctccaaagagagttgtgtacactgcctggtgagagtgggtgctgctagtgtagttgtcggtcctctggaggaagcctccctaccgtggcatttaaaggtccaccagtgtaatgactagctcccactctaagctctccccacatgcacataaccaccatcagcctgtccataaaactcctttagatacgaaaggagagaacgcctatttaataaacggttctgggaaaactggctagccatatgtacaaagctgaaactggatcccttccttataccttgtacaaaaattaattcaagatggattaaagacttaaatgttagacctaaaaccataaaaagcctagaagaaaacctaggcaataccattcaggacataggcatgg

SEQ ID NO: 54098 - DNA, 404 bp, Homo sapiens
cgggccccccctcgaaagtcttctagaattaattaacgcggggttaagtgaaggctggatttcagttcaaactcacattcatttgattctcttatgaagaggtgaaaggcttccattacatttactattctcctgcatatatttaatgagctgattacttttgcttcttacagatagtctacaaaatgtatttgagtaacttagtctttcctcgtgctctttaaaaagcaattaaattaaaacgtgtggaaatggtttgtggttgttgttgttgttgtcgttgttttttcagatggagtctcactctgttgcccaggctggagtgaagtggagtgattttggctcactgcactccagcctgggtgactgagcgagaccccgtctcaaaaaaaaaaaaaaaaaaa

SEQ ID NO: 54099 - DNA, 602 bp, Homo sapiens
  misc_feature 28: n = A,T,C or G
cgggcccccccctcgaaagtcttctagnattaattaacgcgggagggagtaagattaaaaaattagagagatttcttgagtttttttttttccggagttacatgaaatgagacatctctagagtacatcagaatacaatttcgattcattcttaacaaaccatgttgcctgtctgcagtggataaaggaaggaggaatgcacacttcttgatttgttactgtctgccagtgtactaaatctctcctatatattaattcacttagtcataggtcatagaaggcatttttacaagagatgaacaagcttttggctgctctgtttaatatattacatctttgcatttatttaatcagaattatattgtgtaaataaatgagggttttcatgaaaattgaatgttatgttgtaactaatttattttgaaataatttaacagccattgagttttacactaattgctttatgagattaatgaatttacatagttatttgagtctcattacttggcagagtatagaaaaatgaagctaataaacttttccaagaacttcccttggcatgaagcaagtggaaaataaaattctgctttaaaacaatggca

SEQ ID NO: 54100 - DNA, 585 bp, Homo sapiens
  misc_feature 80, 537, 550: n = A,T,C or G
cccccctcggaagtcttctagaattaattaacgcgggcagctcattttgacaaccattcattttttaaaatatcaaactngaaaagaaacaatctcctggttgtaataattatatacagctgatttctctctggtagataatgctagacaaagacaaggcatttatcatagataaacacactgaggcagggctgagacaatcaaagtgaaagatcttttttcttgtgaggcagttttattccagtgaccttatttctgttattcaaaaccactaagaggaaactgatgaatatttgagaaagacaaataactctggtgccccatattactcctaaaaatatataaatgtcctggtttaaaaatcagatatgctaatttatttaaatgcaggagttccaaatgaaaaatatctttgaggaagccccaggttattttcctcctggctttcaggaatgaaattaaacaattaaatatcagaaagcataaaatgactttaaattgttttttaatccagtgatttatcaggtcacaatccanggccatagtgaangtgagtggcgctgttttcacttgtgccttcatgta

SEQ ID NO: 54101 - DNA, 512 bp, Homo sapiens
  misc_feature 426, 499: n = A,T,C or G
taattaaatagtagcattaattttaattgggcagatgaaaatttgtctttataaagtctgggcaaagagttttttgagttaaattttaataattcttgataatatccagaaataaaaactgctagtgtttactcttgtctgtgcttagaagaaagctacatagacatgattagctttatttctgattaaaagaaagaatgtatagaaataattaaaaatataacactttgctttttaaccgaccaaaatgggagaaaaacaattcttagacattgaatagaagcttttacatcttgcttagaagatttttggtttttgttagcagaaccaaatgtagaatttaaactttgtcagaacaaaattggcacagatatgtagtgaaaaaaatctacacaaattaaggtaggtgtggatataaaatatatntaagaatggcctggcgcagtggttcatgtctataatcccagcactttgggaggctgagacggggcatcacctngagtcaggagttc

SEQ ID NO: 54102 - DNA, 610 bp, Homo sapiens
gggccccccctcgaaagtcttctagaattaattaacgcgggtcttttcatatattaacccctccataaaaaagatcacgctttattgtaatttttctttaactctcatttcctttcccagttttattgtatttgcttgttttttgtgtctaagacagacgtttttaattcctctttcccatttggaatgtttgtttttgtttttatttctttgtgtttttttgctgccattttagttttgaaattttgttaagaattggttgtgtattcttataatctttacttttaaggataaaacataaaaaataatgaatattaagatatgatattgggcaggcgcggtagctcacgcctgtaatcccagcactttgggaggccaaggcgggaggattacgaggtcaggagatcaagaccatcctggctaacacggtgaaaccctgtctctactaaaaatacaaaaaattagccgggcgtggtgttgggcgcctgcaatcccagctactcgggaggctgaggcaggagaatggcgtgaacccgggaggcagagcttgcagtgagccgagattgcgccactgcactccagcctgggtgacagagcgagactccatctc

SEQ ID NO: 54103 - DNA, 587 bp, Homo sapiens
  misc_feature 9: n = A,T,C or G
acttctagnattaattaacgcgggtcttccttcagttatcacattcttcgtggtcagattcaaccacttctaaaaaacattgctatctccatagtgtttataaaatctttcctttaattatccaaaaggaatacattccttgtcaatgcaaataaaatggatgagtactgctaaaagtaacccaagaagattatcttcttttttttcttttttttttctgagactctagcaaaagaaccaagaggacttcctttagatatatttaactccttggtgaagtcagccagtggaaaccagcataaaaagatatcttttgtctaatccaaattgtagaaaaataagattcatgaagcaaatgaataattagcctctcaacttctgatcctggcctttcaaaatacgaaacaatgacaaaagaaaaagttcaatgagcaaacttttaaatagagtaactattcaaaaggagtagatatctctagatttaatttccaaggaagcacaaacttttctaaaaaggcatttttttctgatagtgctatccatctttcatgtatatataagtcgctcttgaggtaaaaaaaaaaaaa

SEQ ID NO: 54104 - DNA, 547 bp, Homo sapiens
  misc_feature 510: n = A,T,C or G
taattaacgcgggcacatagttatttataaaaatgtcaatgatttaataatatattgtgccaaaattatgtaatattaactgagaagaaataaaatctgtgtttagaaaacaattatattgccttcactgtttggtatgtgggaagaaaggaatgctcattttatctgcaggaaaaatgccaggattcttgatagaagtcttcaaattatttgaatagcttttatccttaagaattcaaagggattaaaatgagaatcagcttttgaggctcaaaagaacctcaccaagcaaaaaaaggttcttataaaactgaaattcagagttgagtataattgtctaaatttagcttgtgaaatgcataaaataagctgtataatacccaaaatgctccttagaaagatgagttcatgttgaaacttaaaaaaaacaacaaaaaaacccccccccccaaaaaacagatgaaaagcctctaaagatttttttttttaagtttaagcttatgttatgcntttcgttgttgctctggtctcggctaaaatttttctc

SEQ ID NO: 54105 - DNA, 595 bp, Homo sapiens
  misc_feature 18, 31: n = A,T,C or G
accggggccccccctcgngggtacttctagnattaattaacgcggggaaagaggggctgtcaggatttcacatttctcacagctgggcaggaaacccttctttaaaggggaatctgagtctactacaggggtcatacattattcaaccctctatgttcaacatctgtttgaactccgatgatctgccgaatgcacatcttcagtagtaagataccaggacaccaaacaagactaaaaagccaaacttaactacaatagatgcgcttattttaaaaagcacgtagattattattatttctaatttcagttgtattatacgatattttaaatatgattatttatatgtttaaaatcttttatgaattgtaaaactgttatacaaaatgcattttagcacgacaaaacaatgcagtgaagagataaactatgggagaaaatatttgcaaccatacacctgattaggggttaatatccaaaatatataaggaactcaaacaactcaatagcaagacaacaatccaattttaaaaaacgagcaaaggacccaaatagacatttctcaaaagacatataaatggctggctagtatgtgaaa

SEQ ID NO: 54106 - DNA, 547 bp, Homo sapiens
cgggcccccccctcggaagtcttctagaattaattaacgcgggggttgaggcagcaggattgtttgagctcaggaggttgaggctgcagtgagccatgattgcaccactgcaccccagcctgtgcaatgaagtgagacccttcacgcttcacacacgcaggaagttacaaacaagcaaacggaaaaaaaaaacaaaaaatacattacttgactattagaaaacaaattagtatcccacatatttatagataataaatctgtgaatttgatgtttctgagagaaatataatgaaacttcaataataaacaaaactaagggaagtgaagagacaatctgtataggtctatatttattaaagagatttaatcagtaattaatagccttccaaaacaaatccccaggcccagatgtggtgaattctaccaaacactgaaggaagaaattataccaactctctacagtctctttcagaagatagatgcagagggaatactttgtaacttactgtatgaggccagcattaacctaataccaaaaaaaaaaaaa

SEQ ID NO: 54107 - DNA, 591 bp, Homo sapiens
  misc_feature 28, 546: n = A,T,C or G
ccgggccccccctcgaaagtcttctagnattaattaaggctctgcaatagtgtaaactgatcatgtcaagcaactaaacacttgcttaatattaaaatctattcaagcttcactaatgctaaagttaaccagacatttcataattcatccaagggaaaatgtcattcaaatcaataaaaacataaaatttatcctcttatttcactaaactttttttttagaagccccgcgttaattaacgcgggggaggctcttcagttgggccccaaggataaggctactgatttgatactaaatgaatcagcagtggatgtagggatagctgattttaaaacactcggctgggcacagtggctcacacctgtaaacccagcactttgggaggctgaggcaggcagatcatgatgtcaggagtttgagaccagcctggccaatatggtgaaaccctgtctctacaaaaaatacaaaaattagctgggcatggtggtgcgtgcctgaagtcccagctactcgggaagctgaggcagaagaatcacttgaacctgngaggcggaggttgtggtgagccgagatcgcaccactgcactccag

SEQ ID NO: 54108 - DNA, 439 bp, Homo sapiens
  misc_feature 22: n = A,T,C or G
cccccctcgaaatacttctagnattaattaacgcggggtgaggtgtagaaagggagatcctattcacataacagaatcctataaactgattaaaaaagaaaagaacattgaacaaaaagaacaaaatactgctatcttcaacaacatgaatgaaatacataaatgagtaaagaaggcaggtacaaaaggatacatactgcaggtctccagataaaataagatctggtgataagactcagaaccagggttaaatctgtgggagaatgacaggagggacacaagggggctttccggacagttggaaatgtccctatctttgtcggggtgatttttacatagagatatacatatgtgaaatttcactgaattgtatacttaagagttgtatactttaccaatgtaaattatacctcaagttaaaaagttaaaaaaaaaaaaa

SEQ ID NO: 54109 - DNA, 579 bp, Homo sapiens
  misc_feature 17, 28: n = A,T,C or G
cggggccccccctcggnagtcttctagnattaattaagatttcacaatgagtaagtggtcaattagaacccacaatggactcaaaattccgtgctactcttgtgatggtattatgccgtctctttgttttcttaagtaggatgattttaaattgtggacttcttagaatatgattatattttaaaaaatctctgcggatgatagaaatgttttatatcttgattgttgtcgtggctacataggtacatgcattttcaaaactcatcaaatcctatgcttatgatgagtgcacttaattttactcctcaataatgttggcttaaaaaactaaaacaaaaaatctattttcaaaaaatctgtggacatatttaccgtgtaaaacaaagtgcttgtttctcaagagatactactgtgttagagatataacgaatatgacaacagataagaaataaaacaaaaatttgttttttaaaattttctttttaaggataatttttaactgtaccttattctcaatcatatgattaaacaatgtgtatataccatactactgccaattttcagataaaaagctttcat

SEQ ID NO: 54110 - DNA, 486 bp, Homo sapiens
cgggccccccctcgaaatacttctagaattaattaacgcgggccccagcccctcatcctccctttggggccccaaggtcagcagggcaggtccagcggctgccagtcaaaatgctgagcagaaatggatacaatattatccagggaataacaaaggaagggcccacgcagaaatttatttgtactgatcaggcaaagcaaaggtaaagggcagagaggaagtgctgtcagccggcctgaaacccaagaaagttgccattccgagcacagtggccccttatgccccaccactcctcaccgcagcagtagttaaagcaaacacaagcccttcactgccccgtcagttacaccttccccccaaaattacacaaactttgaaacatttttctgagagaagatggatgcttcaggagacttgaggtcaaggctaggctgtttaaagtctattatcaacaaataaacatttactgcaaaaaaaaaaaaaaaa

SEQ ID NO: 54111 - DNA, 506 bp, Homo sapiens
ccccccctcgagaagtcttctagaattaattaacgcggggttacaacgctgtgatttagggcagccaaatttccatttggaagttaagaaaatttttaaggaaatcagacttttgaattgtccttcccacttaactctctcacagccctgatcactggctctacttcactgcacctgccatattggtagctattccaaaacaggagagaatggccaggcgtggtggctcatgcctgtaatcccagcactttgggaggacaaggcaggcagatctcctgaggtcaggagttcgagacaacctggccagagtggcgaagccctgtctctactaaaagtacaaaaattggctgggcttggtggcaggcacctgtaatcccagctactcaggaggccgagacaggagaattgcttgggcccaggaggcagaggttgcagtgacccgggatcgcgccattgcactccagcctgggtgatagagcggggctcagtctcaaaaaaaaaaaaaa

SEQ ID NO: 54112 - DNA, 619 bp, Homo sapiens
  misc_feature 39: n = A,T,C or G
gactgggtaccgggcccccccctcggaaatacttctagnattaattaacgcgggatattacaaggagttacatacaaaattaatgtatcacctaatacatacataaaagtaacctagaaggaagtataatttggaaggaaaagagcaggttgctatggtaaagaataatagaggcagtttaaatagataaatggcaatgattatctaagggagtgatattttagactaaaaggggccaactaagggaagaaccagaaaaagaacatttcaggtgcagagaacaatgccacgaccttagacaaaaatatttaattttgttctggagtgggactaaaagccaggtgactacgtgatggtaaaaaagaggagagtggcatgagatgaagttgatgatatagttggggtgaaatcaccaaaatacctgaaggcttctggtaagaagtttagattttactttgtaaattggggctccatgaatagactctaaatgagtagcaacatggtcatcatagaatttaaaaatgatatttctgacagcttggtagagatagaattgttagaatgcccaagaacaaaataagaatggaaactagttaggaagaattgtaatactccaaag

SEQ ID NO: 54113 - DNA, 563 bp, Homo sapiens
  misc_feature 537: n = A,T,C or G
ttctagaattaattaacgcggggtgggggaaagaaaaaaagcagatcccttacaatataatagaacaaaaacaaaatctacccagttatttgctggattatctgaggcaatctctctggtcctagttaacttggaatactgaaagacactctatacgcctgcaggtgggagacacaaattgttcttcaactgaaaatactcttgaaatgtcaacctgcctcctgagaagtactgctgaacacatagctctaaggaagtgtgttcaaaaaaaaaaaaagcggccaggcgcagtggctcacgcctgtaatcccagcaccttgggaggccgaggcaggcagatcaccaggtcagaagatcgagaccatcctggctaacacggtgaaacacccccaccaaaaaaaatacaaaaagttagccgggcgtggtagcaggcgcctgtagtcccagctactcgggaggctgaggcaagagaatggcgtgaacccaggaggcggagcttgcagtcagccgagattgcaccagtgcaccccagcctgngcaacagagcaagactccgtctccaa

SEQ ID NO: 54114 - DNA, 587 bp, Homo sapiens
  misc_feature 566: n = A,T,C or G
cccccctcgaaagtcttctagaattaattaaccgggggaggtatagaggtctcacattttgtaaagttttatctcaacttgacattttgagaaactatcctaaagggtagaaatcctcattcagggaagttaaaagtacaaacaagagaagaaaaaacattaaaaaatgtgggaatatataatggttgctaatacaactgtatataaaatgaccaagaatgttttctccaatttcatctaacaaccaactaaagatggaaagttaaaaataggagggtatgatggaaaaaacagaaacaccattcacattaatattaatagcactgcactaataagtagatattatttttccctaacaacattaagaaacagaattctaacagtggccacttctcctttcagagggaaatgtgaggcaatgtattaaatttactattttttttttaaaacagaactaaactcaggctgagtaaggaagcattttccctcctactgaattctgatgacatttctaacagttacttattaaaactgttttccctttcaggaaagagaaatgcatgtangtattcattcttagttaagct

SEQ ID NO: 54115 - DNA, 484 bp, Homo sapiens
cgggcccccccctcggaagtcttctagaattaattaacgcgggtgaacagagacaaaaacagtatagtagctgggtatagtggtgcatgcctgcaatcccagctacttgggaggtttaggcaggagaatcacctaagaccaggagtttgagaccagcctgggtaacatcatgagactccatctcaaaaaagaaaaagaaaaagaaaaaaaaagagtagagaaaatatgaaaatatgataggtcagagagaactctctgataaactgataaacacacatctactggtatgttagcaggaggtttgtgtaaaagcctgaagtcccagcccaggcaacatggaaaccctatctctactaaaaatacaaaaattagtcaggcatggtggtgggtacctgtagtcccagctacttaggaggctgaggtaggaagattgcttgaatccaggaggttgagactgcagtgagctgagatggcaccactgcac

SEQ ID NO: 54116 - DNA, 605 bp, Homo sapiens
gggccccccctcggaagtcttctagaattaattaacgcggggactatctgactcaaattttcaagaggagatttcttaccagggaattgaagtacatgctcaagctgcttacatgcccatatgttctgtttccacttaggataaaatattttctagtccagtactacaaaatccttccttgtatttgacccttcacacagatctcaatacatgtatctattgctattcaagtcatgatatccattgcaatgcagaatggtaagtaatttattcacagtaccgattgatattacaaacttttaagcagggtacggcaaaagcattagatactttatgtattaaagaagctgttaactgttttaacagataactaactcccattcccaaaattgtatagtgtaagctcaaaagcttacactatagaagtttatatctctccttggtaagatctgctcaggactccctgatcagtaagtgactctcttccaatgtctggtattctcacacagagactactgtgtatgtatttagatgaaaacaaatgtctgtgttactgggaaactggattttgacatgagagaaataatacataattaagagagaaa

SEQ ID NO: 54117 - DNA, 568 bp, Homo sapiens
  misc_feature 517: n = A,T,C or G
cccccctcgagagtcttctagaattaattaacgcggggtacaattcacaccaatgacaagcaaaatcttttcaagaaaaggaaagatgagaagcacagaaattcaaacacacggtgaactgatcggcacacaaaccagtttagcaactcttcaaggtgaggtgtatttgtgcctcttcatcacgcatacctttgaaaaaaagtaattaaactacagtctaaaggaaagttttatttgtcaaacttgaatctgcaataacagagctagagggcccccagttcctggcccaaagacctcaacttgtatttgatacagctgcgtgtgatgctgtgtatccttttatttaaacacaatccattttcctctgtcagtctacaattagcatatgagtcaaaataatattaaatttcacagcccacagtgctgcacaattgaatgaaaactgactccttttgatgttaatcttgttttttatttgtgatgtaatgctcaaaatcctgctggctgaagtcaattntattttaaagtgctcaaagacagtattctcatagtttaagctttttttttt

SEQ ID NO: 54118 - DNA, 610 bp, Homo sapiens
cgggccccccctcggaagtcttctagaattaattaacgcgggggcggtttgaaaagctaacttgtttcccacaagtctaattgtcccactgggcaattaggatctcatattaacttcctaggttgaaaggacctaggaaggcccacaaccaattccactctcccaatacccagcagaattagtctccaatgaaaaggcaaaagattcatgataaaaggataatccacaagaaaaatcaccttgctcaactgcaaaaggcagttcactgaagtcatgaagatgaaaacagagaggctatttacagaaacataatttgaggagcaactcactttacagctagcataactaagactgggaaaaaggatatatcttatcttcctacatgggtatttggtccaaagacccagcattcctgtaacatggattcatttttctcttcctggcaacatttccaggtgtggaaggactaaaataacacaggccactattttttattttaacattctcctttcactaaaactactgatgtcttcttcctgcaacaggattttggtggaacacctgcttctctgcattttctagcttatttcattttatgccagatacgtga

SEQ ID NO: 54119 - DNA, 593 bp, Homo sapiens
cgggccccccctcggggtacttctagaattaattaacgcgggacacacccttcagccaatacatgtaatacatataaacaaactgaatcagtcctgggacataataatataagttagtgttatgcatgtgtgaatagttaaggggaaaaaaactagaaatatatgctgttaatatgggcctttggtacaatgctcaatatctgaggaaggatgaaaaggaagaagcagtcagatttacctttgctaacacagactcacataaattttcatttcccacatttgagtattacttgatttttttaataatcaatattttcagtggttagaattacatggtccttactttaagaaattaaaaacagtctgggcgcagtggctcacacctgtaatcccagcactttggaaggccgaggcaggtggatcacctgaggtcaggagttcgagaccagcctgacaaatatggagaaaccctgtctctactaaaattacaaaaactagtcgggtgtggtggcacatgcctataatcccagctactcgggaggctgaggcaggagaatcgcttaaacccagaagatggaggttgtggtgagcct

SEQ ID NO: 54120 - DNA, 596 bp, Homo sapiens
  misc_feature 27: n = A,T,C or G
cgggccccccctcggggtacttctagnattaattaacgcgggcctgtagtcccagctacccaggaggctgaggcaggagaatggcgtaaacccaggaggcagagcttgcagtgagcagagatcgcgccactgcactccagcctgggcgacagagtgagactccatctcaaaaaacaaaaaagccttaatatttcaaaataatttttgaatgacagaagaaatgcaaaaatagcttagagttccccatacccctcattcagcttttcctaatgttcatctcttacataaccacgatgcattgatcaaactaagaaattaacactgattcaatattcaatactattaactaaactacatgttttatttggatttcatcaatttttttactgatgtcttttttctgttcaaggatccaatccaggatacatgttgcattttaatattatttgtttttaaatatgtaaacattttatgattatttattcttccttggtaagtactggtactctgggcaaagacttaatccttctccctatcgtcaaagaaagcaatctttgacacgatcttctggcctccaaagggaacagaatttgatc

SEQ ID NO: 54121 - DNA, 577 bp, Homo sapiens
  misc_feature 26: n = A,T,C or G
gggccccccctcgaaagtcttctagnattaattaacgcgggggaaggttacccttttatttgcaaggggtatatgtgttggcagtattctatttgttaaactgggtagttaatgcattgtagtttatgttacaattattatctctaaattaatgctttatatacacttttgtgtgtatttattaataaaatattaatgcagtgtgcaagatggtaagcacgatgcatattatgtctccgtttgtattaaagggagagtgtggtatgtttaaaatgtctgtgcttatacatggattgatgattttttgaaggacaaccaataaattggaaacagtggttatattggggggaaagacataaataagatagaaattgtaccctttgagttcaggcaaaatactaccctaatgagggctccctacccctttcatccccccttgaagaatggcttcagtcatttagtagaagggctaagcttttgaaaatattattttcttcttttgttaaatcagcaaaatgtcaggtatgtctgctttttctgagttgtgtaaattccacagttaggctgatgcaaaaat

SEQ ID NO: 54122 - DNA, 429 bp, Homo sapiens
cgggcccccccctcggagtacttctagtattaattaacgcgggcatccggtgacagcaaggccctcgggtacactgggggagccaggtacatgctcaaggcccagtgtagaggggctgggcctgaatggcagaggggatccccgcagcctagagctggaggctcccaagccctggagacatgggggcctttggaaggaggaggcatgagtgctgcctcggctgtttttggcttaacgctgaggtgtccctcagcctcccacctgcccagagaagaaagtcatgttttttaaaagatggagatccggccgggtgtggtggctcacgcctgtaatcccatcactttgggaggctgaagccggtggatcatttgaagtcaagagtttgagaccagcctgtccaacacggtgaaacctcgtctccaaaaaaaa

SEQ ID NO: 54123 - DNA, 523 bp, Homo sapiens
cgggccccccctcggaagtcttctagaattaattaacgcgggggcctcgcacatctgctccaaacctatagaaatatgttttaaatccccccacttatagctcggattgtgtagactttctaaaactcgaggctcatcgcagctcactgcagccttgacttctgggcttaagcgatcccgctgccacagcctcctgagtagctgggaccgcatgcgtggtggcgcgtgcctgtggtcccagctgctgggaaggctgaggcaggataattgcttgaacccctgggaggtggaggttgccgagagctgagatcgtgccactgcactccagcctggtgacagagcaagccttcatctctaaacaaaacacaaaagaatggttaactgggtgtggaggcgggttcctgaaatcccatctacttggaaggctgaggcaagagaattgcttgaacctgggaagcggaagctacagtgagccgagattgcgccattgcactctagcctgtgtaacaaaagcgaaactcca

SEQ ID NO: 54124 - DNA, 548 bp, Homo sapiens
  misc_feature 49: n = A,T,C or G
ccgggccccccctcgaaagtcttctagtaattaattaacgcgggggggngagagggaggaatccaaacattttccacacaaaaatcatgatcctcatgtagtaaagttttatactttgctgttttcatggccttcttgctgctaatctccaggtggtgtttttgccttttggcttccctcttgtttatgttaaatatgtcagtaattgaattccaaaacccttgcaaactttggcagccaatttataatcaatttgtttattctttttgtcattatgattaaccaagactagattttactttgcagatttacttaaatttgtggctgtttaacaactcttcattctgctcagttagtcttcgtaacattaggttagaagacagatgtcattttcaaggagagatctttatgttatgtctgataacctaatctgcctcctggtttatctcttgcatttgctgtttgtgtattctgtgttctgccttgatccttttactgatttctgtgttgacctctgttttttagctaccaatttaagctggaaagta

SEQ ID NO: 54125 - DNA, 311 bp, Homo sapiens
cccccctcgaaagtcttctagaattaattaacgcgggtggcctagaattcctatacttaagcaccatagtacagctctctgaatactcttctactaaataccttaacagttatttctcaactttcttcatgcctttgctttaatgcaatctcagaagaagggtcacttttctaactctatataaaattagaagccttatcatctgtatcctcttaccctactttatctttcttcataacaccaatcatggtttgcatgcatatttatttgttcattgttcatctctctttctcctaaaaaaaaaaaaaaaa

SEQ ID NO: 54126 - DNA, 560 bp, Homo sapiens
  misc_feature 433: n = A,T,C or G
ccgggccccccctcggaagtcttctagaattaattaacgcgggctagacttaatatctaagcatgatttgtaaagtagtaaaacatgtcattatatctctaaatagaaataggttttaggctttagagtactaaatttagtaacatttagaagaaacgttttggaataaaaaataatattcataaatgcagctggttaaatcattatgaatatagcacctctacttatctgtatcaatcttaaattttgatcactttgcttagtgcatagctcattttcaatctttcttctctgaagttccagtttttagtgtatgtttatataatattcactgcattttttccaatccttcaacttccttagttgcttagtagataatctagtctcttacttaacaaagaaattacgtgatcaaataagatctgctcaattntatgccataattccacaaaattctctgcatcttcttctattattttcttctttcctcttctaaagtattgcgattctggtacaagacttatttctccaaattacactgaacctatctgatccctact

SEQ ID NO: 54127 - DNA, 605 bp, Homo sapiens
  misc_feature 586: n = A,T,C or G
ccgggccccccctcggggtacttctagaattaattaacgcggggcaagtattattgctgacagctgttaacatgcttcaataaagcccaaacaaaggggcttcactgataatcctaagtcacaactagcattccaaacaaaaggccacttctttctctcataatatttagaggagatttgaagaaatgtcagtgctacataagggagaaactttggtgacagtcctggaaaatatgtttaattttctacccaaattcactgaagggggttggggagtttacactaaacagtaaggcttctgtccaaactgcagatcctcaagtaaagaacaggaagtctaatttatgaaagaagagttcttttcagagttttctatttgattaggttgctttctctttcttttcttgcctcagatggtgaagtgcctaactctaaaaacacactctgagcagaaggtcctaaaagaaggcaagagattttctatgaactctgacttcctctgcagtttgcagttctgcaagttattttcacattaaagtagtcaaactgcatagagaaatgatatttggatctttgcaaacaaatntagtaatttcctattttac

SEQ ID NO: 54128 - DNA, 576 bp, Homo sapiens
cgggccccccctcgaaagtcttctagaattaattaacgcgggctcctctctttcaaatatttttacatttactctttgtattcttctgtaatgatccttctatggtttatttcccttgacagaatagaaactgaatttttttgtatcactaatagtcttgaaattaaagtggatgtattaggtgctggcaattttctacatctgcctccactataactgaaactatttcagtatcatctttagggataaagtttacttgttatttgcagacttcagtcacagagttggttagaaatgatgagtattttaatataattgtttcttattaaagggtcaaatcttaaagaaagtattgttaggtcttcgtggaactgtttgaattacaggttctctgatgtatgttacattttgaacgcacaaatgtgattgtcttattttaatataccatcaaaaagctcagataacccaatgacgttttcagtggttacatttcaaatattggcatggttccaaaatgtagacctggagtaagtaatcagagattgaagcaaggctagctgaactattcaaacgcat

SEQ ID NO: 54129 - DNA, 461 bp, Homo sapiens
gggtaccgggccccccctcggagtacttctagaattaattaacgcgaggaattcagtaaggacaactgctgaaccctgggttatggatttaaaaataaacctcagtgacccgcatgccttaagaatcatttgggaaagaacgttgctgaatccagcaactatgtgccccactggggtgaactacagagagggaaaaagagaaaaatgcttttactacccctttcaaggagtatgataggacaaaaagacaaaggaaatccaaaattggcttccccaagagcaaagacttacaaactacctgtatttctatatttcttatattttaaggtttcaagaaaggtgttagtacatgtgcactgtctgtgaggtactaagattatgttcagtacataaacgaatgaaaaccaccatggcacatgtatacctatgtaacatacctgcacattctgcacatgtatccc

SEQ ID NO: 54130 - DNA, 598 bp, Homo sapiens
  misc_feature 531, 583: n = A,T,C or G
cgggccccccctcggggtacttctagaattaattaacgcggggagacacccaactctacaaaaaaactaataataattagctgggtgtggtggtgcacacttgtagccccagctacttgggaggctgagacaggaggattgcttgagcccaggtgattgtagctgcagtgagctatgatcatatatcaccacactctaacctgggcaacagagcaagacttggcctcaaaaaataaaataaaaatgaaaaagtacaagttcatattcatgttaggacttattctgataacaaaatgcactatcctatcaagaggaaccccactggtctcattaacattatttagacaaaaatctaaagccatttataagcctcgtctactaaactatcaaagtgaggccactatgttagaaaaacacagctgaattatttatctaacatttcctggtattttacttaatgagtaaactgtatgttgatctaataagaacagggagtggaatggggcgtatcatttcttgactcagacattntttacagctagcaggaaactagatgtcatttactccgggagtctcaacctgncagcctgttctgcaa

SEQ ID NO: 54131 - DNA, 351 bp, Homo sapiens
cccccctcgtgggtacttgctaaaattaattaacgcgggggagggtgtctctagcatacgcaatgtgtgctgcaatagaagggtaagacgtgagctcccagcaataacagcagaaaaaactaaaagcataacataaaatcccaaaaagataagttgtattatatcaacagagaacagaaaataaactaaggttagagactaatcaaaccaaagttgcgattgccgaggtttaataggaaaaagcaactaatattgttttattatttaacacagtggagcaagatctgtttgttgcacttttgggtgtagaaaatcttagctttaacctgtggaacgcctgtggggtcatgc

SEQ ID NO: 54132 - DNA, 617 bp, Homo sapiens
  misc_feature 22: n = A,T,C or G
cccccctcggggtacttctagnattaattaacgcggggcctgaatgtgggatgatcctgtattcagagaagtgaatttcccttcactagtccatttgcttttaaaaataaagaagacattaaaatgagttgcagatataagtaatccttatttagttattttgctttctcaaccagcataaggtctctacataaggacaaaatttggattcagtacctcctaactctgccacgtgggagaaatgtgtcccccctcatttctgtgtgggtatttgtctaaatcttgtctcccttcccactactgaggtctcacaacttgaagagttctatctagatatagaacatgggtatatatgctggtaacaaaatagttgtaactattttcctcactcacgaatcttaccctttaaacaggtaaaagagtgatttacatggattgacaggagtcagagaatccttattgcttttgtaagctgagacaatatgcccagtccataccaacaccaaataaggtatcttggaatgtgattgcatccatatgctttcagctcatgcaatataggcacagagaaccaattttaggaaactggcctcataggaaggcacgggctcttgatt

SEQ ID NO: 54133 - DNA, 394 bp, Homo sapiens
  misc_feature 27: n = A,T,C or G
cgggccccccctcggaatacttctagnattaattaacgcgggtctctgggtggggaacatacaggaacatactatgggcttgtctaggacattctcctagactttaaatccagtagcttcttttaagcaaagtgatggtcaaaggtcagatttcactggatgtttaagggaaaggaaacgtcacgaaaatgaacatgccctcctcctccaatctggttacaagaagtttcaagccaggagttttggcccaggcctgcagtccagctagtcaggaggctgatgtgggaggataggctgacagcccaggattcgaagctacagtgagtggtgattacaccactgcactctagtctgggcaacagtgcaagaccccatctcaaaaaaaaaaaaaaaa

SEQ ID NO: 54134 - DNA, 380 bp, Homo sapiens
cgggccccccctcggaagtcttctagaattaattaacgcgggggaagcactgaagctaatcccacagggaaagctcttgaagcccagacaagctattctgccttaaagttatcctacccaaggggtaagggagctaagtatttatacaccaacactcttcagatattgcttgagagctgctcctagagacattaattccagaagcttccaacctgttgaacaggtggcagagtgagtttcagcagtgagaggacacccttaacaaagaactactggtgctaggagttggaagttgggccaaagggaaacagatgctaacagggaggtaatatgagaggcactgacagcatctgctacaaaactgtccccaaaaaaaaaaa

SEQ ID NO: 54135 - DNA, 562 bp, Homo sapiens
cgggccccccctcggaagtcttctagaattaattaacgcggggggaacattattagatatttaaatataaaaatgtgcaaaaatccagcattttctgatatgaaagttctgtgaacgacctgcttgcagggtagctatgcatatgtttgagtgggaggaaaagagaacagatgattcgaaaactattaaaatggttatacatataaaaagttatttccctcctcataaaatttaaaaaaaccagaatttggcttagttaacatcttacttgtcatttgctcaattaaaatacttgcacataacatttcattgattcatccattcactcactcatttgtcaaacaataataatgcctactttgtataagataccatatttagtaggtatatgtaatacatgtggtaattatttctgtaaaggatcaaaccaattcatgaaaaagataactgcaaatacagtgggcaaaatgtcaggattcttggtgaaatttgtaattaagctttacttaaaagcatgttctataaagatatagatgcagaaagcaatttgtgttgttttcct

SEQ ID NO: 54136 - DNA, 553 bp, Homo sapiens
  misc_feature 28, 551: n = A,T,C or G
ccgggccccccctcggaagtcttctagnattaattaacgcggggtgaaagtgaaacagaactgttctttacagctcatctacagccatgtggcctaaactaccaaggtccagctatgctgtgggaccgcccattccacactcatttcagcagcacagtcaacaaaatattagaaatcaatttcagtgagctcctctgtacatctcatcagagctagtgcagcacttgatagtcattaaaaacaattttaagtctccaaatctaaacatctaagtcttccattttcttaatgtctattcctaagaattaatcacaaaaaacgactccaaaaaactcttcacacatttccacattaatgcagaatgcacacaagtacagaattttctgttgaaaaacacaaataacaataagctggccatgtgtggtggctcacgcctgtaatcccagcattttgggaggccaagatgggaggatcacttgagctcaggagttcaagaccagcctacacaacatggcaaactccatctctaccaaaaaaaaaaaaaaaaaaanaa

SEQ ID NO: 54137 - DNA, 581 bp, Homo sapiens
gggccccccctcggaagtcttctagaattaattaacgcggggtggggggagagggttgcagttgcaaattgtataccggaaggaaatgttaacctttgtagtttctgttatggagtaaaaaaagagtcttttaggacttacctaagggagcagatgtaaatgcatgttttagtcactgaataataactcaggaagaatgtcctgttcactgttcttgaatccttttaatatttgatgttcctcttttagagtgagggtacgtataactgttaactggcctcttctagtttattatttcccttttatccctaagtactttatgtggtataaaaaatttaatttttcaggagtcccaaaacattatctctggattcaccaactgactcttccctcttttcctagctagactgttccctcttttccttgcttactttccaaatctagggcttgaaaggagggaacattttttataaatatgacttaaataattttgtgtgtaatttttctttatcttccttttctcattttcttatgtacacacaagtatgggcaaaattggagtatgttagaactccaaactc

SEQ ID NO: 54138 - DNA, 574 bp, Homo sapiens
  misc_feature 56, 529, 565, 566: n = A,T,C or G
cccccctcgggggtacttctagaattaattaagcggggagttcagagaagcattcncaggaaaattaaatcctgaagtataatctgaaggatgaaaaggagcaggggaagagaaaggaaaaagagacacctgtagaatgtgcaaaaaggactagagatgaagaagcaggaaggagagcaaaagcaattaaaccaagaaaggagtcttttcagtcttctctactaaccagatatcaaaaagttatcactattgggctcagtggctcacatctgtaatcccagcattttgggaggtcaaggcaggcagactgcttgagcccaggagttcgaggccagcctgggcaacatagtgaaaccccatctctacaaaaaatacaaaaattagccaggtttggtggcatgtgcccagtcccagctacctgggagaccgaggagggaggatgacttgaacccaggaagtcaaggctgcagtgagccaagatcgcaccactgcactccagcctgagcaacagagcaagaccttgtctcanaaaaccaaaaaagttatcactgacatcaaagagatnntcatgcct

SEQ ID NO: 54139 - DNA, 581 bp, Homo sapiens
attaattaacgcggggtaaattgttagcttttagaaacctgtgttttaaagtacaaagcatgcatctcagatgcgagtttagaacttggagaaagttctcccgtgttttcagcctccactgtctgcagccaaccccaggggaggaatagtatggaagagaactcaaagaaatgtttgcacaacatatccctttactttgaaacaagaggcctgtaagtattcatgtaaaaagtcgtggtaaaattctgtgttcttacagaatgatgatcctcttattttcaaagttgtggggaggcactcttatgggaataaaaagactccaaaaacaaaacaagaagaaaaagtatttttctacacagaaaaacttcaagaaaacatcccatcgccttttatgtcctaggcttttatccttattcttttaaaacacccattaaaaagaaagaggctggcgggtttcatgctaaaagctatttgctacaggggacaatttgccagatatgaaagtgtggtttgtgggtgttgacattcgggtttgtcctatcatggctgggcagaacctctgatggactccactggactat

SEQ ID NO: 54140 - DNA, 562 bp, Homo sapiens
cccccctcgagagtcttctagaattaattaacgcgggctggcagtggaatgaggctcacggcattattatcaataaacacataaagaaaataaaaggctatacctatttttctttctaatgttctcaagagtaggccaaaaatataaaaagcaagatactagaggtttagttaatctgattgtattgttttcatatagatctctagatttctgcaattggatgtgtttaacatgaaaccttgatatatgatttcactaccaacaacaacaaaaaatcagttgggattatgatttctaatggtgtggaaaccctgttttataaaaataagacacattagctacttaaagttcatctgaacctgaactgtaattatttcagagaagtcctgaaatcattttggtcctgatttagaggtcttctttgtcttttcaatttaaagcaattttcatgtatagatttttaccacatttccaccttttataaaaccctaaagaatatcagtcactaaacctactgtagtaactgatctgatattcatttaagctaaaactttaagctaaa

SEQ ID NO: 54141 - DNA, 551 bp, Homo sapiens
acttctagaattaattaacgcgggaaagtactgtgactggatttaaggagatgaggctgggtgcagtggctcacatctgtaatcccagtactttgggaggttgaggcggaaggatcatttgagcccaggagtttgagtccaacctgggcaacataaggtgaagaccgtggtctctagcaaaaataagaagttagccaggtgtggcggcatgagcctgcagtcccagctacccaggaggctgaggtgggaggattgcctgaagccaggagctcaagaccagcttgggcaacatagcgagactctgtctctaccacataaaaaaagaaccaaaccaaagagagagagagagaaaagaaaacaaaccctatgatgaaataatgaaaaaaataaaattaaaaaatgaattcatagaagtagttctcactatccagaggttcacagggttaaagcagagctaacattaaaaggaggagaacatgcatagagcagaagaaaactgatagttcacgtttttcttctttctttcttttccttccttccttccttccttc

SEQ ID NO: 54142 - DNA, 322 bp, Homo sapiens
cccctcgaaatacttctagaattaattaacgcggggagaatcgcttgggcccgggaagcggagattgtactggagccgggtatcgtgccattgcactgcatgctgggcaacaagagcgggaactctgtctcaaaagatagaaataaaaaaaaaaagaaactgatcacatttcagttagtgtaaccagttggtgtgacccagttggtgggtcactaaaaatgtttaaagttgataggaataaaaaaaacatttttttttttttttaggacagcactccggcatgggtgacagaaccagaccctgtcccaaaaaaaaaaaaaaa

SEQ ID NO: 54143 - DNA, 504 bp, Homo sapiens
cgggccccccctcggaagtcttctagaattaattaacgcgggtaggtcatcatgaatctggtgatgtatgttaaagattcaccataaaatttcctttaattatatgctgcactttagtatgattttacaagttgtgagatcaaggtaagtatataacataaagtagaggtactataatgaagtgactaagagcattagctttgaagtcagactgaagtgtgaagcatcacccttctattagctgcaggcatttaatcaagttacttagcgttcctgagcttcatcatttataatacaaggaaaggaaaaatactcagatggttgtaaggatttattaactgtttagtatatgccacatatcattattattgcacatttatacaatacagtgtggttacctcctgaaaattttcatgtattatttgcaaattaatttttctacgtattcaaaattcatgtagtgccaactttaacacaatgtcttataaccattaaaaaaaatat

SEQ ID NO: 54144 - DNA, 577 bp, Homo sapiens
ttaacgcgggtatgacaggtttaacaaagaagataccaggattttcataaaatacaaaaacaagtttccagtttatgatctgaagtcaacgtagatttagctctattttacatacagtgtatatatttacatccacatagatattgacatttcaatgattttatcatgaccggtttggggaggaaaatcagcaaaatatactctctaaaaatgggctgaaaggttttagaaatattttcagcattgagggttgaaatagcagattaacccagcactttgggaggccgaggcggtcggatcacgaggtcaggagatcgagaccatcccggctacaacggtgaaaccccggctctactaaaaatacaaaaaattaaccggtcgtaatggcggacgcctgtagtcccagctactcgggaggctgagctaggagaatggcgtgaacccggaaggcggagcttgcagtgagccgagattgcgccactgcactccagcctgtgcgacagagcgagactccgtctgaaaaaaaaaaaaaaagcggtcgacaccgtggtggagctgcaattgggcctatagggag

SEQ ID NO: 54145 - DNA, 510 bp, Homo sapiens
  misc_feature 482: n = A,T,C or G
cgggccccccctcggaagtcttctagaattaattaacggggaataggggtaatattagtgccagttattgctccaggggtgtcagtcagaatacaggactatgcaagggcagtgggagatcacttgtaaccaagaagtggcaggtggaagccccactaaatattgtgacactgctctcttctccagtttcatatttttcctcttctaattgaacacaacaaaatgattacattagctgttcactgtctgtgtagtgagttctgaccacagattacctttgttttgcaaaaaatgacagtgagctgttctttttagctgtaaatattataattactaactttagcttgacagactttcattatattgtatttcaaaattaatacatctgagtgatcacacttcttaaaaagaggttcatgttgtaatatttggcacacacattttaaattaatgtacacatatttattgtatttgtgactcanactttgataccttattcatctagcttta

SEQ ID NO: 54146 - DNA, 567 bp, Homo sapiens
  misc_feature 456: n = A,T,C or G
cccccctcgaaatacttctagaattaattaaagatatttaatgggtcaagcatttatagaaacaaggaaatgtctaaggaaattattaagatatggtgaaacacccagtgaaaagtaatagcagggaggtcttactatcttaagcctgaagggacaagggaaggcaatgatttattggaatcagtaagtactaaagctgtgaaagaaagagaagcccatcaaagctataagcctagtcacagaggaatgcaagcattgccagactgttaggagagagtggaagtacagacaaaaatgcccactctttctgtcctaatggctttcaatctaccccctaactttccctgtgtctgaacccaaatccaagggaaactaaaactccagattatataatccacagaattaagccctaaaagcatagaatatgaaaaaaatggcagataattgatctagttntgggagcatagtgaaataaatagtcagcacattttccattttctcttattgaccaagtccaataaagaaattattacatctattaacattttcatttaaatttctttttta

SEQ ID NO: 54147 - DNA, 588 bp, Homo sapiens
  misc_feature 28: n = A,T,C or G
cgggcccccccctcggaatacttctagnaattaattaacgcgggtatgtgtgggttttttttttacataagtcatgaaatcttcttccccagatgccaggaagaaaaggagaaacatcatatatcagtcccatagtatttaaattttctactcctaaaggatttttcctaggatttcaggcttattcaaaaaccttcatgtttcatacaatttgtaatatagctttatacatttgttcccaatctcagtcagcatagatagataatagaaaatatcagcataggaagctgtagaattacttatctacaaaaccagacatcaaacactgcaccttgcaatattttttagtaaagagaaattatgtcacaaaatttcacagatgaggcctatggaagaagaacacaaaggaactatatctgtagtagaagcccatcctaactactaagaaagccacacgataccctttagatttcacattagaattcctaaactgttagcctaacacctggccctcatgctgaccacaggaagaggacttctgaaccaccatcgtcaggatgctgtccaccttcctgaaagggatgagaa

SEQ ID NO: 54148 - DNA, 585 bp, Homo sapiens
  misc_feature 45: n = A,T,C or G
ccgggccccccctcggaagtcttctagaattaattaacgcggggnagaagaaaacttcaaaaataaccatcattaatatcttcagaaaattaaggcaaattatagccatgaaacaagaacaaggggctattaaaatattcagagaacagggtcgggcgcagtgtctcacacctgtaatcccaacactttgggaggctgacgcaggcggatcacctgaggtcaggagttcaagaccagcctgaccaacatggtgaaaccctatctctactaaaaatacaaaattagctgggcgtggtggtacatgcctgtaatcccagctactcaggaggctgaggcagtagaatcactttaacccaggaggcagaggttacagtgagccgagatcacgccattgcactcaagcctgggcaacaggagtgaaactctgtctcaaaaaaaaaaagaaaaaaaattcagagaatacaagatcttggaaattaaaacatgacagtagaaattaaaaacacaacagaaataatcaattccactctatactcaagagaattgaaaacttatgcccacacaaaaacttgtaacggaatattc

SEQ ID NO: 54149 - DNA, 472 bp, Homo sapiens
ccgggccccccctcgaaagtcttctagaattaattaacgcgggtaacaagaacactgaaactttattcttagaggactgtatttccacttccacagttgcaagtgaaccttcaagacactttaacattcggcatattgtctagggttttgaaatattagaaaaaagacgccgggcgcgctggcttatgcctgtaatcctagcactttgggaggctgaggcgggcggatcacgagctcaggagatcgagaccatcctggccaacatggtgaaaccccgtctctactaaaaaatacaaaaaaaattagccgggcgtggtggcgggcgcctgtagtcccagctactctgagcaggagaatggcgggaacccgggaggcggagcttgcagtgagccgaaatcgcgccactgcactccagcctgggacacggggagagactccgtctcaaaaaaaaaaaaaaagaaaaaaaaaaaaa

SEQ ID NO: 54150 - DNA, 260 bp, Homo sapiens
ccgggccccccctcggaagtcttctagaattaattaacgcgggggatgctgtagaggagcctcagtacgctatgtgtcagtcatgttgcggtcttacttccactcgagtggtgatatcgcaagaatagatatcccttgtcctcgttcacacacaatgtagacttgcctgctcttgcgtttctaacgcgaagagctacaatcacttctattgaacaacagtgtaatctattgctgtaactgtcccacacaaaaaaataaca

SEQ ID NO: 54151 - DNA, 539 bp, Homo sapiens
cgggcccccccctcgaaagtcttctagaattaattaacgcggggcctttctctatcaatggcagcactgatttcacgcctggcgggaggggagagagagaaagtgccttgctttcattatgtgtgtatgtgttgggtaacttgacacacgcaagactggctccctgtcaagcagcattgctcttcaacctctgctgcgctggaaccatgtgggggctatgcacaaaaatactgatggcttagccccaccacacatgatagtcacactttgctgggggctcctggcaaagggaagaggactaggctgtgccctggacgttataaagcagagctctctatgtcagtctaatgtgcatggaccagttgaggacctcgaaactaaaccttacgttctgtcatttacataacaaatacagggctttgatgcctgttgaagagtgcctacgcaatacacacgattttaacagattctaatgcagatggccatcagtatagccttctgacttgatatgtttttgatacagagggaccatagtaata

SEQ ID NO: 54152 - DNA, 610 bp, Homo sapiens
cgggccccccctcggaagtcttctagaattaattaacgcgggaagtgtgctctcataaacacactctgctcatgtaccctgtaaatattactatcctgtaagggaataggataacccactcaaacccttccaacatttcgtttgtctgaggttagctgttaagtagctcgcaaaaactgtctatgtttcttaccttcttaatatgcccatttcccactaatgtgctttaaatgtatttaaatgttttgacactaaaaatattgagaaagttttgaagggacctgggtgtactcagattgtggcatgtagtgtaagtacttgaatacaagtattatctcagctcttattgttaaagtacaaatagaaaattattttcaactacattttatacttaaaaagtattttacaacagtagacctcagtgagctcaaatcattcacagtaatattatcaaatgcttgtgggagttggcaaaatcttaataaaaagatttaatgaaagggatttatgagtttaaaaccagagaactaataaaaagcccattttccactaaatttaagtccaataaatacactgtaacaagtaaatattaaagctgtggggttttgaa

SEQ ID NO: 54153 - DNA, 520 bp, Homo sapiens
ccccctcgggggtacttgctagaaattaattaacgcggggggtcagggaaaaaaattgaagaccaaagctctgggagttcaataatgacaagaacttggtataatcaagtgtctactaccacaagtactcatatcttctaaagacttacctctatttcaggcaatagatatagtattctatgggtattttcacaagctcgtctttttgattaacaggtctgtatttaatttgccctctttttcactgtatttctttgcatttgcgaagaaacccatcatgtctatataagtaacattccaatgacagccttggtccatttattgcattgcaattacttatcacattgcgtgtatgaaccacacattaaatgctggaaacagacatctatagagcgtgtacaagataacttctgatcctgaactcctggcatgttttagcatgggacatagacatcggtattattagcgctaatggctactatgatacgtacgatacatgacaagagagttgctacttctt

SEQ ID NO: 54154 - DNA, 493 bp, Homo sapiens
cgggccccccctcgaaagtcttctagaattaattaacgcggggtatctcaatttattaaattattcatataatattgaatatttcattgtaagttagtagaaaacaatggtgcagtatcatttgatttctctgttgaatcatttccagaccatatcgaaaagaatgaacaaaccttgctgtttgtagttgccacattgctttcataagggatgtagcaatcacaatactatcagcaatgagtgcttgtttcaccacaactttcctggaattgggaattatcgattactaaactcattttaaatcttcattgttttcaggactccaaaaatgaaaagaaggggaaaatgccacaaatagctatgtttataaatggagccattggtagttccctggaagtagagagatgtatacagtgatgtgcctacaactagatccaagtaggttattctaatttaagtgactttttaagtcattaccaaaaaaaaaaaaaaa

SEQ ID NO: 54155 - DNA, 602 bp, Homo sapiens
taccggggccccccctcggaagtcttctagaattaattaacgcgggggctcactgtagccttacctcctgggctcaagcagtcctcccacctcagcctcccaagtagctgggactgcaggtatgtgtcaccatgcctggcaagttttttaattttttggtagagacagtatctcgttttgttgcccagactggtctcaaactcttgggcccaagtaatcttcctgccttagtttctggcattttagaagatagtatacacattgaggattcggttataccttattctgtaacccgaatattatttcatgtcttaccagctggggagagatgaatggctagtccctgctggctggtgctagtcagacgtgagttagtctttataaactgtttaggaactgtaggacccctcatgattgctcctagataagtaactcattgtggcagtgctagtatgctttagtccatgtcctctgttgcactctagtgctgaggtcattcctgttaatttaggattcatacatacctaatagaagcaaattgcttgtgatgcctgtttttgttggagatttctagtttatcctggtcctgacagtttctgaac

SEQ ID NO: 54156 - DNA, 571 bp, Homo sapiens
  misc_feature 15, 53: n = A,T,C or G
ggagatacttctagnattaattaacgcggggtggcgggtgcctgtagtcccanaaactcaggaggctgaggccagagatggcgtgaacctggaaggcagaccttgcagtgagctgagatcatgccactgcactccagcctgggtgacagagcaagattccatctcaaaataataataataataataataataataataataataataataatgcctggcaaatagtaagtgctcactaaaggttagctgttgctatttaatttgaaaagtaaagtgcaatgcaagaatatttggggggtggggaagcccaaagttataaagaaatatcactgcctctcaaataactatttagattagtgtatgtgtttttggttttctattcggtgtgtaggtgtgtagcatatctgttgtatacacacactcacaagatatgtacacataaatatgacattctcttgagtagcctgcttttctcacttaacaacatatacaaacactttggtaaacaagtagtatttttatctgtctttgtagccacaaagcctagctcagagcctagtacaagaatagg

SEQ ID NO: 54157 - DNA, 541 bp, Homo sapiens
  misc_feature 492: n = A,T,C or G
gggccccccctcggaagtcttctagattaattaacagtggctctctagtctccatggaaaatcactttggctgattctggctcaccagaggagatgcttgggtataaaacatggggcattactgtctttcagatgggagctggcaaaaccaaaataccagaactccagcacaagcagagtcctctcacctctgagaagcctcctggctaccagtctttcacaccccatcccttcatctcttcataccaaaggaacagccaagagaaaaaaagacaaccgctatgagaaaaccatgctagagccaaagacctaaagtcactggcccaccctggacaagggctcttggccagagaagcctggctgaaccagactggcagagtctcttcttttcttcactctcaaaagcatgggtagatccacagccccccacactgctactgccctcaagatacagcccacgctccctggccacagcatacaaggtattttctnttttatttttttaagacagagtctcaaaaaaaaaaaaaaaaagcggccg

SEQ ID NO: 54158 - DNA, 615 bp, Homo sapiens
  misc_feature 28: n = A,T,C or G
ccgggccccccctcggaagtcttctagnattaattaacgcgggcgtataggcatggtgctcattttcatttcccagatcgggagattaaggcactgagaaggcaacacttctaacactaaaacatctttcaggttccttgttagatctccaatatcagacccccaatgacaggtgttgttgggaatccgaagatgaataaagaacagtggttgatgctaacatcttccattctggcaggacaaacaaaaatgatacacatctaaaactgaagtgctaggctaagtagggttggcatcactgagttggaatacgaaagaaggaaaaaaaatgggtcaacaaggaacacagaaagcagtatcaatcaatgtgccttctttactttgaccaaaatggtggcacctgacttaccagagttctgttaacactcataaaccatccccaaaaataatcatatgaatggtacataatccctgacttaactcctactaaaatcaggttttggcatacttgaactacatgggttctaaaatgatagtttctccaatgcatccttaagaaagttaatcctttcacttttttaggtctggtacaaattaagggagtgtgtgaaatgc

SEQ ID NO: 54159 - DNA, 513 bp, Homo sapiens
  misc_feature 9, 497: n = A,T,C or G
acttctagnattaattaacgcgggtagtatatcatggttgtgtattcctgggatttcgtccacagagtgtgagtggatgttttctgagaggtcactacagtccagtgtgttacagacgtgctgagtcaaacaatattcaagggctttcttgtctatagcacttctcaaaacctttaataggctgtggcatgtagttccagaaaatattacatagagtttcttaaacattttcagctgggtttttttttttttttttggaattttttttcaaggagcatctcttcagaataaccatctgtgactcactctgagaaatgccgcatgctggaaagagttaagaaacaaacagttgagatgaaaaaagtactgggtgggccctcgattcttcagaaggctcataccttcacctgtggagcttctagtgcaaatccatctccccctctcgctctttctctgtgcactaatcgcttacatatcattgttactgggagcagcanagcctgtctgggcagg

SEQ ID NO: 54160 - DNA, 584 bp, Homo sapiens
  misc_feature 467, 515: n = A,T,C or G
ccgggccccccctcggaagtcttctagaattaattaacgcgggactctgtctcaaaaataaataaataaataaaatgcctttttaaaaaatgggccatctataccagctaagaagaatgtaagactcagactatcttcattactgatttatttctttggtctggaagcctgtcaatttttgccagttgaatattcagcaataaatagtcatcaagcataatgtttgaataaaaatgttattcttcaaaccaaaataaattcaagatgatttgagatccaaatgcaaataaatgtaactataaaagctacaaaagagctctcagtctgaattaaaaaaaaaaaaatcttgccataatccattcctaagacccatcttattattcaaaagtggacagtctcagtaccataaggcagagtagcttgtgagaagaggctatgtggaaattgggtctctggcaagctagaanaaactataaaattaaaccatggtaaacagtttcgttcttgttttctgnagttcatactttcattagaattcttagaaattctgtgaacaaacctggccactggccacattataggct

SEQ ID NO: 54161 - DNA, 536 bp, Homo sapiens
cgggccccccctcgaaagtcttctagaattaattaacgcggggccaactatcagaacagaatcttgttctgagaaggaactgtgtgcatatggttggggtggaggtgacaggtagggttctagagagtttgaatacagagctagaagataaccgttattggtgctgcaagactgtcataaaaccagttttgtagatggcctggagggacccaaattagtggagtaggttagatacagactaacatcatctataccagagaaccaggagtatttttaaaagaaggcgttacctctcatctattggctataaaagggttttaactttattattattcttttttattagagatagggtctcactctgtcacccaggctggaatgcagtggcttgatcatagctcactgcagcctcgatctcctgggctcaaacgatcctcctgcctcccaagtagctttattattaactgaaaaacgacttatgtttgtatagtgctttactgcttagaaagtgatttttttttttttttttttttttt

SEQ ID NO: 54162 - DNA, 501 bp, Homo sapiens
  misc_feature 445: n = A,T,C or G
acttctagaattaattaacgcggggatttgattccgatcctttaaagctctggaagctattcatatcatactgtggtatttagatgcggttttcaaaaatatgcccagtaatctcatcaatttcttcctctaataaaattatcaaggtttagtaaagaaaaaacatcttactaactccagtatgataacctaaatgttaaaaaactgtgatatttttgctcagaaataatgctgtcaagctacccaggaaactatatgtttagcaaagcatgtcactttggcaaattatttataaaaatagaaatggctttattggcattaactgtgtcataaataaggggtaaaaatgtaatctcgtctctaacttcgaagattcatgcaagcatctttctcctcacaggcagtatggaaaagcagggtcagacttaagctcatgccacacgtntttcattcagcacactgtaaagaggaatacttgggcccggcatggtgacgcatgcc

SEQ ID NO: 54163 - DNA, 443 bp, Homo sapiens
ccgggccccccctcggaagtcttctagaattaattaacgcgggcatgactaaaaatccacttagcaaggttataccattcccactgcccataatggcgtcttcagtgtctgtatcatagacattgactctctgtgttctgaaagctttttccttcagggaggcagaacattgctgcattccacatggcgataggcaggagggtggtcctcgcctatcctgggtccctgcactctgcagcagctcagcctgcatccaaagcctcacaaaatctgtctgttcttaatctttacttctctaatcacaggggacttgtctcaatcaaacccaaggcactggaagagaacaggccccatctattaattttttttcatttaaacaaatttttatacctggaactcaaacttcttttcctgtctcctggattactaaaaaaaaaaaaaaa

SEQ ID NO: 54164 - DNA, 621 bp, Homo sapiens
  misc_feature 23, 47: n = A,T,C or G
ccccccctcggggtacttctagnattaattaacgcgggggtactagnaaacaaggtcacaaggaataaggggccaggccacatcacaaagggccttgcaggccacttcaaagtctgtttgaaacggacttttcaaagtttgcttgaaacgggagatattggaggctttgaaacagcgacaggtgacctgggtcctttaaaaatcactctgctttgactttgatctatattatgtcaaaaaacaaaacaacaacaacaaaaaaatccagtaaaagtcactgtgcttctgagttgagcacaattgcagggaaataaaggagggccgggagtctccaggaggccggagcaaaccagcagcatgagagggcagaacatgtcagagggggcgtctgactctggaagtggggctcacaggattttttaatttgtttttgattcctttattgagtaagtctcttcttagtggtacgatctcaaagctggtcagctggattttattgatgagataagacaatggcttaaagtagaggtttcaactcctaactgacagctctcattaattgtaggatctcatttgttattcacaacagcacttatatcttaggttttatgttgtaactgc

SEQ ID NO: 54165 - DNA, 367 bp, Homo sapiens
cgggccccccctcgaaatacttctagaattaattaacgcgggtccttcttcttccctccccattaaattgtttatgtaaccaagtgcttatatgtataaaaataagagttgaattgatgctaaatcctctcattttcttttatcaatgagtagtatttaaccatggttacacatactgattgaagaatgaaagctttatatgcctcattaagaaatacatttccaataaaatttgtcttatgtttattatctattaagtatatttattatgttttagccaataatgcattagtaatacttacaatactgtggaaagtctttttctctttaacatttagagctcttgagtctccaaaaaaaaaaaaaa

SEQ ID NO: 54166 - DNA, 462 bp, Homo sapiens
ccgggccccccctcggaagtcttctagaattaattaacgcggggtggacataccaaattttctgctactatattcctagtagaaatgacatggtacaatgctattatagattaagtctgatttaaagccttgctgacaacaatcaaaatatcatataagcaaatcagtgctgataaactagtatcacaagtcaatttcaaaataattttctcattaaaatataaactttcaaaaaccacactgactataataacggtataaaaatatctgccattgaaataaatagtatttattttccctgaattctgccaatcactaactaggtgagcctaatatttactgatctaaaagtaactgcatgaataaaaatgatatttctttttttcttttttttttgagatggtgtctcgcactttcgccaaggctggagtgtagcggtgcgatctcggctcactgcaagct

SEQ ID NO: 54167 - DNA, 574 bp, Homo sapiens
taattaacgcggggagaagtttttttacctttcagagacgatctgtgagtatataaggtgaggggaagggaaaatctgggggggaaataggtacagataaatccaaaaggaggctgttccaggtaaagctgatttacttaggggtaacctcaacaccttcattttgatttaattttgactttgagccaactgaaatgtgacactgtgtactgggatttttaaaaacatcccctttataaatagaaatacctggagaagaagaaataattcttcctatattgtcttttcctatattttaatagtagatggcctgcagaaatcatatcagggcgaggtgcagtggctcatgcctgtaatcccagcactttgggaggccaaagtgggtggatcatttgaggccaagaattcgagaccagcctgagcaacatggcgagaacccatctcaacacaaattaaaaattagatgggcatggtggcatgagctggtggtcccagctacttcggaggctgaggttagagccactgcactccacagagcaagaccttaccttaaaaaaaaaaaaaaaaaaagcgg

SEQ ID NO: 54168 - DNA, 408 bp, Homo sapiens
  misc_feature 37, 66, 71, 74: n = A,T,C or G
ttaattaacgcgggggggaggaggggtgggtgtacanagagctgaagcaggccctggacctggggngaganganaagccctgatggggccgtgggagacaacctgtccgtggcatgtggagtgagtgaagccctctgcgcctggacttcctcccttcctgtcaacagtgaccaaccagcgattgttcagaagataaaatgaggaaaagcacctcgaagtgtcttgtaaataaaggtcgacagcagcacttttttttttttgagatgaagtctcactctgtggcccaggctggagtgcagtgctgtgatctcagctcaccgcaacctccgcctcctgggttcaagtgattctcctgcctcagccttccgagtagctgggattacaggcacctgccaccacgcctgacta

SEQ ID NO: 54169 - DNA, 558 bp, Homo sapiens
  misc_feature 29: n = A,T,C or G
cgggggcccccctcgggggtacttgctanaattaattaacgcggggtcatactgttggtaagtgacaaaggcaaagtcaggcagctcacttggagccgggcagctccacatggttctctgctgcctttctgaatgacccagcacatccagccctgctctaagtgttctgcatagattgtagctccttgctacaatgctatgtgacaggtactattatgctccctgtcctgcaggtgtgggccctgagcactgagaggtaagtaagcattgatggtaagaagagcccaggcaggcaggcctcagagccccagctgatgaccatcactccatactgcctcttgacatgtctgggagaagccaactgtacatacccatgtccccgctaccctttctgtctgcccgttacactttctctaatttcaggctctgccagaacccctgttgcactcccaagtgacaagttgttattggcatatcctctgtgctatcagatgggatgcaacatgccccaaccccctccccggcaccgacaccttgaaccagactacccttgcctta

SEQ ID NO: 54170 - DNA, 398 bp, Homo sapiens
  misc_feature 23: n = A,T,C or G
tgggtaccgggctccccctcggngtacttctagaattaattaagcgggggggctcccgtcagaagccactctgaactccccatccagcacatctttctactaccctgatcctgccttacaagccaaacatgatttcggtttctaagatggctgtcacacttcactctttctcctaaggaactcaatctttgatgaagaatctgcaaaccaacgtgtggcaaaacaaactacaaaccttccttatagtagaaaacaagaaatatccaccttttacatgacacatcgtaaatctctgcagtctgctgagaggcagcacagtgtaagggaagtgcacaggccttgatgttggatcaacaaggcttcaatcctgcggggcacttaccctcttcaaccctatc

SEQ ID NO: 54171 - DNA, 480 bp, Homo sapiens
  misc_feature 19, 161: n = A,T,C or G
cctcggagatacttctagnattaattaacgcggggcatatgaaatggtttgattctaaaatatcaaattaatttcatttcttgtgctagctccagttcattgattgggtgtctgtaatattaggtacagaaggcttgtgagactaagtttgtgctaagctngaaaaatgccattatcaatttacaaaatattctctaggcaaaggatgggcgaattcctgatgtagcccattcccaccttttcagcctcacaccttctactttattttcaaagtttcttttccagtgttaccatgaactaatacatcccctgaatgcaggcaatatgtttctcataattgaaccatattggctgggtgcaatgcctcatacctgtaatcccagctgtttgggaggctgaggcaggaggatcacttgaacccaggagttcaaaacaagcttgggcaacatagtgggaccccatctctaaaaaaaaaaaaaa

SEQ ID NO: 54172 - DNA, 556 bp, Homo sapiens
cgggccccccctcggaagtcttctagaattaattaacgcgggagctggaatggaaagaagtcaatttccgttacgttcattattggcatgaagagctcaccctgtgattccttcttattcattttgccaaaatgacaccagaactcagtgtgggccaccaaaccattaaaggcatttcataatttccagagactctttgggcctgcttggtgctagagtggtaaatttattctatttcttaagtattaaatcatatgattggccaaagtagcttgagagattcccagtcatactgcttttccatgagtctcctgtggctagtccagtctccccacagagcttctcagagcttgagagaggctgggctatttctacttttttagtatacggtgacataatgttaatgtatgaacaataaaacaaatgaaaaaatgtaaaacagaactacacaaagttggagtgtatttttaaagttcacatttaataaattaatctttttaccacaagataatatggtgctatacaattgctattcattggataattctgggactca

SEQ ID NO: 54173 - DNA, 617 bp, Homo sapiens
ccgggccccccctcggggtacttctagaattaattaacgcggggggggttttaaagaaataacatctataagctgaattttagtaggttaaataatattcttcagacgaggtcaatatgaaccataaagtactggaaaattcaattttcttaatttaaaatatttagaccaagaaaagcatttaagatatctcactaaaattaaaagcaaaacttctaatcctttccacagtcctttaacactttttttcaaatgaatatgaataaatcagagaacaagtgaggactacagataattaatatttgaataaaccattatgtatttaatggccaagaaaacaagctggaaacatcaaagatgaaagtttcaaagaatacaaaacatgtaattccaactctgacaaggagaagcaattattacacctattctagaaagagccagagttctagaaagataacattaaatcccaggagcgaaccacgagttaatggtatcttattttttacaggttgggaagatgacatgagagggtggagagaggtggcaatggggatcttctaatcatcaaattagacatcctgcattttggatgaaagagtcagataatcaaaaatgct

SEQ ID NO: 54174 - DNA, 620 bp, Homo sapiens
  misc_feature 44: n = A,T,C or G
ccgggccccccctcggaagtcttctagaattaattaacgcgggnaagccatgtaacaaactaaaactgatctcagcaagatgatctagtgatcactccagcggaatatcaatgctttagcctagtacacacatgttctgagctgtgaaggtttttcatgattattatttttatccttcgtaattatctttcagtttatatttctagccttgaaacacataagttattctttgcatttagagcctattaacacaatttcaagaagaaaactacaataagcagggcttgtaaatttgttttttttttcctactgaaaagcaaagagaagtcgatttgttgacaacaaaagtgcctcaagtgattatgttttctttatttattctcagtgtttattcccaattcctcagtcccaactaaaggtctactacagagagtacatatttcttaaatctggaaaataatttaaatacatcaactaacacttgcatggtgcaaaataccttcagctagttgatgccaatgtggtacttaaactatggttcccaggatgggcatcctacatttccaccacactagcagccccacaagatagagttcactgcctcaatgagttcaaaagta

SEQ ID NO: 54175 - DNA, 328 bp, Homo sapiens
  misc_feature 17: n = A,T,C or G
ccgggccccccctcganagtcttctagaattaattaacgcgggtcatttctgaataaaatacttttaatagtcattaaagaatatcactatagcagttgaaatctttcccaaatgaaatgtttacttctttaaccattttctcccttattttctggtccttttgatttattttctgactatttcttttaaataaaatgagggttattttcactaggttaatgtttggccttctgtacttggtaaaaaattgaatgacctagaataaagagtgaacaagagaaataacacatttcttataaggcttaatactttaaaaaaaaaaaaaaa

SEQ ID NO: 54176 - DNA, 568 bp, Homo sapiens
acttctagaattaattaacgcggggttttatggtaagatctgttaacaatagcagcagcagtaactaatttattgagcacttgtactttatatataacccaggtactgtgcaaagtaaatatcaccttattttacaaatgagaaaaaccagccaaagagatgaaatacccaaggcaaacagtttataaatagccaaatcagaattctaacccaagtctttctgactaggcccaggctcctaaccactacactatgttgcctcctccgaactgtttttatggtttgccattgtgtctgcagcacctcagcacactgatcagcaggtagtaggcatttaataaatgtcaactcaatgaatgaatgattggtaaaaccaatatgaggaaataaagacttgaaggtagattttaaagtgtgaattaattcatcatcatagcagtgtttaatggggaaagtcctactgggttgacaactttttaaaactcaaaagaagtagaagcaatggagtcatgggccagaagattgaggagaagagtagtgacaaaaaagacacatatgggtatgtttg

SEQ ID NO: 54177 - DNA, 562 bp, Homo sapiens
  misc_feature 460, 526: n = A,T,C or G
ccccccctcggaatacttctagaattaattaacgcggggtggccatcccagctgaatttttagggcctaataaggaaacaagttaatcaagttatcagtgtctgcttgttgaatgaataagtgcataactaaataaggagaatctgaaaaattggtgactttaggatttctatttgttataggaaattaaattgcttctgaatttctcatatttatttagttcttttgacaaatattcacaaataacttacgaacaatgctttgtgtgaaacccaggcatatatattaagacatttctgtttttttatctggttgagaaaatagaaaacacacaaaatgtttactaacattgaaataataggagaaagtcctgcctgcttctgaaacagataagaaagggtgggctcttaccaaataaattttcctatggacaatgactatgagctctagaaaacaacanaataaacaagcaaaacaacattcctaaagtccctgagagtgaataaaaagcaggcatatttaaganatagttaaaacttgaaaaaatggatacaaagatgac

SEQ ID NO: 54178 - DNA, 162 bp, Homo sapiens
  misc_feature 28: n = A,T,C or G
ccgggccccccctcggaagtcttctagnaattaattaacgcgggtcattttctttttctttttaattgttttttccaggcagaaagggaaagcgtcagtatataactcagacattgctaaaatttgtaccaagctccccatcccaaactgaacaaccatcca

SEQ ID NO: 54179 - DNA, 558 bp, Homo sapiens
ccgggccccccctcgaggtacttctagaattaattaacgcgggctgataataatggttctttaaccaacttactgtacatattctgagtactaatttggaaaatcaaattcattctgaagaaaaataataatgtgagtgctgtaagaaagacaatttcacatgtaggatgcatcaatattgtgtatttctttgcttcttcatttgccaatttaaaacagcttttgcatgccaaaactcaatatcaactctatcacagactcattagaaaagcaatttggcaaactgagaagaaactgcatgattcttcattttatttcattaacagaatcagcccgttaaaatttaagacagataaacctcttccccagcatcatttcttaggaaaatgctaacagaaaaatggtgttttactttcacttctttgtgtaaatattgcctttttataaagcaataaaattgcttttaaagcacatctgtaatattacctcatatgttaatagtttttcaaatacgaatataccaagcctggccactaatggaccaaaaaaaaaaaaaaa

SEQ ID NO: 54180 - DNA, 528 bp, Homo sapiens
ccgggccccccctcggaagtcttctagaattaattaaccgggtatctacttcagcaaaatgctaacacgatctccaagaaccaaccttgctaatacaaacaaggttctcttttaaagatagcttaatgagaaacttcagttcaagtgtatgtacatcataaatacaggctaaacctttagagactgactagtttgggaactactgaataaagaaaatttcttcaaggaaagtttaaccagttttatgcatccattcagttaggtgatacagcagtatttaaaacacactctgactttaaaattaacccaatacacatagcctctgatgtcctaaaatttactaagacccacactaaagtttcatctgaagccaaatatttgtgttacattatttggctgaactaatcaaacgaagctggtttcttttaaagctaaaatgggcagtgtagagcttgagaaaagaaaataatataaagaaatctgcactttcctattcatgcattttagaaaaataaaaaaaaaaaaaaa

SEQ ID NO: 54181 - DNA, 369 bp, Homo sapiens
  misc_feature 15: n = A,T,C or G
cgggccccccctcgngggtacttctagaattaattaacgcggggaacctctctctttaaaagagatggacttcaaattatactcaccaggcttctattacaactacctggaccatactgagaactaccctctccccactcctgaagctacaaacactatacacaaaatttaatatttagactcaaattttaaaatatttgcacgaactcttaaatctatagaagctgagcagtcatggctgggtgcggtggttcatgcctgtgatcccagcactttgggaggctgagacgggagtatcacttgagctcaggagttcaagatcagcctgggcaacatggcaaaaccctgtctctaccaaaaaaaaaaaaa

SEQ ID NO: 54182 - DNA, 589 bp, Homo sapiens
ttctagaattaattaacgcgggaaacagaaatattatttaatgactgaagatcactgcttagcatcgactttatttcccgtcaagtagaatccaagaaaacagtatgtcataaaggcatcacaaacagatcaaacctggtttctaataaatatctattctttcaaatgatttccttcaaaaaaatggaagctatacacacatagcctacgtggatgcaggtgacccctgagaagtgtgtgtgtctaggcctctgaacttcttttctaatcaacgcttccggaagccctgcttacagatgagatgtgtggcctcctagggtttgtcaggattgacttcgtcctggggcctttataccaggctgcaagtggaccatgaatggtcagaggctgtagacggagctgcctcccgctgctggggctaatgcagcctctgcagttctcctgaggcatccagctggccaagaagcacagtgtgtacaagttggagctgcacctcaattttcttgtctcaagcttcggacacacagactccagaaagcatcattcagtgacacctttggcaggcccagtgacaacttttctgagcctc

SEQ ID NO: 54183 - DNA, 514 bp, Homo sapiens
ccgggccccccctcggaagtcttctagaattaattaacgcgggcaccatgcctggctaactttttttatttttcatagagacagggtttcaccatcttggccagggtggtcttaaactcctgaccttgtgatccacccgcctcagcctcccaaagtgctgggattacaggtgtgagccaccgtgcctagcctattttacagtgtgttttatgtactgttattaatatatacttatttaaccctcaaaatccttctgacttttattttaaacttacacatgggagggttatgtaatttatccaatataatattgttaatcgcataagtgagaccaaagtcctattttgtagtttaatttttttaaagatttgtttcaaaaaggtttatgaacaatgcataagaaacaacatttctacaccctccataggaaactagtttggtgtatattttagtttgcacatttaatagatataaaatataacttttaaagtactcatatacatattgtgcacct

SEQ ID NO: 54184 - DNA, 587 bp, Homo sapiens
  misc_feature 575: n = A,T,C or G
ccgggccccccctcggaagtcttctagaattaattaacgcgggaccacgcccagctaattttgtgtttttagtagagatggggtttcgccatgttggccaggctggtctcgaactcctgacctcaaatgatccgcctgcttcggcctcccaaagtgctgggattacaggtgtgagccactgtgcccggccaggtcatatttttacagtgtggacaaacctcttgtgatgacagtattcctgtggaaggtgtcacctcagtaactattgggacattttatcgattatgtgcaaaattaagcaaagaaaaacatttgaccacagggggattatggggagagaaagagtaacaactgggtcagtctcctaagtctcaggaacagtccttcctctcatggaatctttcttttggtcaaaggggaacaagcaggaattccatagggtttcaggaacacctttatgtatgttcttccagattttaaaatgaaaatacatatgggcctggcgtggtggcttgtgcctttaatcccagctctttgggaggctgagataggaggattgcttgagtcccagagtntgaaaccagcct

SEQ ID NO: 54185 - DNA, 325 bp, Homo sapiens
  misc_feature 176, 177, 181, 183, 186, 189, 192, 193, 201: n = A,T,C or G
ccccccctcggggtacttctagaattaattaacgcgggtagctattttatatgcaacttctataatttgggttgttaaatttttaaattctttttactaatttatatgtttttactaattctgaatttgcctttttatagcttagtagaagactccatatttttatatattggagnnaatntnagnatnaannactgggtnctgtggtcactctcatttcaccctacaatattgtacatctgccaatatagcctttctcagattttgataacctaggttgagaagtttcagtttgtaattattctatatggggacaaatatccag

SEQ ID NO: 54186 - DNA, 615 bp, Homo sapiens
  misc_feature 18, 31, 42: n = A,T,C or G
accgggcccccccctcgngggtacttctagnattaattaacngcgggatagttctttcttttgagacaaattctcgctctgtcacccgggctggggtgcagtggtgtgagctcggcccactgcaacctctgcctcccgggctcaagcgattcccctgtctcatcctcccgagtagctgggaccacagatgtccgccaccacacctggctaattttttcattttcagtagatatgaggcttcaccatattggtcaggctaatctcaaactcctgacctcaggcgatccacccacctcagccccgcaaagtgctgggattacaagcgtgagccaccgcgcccagcgcggtgtaagaacagttcttacaatggatatccactttggaaaaatgagagggtggaaaggtgtgtcctagttctgtttctcaagacagaggctagatttttgagcctagagtctgacttctgtcacccaaggcattttacacaaagttccatgtacagtacctgctccaaaccaagtgccctaaccaagggtcagtacagggcagctcagaagttaaataaaagctgctgaggctcccctgtcccagatttgtctgttaaatcaggtccag

SEQ ID NO: 54187 - DNA, 547 bp, Homo sapiens
  misc_feature 452, 519: n = A,T,C or G
ccgggccccccctcggggtacttctagaattaattaacgcgggtgccaaacaacagcaaatcagagcttctaattagtaggacattgaacatagccaatgtttccaaaccgaatttatacagttttaacccaaagcagtaaaagttgacaatttagtatcttgagtggttttgtcctcagcaaatacaaaattttcatcatattccttgatatttcaaaaaaaattattttaataaattgtggtggccaggcgtggtggctcacacctgtaatcccagcactttaggaggccgaggcaggtggatcgcctgaggtcaggagttcgagatcagcctggccaacatagtgaaccccgtctctactaaaaatacaaaaattggtcgggtgtggtggcacgcgcctgtggtcccagctgcttgggaggctgaggcaggacaatcgcttgaacctgngaggcggaggttgcagtgagcggagattgcgccactgcggtccagcctgggtgtcgcaacagagcanaactccatctctaaaaaaaaaaaaaaag

SEQ ID NO: 54188 - DNA, 494 bp, Homo sapiens
ccgggccccccctcggaagtcttctagaattaattaacgcggggaagtttttttgtttatcttattttctccttaatataaaagcaagacatgttctctagaatcattgacaatacaaatcacccgaaactcatttctaacagaggtctaggtttggtttgagatcattcactttaaaaaaagagagtgactagccgggcgtggtggctcatgcctgtaatcccagcactttgggaggctgaggtgggtggatcacctgaggccaggagtttgagaccagcctgagcaacatggtgaaaccctgtctctactaaaaatacaaaaaaaattagccggctgtggtggcacatgcctataattccagctacttgggaggctgaggagggagactcgcatgaacccgggaggcggaggttgtagtgagctgagatctcgccattgcactcgagcctggacgacaagactgaaactccatctcacaaaaaaaaaaaaaa

SEQ ID NO: 54189 - DNA, 465 bp, Homo sapiens
cgggccccccctcggaagtcttctagaattaattaacgcgggcacctggctgaggtaatattttgcagatttctctactttaaagttacccataaatatagcctcttcctatacgtaactcataatctagtcttatgcatgaatagattttttaaaatgactgatggttggcaaggcatggtggctcatgccggtaatcccagcactttgggaggctaaggtgggtggatcacttgaagccaggagtttgagatcagtctggccaacagagcaaaaccctgtctctactaaaaatacaaaaaattagctgggcctggtagcacatgcctgtaatcccagctactgtggagactgaggtacgaaaattgcttgaacccgtgaggcggaggtttcagtgagcccagattgtgccactgcactccagcctgggtgaccaagcaagactctgtctcaaaaaaaaaaaaa

SEQ ID NO: 54190 - DNA, 512 bp, Homo sapiens
  misc_feature 13, 37, 489: n = A,T,C or G
ctgggtaccgggnccccccctcggaggatacttctanaattaattaacgcgggggaaattttaaactattcaataataaactattagtcttttagaatttctttttcctcaagtgttgataagtaactgaaagtctacaagcagacaagcagaattagtcggtggaacttcatttcttgctccatttttgtcctcagcagtagagggtggtgagatttcaacccagcctagcaggaccaataagtctggaaagaagtagctctagttcatattggcacctgctaattctagttctgaagaccatgggaaatctcttgcctatttagctcagtgatcatccaagatgggaaattcttgggctcagctgtgagggatcccaagtttatatgtaccactaatgtctcacaaatcaagaatccaagagaatcaagagactatagttcattccttatattaaattcttaggactgccaactgggtggctacagntttgggggctagaagtctgatat

SEQ ID NO: 54191 - DNA, 592 bp, Homo sapiens
  misc_feature 37, 86, 91, 176: n = A,T,C or G
ctgggtaccgggcccccccctcggaggtacttctagnaattaattaacgcggggactgctcacagtagattatgctggactacagnatggnaaaaatcaaatctttcaaacctaaacttcagtagtcttctgttttctgccttataattcttagctacatgtagaagtatgcatangaaaaaaggtaagcattttccaatagtggtgtcaattggaaaaaaactgaatccttttaacataaaaaggaatcatacctatagcagccacaggattataaagactttttaggaaggaatgatttagcttggagtacaagatactgaaaacttgtattatagaacaactattaaatgaaaatgtaagaaataccttagttacatatatgttctgccttcactgctgattcttttagtgtcctaaatgggaagttttccatgtcctttgttttgttttgttttgagacagaatttcgctcttttttgcccaggctggaatacaatggcataatctcggcttactgcaacctccacctcctaggttcaagagattctcatgcctcagcctcccaagtagctgggattacaggtgcatg

SEQ ID NO: 54192 - DNA, 598 bp, Homo sapiens
  misc_feature 13, 26, 576: n = A,T,C or G
ggccccccctcgngggtacttctagnattaattaatgcgggcaggttatttaactaggtaattacaaggagcctatatttaaactcgattttaaaaagcacgttttaaataagaaaacttaacaagccatgggctgagtcctgacagctgggccccgcagcggccacgtcactgagagggagagattgtctctgtgacagtgtgcaccagggctactgccacaggaagctgctcctcagacccagcacatcacctgccgcagggagagtaggggttggtagaagagtccaggccccagcacccttcctgccccaagaatgtctgcttcaggctgctttattcatccaacttgcaggtgacatttcatctgaaagacatgttctgaagcaaaaaactaaacaaatcattgaactaggtataagatctctccacttctcgactgttctggtatgaccatttaaattgtcacaagcataattatccaaataatagtaaatgtgtggctaaattaaaatagataagctctacatcttgatgaatgcctttaatcaattctcactaagccaaaacaaaatntgaaaaaaattgttttactcaa

SEQ ID NO: 54193 - DNA, 434 bp, Homo sapiens
cccccctcgaaagtcttctagaattaattaacgcggggggatggtatgatactatatgaccagtgtctttttttgcctcataacaggtaattgttgatataatcagagaaactgaaaaagtggttttagttactcctatacacaaatttgatatcctaaaaaaagtcagctgcttaattgcatcaacgtaaaacctcctttcctagcccattttctttttaatcataaataaaatgaaatgatctcccatactgtgatgaaatgttgtaaatgataaggccagctttttaaatctccttttggggtagaatacatcagcaggggaaaggacagatactttgattaaatagatcatatgagtctacatatttccccaattagctactttcagtaaaatacttgtcagaattcatgcagaaacaaaatactgtcta

SEQ ID NO: 54194 - DNA, 596 bp, Homo sapiens
cggggccccccctcgaaagtcttctagaattaattaacgcgggggtgggtattactgaatagctgttgaagtgggaaagttggaagcaagagttctttatgtcaaacttctcatctcttttattgtattgttttttcctacttgtttttctccctttctcaaatatttagtgcctatgaaatgaaagcagagtgccaaatgtagtttctctccttgctttgctatttatttccttttccttgtgaggagggtttgttaaaccctaagcaggtaacttgaatgaggctggccaggtggtgtctctggaaaacttgaggtatgccctctaaatggaacacctgctactctgtcccagttaattgttgcctggtggaagtgagcaattccaatctgaaactgtcagatcttatgtatgaaagatgaggccagaagtctgaaattttatatgagagctcccaattttaagcgatggtaaacagtttgtattttggtaaaacacagtgccagtgatcaaaatatatatgtcatctgaatttgggcttgtaaacaacttacaatctcagatctattgatttgaaactgccacaaatatatct

SEQ ID NO: 54195 - DNA, 376 bp, Homo sapiens
cgggcccccccctcggaagtcttctagaattaattaacgcgggaagtgccaagacaaggcttaccatgctaagaatgggggtgttcatgaactatagtgttaaaaggagaacttcaaactgcaccggactctatagttcaataaaaaaatccaaagggataggagaagataagacctaatttcaggcccataaaacatcatcaaagaactttgaacataatttgcaagttgaccgacgagtaaggattttatttatcaacctgaccctcttgaaatctggaaggagagttactagcgcccacatggatggtgataattatgtatatgaactagttttgaactggacagatcttctgaactcaaaaaaaaaaaaaaa

SEQ ID NO: 54196 - DNA, 347 bp, Homo sapiens
  misc_feature 126, 172: n = A,T,C or G
cccccctcggaagtcttctagaattaattaacgcgggcaggtatgccacgttacaaacaagaaaaaagtggaatcctaagtagtagcaatggttgaatgcttagaaagagaaaaacctggatattnctagttttttaagagcaaacttttattataattcagagcattagtntaaaaatgggaacattctcaataagataaaattcaaaaaaattggaataataaaaagaggattttctaatgctttgtacacactcctgggtcaccgccatctgaaatatattcattaattcattgatatgttaaacttatatttgtgtgtaagccatttaagatgtatcaagcac

SEQ ID NO: 54197 - DNA, 609 bp, Homo sapiens
  misc_feature 28, 107: n = A,T,C or G
cgggcccccccctcggggtacttctagnaattaattaacgcgggtcccaaataatgcaacaaatattaaaaaatgaatgacttttcaaataatagataacacagtgngaaaaaatctcaggtagttataataaatcttaaatatttaagcattaacaaaaatattcacaactacgttaaaaacataaaacttcacttaaagcctaagtgcttaataaatggaaagttatatgaatcaacaagaagggatgatgatatcctaaacctgtctagcttttcacaagttcattgataaatttaatcatttctagttaaatctccacagtaatttttttctaagcttaacaaaatcattatagaacaatctgaagaaataaagagttaaaaacaactgagaaatttttgaaaatgatgatgatgactcgtgctattaaatacttggagaaaatttttgtcgtacatgtgtatgacaaaaaatttgtatccaaaatttatgtttaaaaaaaactcttatgattcaataataaaaaggcaacccagtttaaaagtggatgaaagatttcaacagatatttcatagaagcatgtaaaatgatagtcaatattggtag

SEQ ID NO: 54198 - DNA, 597 bp, Homo sapiens
  misc_feature 568: n = A,T,C or G
cccccctcggaagtcttctagaattaattaacgcggggggagaagtttgggtctgctcaaggtaggaggtgagaagagataccctcctattccataaagtcatgatccccaaaagggctacacttaccagaagataggtagatcaaaaaaagaagaagaaaagcccactagtgtagaggggactacaggatgccttctctgactatcctgagctggcagacagaagcatctcttgagctgtagggacaatggactagtactctacaaccaagcccatttgtccaggaacccctagcccaaactgagatattaacaaaacagaaagcaattcccccccaccccgcctcaggaaagaataaacctcataccaggctaaaaaggatacccacagatcagcacaaatggtagagaggctaaaagcccaaagctcaaaaagaaggaaggatggattagaagtaggattagactcaagaacttcgggagacagaactaagattgagacaataaaaagcataagagacaaaaaggtgacattttagaaaaaaaatcgagagatggaacgaatganagagctaagaaccatggaatgagaaactc

SEQ ID NO: 54199 - DNA, 528 bp, Homo sapiens
  misc_feature 488, 501: n = A,T,C or G
cgggccccccctcggaagtcttctagaattaattaacgcggggaggattgcttgagctcaggttcaacgccagtctgggcaacaaagcgagacctcatctctgctaaaaatagaaaaatttaaaaatctgccaggcatggcgacacatgcccatagtcccacctactcaggaggttgaagtgaaaagattgcttgagcccaggagatcaaagctgcagtgagccgagatcaagccactgcactccagtctgggcgacagagtgagaccctgtgtcaaaaaaaccgaacaacaacaaaatccttaagtaatattctctggacaaaaagcatgagatctaagtaattcctaggcaaactgttggggggtgtagggacaatacacagttgaaaagcttaagtctggattttccaggccaatgacatttcagatttgtaactgggctaaaaaaaaaattttgtggaggctgggcatggtggctcacacctgncatcctggcactntgggaggccattgcaagagaattgctt

SEQ ID NO: 54200 - DNA, 599 bp, Homo sapiens
cgggccccccctcggggtacttctagaattaattaacgcggggctcacccatttatgttacataacaagaattccagaggtagagagttgttggctcagtgatgctacaagaacctatgctcatcctattctttggctccttgtcctcagcaggccagcacattgctaatgtttataagatggctcttgtattttcaaactttatattcttattttaggcaagagaaatgggaaaggacaaagactaccctgctgtttctgctcccctttattgagaaaataaaaggtttctatagccattagcagatttcccactaaatcccactgactggaattgactcacgtggctctcctagccacaaggaagagaatagcaagcctcttgtcttcggcagggcacaaactaccctgatcaaagttagggagaaaggggaatctatttgaaggagggagctaacaatgtctgtcaaagtactgtgcttaaaatttggttattttgcctgttattttaaggcaaatgacatttaatcagaatttagatacaaaaaaaaggaaaacatcacagcctatcactttttctttccttacattataaaact

SEQ ID NO: 54201 - DNA, 595 bp, Homo sapiens
  misc_feature 9: n = A,T,C or G
ccccctcgngaagtcttctagaattaattaacgcgggtacattagttaacatatccatggcttcagtttcctcatctataagctaaggatagtcaaataatctatctcataggattaactgaaagattaaatgtgatgattcatgtaaaggactcactagtgcctagcatacaaaggatgttcaatacatactggcttccataattagtgcagccatcatcaccttcactccttgtgtcatctttaccacctgaggaccagtattggtggctgcgggagcacaatctaaaattgatttggtttcagatgtaacatttaatttattctgcaattgcaaataacatccgagaagggaaaggattttaggtattccaatgggttagaaaaggttaaaagtagcttaagtaggtccaacgatctctcctaccttcttagagtcttccttttagtgactttcagcttcaccaaacatttgcatatgaatccacaatattaagactatattaactctttttaattcaaaactacattacaggccaggaacggtggctcacacctgtaatcccagcaccttgggaggctgaagcgggtagat

SEQ ID NO: 54202 - DNA, 138 bp, Homo sapiens
  misc_feature 13: n = A,T,C or G
ccgggcccccccntcggggtacttctagaattaattaaaacaatctttggttgatacctagcctaaaaaattgatctaatatattctttcataaaccgtaccaaacaatcatataaatgctttaaaaaaaaaaaaaaa

SEQ ID NO: 54203 - DNA, 600 bp, Homo sapiens
  misc_feature 25: n = A,T,C or G
ggccccccctcgaaagtcttctagnattaattaacgcgggaggcctctggggtcagcccttggctcttgtgccccacgttaaacaagtttgtcaattttccatcagattgatttttctcacaggtctgaaggccttgtcttatttcgcctcatttccacaggggttcttagcattgcaaacatccatttactttgtttcaaattgtgaagagtgatttttatctctgagagattaccaaagaagaaaccgctggaattgggagaccttgtttaatatgtagactatgttggtcatctaccattttctttcattattcttctcttttgaaatgaaataccctttaaggacaatcatgtttacctagtttacctagagttctcttctgcatttgattttttaaaaaatatctgcttatagcagaggtttctgaagatcagatgggttgttctttccaagacaagttaagtctaactatgagcagattctaaataggctcctgggaaatacacatacttgctaatgtttaggagttggtccacctggcccaaggacatctgcaaggactcaaacactacgtaaagaagccaactcctggcttg

SEQ ID NO: 54204 - DNA, 472 bp, Homo sapiens
  misc_feature 28: n = A,T,C or G
ccgggccccccctcggggtacttctagnattaattaacgcgggtaagaaaggtgttagcataccataaccagcatagacatatcaaagaaaagagaattataagggaactttcttcatatttcccatcaaaatatccctatattccttacaattcaaaagtagtttctcataaatataagaatttcctggtatctccaaaaagccaaaatttgataatccatttactattttactctataaactgtactgttgagaaataaaatgtctttcaatttacaacaaatgtccattatcagcaggagttgcagcctcaggccctagccttctgctttgaaaaactggggcactgtgctaaacaatctacaaagcttcttccagctcactgcagcacatcacttagtacatccttaccacaccacttaggagtgggtaagggtctcagcactgtttaaaaaaaaaaaaaaaaaaaaa

SEQ ID NO: 54205 - DNA, 510 bp, Homo sapiens
  misc_feature 22: n = A,T,C or G
cccccctcggaatacttctagnattaattaactagggaataaaaatgtagtaagtagaaataaagtaaaaaagcttatactttagaaaatacctatagataaaacatttgcaagactgatcacaaaaaaagcaaacatttgacaaggattacctatccaggaaataagacataaactctgatataatacatactgatagaattctaggacaataaatagagcatgcaggtgtgtgacagcagatttgaaaacacagaggtactaaatggtttccatttagtatatggtgaccaaaattgaccaaagtagaagtggaaaactgaaaagaccaatttcagagatgaaattagaagagttatttgacgtttaatggcaaaaaccaccagggaagtttggataaactattacaaatatcctctcaaaaccattataagagatcaagagaaagtaagggaaattcccagggaaccaaatagaggtgaaaacaggaagagtaagctacagctggga

SEQ ID NO: 54206 - DNA, 354 bp, Homo sapiens
  misc_feature 196: n = A,T,C or G
cgggccccccctcggaagtcttctagaattaattaacgcgggaatgactcgttctctggggcatggtgctgggactttgtagacaggcgtctttattgcatggggaggtgcactggggcgtgaaggatagatgtgtcaccacgtctgctactgactttgaaagcgttcagcaaaatcgggttatctataacacatngaaaagcacacatggggccggtgtggtggctcatgcccgtaatcccagcacttagggaggccgaagtgagagggtcacttgaggtcaggagttcaagaccagcctggccaacagggtgaaaccctgtctctactaaaaatacaaaaaaaaaaaaaaaa

SEQ ID NO: 54207 - DNA, 501 bp, Homo sapiens
  misc_feature 18: n = A,T,C or G
taattaacgcgggtagcnctgggtttcatagtgctttacaaaatcctacactttattttctatttgattctgttttttaaaatataggaagtaaaaatataatcttgatttgcagtttcagtttacaaagaatatgtattcattcttttaacctaaaagagtttttagcttcttttatatgccaacaatttggtagccttagaaaatagaagccaggcagggtggctcatgcctgtaatcccagaattttgagaggccaaggtgggaggatcacctgaggtcaggtgttcaagaccagcctgacggggtaaaaccccgtctctactaaaaatacaaaaattagctggttgtggtggggggcacctgtaatcccagctacttggggggctgaggcaggagtatcgcttgaacccaggaggtggatgttgtagtgagccaagaccatgccattgcactccagcctggcaacagagtgacactccgtctcaaaaaaaaaaaaaa

SEQ ID NO: 54208 - DNA, 587 bp, Homo sapiens
  misc_feature 28: n = A,T,C or G
cgggcccccccctcggaagtcttctagnattaattaacgcggggaatgtcttgagaataaaaaaaaaacaccaaatggttcaaatctgtgaaactttcagctcttcacagaaaaaggccttgtcatctccatgtttccaccccagtccttgacccagtgcccagcacaaggtaggccctcaacacgcagatgaactgacatcttggccagttgctgtgtggcatggggcaattcctacaccttcttaaccgttccctcatttgaaaaatgggtgcagggtcaggctcggtggctcacacctgtaattccagcagtttgagaggccgaggcaggcagatcacttgaagtcaggagttcgagatcagcctggccaacatggcgaaaccccgtctctaccaaaaatacaaaaattagccgggcgtggtgacatgtgcctgtaatcccagcaactggggaggctgaggcaggagaatcgcttgaacccaggaggcggaggttgcagtgagctgagattgcaccactgcactccagcctgggcgactgagccagactctgcctcaaaaaaaaaaaaaaaagcggccgccacc

SEQ ID NO: 54209 - DNA, 589 bp, Homo sapiens
cgggccccccctcgaaatacttctagaattaattaacgcggggtggggataggaggtggcctaataaaattcatgccttcatttaatcaaaaggtttgtagcctcaaaaagttaagaactttctatctgaatctactcagtggtggttgaggctttctaatactcaatgacagctggcaaaaaatctatcccataactaaaaattactaaaaaacgaaaaaaactctttcaatggatcttttttctttttaatgaatgaatgtattcttaaaagaaatgatctcaagataacattaatttttaaggtatcatcttagagctaaataggatgtcaccttagcattccacagccagctaaaaacccaaaaacagagatagaagattagtatgatgtaatggttagagatattgaggcaaaaaagaatttgattataaaaacccctgctgtatagcaattagacaactgtaagattcaaacagctagttagaaggcaataacagtaacaaaactatgttttacaaaaccaccgagttattaaaatgtatatgcattatattatcttacagtattaaatatagttctagccac

SEQ ID NO: 54210 - DNA, 277 bp, Homo sapiens
cccccctcgagagtcttctagaattaattaacgcgggcaggacacactcaaagcgatataacagagacctgaggactgaaccaagattcacaccagggcccaaatctcaaagtaatccctggtgatacaatttcaggagagacccaaagtggaaagccagggctttaaaaatctcaactcacactggaaacaccaccaatagagatcgagacagaactacttgcagcctgaacctaaccacgatggatggtggttgtctgatttaaaaaaaaaaaaa

SEQ ID NO: 54211 - DNA, 382 bp, Homo sapiens
  misc_feature 26: n = A,T,C or G
ggccccccctcggaggtacttctagnattaattaacgcggggttagtgacataatattcttggcactattatacttgttttcttaaagtaacaaattctcaaatggcgtttccctggattgtctctactgtgctcttctgaaacctactcgcactgctatactatcaaaacagaagcaccaaaaatcatttgccagcagttactcataaagtcattgccacagttaggagaggtatctaaccggtccttgcatgatatgctcgaactcctacagggaaaaaaatatcacaaaactccctatcaatagatattgacataacttaaatagatgcatcttcagtcttacctagcgtgcttattagatgtaaaccaaaaaaatgaa

SEQ ID NO: 54212 - DNA, 603 bp, Homo sapiens
  misc_feature 560, 586: n = A,T,C or G
cgggccccccctcgaaagtcttctagaattaattaacgcggggtgcaatttgtccagagaatactccagcccagatttttcgctgcctcagagccgctaataaactggtagaatgtcagagctgctttatacagcaccatctgggactgaggagggactctgaggcaggctagtccaaatggccttgtgggttcccattctcaacctttccaaactaaattaagtctagaaaattctataatgagttaatctgtagaatccccttgaaatataaaatatactttaagaaattggtatgattactttgaaatggctcaaaatggaataatctatattactctatattcatactcttgacattatgtttaaaagttggagccggttaaacttagctttatgtcttactcttccctaaaagctcactgtttctatctaagatcagatgcttttttgcttgttttgcccatgaacaaacactggagttacttgtggctcagggggaatctgcaggtcggtggactatggaaaaaggggaagtcagcaagttccacatgactcangagagcctggaggaggggcctacggngcaggtccatgttttaa

SEQ ID NO: 54213 - DNA, 567 bp, Homo sapiens
taattaacgcgggggagggagtagtttctaggagaggggatgaggataaagactctgaagaggaaggaggtcagtaccttcaaggaacagaaagaaggccagtgtgtcagaaggggagtaggcagggggagagtagaccaggagagacaagagggcttgatattgtgaagctaaaagagggtactacgcagaggaatgacataacaatacttttatgttttaaaaggagcactttggttgccggatcaagagtgaattatagggaacaaatacaggagctgaatttgcaggttcctgggcataccacatttgcttactcatctctattacacctacagaaaatttttgctctattacacctacagaaaatttttgctcatacttgaaatatcagcctaaatactagcatctctgtgacaccttctctcattcatgtaggaagatctaaccacttcttcttctagaattccattgcatcagggggagttctagcaaactgctagaacccattatcctttggagagaccagagaatcatgtagacttctggcatttgtactatttttct

SEQ ID NO: 54214 - DNA, 566 bp, Homo sapiens
cttctagaattaattaacgcggggatactcactcactagatggtcacctatgcccagcactcattgcactgaattataggtccctcgagctggatttgaacataagagggccttcggaattatcatctaaatgtctttcaaactagtaatatgactactgactacggcaacgcaaagggcttgtgacatgtggagaagctcacctaccaatatgaactgctggagactggaaacaccgtaacagagtgtctgcaagtgcatgcaaaaaacgatacagcgcattagtattgcagcatggatcacttcaggataatttttaacctctgagttggagagaaagaacaataaaccagccggttcactctatgaagttgatactatctaaacactcccaaaacccattactgaaattatgcgtggcgcataacccacgtggcttatttcaagtggctgattgaacaaagtatatgagaggcacctgtctgtccataaactcccaataagtgctaagtaaatggttcttttcactaatacaaccatggtggacctaccatgactctatatga

SEQ ID NO: 54215 - DNA, 588 bp, Homo sapiens
cgggccccccctcggaagtcttctagaattaattaacgcgggtcacaaggtcgggagatcgagaccattctgactagcacggtgaagccttgtatctactaaaaatacaaaaaattggccgggcgtgctggcaggcgcctgtggtcccagctgctcgggaggctgaggcgggagaatggtgcaaacccgggaggcggagtttgcagtgagctgaaatcgcgccactgcactccagcctgggcaacaagagcgagactccgtctcaaaaaaaaaaaaaaacaaaaaaacaaaaaagaagctggacagatctatcatagagaggagaaacaaagtttaaagccagaaaagcaaactagttgaaaaatatagttctctaattggcacagaatctgtgtatccccacttacaaaaacattttgacaaataatattgtgtagaatagacctaccaaattaccacagtagttaatactgaaattaaagcaaagaaacaaaaaacctaactctacttgttgaagatgatgagaaagtcaaagaaaccaaaccaataaactatattaaaaaaaaatatgatcagtcaatataaaca

SEQ ID NO: 54216 - DNA, 594 bp, Homo sapiens
ccgggccccccctcggaagtcttctagaattaattaacgcgggtcggtgaacaaattaacggactctgtggggctgcatattctatagggaagctgatggaagaacattcatgtaatttttgttttccagtttgaaaacttctatttaaaaatgcaagagtgtgtgtgagaaagcaggagagtgcaagtgtgtgtgtgtgtgtgttgggagctggcgttggtagtgtggggagagaatgcactgctcaaagtatggaaaccttctgttcaggacactgatacgacgagctgtgtcctttgcccactttccctcactgtataccggtttctctagttaccacttttggaatggtgctgtttcagtgttggaatgttggacgtttgataagaaaatggatcaagtttaatggcgcatgctctttgtgccaccagcagcctcttgctgagagcatgctccaaaagcgggaactgtgtggcattacactgagcatctatatgctttgtgtttctgtgccacagagaagagaaatgaactgtggcatcgctcctgccttctgaacagctctactccgattaaaaaaaaaaaaaaagcgg

SEQ ID NO: 54217 - DNA, 619 bp, Homo sapiens
cggggccccccctcggaagtcttctagaattaattaagcagtttgattttcttggtttctttctggatattagtcccttatcagatatatatattgcaaatatttaccctttaatttgtgtaacccacaaattcttcttattcttttgtttccttttctttgaagaagttttatgtttgataaaacataaaaacttttatattgtttaatattaaagtcaaagtaagtcttatgtaaaagtatcagagaaaattacaactaatgttaacttagtttttaaattcagtaatgatagtctgtaatttatattcataatgttatcacaagaagtaataatataaaatattttttaaaatatataaacataattttaaaaaaacaaattcttaaatttaattacctctataagagctaaattaagtgtgtcctacattaaaagaaaaaaatttttaaagaaagagcagttgtcattgaacacaatagtgaatatggtagtattagtcatacagaatacaataaaagttgaaacaagttttaatttaaactgaaaaagaagctaagatttagttctgcaaattatgccattataatataattttgttattttaaaacttgtagt

SEQ ID NO: 54218 - DNA, 587 bp, Homo sapiens
agaattaattaacgcggggggagtaagtaagtaggtgaagaagtaagtatatgttatggttacttttttcacttggttttttactttagatagttatctaaaattggaagcaatgacaaagtaacaaacaaatctgaaacaagtaaaggtagtgggtgccatatataaatacaggagttacaaattggaagagggaacatgcaattactcaaaagaggacatctttaaggagatgctactgtggatttcactgatgagaaagagtattgagaattacacctatatactctatctccaaagaggtgcttttattccctttgctaaactgcatacaattaaagaattttgctgaacattagctgctgtgctacattcttccataggctttaactacttaaatcactttatctagttttcagtttaatctctgcaaggtcagaggttatagcccgtaaaactattcttactgaacaaagcacactgtcttacattaaatattaatggaaaaagtccagaataatcacatatttcttcctatagctattagctaatgatctttcatacttatttaccaaacatgtattaaa

SEQ ID NO: 54219 - DNA, 606 bp, Homo sapiens
  misc_feature 10, 403, 530: n = A,T,C or G
cccccctcgngaagtcttctagaattaattaacgcggggcctgtaattaatcccctgaagaatggcaacttgtgcattgaagacatgtgatactttggggatgaggatggtagtggaagttctcatttctttctaaagttcttagagtcttaatttatggatttattttcccatctacctatggaagagttattttataagtaaaacattttgtagcagacatcaaattgtctgctacagaagtaaatggcatataaatccacatagtgagtctgtgaaagcttctctcttttaaagttctattcttaataaagtcaaataatgattaaggatgtttaagatatagaattacactgacataagaaaataaaaatggcagttaaaataattaaaaaaacaaaanatgcaaatgtgaataaacatgttatttagaaaagaaaccagtttattttaaaaataaaataaattatgcttattaaaataagatgaaaagaacggtgacataattgatataaatatagagttaaaanatagaggagtggaaaattacttcaactgaagcatgttgcctccaatgataatataaaagggtactgactaaaaaaa

SEQ ID NO: 54220 - DNA, 549 bp, Homo sapiens
  misc_feature 523: n = A,T,C or G
cttctagaattaattaacgcgggaggcggaggttgcagtgagccgagatcgcaccattgcactctagcctgggtgacagagcgatactccatctcaaaaaaaaaaagtatgttcgttgtgttttatgagacaatgggatctcagttaatgaggctttcctgtcgatcagctggccttgtgaaaagctttaaagtgcctcagctataatagccaagtcaagtcaactttttgtataatagctatttcatttgtttgtattttaaatctagaaatttgatacgcagagattctccccccaaaaagctgaaagggccagactttctgctgctgctggagactgtgtgggagtgaggaggctgtcctagcagcccagctgtatagctgcaagctgctagtgttgggcacatcaggagttagtcctgctcatggttcattgagagccaggggcccagctggggacaggccttctcatcttgacagggtctcaaccccattgtagagcatttgaggtgaagagcgcctnccggccgggcgcaataactcacgcct

SEQ ID NO: 54221 - DNA, 610 bp, Homo sapiens
  misc_feature 9, 23: n = A,T,C or G
ccccctcgnaaagtacttgctanaattaattaacgcggggtcctaatagtgtagggtgcattaagtttttaagactggggcaatccatcagggagtgtattctgggagaattcaagcagaggcatgttttaaaggaagtaagaaaagttctgtaagttatataattataaaaataagaccaacattaagttgtagtaaattttgttgtttgttcctttctaacactagagcacccacaacttttaccttccatatcagtttgcagacaaaccgctaaaagttgcaagagttcataatgtaacttggcagtaatgctaacaatgcaatgcctattgcacaaagtttatgtctatctttgtgaatcaaaatagcttttgtatgattttcttatttcaaaataactaatatttttatttcattttaagcatagcttcttctctttcaaatacatgttagcttcaagaaaaaagctcacagctgagcccgggtttagtcatttgaatcctttgtgtccatcagtgatagaaaactttcatattttcacaatatatgtagtattaaatactcctctgaatattttgcaccatttctatttggtgattatccatct

SEQ ID NO: 54222 - DNA, 569 bp, Homo sapiens
ccgggccccccctcggggtacttctagaattaattaacgcgggcgcatacatgcatacgccttcactcactaactaggaggaggacaatgctgggcttcatgctttaccctccacaactcctgacaacaaatccagtgccaaactccattcacaaatgtccccaaagagatagaaagctgatgctcctcattgcgtgctgggaaaagatgatggccacgaccttaatgaatccaagagaactaattgctcttcatttctacactttctaatcaagctgttgaccttgagttgtgttgtgtatttggaggagtcccacaacatctgcttagagagagattagatggatactcccaagaggacagtccacaagcgtttatacatggccatcctagaacaaggaatcatggagtgatcaaaggggatttttggttcctgcattaagcaatgactacgccgtcggccgctcctggaatggcaggtccccctcacaatgcatagagttcaatagccagctctaccagagagtatgctttccatagtagtgcgggaagcacaagccccaccccca

SEQ ID NO: 54223 - DNA, 415 bp, Homo sapiens
  misc_feature 11, 23, 36: n = A,T,C or G
tgggtaccggngccccccctcgngggtacttctagnattaattaacgcggggggtaagtgctggttttccattttaaacatagctcgtgatatcaagttgccccctcccttcattccctgactcccgtcttcctccaaaagcggctctcttggtttagtaagcatctctaccctgcaaagcggaaataatgaaaaatgagattcactttgcaagcttgttgggtgagcttctggagaataatttttaccaaaagcctgaaatcatttggcattgttggtgttttcaatgcatctgcatcacagcacattgcatttcacatctggccagtttggaatgaaacttagaaaatcaccagactatagtgatgtaattgtcatgaagtggtttttgtagcttagagaaaaaaaaaaaaaa

SEQ ID NO: 54224 - DNA, 585 bp, Homo sapiens
  misc_feature 29: n = A,T,C or G
cgggcccccccctcggaaatacttctagnattaattaacgcggggacatactgcatttctttcatgtaccagcactattctaaattcttcacatctcccacacaacaaagcattaacactcactatctcatttaccaatgagaaaaaaaggaaataaaaagttaaataatccatcaaagactacatagctaaaatgaggcaaaactaaaattatatccatttctggaatattatgcccacttctaagccttctatctttccactatagtatgctgtctcctttacagattacacagtactttgacatagctcatacagtctagtcacactggatttttactcctcaaaaataccatatacttgcttatttctgtgggtctgccaaaggctgcatttcttccttgaatgctactctcccaatctccatgtgcttgtatgtcctacctaaagaagagcttcaatatactctgcttgacaaccccagtacaaaattaccttttcatctaaattatcactacacatatgtctctcatacagttctgagtttacagtataaaacaccagaataactgtaaacatttatca

SEQ ID NO: 54225 - DNA, 593 bp, Homo sapiens
gggccccccctcggaagtcttctagaattaattaacgcgggaagaagagcagactttacaagggctgggtccgctgttgtcactcaaacaggcagtcaaatttctaccctgaacacaatcttatcatcagtaaatgcaagggagaaagagagagagggaaactgattaaataagttaaatctcttgcaagaagtgcaaacagtttgcttccccacagcaggatattggaaagccccatgaaagcaggctctggagagacatagatagtggaatgagagtacttttttaatataatttttataaagaaggaaaccttgaagttcaagagtctggcaatctaaaatttttgtagagaaagaaaagattgggttccaaatagataagtgctggtgggcatctttctaatttgctcacttttctttcttggcatcctattaccattggcagcttctccaggctgctgctgcttcacccttgggcagtctgtgcctgagaggatgcttgctggtaatctgcaaagggcaggagaactaggcatctccaggcttctgtttcctgagctctgacagcacccaaacatgggtgtgcatact

SEQ ID NO: 54226 - DNA, 583 bp, Homo sapiens
cccccctcgaaagtcttctagaattaattaacgcggggggtacaattcacaccaatgacaagcaaaatcttttcaagaaaaggaaagatgagaagcacagaaattcaaacacacggtgaactgatcggcacacaaaccagtttagcaactcttcaaggtgaggtgtatttgtgcctcttcatcacgcatacctttgaaaaaaagtaattaaactacagtctaaaggaaagttttatttgtcaaacttgaatctgcaataacagagctagagggcccccagttcctggcccaaagacctcaacttgtatttgatacagctgcgtgtgatgctgtgtatccttttatttaaacacaatccattttcctctgtcagtctacaattagcatatgagtcaaaataatattaaatttcacagcccacagtgctgcacaattgaatgaaaactgactccttttgatgttaatcttgttttttatttgtgatgtaatgctcaaaatcctgctggctgaagtcaattttattttaaagtgctcaaagacagtattctcatagtttaagctttttttttttttcttcaggaaa

SEQ ID NO: 54227 - DNA, 573 bp, Homo sapiens
attaattaacgcggggggatcttttgaggtcaggagttcgagaccagcctggccaatgtggtaaaaccccatttctaccaaaaatataaaaattagccaagtgtggtggcacatgcctataatcccagctacttgggaggctgaggcaggagaatcacttgaaccctggaggcatatgctgcagtgagctgagattgtgccactgcactccagcctgggtgacaagagcgagactccatctcaaaacaaacaaacaaaaacaaacaaacaaaaaaaaaacaagtccatatgtaaggtccctgatgataaccctgagtttcctataaagacaaaaatgctgccagcctttactttggcttgtgactaattgggcattagtgccttacttttgaaatctatgtcaagcttttaattctgtttctgaatttttcaataaccatgctatccttcaattacaagatttatgctcctgatgcatcatcaatactctttcaagttttgttttctagtattagagataagttgcaccgaacttgagaatttgccacttattagggtaggggctagataggg

SEQ ID NO: 54228 - DNA, 511 bp, Homo sapiens
acttctagaattaattaacgcggggtcttcctcataagacagttagctgctgtttgaggtcaggaaccagttctatttcagtttgtattccaagagcccagctctgtgtccaggtcagagttataatatgggttcttacgctctttctctgtctctcttatctttccccactgattcatttccattgctattgcagatagtagtcaagttaaattaaaatgtattaaatgggccgggcgcggtggctcacacctgtaatcccagcactttgggaggccgaggtgggtggatcacgaggtcaggtgattgagaccatcttggccaacatggtgaaaccccgtctctactaaaaatacaaaaattagccgggcatggtggtgtgccagctactcaagtgactaacgcaggagaatcacttgaacctgggaggtggaggttgcagtgagccgagatcatgccactgcactccagcctgggcgacagagcgagactctgcctcaaaaaaaaaaaa

SEQ ID NO: 54229 - DNA, 618 bp, Homo sapiens
  misc_feature 28: n = A,T,C or G
ccgggccccccctcggaagtcttctagnattaattaacgcgggagatagctgtattcattgttctatctctactgctttgcactagatgcataatatatgtttcttgaatgaaggacaggaaactactaggcaggccagattgaagccagacaagaaagtacatttcaggcagggcagacctggacacataaaacctagtggttacaatctgagattcttttagtcagagctcaaattttgttagtagagtccccagtcaacccttactaaccgaggttacttaacctcgttgaatttaattttcccagatgtaaactgagcaaaataataatactcatagaattagctattgctattgtatttttattgttattatcatgaggaagggaattcatggctttatgaagcaactagaaaaggtatgtgtactcttcaaaagttcctgggatgataagaatctgtctctcatggtctcccagggaatttcatttgcttgaaaatataaggttctactgaaatcaagtagggtgttactaaacaattactcacccatggacccaaatagctcttgctaatgtcacagtgactcttatgcatttaggaaacagctttgcttt

SEQ ID NO: 54230 - DNA, 432 bp, Homo sapiens
gggccccccctcgaaagtcttctagaattaattaacgaggggggagggatagcattgggaggatatacctaatgctcaatgacgaggtactgggtgcagcgcaccatcctgtcacatggcatacatatgtaactaacctgcacattgtgcacatgtaccctaaaacttatatatcataacactaaaaaatcaacagaatattctcctatagctataatgccactgcttaaaggaaaggttattttaaaaggtgaccattgataaagtttgattgaaaacctccttcttggattacaatacaaaaagaagagcagggtaaggatatcttatattgccttaatcttactctcattttctctcttctacacacataaaatcccattattgtttacaaaaattgctccttcattaaaaaaaaaaaaaaaacgggcc

SEQ ID NO: 54231 - DNA, 377 bp, Homo sapiens
gccccccctcgaaatacttctagaattaattaacgcgggggacttattcacgtgaaacttgctggctctgtgctatgggtgtttgtgactcttttttaggggtgtagctgtcaagggctaaaaacaaggtgaaggagccaggcatggtgtctcatgcctatcattcctgtattttgggaggctgacctgggcggatgacttgaagccaaaagttggagaccatcctgtgcaccgaagtgaggccccatatctacaaaaaataattgatctgcgtgttgtggcctgtgtttgtagtcctaactgctcataccgctgagatgggaggattgcttaaccccaaaacttcaaggcttcagtgtgctatgattataccactg

SEQ ID NO: 54232 - DNA, 356 bp, Homo sapiens
aaaacgcactgccattgttaaacgacgtgccagtgataaaacgacggcccctgttatactaaggtcagcgcgcaaagaccttccggggggcccccctgcctttttggggcttttcctacttcctgggttggaacagtttggccctgggcgtcctccttttgggggaggggttttcaattaacgttttttaaaaaagcgttgggcccccctggagtttcctattaaataaaaccggaattgcttttgacccccccgccccaacccaaaggggaaatagccggttttgaaagcccctggatgtttccccggaccactttacaagggccctaacccccccctttcccaaagctttttcc

SEQ ID NO: 54233 - DNA, 374 bp, Homo sapiens
ccgggccccccctcgaaagtcttctagaattaattaacgcgggcacaaaaaaaaaaaaaaaaaaaaacaaaacaaaaaaaaaacaaaaaaacaaaaaaaaaaaaaaaaacacaaacccaaggcaacaaaaaaaatatatatatgaaacttaaggcaaataaaaaactacacgggcgcctaccagggggggaggacgaggcccccacgcattgaatttgaaagatacccctcgggcggccggtggggtcacgattagacttggggcataccttgggcaggcactatcaaaaagtgtacgccaactaacggctctgaaatagtgggagaaaaaaaaaaaaaagccgccgccaccgcgtttgagctacaattggccc

SEQ ID NO: 54234 - DNA, 531 bp, Homo sapiens
cgggccccccctcgaaagtcttctagaattaattaacgcggggcatgatagcggaacgccgcaaaatcactgcgcgccctagtaaaatgcgctgcaaccggcctcggctgacctcgcatctgctgggcatgacatcagagcgaatatagcgattgactgagaataccttaaggattgcctattattagtactcataatgaactcaacaaagcagcatggcaaagatgtgtatagccatgaactaagggtgcttcttatgtgaaagtcactataccgatgggaaaacatgccagcaaatactgctaaatgcactgaaccccccccctgacaacgccattgtggatcctcaatattccttagagggcttctgattacgcgcgcgcactggccgatcttcaacaacgatatgacgaggaaagaccatccgtgacccactggaaggaacatccagatcgtgcccctttccccagctggcgacttagatataaaagcccggtgcttatgccatagcaaacaaaagcacaggctggc

SEQ ID NO: 54235 - DNA, 372 bp, Homo sapiens
  misc_feature 27: n = A,T,C or G
cgggccccccctcggaatacttctagnaattaattaacgcgggacttacaaaaaaaaaaaaaaaaaaaaaaaaaaaaaaaaaaaaaaaaaaaaaaaaaaaaaaaaaaaaaaaaaaaaaaaaaaaaaaaaaaaaaaaaaaaaaaaaaaaaaaaaaattttaaaaaaaaaaaaaggggggccccccccgggggggctttcattttcccttttttggggttttttttaccccctttttttggcgttttttttaaaactttgggtttggaaaaactttggttttcccaattttattgcttttgaaaaaattccctttttccccatttgggttattaaaaaaaggcccccccccattcccttttccaaaattttgcc

SEQ ID NO: 54236 - DNA, 605 bp, Homo sapiens
cccccctcggaagtcttctagaattaattaacgcgggtcctggaaaaaaactatgcagagagagcagtccagaagtcttcatgctgttccctgagtgtttggctgagtactcagctgtaccacatgtaaggtgaaaccccataagttgcctatgaactcaacaattcccctagctcatgcaaaattggaaatgcgtgagttctgatgagtcaagccagggagaccatgttgaatatatgggagcattaatggggatcatgccttcatagtacagctaatctagcccagagctaggcttactctagatccaacataaaatgcttaaaacaagacacaaaaggatcagctaatctacatactatttagctgactgccaaaacaaaactcaaaaatttcttaaggaggataacaaactccagaatcttaacatgatattcagagtgttcagtacgcaatcaaatgttactaaatatgcacagaaacaggaaaatattatttctaatgagaaataaaatcagttaatagaaaaatacctgaaattctctactaaaaatacaaaaaattagtgggcatggtggcacactcccgagtagtcccagctactc

SEQ ID NO: 54237 - DNA, 383 bp, Homo sapiens
taattaacgcggggggaaaaaaaaaaaaaaaaaaaaaaaaaaaaaaaaaaaaaaaaaaaaaaaaaaaaaaaaaaaaaaaaaaaaaaaaaaaaaaaaaaaaaaaaaaaaaaaaaaaaaagaaaaatttttaaaaaaaaaaaaaaggggggccccccccggggggggtttccttttcccctttttgggggtttttttccccccccttttggggcctttttttaaaagggggggggggggaaacccttgggtttccccatttttttggctttgggaaatttccctttttccccggtggggttttttcaaaaagggcccccccctttttttttttccaaaatttcccccctctttttggggagtggatttttgccgccttttttttt

SEQ ID NO: 54238 - DNA, 502 bp, Homo sapiens
  misc_feature 10, 23: n = A,T,C or G
cccccctcgngggtacttctagnattaattaacgcgggacctccagctgtactagtgccattggaataataaatttgataaggtggtgaaaaaaaaaaaaaaaaaaaaaaaaaaaaaaaaaaaaaaaaaaaaaaaaaaaaaaaaaaaaacggccaaacaacaaaaaaggaaaaaaaaataaaacatatggggccccccccggggggccctccctttcccccttttaggaactttttttcccccccctccttggcctttttttactaaattgccttggggaaaacccctgttttcccccattttattctctttaaaagccccccccttttccccctttggattatttccaaaaagcccctccccaatggcctttccaaacattggcccaccctaaagggcaaaggaaaattttagccaaaaattttttttaaaaatcccgttaaatttttttttaaaaaccctttttttttaacaaaaggcccccattttgggatttcctttt

SEQ ID NO: 54239 - DNA, 434 bp, Homo sapiens
attaacgcgggggatcttgttggatgcacttagaatttggaaaaatggaagccaaattttatctttaaaaactgttttttcaaaataaaacttttttttgtttgtttcaaaaaaaaaaaaaaaaaaaataaaaaaaaaaaaaaaaaaaaaaaaaacccaaaaaaaaaaaaaagggggcccccccccggggggaacctcaatttccccttaaaggaatttttttaaccccccttatttgccttttttttaaaaactttgggatggaaaaacccttggcttaaccaaattaaatcccttgaaaaaaaatccctttttgccaagtgggtaaaaaaaaaaaaagccccaaacaaatccccttcccaaaaattggcccaccttaaagggaaaaggaaatttgaagccttaaattttttttaaaattccgcttaaatttt

SEQ ID NO: 54240 - DNA, 548 bp, Homo sapiens
  misc_feature 511: n = A,T,C or G
cgggcccccccctcggaagtcttctagaattaattaacgcgggcagaatgtatttcacttcatatgcacagttaaattactgtgttttaaaagtcatttgaaattatctctgtttgtgtgcctccaactggacacacaattaggttcgctgtttcacatttcttttggggttcagggattgttattttcatttttgagttaattatgttttgtaatcatgggagtcaaatttgcagaaaaggtacattccaggccaggcacagtggctcacgcctgtaatcccagcacttggggaggctgaggcaggtggatcacctgaggtcagcagttcgagaccaacttcaccaacatggtgaaaccccgcatctctactaaaatacaaaaataagctggatgttgtggcgcacgcctgtaatcccagctactcaggagactgaggcaggaaaatcgcttgaacccaggaagcagaggttgcagtaagccaagatcacgccattgctctccagcctgngcaacagagtgagactctgtctcgaaaaaataaaaaa

SEQ ID NO: 54241 - DNA, 466 bp, Homo sapiens
cgggccccccctcgaaagtcttctagaattaattaacgcgggggggaaaaaaaaaaaaaaaaaaaaaaaaaaaaaaaaaaaaaaaaaaaaaaaaaaaaaaaaaaaaaaaaaaaaaaaaaaaaattaaaaaaaaaaaaaaaggcggccccccccgggggggacctccatttccccttttagggagtctttttaccccccctcattggccgttttttaacaacttcggaattggaaaacccttggcttacccaaattaattccctttgaaaaaattccccttttccccagttgggttaataccaaaaaggccccccccattcccctttccaaaaatttgcccaccctaattggcaattgaaatttgaaacctttatttttttgtaaaaatccccttaaattttttgtaaaatcaccttttttttaacccaatgggccaaattcggaaaattcctttttaattaaaaaa

SEQ ID NO: 54242 - DNA, 522 bp, Homo sapiens
  misc_feature 16, 29, 79: n = A,T,C or G
cggggccccccctcgngaatacttctagnattaattaacgcggggaatgatggttgcacaactttgtgaatatactagnaaaccaatgaattaaaaactttggaagatgaaaaaaaaaaaaaaaaaaaaaaaaaaaaaaaaaaaaaaaaaaaaaaaaaaaaaaaaaaaaaaaaaaaaaattaaaaaaaaaaaaaaagggggccccccccgggggggacctccatttccccttttagggagtctttttaccccccctcattggccgttttttaaaaacgtcgggatgggaaaaaccttggctttcccaaatttattccctttgaaaaaaatccccttttccccagttgggttaataccaaaaaggccccccccaatcccctttccaaaaatttgcccaccctaatgggcaaaggaaatttgaaacctttaattttttgtaaaaattcccgtaaaatttttgtaaaataacctattttttaacccaatgggccaaattcggaaaattcctttttaattcaaaaa

SEQ ID NO: 54243 - DNA, 539 bp, Homo sapiens
  misc_feature 28: n = A,T,C or G
ccgggccccccctcgaaagtcttctagnattaattaacgcgggggggggggagaagaccaattaaatactgaaaataacatgttatcattttcttctctcttcagtttacactccagtcaactacaagtaaatactacctagtacacatacacataaattttgcacgttgggtatcatctcataattactgtgtatacaaataataaaaagagaagataaaaaatgctaaacactgtttcatttttattaatttggttaataatttagaaactctttttaccctctgatcattcaccacatgtatgtcccaggaaattcacttccgttctagccttcaggctgtatttgggtgataactgaccaggtttggcagtgtcacctggttaatcaaatagcaggagcaaaacaaattaaattagaaggctccagaatgtcacaacaaaaccaaacagagaaaatagctccattaaaagagagagaggagaaaaaaaaaaaaaaactatgccaagttttttatgaccatatacaagctagcctg

SEQ ID NO: 54244 - DNA, 282 bp, Homo sapiens
  misc_feature 25: n = A,T,C or G
aaaataaaacgtcgtttttcctggnaaaaaaaaaaaaaaaaaaaaaaaaaaaaaaaaaaaaaaaaaaaaaaaaaaaaaaaaaaaaacaacagaggagaaaacaaaaatacaacttataaaaaaattttgtggccccccctgggggggcgttctttttcccctttttgggggggattttcccgcccttacttggcttaattttttaaaagtccatcttggaaaaccctggtgttttccaaattaaaaggcttggaaaaatttccctttttaacagtttggctt

SEQ ID NO: 54245 - DNA, 368 bp, Homo sapiens
  misc_feature 11, 22, 191, 192: n = A,T,C or G
ccccctcggangtacttctagnattaattaacgcgggatatactttaattaacaatgtgagtttctctgtgaaaaaaaaaaaaaaaaaaaaaaaaaaaaaaaaaaaaaaaaaaaaaaaaaaaaaaaaaaaaaaaaaaaaaaaaaaaaaaaaaaagaaaaaacaaaaaaaaaaaagggaaaaaaaaaaaaanncccccccccccccccggggggccccccattcccccctttgggggcctttttcccccccccccctggccctttttttaccccctggggccggggaaaaccccggggttcccccatttaatccccttggagacactcccccttttcccccggggggttttaaaaaaaaggcccccccc

SEQ ID NO: 54246 - DNA, 584 bp, Homo sapiens
cccccctcgagagtcttctagaattaattaacgcgggcaagccgtccacccacctcagcttcccaaagtgctgggattacaggtgtaagccaccacacccggcctgttgtattgttcttatgctgtatgtgaagtagtgtaatatatttgaaagtagtctgtgctgtgttaaagatatatattttggatccaagcacactaaaaaacaacaaaactaaaaataaaacagaagaactaatgtaataagtcaataagaggagaaaacagatctataaaaaatactcaatccaaaagaaggccatacaaaagggaaaaaataatcccaagaacagatgggggctgggtgcggtggttcatgcctgtaatcccagcactttgggaggccgaggcgggtggatcacctgaggtaaggagtttgagaccagcctgaccaacatggagaaactctgtctctactaaaaatacaaaattagccgggcgtggtggcacattcctgtaatcccagctacttgagaggctgaggcaggagaatcacttgaaccgaggaggcagaggttgcggtgagccgagatcacgccattgca

SEQ ID NO: 54247 - DNA, 331 bp, Homo sapiens
gcgggggggtggcggggggggagagggagaagaaaacacaaaagaaaaaaaaaaaaaaaaaaaaaaaaaaaaaaaaaaaaaaaaaaaaaaaaagttaaaaaaaaaaaaaggggggccccccccggggggggcccccattcccccctttggggggcggtttaccccccccccccggcccggggtttccccccggggggcgggggaaaccccgggggtcccccacctaatcgcccggggggcccaccccccttcccccggggggggtattaccaaaggggccccccccgtcccccctccccaccagtggcccccccggaggggcgaggggaat

SEQ ID NO: 54248 - DNA, 376 bp, Homo sapiens
  misc_feature 319: n = A,T,C or G
ccgggccccccctcgaaagtcttctagaattaattaacgcgggcttgctaaaggtatttgtatttgtatttctttagtaagctctcttgtcatgttcactactttttattaaggtgtatttctgttattgattttaataagacttttatatattgtataccaaaatgttttctaatttgtgccattctgtatttttgctttaaaatatttagttttaaaatgatataaataaaaagttattcaaatttgtataacaaatttttgaaacttttatgttaaaaatgataaccttataccttagctgataatctatttgctntcttttcttgtgacagttgattgacagctttatttataaattaaattcttcagcatg

SEQ ID NO: 54249 - DNA, 540 bp, Homo sapiens
  misc_feature 34: n = A,T,C or G
ggtaccgggcccccccctcggaaatacttctagnattaattaacgcgggggaagacttattgttctaatatttctacttttgtatgtgtttgaaatttcaataataaaatgtttaaaatcaaaaccaaaaaaaaaaaaaaaaaaaaaaaaaaaaaaaaaaaaaaaaaaaaaaaaaaaaaaaaaaaaaaaaaaaaaaaaaaaaaaaaaaaaaaaaaaaaaaaaaaaaaaaaccggccccccccggggggaaccccaaattccccctaaaagaaatcttttaaccccccctaattggccgttttttaaaaactttggaattggaaaaaccctggctttcccaaattaaatccctttgaaaaaaatcccctttttcccagttgggtaaaaaaaaaaaaagccccaacaaatcccctttccaaaaaattgcccaccctaaatgggaaatgaaaatttaaacccttaattttttttaaaaattcccctaaaatttttgtaaaaaaaacttttttttaaaccaaaaggccaaaatcggaaaaatcc

SEQ ID NO: 54250 - DNA, 266 bp, Homo sapiens
cccccctcgagagtacttctagaattaattaacgcgggcttatggactgcttttcagaatggtgattgtaaactcataaaataaagcacataacaagacaaagggaaccagtggcttggagcgagttatcaaaatattggagaaaacaaattagtagtgacaattatatatgtgcctctttactaatacgttaagtagcgagctgcactggtgggtgtaattagtaccactacttcaaggcagcgacgaatataaacgatattttg

SEQ ID NO: 54251 - DNA, 502 bp, Homo sapiens
cgggccccccctcggaatacttctagaattaattaacgcgggggggggttaaaaaaaaaaaaaaaaaaaaaaaaaaaaaaaaaaaaaaaaaaaaaaaaaaaaaaaaaaaaaaagaaaaaaaaaaaaaaggaaactaaaataagaaaaaaaaaaaaaaagggggccccccccgggggggacctccatttccccttttgggaatgggaataccccgccctaactgaccttattttaaaaacggcggatcgggaaaaacccgggggtaacaaaattaaaaaggctggaacaaattccccttttcacaagttgggtaattagaaaaaaggccggaactggtcgcctttccaaaatggggcccacccggatggggaatgggaaattgaaccctttatttttccgaaaaagcccaattaaaattttcgttaaataaccaaatttttaaaccaaaggggggaagtgggtaaattcccttttaaaaaaaaaaaacaaactaaaatagggt

SEQ ID NO: 54252 - DNA, 340 bp, Homo sapiens
  misc_feature 17, 28: n = A,T,C or G
cgggcccccccctcganagtcttctagnaattaattaacgcggggctctttttcttgtgcattacaggaacatgaacaatactcattaaaaaaggattctgcctaaaataacaaaaaaaacttgcccataaccacaaaacacacaaaattaaactccaccagctactgacactacacttaatgcccataaataacaataaggccccccccaccgggggggccccccaattccccgcatattggatgccatgcccccccccccttgcccagattttaacaacgcgaagccggaaaacccctgggaccacccaaattaattccctttggaaaaaatcccctt

SEQ ID NO: 54253 - DNA, 410 bp, Homo sapiens
  misc_feature 389: n = A,T,C or G
tgggtaccggggccccccctcggggtacttctagaattaattaacgcgggtggggaaagaaacacaacagataggacaaaaaggaaacaaacagcaagacagatttaaacccaaacatgtcggtggttaccttcaatacaagtgatctaaaaactgcaaagaataattgagtaaataaaagagatcccccttcctggctaacacggtaaaaccccgtctctactaaaaatacaaaaaattagccgggcgtggtagcgggcgcctgtagtcccagctactcgggaggctgaggcaggagaatggcgtgaacccgggaggcggagcttgcagtgagccgagatcgcgccactgcactgcagcctgggcgacagagcgagactccgtctcanaaaaaaaaaaaaaaaaaaaaa

SEQ ID NO: 54254 - DNA, 566 bp, Homo sapiens
  misc_feature 23, 532: n = A,T,C or G
ccccccctcgaaagtcttctagnattaattaacgcgggccatatgttctcacttaatagtgggagctaattggtgagaattcatggacacaaagaggggaacaacagactctgggacctacctgagggaggagggtgggagaaggaagatcaaaaagataactgttgggtagtaggcttagtacctgggtgatgaaataatctatataccaaaaccgatggcacgagtttacctatataacaaacctgtgcatgtaccctgtatctaaaagttaaaaagatgttacagtaattgacacattaaaagatgactttaatgagagtgctattttctatatagacagaaaaaggttgcatataccttatttctatccttactacttgtagaaatgttcagacttttatttgggctcactactcctccatattagtaactccatttgtggttggtttcatgaattacctatattttaattcaattaaaatttatattaaaataagtattaaaatatttcctttatattaaagtatancaacactttatactattaaaatattatttatttt

SEQ ID NO: 54255 - DNA, 402 bp, Homo sapiens
  misc_feature 28, 44: n = A,T,C or G
cgggtccccccctcggggtacttctagnattaattaacgcgggnggaaaaaaaaaaaaaaaaaaaaaaaaaaaaaaaaaaaaaaaaaaaaaaaaaaaaaaaaaaaaaaaaaaaaaaaaaaaaaaaaaaaaaaaaaaaaaaaaaaaaaaaaattttaaaaaaaaaaaaagggggcccccccccgggggggacctcaatttccccttttggggttttttttacccccccttttttgccggtttttttaaaccttgggattgggaaaacccttgggttccccaattttattccttttgaaaaatttccctttttccccgtttggttttttacaaaaagggcccccccgattccattttccaaaattttgcccccttttttggggaattgaattttttaccttttt

SEQ ID NO: 54256 - DNA, 587 bp, Homo sapiens
ccgggccccccctcggaagtcttctagattaattaaatactaaaacataccatgatctatttctttttattgtttttctttcatgtgtatcatagtttaattattatatctttgtatatactttattatctgacaagctttttttttacactttttttcctcatattgtttgatatatacttttgtccactattctgaacttgaaaatcatttgtcaaattcgggatgaaaatttcctttggtgaacctgaattgacttggtcttaatttaccaaataaattggaaataattaaactctttataaaatgagtttttcagttagtaacatgctaaaccttttaatttatttatatttttgaaagtttccctagacaaaattttgcagttttttttcaaagtgatgttatatttctttgtagatttacatttgtttattttattatagatactattttgtgagcattttttcccttctattttctagttgttttattttttataccaggggttgtagcaggaagctctatagggtagaggctaagagtttaaacctcccaaacctcagactaagttcaaatcttggttc

SEQ ID NO: 54257 - DNA, 474 bp, Homo sapiens
  misc_feature 13, 15, 26: n = A,T,C or G
ggccccccctcgngngtacttctagnattaattaacgcgggagttaaaaaaaaaaaaaaaaaaaaaaaaaaaaaaaaaaaaaaaaaaaaaaaaaaaaaaaaaaaaaaaaaaaaaaaaaaaaaaaaaaaaaaaaaaaaaaaaaaaaaaaaaaaaaaaaaaaaaaaaaaaaaaattaaaaaaaatttttcccccccccccccggggggccccccttttcccccttttggggttttttttcccccccccccttggcccttttttttcccccccgggcctgggaaaccccttggttcccccccttttttcccttttcccaccttcccttttttccggttggggttttttaaaaagggcccccccccgttccccttttccaatttttcccccccctttttggggtatggaaattttgcccctttttttttttttaaaactcccctttaattttttttttaaccccctttttttttcccc

SEQ ID NO: 54258 - DNA, 599 bp, Homo sapiens
cgggcccccccctcggggtacttctagaattaattaacgggggccctgtgggtctgcgaggaggaaagtccttgaacgtccctatagaaagcccacatctagtcaatggtagtaagcaaacactgaaggtaaaatatttgtaaaagagagtcattgttttaacagaatttcttaaaaatgatttcaggacaaaacttactaaagtgtattttattttattcaattaaaaattttaaagttcagagatataattgtgtcagaatgggaagattaaaatgcctttgctttatacttccatgcttgtaaaattctaagtgtgtttgatttaaaaatgtagaaattttaagatatctttctttaaagatatttgtaaaagtaagtaaagattatctttaaaagcattcaaatgttttaaaatttaaaatattttgctagaataaataaccaagaaatagtgtgtggctagaagacttatgtattcagtctttaaatttttgttaagatccagtgcttaccatgttttccactccaaaaaaaaagactgcaaagtataaaatccggatcattttaaatttttaatcaggtaggtttcttttcaa

SEQ ID NO: 54259 - DNA, 490 bp, Homo sapiens
  misc_feature 17: n = A,T,C or G
ccgggccccccctcggnagtcttctagaattaattaacgcggggcaaccacaaaaggttgcatagtatgtggttccaattatgtaacactcctaaatgacaacattctagaaagggaggacagattattggttgcttagtgttaaggataggaagggattggatgaggctataaaagggtaacatgagagattcttattgtgatggaaatattctttatcttgagtctattactgtcagtatcttggttgttttattgcataatagttttacaagatactcccattgggtgaaattgggtaaagaattaaaggtgtctctatattatttcttacaactactggtgaatttccaattatctcaaaataaaaagtttaaaaacccttcatctacacactcaaaattaactttctaaccaaagttgaatttttcataacatcttttaatataaaccacattggaaatgtcattcccataaaacaattggttat

SEQ ID NO: 54260 - DNA, 385 bp, Homo sapiens
  misc_feature 10, 40: n = A,T,C or G
cccccctcgngggtacttctagaattaattaacgcggggnaaaaaaaaaaaaaaaaaaaaaaaaaaaaaaaaaaaggaaaaaaaaaaaaaaaaaaaaaaaaaaaaaaaaaaaaaaaaaaaaaaaaaaaaaaaaaaaaaaaaaaaaaaaaaaaaaaaaaaaaaaaaaaaaaaaaaaaaaaaaataggggggcccccccggggggggttttcaatttccctttttggggggttttttacccccccctttttgcccgttttttaaaactttggggttgggaaaacctttgggtttcccaatttttttgctttgggaccctttccctttttccctggtgggttttttacaaaaaggcccccaccttttcccttttccaaaaatttcccc

SEQ ID NO: 54261 - DNA, 623 bp, Homo sapiens
ccgggccccccctcgggagtcttctagaattaattaacgcgggtagtaagatagacataatattataaactgggttagaaatactttttaaattctaaatttattcattcagttcaacacatttttattaagcacctgcttttaagcattttcttaaatacttgggattcatctagaaacaagagacccagagccctgccattgtagagtttacattcctgtgaatcgagccagaccacaagcagtaaataagatgaacaagctatgaagtatcttggaaggggatcaatgctatggacaacagtagtgcagggggttgggggtgatacgcaggattcagagcaggctgcatttcagtaaagatttgaagcagatgagacagtgagtgtgggctatctgggccgagagcgttctagatagcacagactgtgtctcaactctgaccttgagctctgcttcatgcagacctttctttaaagaaacaaatatcatgtattagctaaaaatacaaaggataatttcatttcaaaaaatatataagtaccttaaacatatgatttttaatagccactaccaaaaggcagctattcagattatttgcaggcacagtggctcatgactgt

SEQ ID NO: 54262 - DNA, 360 bp, Homo sapiens
attaattaacgcgggattgcaactgttttctaagtaacttttgaatcaaagaggaatttaaaactgcaattgcaaaatagtgagaaaacaggaacgtgaaaaccctatatatcaagagctaggagaactgtcaaagttataatgaagcaaattcatgaccttaaatgcttttcaatgttatgaagaacagaagaaaaatagataaggcaagttttcaattcaagttaataagagaagaataaagtaaatacaaggaaagcaagacaaagggattgatagatagaagttaatgaattaaaaaccccaaatcacaaataaataccagagttggttctttggaaaccctcaaaaaaaaaaaaa

SEQ ID NO: 54263 - DNA, 508 bp, Homo sapiens
ccgggccccccctcggaagtcttctagaattaattaacgcggggggggtgggaatttgtgggggttactctttattaggttaaagaaattctcccctattctcgatatgttaggagtttttcttcttttttaaaatgatgagtattattgaggttctttttaatctattgagatgatgacataagttcataaatgtattaagtggagaattaaaagattttctagactgggcgcggtggctcacgcctgtaatcccagcactttgggaggctgaggtgggcagatcacgaggtcaggagatcaagaccatcctggctaacatggtgaaaccccgtctctactaaaaatacaaaaaattagctgggcgtggtggtgggcgcctgtggtcccagctactcgggaggctgaggcaggagaatggcatgaacccggaggcagagccgagatcatgccactgcactccagcctgggtgacagagcaagactctgtctcaaaaaaaaaaaaaaa

SEQ ID NO: 54264 - DNA, 617 bp, Homo sapiens
  misc_feature 26, 27, 45, 52: n = A,T,C or G
cccccccttcggaagtaccttctagnnaattaattaaccgcgggnatgcagnaaaattattcattatagcatggtttctaattataaaaaattgcaaacaacttacatgttcatgtgtaggagagcaactacataagctatggcaaatccacatggagtactgtacatctgttaagaaagaataaggaagatctgtacagactgatatggtatcattttcagaacacactgtcaaataaaaaaagcaaagctcaaaagaaaaatataatattctactctttatgtaagaaataaggggatctaaaaaatacacagatgtctgcttatttgtgtgaaggaaatacaggtaggatatatcagaaaccagataaattaattacacatggccgggcgtggtggctcacccctgtaatcccagcactttgggaggccgaggcgggcggatcacgaggtcaggagattgagaccacggtgaaaccccgtctctactaaaagtacaaaagattagccgggcacggtggtgggctcctgtagtcccagctactcaggaggctgaggcaggagaatggagtgaacccgggaggcggagcctgcagtgagccgagatcgcgtcactg

SEQ ID NO: 54265 - DNA, 454 bp, Homo sapiens
  misc_feature 415: n = A,T,C or G
cgggcccccccctcggggtacttctagaattaattaacgcgggggtgatactccctggttgtcaacagaattaatttcctgtagccagataactgaggttcctattttcctgctagctgtcagcaggaaaccccactcaactcctagaggtcgtcctcaggtcccttccactggctcacgcctgtaatcccagcactttgggaggccaaggcgggtggatcacaatgtcaggagtttgagaccagcctggccaacatggtgaaaccccatctctactaaaaatacaaaaattagctgggcatggtggcagatgcctgtaatcccagctactcgggaggctgatgcagagaatggcttgaacccaggaggtggaggttgcagtgagccgagatcgcgccactgcactccagcctgngcaacaacagggatactccagctggaaaaaaaaaaaaaa

SEQ ID NO: 54266 - DNA, 422 bp, Homo sapiens
cgggcccccccctcggaagtcttctagaattaattaacgcgggctccagctgacatgctcttgattcttactgtaccacggatataccaaatatcgctcctgaccatgcccaagagatatctttgcttcccagctaaaatgccctacgtccggaccctcaagtcttcctacttacagatggagagatgaatgatcctagatgtactgagaacaaccggtggcctttctaaatcatcttcatgcttgatctgcagaggaggtgcttgttctctaatcaaatctcttatgcctagatcatcttgatgccaagtcctgtcactctccacacctcactcgcacacccactcgcacacatcccctgtgactgaaacacgactggtctctttgcatcactagcttagtccccattgtgcccaaccatt

SEQ ID NO: 54267 - DNA, 430 bp, Homo sapiens
  misc_feature 28: n = A,T,C or G
ccgggccccccctcggaagtcttctagnattaattaacgcgggtgtcgctggactataagtagatcgcgacccttccttctgaattgtctaaacctgccgcactcaattgcttgagggataggatcttctgagccctgttatccacagttgcagcctttaaatgcaccctccctattgtgatgcattggcacctgccccttaataccttagatccattctaaggtggatgcccatcgggttgatcaggcgcttgccgacccaccagccaaccatacggaaaagactggtaaatgttatgagcatgtctaatggcatccgggaaatgactatgtaattaatcctggtgacaccagtactgaatccaccttgatttccccccctacgtctgccattctggatgatcctcctatgaaaacatgcaatatacag

SEQ ID NO: 54268 - DNA, 338 bp, Homo sapiens
  misc_feature 14, 37, 60: n = A,T,C or G
ctgggttaccgggnccccccctcggagtacttctagnattaattaacgcgggtctcgcanaaaaaaaaaaaaaaaataaaaaaaaaaaaaaaaaaccaaaaaaaaaaaaaaaaaaaaaaaaaaaaaaaaaaaaaaaaaaaaaaaaaaaaatataataaaatggggaaaaaaaaaatattgggggtcccccccggtgggggtctttcttttccctttttggggtttttttttcccccgttttttggccgtttttttcccatttttgtttttggaaaacctttgtttttcccattttttttgtttttgttctcttcccttttttcggggtttgttttttt

SEQ ID NO: 54269 - DNA, 268 bp, Homo sapiens
  misc_feature 16, 249: n = A,T,C or G
cgggcccccccctcgnaaatacttctagaattaattaacgcgggtccaattatattatgtcggcaataaatccactctaaatataaatgcacaaataggttgacactcaatggatagaaaattgtaacatgctaatactaactaaaagacagcttgagtgactatattcatatgacacaaattaggtttcagagcaaaaattcttacaaggaaataggtttttacataattatgaaaattaatcaattntcataattcatcaagagga

SEQ ID NO: 54270 - DNA, 488 bp, Homo sapiens
  misc_feature 20: n = A,T,C or G
ccccccctacaagagtactntctataattaattaacgcgggtgtggtggcaggtgcctgtagtcccagctactcaggaggatgaggcaggagaatggcacgaacctgggaggtggagcttgcagtgagccgagattgcaccactgcactccagcctgggcaagagtgtgatactctgtctcaaaaaagaataaaataaaataaaaaagaaatctaaaacataataataaaaaaaataacactatggaaaacaggcagatgtgaaaaagaaccaatcagaacttctagaaatgaaaaatgaaactataaaattaaagactcaatggatgggctaaacagcagacagacacagtggaagagagatttagtgaagtggaagaggagcaaaggaagctatccagaagacacctcagaagataaagagagaggaaatagaaattatgagaaggaaaccagaaggtgctcctgtatctaatggggactccaggg

SEQ ID NO: 54271 - DNA, 491 bp, Homo sapiens
  misc_feature 24, 35: n = A,T,C or G
gccccccctcgaaatacttctagnattaattaacngcgggggaaaaaaaaaaaaaaaaaaaaaaaaaaaaaaaaaaaaaaaaaaaaaaaaaaaaaaaaaaaaaaaaaaaaaaaaaaaaaaaaaaacaaaaaaaaaaaaaaaaaaaaaaaaaaaataaaaagccgccccccccccggggggaaaccccaattcccccttaaaaaaagttgttttacccccttttttggccttgtttttaaaaccttttggaaggggaaaacctttgggttaccaaatttaattcgtttggaaccaaatccctttttgccacgttggtgttaaaaaaaaagggccccccctattcttttttaaaaaaattggccaactttttggggaaatggaaatttttacccctaattttttttaaaaattcccctttattttttttaaaaaaaatttttttttttaacaatgggcgcaaatccgggaaacccctttttaataaaaaaaaa

SEQ ID NO: 54272 - DNA, 389 bp, Homo sapiens
aacgcgggggaaaaaaaaaaaaaaaaaaaaaaaaaaaaaaaaaaaaaaaaaaaaaaaaaaaaaaaaaaaaaaaaaaaaaaaaaaaaaaaaaaaaaaaaaaaaaaaaaagaaaaaaaaaaaaaaaaggcggccccccccgggggggaacccccattcccccttttagggatttttttaccccccccccctggcccgttttttaacacctccgggccgggaaaaccctgggcttccccaaattaaatcgcttggaacaaaatccccttttccccggggggtgtataaccaaaagggccccccccgattcccctttccaaaattttgcccaccctaatgggcaaaggaaattggaaccctttaattttttgtaaaaatccgcgtaaattttt

SEQ ID NO: 54273 - DNA, 550 bp, Homo sapiens
cgggccccccctcggaagtcttctagaattaattaacgcggggagactctgacacacacacacacacacaaattatcacaaaaggtgaggcatggtggctcatgcctgtaatcccagcactttgggaggccgaggagggcagatcacgaggtcaagagattgaaaacatcctggcccaaatggtgaaactctgtctctactaaaactacaaaaatgtgctgggcatggtggcccatgcctgtagtcccagctactcggaaggctgaggcaggagaattgcttgaacccgggaggtggaggttgcagtgagccaagattgcaccattgcactccagcctgggtgacagaatgagactccatctcaaaaaaaaaaaaattccagaacaaaaattaaaaatgaagatgtacaaagttttaaaatttgacctgaataaaactcaatgagctaaatggtaacaaaactaaatataattaaaatatatatatatatataaatgaaaacattaaaaatataaaaaacatggaggtgaaaaatacaaaaataatgcct

SEQ ID NO: 54274 - DNA, 359 bp, Homo sapiens
  misc_feature 33: n = A,T,C or G
ggtaccggggccccccctcggaagtcttctagnaattaattaacgcggggggaaaaaaaaaaaaaaaaaaaaaaaaaaaaaaaaaaaaaaaaaaaaaaaaaaaaaaaaaaaaaaaaaaaaaaaggaaaaaaaaaaagggaaaaaaaaaaaaaaaaccgggccgcacccgggggggacccccaatcggccctttggggaacaatttaacccccgctaaaggccgggctttaaaaaacttagtgacgggaaaacccttgcctttcccaaattaaggcgttttaaaaaaaatccccttttcgaaagtgggttaaaaaagaaaaaggcccgaacggacgaccttaaaaaaaaggggccaatct

SEQ ID NO: 54275 - DNA, 600 bp, Homo sapiens
  misc_feature 24, 48, 49, 68, 74: n = A,T,C or G
gccccccctcggaagtcttctagnaattaattaacgcgggggttacanngttggcaagggatgtacangcaatnggaaattctcatgcactgacattaggagcgtgaattagcctgactgtttggagagccatttggcagtaacaagtaaatctgttggtgttcataccctgtaagccaggaattcctcttctgagtgttcttcttcagatatttttgcatatcatattcaggcactgcacgcaaaaatgttcattttctttttatacttctcattgaaagaagtaaatactcatcaataggagaatagataaatatattatggcatatttagacaataatatatgatatagcagttaaacataattttaacaataagagcaaatacatagtgcttacaatgtatttgtaacacaaagccttgtgttgttctaagtgacttatatatgttaatttatataatatttaactgtattcttattaatatttaatattaagcacaagtcacaatagtagcaagcctgagagattggtattattataatctcattaatagaggagggaactgaggcacagaaagagcaaattatttacctggtca

SEQ ID NO: 54276 - DNA, 464 bp, Homo sapiens
gggtaccgggccccccctcggagtacttctagaattaattaacgcgggtcaccatggcacatgtatacctatgtaacaaacctgcacattcagcacatgtatcccagaacttaaagtaaaataaaaaaagtattccttaaaaaatttcttgaaataattaccaatccagtaggaatgagcacccttagcgacccagattgggatccctaactatctcttctccccaaaggaatgagggcctgttcatcaaatggctgatttcacagctagaatttattttcatattgaatacaaggagaacaactatatgccaataagttggaaaatctagaagaaatggacaaattcctagacacatacaacctaccaagattgaaccagtagaaatccaaaacctcagcagaccaataacaaatgatgagattgaagtcataataaaaattctcccaggttaaaaaaaaaaa

SEQ ID NO: 54277 - DNA, 407 bp, Homo sapiens
taacgcgggggacaaaaaaaaaaaaaaaaaaaaaaaaaaaaaaaaaaaaaaaaaaaaaaaaaaaaaaaaaaaaaaaaaaaaaaaaaaaaaaaaaaaaaaaaaaaaaagaaaaaaaaaaaaaaaagggggcccccaccgggggggacttcaatttccccttttaggaattttttttaccccccttaattggccatttttttaaaacttcgaaattggaaaaaccttggctttaccaaatttattcgctttgaaaaaattccccttttccccagttggtttattaaaaaaaaggccccaaccattcgccttttaaaaaatttgcccaccttgaatggcaaatgaaaattttaacctttatttttttgtaaaaattccctttaattttttttaaaaaaatcttttttttt

SEQ ID NO: 54278 - DNA, 288 bp, Homo sapiens
ttaattaacgcgggggtagggaaaaaaaaaaaaaaaaaaaaaaaaaaaaaaaaaaaaaaaaaaaaaaaaaaaaaaaaaaaaaaaaaaaaaaaaaaaaaaaaaaaaaaacaaaacactaaataaataaaaaaaaaatatcggcccccccgggggggccctcccttttccccatttaggggggtaaaaaaacccccccatttggccatatttttaaaaatccaagaggggaaaacccggggggttaccaaataaaaccgcattaaaaaaagccccttttaacagaagggg

SEQ ID NO: 54279 - DNA, 576 bp, Homo sapiens
  misc_feature 29, 455: n = A,T,C or G
cgggcccccccctcggaaatacttctagnaattaattaacgcgggggaatagataagttagctaggcatatttgagaaacattttattttttattgtcttggaattttgataattgcattgatttagcattttgttgggtattagtaattttacatgtatcaagttggtgcaatatgtttgccagtattctgtattggtcagttattggttaggatattccattaataattttatcctcatgcttttgtttatgtattttgtaaattttctgagttggatagattcactcatgagcaaagcccccatttcctctaacgtctctttataaagacatgcattaaaacattgtgtttgtcagaggattgaatgaaacagaattaattcttatctagcaggcacttaatacacttgaaataatttaaattttaacactttgtctcttgatttccatttntttccttttgtattttttaatttctctttataactaataaggttaatctttattttgagctccttatttaataatttttctctacatttggaaatatttatcttttcattaaagggtttct

SEQ ID NO: 54280 - DNA, 219 bp, Homo sapiens
aggaaaaaccaattaattaattaaggattctaatttaaaattaaatttgttttttttatccgacatgaccatcctttaaaaaattaaaggaaatctggtaaatcaaacaaacaaaaccaaactatttcttacaaaaagtgatttaaaaaaaagtgaaaattgatatatatgagactaatttttcaaaaaatcaaaagatcattatccaaaattggtttt

SEQ ID NO: 54281 - DNA, 562 bp, Homo sapiens
  misc_feature 16: n = A,T,C or G
cgggcccccccctcgnaaatactttctaaaattaattaacgcgggccgggccaaagggcagatgcatttacatctttattgatgttgccaacttcgtggccataaacgttgtgctaacttgtcctttcatcagctatgtacgaaagcgcctgcttccccacaagtctgtcaacattgagggttgcctggcattttgctttttgccagtctgacccgtcataaaatggaacctccatttagtttcaatttgtgtttccttgttaccagtgtggttgggtgtctttctatgtgttaaaatgccagttgccggccggcgctgtggctcacgcctgtaatcccagcactttgggaggccaagacgggtggatcacgaggttgggagattgagaccatcctggctaacacggtgaaactccgtctctactaaaaatacaaaatattagccgggcgtggtggcgggaacatgtagtcccacctactcgggaggctgaggcaggagaatggtgtgaacccgggaggtggagcttgcagtgagccgagattggtccactgccccccagtc

SEQ ID NO: 54282 - DNA, 556 bp, Homo sapiens
ctgggttaccgcggccccccctcggagtacttctacattaattaacgcgggggtctcaaaaaaaaaaaaaaaaaaaaaaaaaaaaaaaaaaaaaaaaaaaaaaaaaaaaaaaaaaaaaaaaaaaaaaaaaaaaaaaaaaaaaaaaaaaaaaaaaaaaaaatttttaaaaaaaaaaaaggggggcccccccccgggggggaccttctttttccccttttttggggttttttttatccccccttttttttggccgtgtttttttaaaccttttgggttgggaaaaacctttgggttccccaatttttttccttttggacaatttcccttttttcccattgggttttttaaaaaaaggccccccccatttcccttttccaaatgttgccccccctttttgggcttttgttttttttaccttttttttttttttaaaattccggttaattttttttttaaaccattttttttttaacccttgggcccattttgggaaaattctttttatttaaaaagattttcccccttttgggttggggttttttcccctttggaaaaa

SEQ ID NO: 54283 - DNA, 338 bp, Homo sapiens
  misc_feature 23, 108, 109, 110, 111, 112, 113, 114, 115, 116, 117, 118,119, 120, 121, 122, 123, 124, 125, 126, 127, 128, 129, 130,131, 132, 133, 134, 135, 136, 137, 138, 139, 140, 141, 142,143, 144, 145, 146, 147, 148, 149: n = A,T,C or G
ccccccctcgaaagtcttctagnattaattaacgcggggggaaaaaaaaagaaaaaaaaaaaaaaaaaaaaaaaaaaaaaaaaaaaaaaaaaaaaaaaaaaaaaaaannnnnnnnnnnnnnnnnnnnnnnnnnnnnnnnnnnnnnnnnncgccaccggggtgacccccccttacggcctatagttttacaaattcccgactggaaaaaccctggttttaccaaacttaggcgggtaaaaacacatccccctcccacctatttgccttaaaagaaaaaggcctttaccgatcgggcttaaaaacaaaaaagccccctaaagggccactttaaatagtag

SEQ ID NO: 54284 - DNA, 473 bp, Homo sapiens
ccgggccccccctcggaagtcttctagaattaattaaccgggtctattttaaccacatacgtgtaatgtaattgttgacatactagagcttgtctgcctttttactttttgtttcttttttccttgtgttttatttctgcatcattccttgagttatttgaccattttaaaaaatttcattttggttgggcgcattggctcacacttgtaatcccaggaggccgaggcgggtgaatcacctgaggtcaggatttccaaaccagcctggccaacgtggtgaaatcctgtccctactaaaaatacaaaaaaattagctgggcatggtggtgggcgccggtagtaccagctacttgggaggctgaggcaggagaatggcatgaacctgggaggcggagcttgcagtgagccgagatcgcgccactgcactccagcctgggcgacagagcaagactccgtctcaaaaaaaaaaaaaa

SEQ ID NO: 54285 - DNA, 270 bp, Homo sapiens
  misc_feature 13, 26: n = A,T,C or G
ggccccccctcgngggtacttctagnattaattaacgcgggggcaggaaaaaaaaaaaaaaaaaaaaaaaaaaaaaaaaaaaaaaaaaaaaaaaaaaaaaaaaaaaaaaaaataaaaaaaaaaaaagccggccccccccgggggggacccccaattcccccttttttgaatctttttagcccccctcattggccggggtttttcaccttcgcccttgggaaaacccttggctttccccactttattcccttttcaccacatccccctttg

SEQ ID NO: 54286 - DNA, 292 bp, Homo sapiens
cgggccccccctcggaagtcttctagaattaattaacgcgggcatcctcaaggttcatctatgtattatcatatgtcaggagctctttttaaggccgaataatattcctttgtatgtacacagagctgttacatattcagaacagtaaatggcaaaaaatgactatgagactcctgcttacaattatactgatccccccatagacaactagaaaactggccaaaatactctaaacgactatattcagaagtcaaacactatgcagtgtggattgtaatccctaaaaaaaaaa

SEQ ID NO: 54287 - DNA, 509 bp, Homo sapiens
  misc_feature 25, 38, 55: n = A,T,C or G
ctgggttaccgggcccccccctcgngggtacttctagnattaattaacgcggggnaaaaaaaaaaaaaaaaaaaaaaaaaaaaaaaaaaaaaaaaaaaaaaaaaaaaaaaaaaaaaaaaaaaaaaaaaaaaaaaaaaaaaaaaaaaaaaaaaaaaaaaaaaaaaattttaaaaaaaaaaaaaagggggccccccccggggggggcccccatttcccctttttgggggttttttttccccccctttttgggcttttttttaaaagggtgggggggggaaaaccttggggttccccaatttttttgttttggaaaaatttccttttttcccagttgggtttttaaaaaaagggccccccccttttcctttttcaaaaatttggccccctttatggggaaatggaatttttaaccttttttttttttttaaaattccgttttatttttttttaaaacacttttttttttaaccaaaggggggaaattgggaaatttcttttttatttaaaaa

SEQ ID NO: 54288 - DNA, 447 bp, Homo sapiens
cgggcccccccctcgaaatacttctataattaattaacgctgggatgtaaaaaaaaaaaacaaaaaaaaaaaaaaaaaaaaaaaaaaaaaaaaaaaaaaaaaaaaaaaaaaaaaaaaaaaaaaaaaaaaaaaaaaaaaaaaaacccaaaaaaaaaaaaaaccccgcccccccccggggggaactccaatttccccttttggggattctttttccccccccccttggcccttttttttaaaactttgagattggaaaacccttgctttccccaattttattcccttggaacccattccctttttccccggtgggtttttaaagaaaaggcccccccccattcccctttccaaaaatttccccaccttgatggggaatggaattttgaagcctttttttttttgtaaaattcccctttaattttttgtaaatcccttttttttttaacc

SEQ ID NO: 54289 - DNA, 450 bp, Homo sapiens
  misc_feature 38: n = A,T,C or G
cccccctcgaaagtcttctagaattaattaacgcgggngaaaaaaaaaaaaagaaaaaaaaaaaaaaaaaaaaaaaaaaaaaaaaaaaaaaaaaaaaaaaaaaaaaaaaaaaaaaaaaaaaaaaaaaaaaaaaaaaaaaaaaaaaaaaaaaattaaaaaaaaaaaaaaggcccccccccccggggggggaccccaattcccccttttggggatttatttaaccccccttatgggccttttttttaaaaccgtgtgattggaaaaaaccgggctttccccaatttaatcttcttgaaaaaaatcccctttttccgggggggggaatttaaaaaaaggccccccccgatcccctttccaaaaattttccccccctaatggggtaatgaaacttttaagccttaattttttgaaaaaattccggtaaaattttttgaaaaaaaattttttttt

SEQ ID NO: 54290 - DNA, 365 bp, Homo sapiens
  misc_feature 17, 27, 28: n = A,T,C or G
cgggtccccccctcggngtacttctannattaattaacgcgggggaaaaaaaaaaaaaaaaaaaaaaaaaaaaaaaaaaaaaaaaaaaaaaaaaaaaaaaaaaaaaaaaaaaaaaaaaaaaaaaaaaaaaaaaaaaaaaaattttaaaaaaaaaaaaaaaggggggccccccccgggggggccccccattccccctttttggggttttttttaccccccttttttgccctttttttaaaactttgggatttgaaaaaccttggcttttcccaatttttttgttttggaaaaaatccccttttttcccctttggtttattacaaaaaggccccaccggaaccccttttccaaaattttccccccct

SEQ ID NO: 54291 - DNA, 475 bp, Homo sapiens
  misc_feature 24, 26, 36: n = A,T,C or G
ctgggtaccgggcccccccctcgngngtacttctanattaattaagcgcgggggaaaaaaaaaaaaaaaaaaaaaaaaaaaaaaaaaaaaaaaaaaaaaaaaaaaaaaaaaaaaaaaaaaaaaaaaagaaaaaaaaaaaaaaggcccctacaatgagggggaatttttcacaaaaaaattaaagggggccccctcccggggggggattttcatttccccctttttgggggatcttttttggccccccccctggggcccctttttttaaattgttgtggggggaaacccctgggtttccccagttttttccccttggggcccttcccctttttcccctggtgtttttatgcaaaaaggccccccccatattcccttcccaaatttttcccctcttttttgggaaaagaattttggccccctttttttttttttaaaacccgcggcaatttttggtaaaaacccttttttttttaac

SEQ ID NO: 54292 - DNA, 401 bp, Homo sapiens
  misc_feature 45: n = A,T,C or G
ccgggttcccccctcggcagtcttctagaattaattaacgcgggngaaaaaaaaaaaaaaaaaaaaaaaaaaaaaaaaaaaaaaaaaaaaaaaaaaaaaaaaaaaaaaaaaaaaaaaaaaaaaaaaaaaaaaaaaaaaaaaaaaccatataataaaattgttttacccccccctcgggggccagtctttttccaaccttgggggctgggattttgccgggccttcccttcctttttttttttgccgctcttcccgctttcgccgcgtgcctttctacctttgaggcccgggccaacccccctttcccccgtttgggttttttgtttggagaatgccccttgtaagcgtttttattttgttaaaatggccccttaaatttttgtaaattcagctcttttttt

SEQ ID NO: 54293 - DNA, 182 bp, Homo sapiens
  misc_feature 77, 98, 154, 155: n = A,T,C or G
aaaaaaaccaaaaaaaaaaaaaaaaaaaaaaaaaaatttttaaaaaaaaggggccgccaccgggggggacccccaanaaacccaaaagggagccgaanaacccccccccacgggccgaagaaatctttttaaattttttttaaaaccggggcgnnccccaacgaaacccccgggaaaaaaaa

SEQ ID NO: 54294 - DNA, 561 bp, Homo sapiens
  misc_feature 556: n = A,T,C or G
gggccccccctcggaagtcttctagaattaattaacgcgggtcttttatttagcatatgtgtataatttcatacaaataccaagacagttttcaacaaaaactgagtagtaacgtatttatatacctaggatacttgaatttgcgctcaggtgctgcagaagtaatatgtaatttcaaatgaacaaatgaacaattggattccaaatattcccagtcttggaagatttcttataaacaatgtttctgtttgctaaaaattgctagctatattcctctcttagaagtttatattatatattcctatatttgacaatgtaaaatgcttgtgtttatctggggttttccagaatcacttggatttagagcttttatcccaatcaaaacctcttctgaaaaataataaaagcctttctaatgaagtctcaaagaacacacttggtctgttgaactaggttttattttagggctaagtctgcaactccattgattgttctgtgaattattttgtcagtaccactctgctcactcagttttaattgctatagctgtaaaaanaaaaa

SEQ ID NO: 54295 - DNA, 181 bp, Homo sapiens
tccccataaaaaaaaaaaaaaaaaaaaaaaaaaaaaaaaaaaaaaaaaataaagaaaaaaaaaaaaagcggccgccgccgcggggggggcgcctcttctccgccttttggggggttttttcccccccccctggcgcccgtttttgaccgtcgtgtttggggttaaaacggtgtttttcccc

SEQ ID NO: 54296 - DNA, 366 bp, Homo sapiens
  misc_feature 14, 27: n = A,T,C or G
gggccccccctcgngggtacttctagnattaattaacgcgggagctagtaaaaacgtttcacattcaggtgatttataaaaggtttttgatgctattggctttgtgacaagcaatttcaacacacccagcttctagacaaatcttcgtagtattcattcaattatttgctcattcatcaaaagtatactgaattccttctatgtactaggaattgttctacatgctgttgatacagcagggaacaaaatagacaacagccgctgcctccatgaaatttctattttagtggagacagaaagagacaataaactaaggaagtgtagctcatagcatattagagaataagtcttaaaaaaaaaaaaaaa

SEQ ID NO: 54297 - DNA, 611 bp, Homo sapiens
  misc_feature 23: n = A,T,C or G
ccccccctcggggtacttctagnattaattaacgcggggcacatgtctgtagtcccagctactctagaagctgaggcaggagaatcacttgaacccgggaggcagaggttgcagtgagccgagatagcaccactgtcactccaccctgggtaacagagcaagactctatctaaaaaaaaaaaaaattaacttaaaacctcactaattctgacccagaatgcctgagttcaaattcagaatctgcggcttagtacttctggggctttgaaaaaatgattttacctctctacgcctccagatccttgcctgtaaaatgtggataataacatcaggataataacagtaaaggctgtgcaactctaacccaaaaatccaaaatgcttcaggccaggagcggtgactcacacctgtaatcccagcactttgcgaggccaaggtgggcagattgcttgagtccaggaattcaagaccaacctgggcaacatagcgaaaccctgtctctacaaaaaatataaaaaattagccaaggctgggcacggtggctcatgcctataatcccatcactctgggaggccaaggtgggcagatcacttcagttcaggagttcaaga

SEQ ID NO: 54298 - DNA, 374 bp, Homo sapiens
attaacgcggggggtatagcaagaggatctcttgagccccagtgctcaaggctgcagtgagccgtgaccgcaccaccacactccagcccgagtgacagagcaagaccttgtctctgaatgaatgaatataagaacagagataagctaaaattaaaaggatgaaaaaagacataccacacaaacactgatcaaaagagctgggatggctgcctcaacatcagaccaattaattagaccacaaaaagaccaacaggaaacgtcctacttaatggtgaaatgtcagaaactttttctcccacatcaacacggtaacacccacactcactgctgctgatgattgtagctaatgcaaaaaggcaaaaaaaaaaaaaaaa

SEQ ID NO: 54299 - DNA, 622 bp, Homo sapiens
  misc_feature 603: n = A,T,C or G
ccgggccccccctcggaagtcttctagaattaattaacgcgggctgactgtatttgattattcacttgggatttcctagacctaaaggctcctggaatactaatttaaatcttaatcatcaaaccaaaatatgaaatcagtttgtttggttgaggtttttctacgaaatttgtgtggtttaaagacaacaggtgtagttgaagactatggcacatgcctatatctctctcttccattattttctccaaaaacaatgcaaaaaccataaggggaaaataacactgtgtgaaaaccgcatccctagcatgttttgaagacaggatgcctaaacttcaaaataatactaagcagaaagagaaaaagcaccaaatctcagggcatgacctctcatgctcctcccctacacctttcacctaaaggctctttgagcaaaggcagtgagcaaaggcagactgagaaaaatgtcatgaagaataaagaagagaactagcaatagagcctaaggttaatagaaaagtatcacaagtaaaagtaagtctacattaactctgaaaatactctttatcaaaagtgtctataatcccagtgccttgggagactgangtaagaggattgcttgagt

SEQ ID NO: 54300 - DNA, 520 bp, Homo sapiens
  misc_feature 415: n = A,T,C or G
taattaacgcggggagcacatattgttatattctctgtgtaaatctggctatatcttacagactagtatgagatgagggtgaaactcagactagatagtgaattatttatcagattcattgaggctttagaaatatgaaggagagcagaaagctatattgttccatatagtaatacatggggaaatttctggaaaatgtgagaaagaaaaaagagaagagtgagagaggataaagaaacatgggggaagtccaaaggctgaacctaattttaagttgtctgtatttcttctatatgaacatctgctatgtccgcaaatatcagtaaagtaggctccagatcaaatgtacatgagtggctattggtgaaaatgggaaaatgactgactgccacacctgagtggaagagcagagaanaaaaaaaaaaaagaggacagtctccaaaggcaagatatcagagaatttgcagaatagcacaaggataactggtaaaagaaactggaataaaaaaaaaaaagaagc

SEQ ID NO: 54301 - DNA, 412 bp, Homo sapiens
  misc_feature 16: n = A,T,C or G
cggggccccccctcgngggtacttctagaattaattaacgcgggcagcctgggcaacagagtgagactctgtttaaaaaaaaaaaaaaaaaaaaaaaaaaaaaaaaaaaaaaaaaaaaaaaaaaaaaaaaaaaaaaaaaaaaaaaaaaaaaaaaaaaaaaaaaaaaaaaaaaaaaaaaaaaaaaaaaaaaaaaagaaaaaaaaaaaaaaacgggcccccccccgggggggcccccctttcccccttttggggggggttttaccccccccccttgggcgtttttttaaaaactggggggggggaaaaccccggggttcccccatttaaatcctttggaaaaaattccctttttcccaggtggggtatataaaaaaaggcccccccccattcccctttccaaaatttgcccccc

SEQ ID NO: 54302 - DNA, 647 bp, Homo sapiens
cgggccccccctcgaaatacttctagaattaattaacgcgggttccaagataaatcatatgctaagccactaaacaaagaaaaaaattaaaaaaaaaacacctttttttaaaattaatactagctttttgcaaactcttccaaaaaatgaagatgagggaatggaacactctccaattcattctatgtggccagtgttaccctgatactaaaaccagacaaagatactgtaagtaaagaaaaccacagaccagaatctcatatgaataaatataaacataaaaatcctcaacaaagtactagtgcagtgaacatgacaacatataaaaaagatcaaacactatgaaaaactgttatttattccagatatgcaagggtgaattctcatctgaaaatcaaatagtacaaaacatcatgtcaataataaaaaacataacagaatccacactatcttgtttagaaacagaaaagcatttgacaaaatccaacatttacgataaagcaatcaataaataaggaagataagggaacattctcaatctgataaaagacatctatgacaaagatccaaaattaaaattgcaccttaatgataaaaactaaatgttttccctctaagatcagaaacaagataaggatacctgctct

SEQ ID NO: 54303 - DNA, 459 bp, Homo sapiens
cgggcccccccctcggggtacttctagaattaattaacgcggggtgacagagtgagactctgtctcaaaaaaaaaaaaaaaaaaaaaaaaaaaaaaaaaaaaaaagaaaaaaaaagaaaaaaaaaaaaaaaaaaaaaaaaaaaaaaaaaaaaaaaaaaaaaaaaaaaaaaaaaaaaaaaaaaaaaaaaaaaaaaaaaaaaaaaaaaaaaagggcgcccccccccgggggggccccccattcccccctttggggggcctttttccccccccccctgggccggcttttaccaccgcggggcggggaaaaccctggggttacccaaatttatgcccttggaaccaattccccttttcgcaggtggggttttttccaaaaggccccccccctttcccctttccaaaagttgcccccccctaatgggcaatggaaatttggaaccttatttttttggtaaaatt

SEQ ID NO: 54304 - DNA, 582 bp, Homo sapiens
  misc_feature 28, 569: n = A,T,C or G
cgggcccccccctcggggtacttctagnattaattaacgcgggagattctaaaattaaaatagaaatgtttgaaataaccaaaacagcttttaggaagaacgtagttagaggcataacactacctgatttcaacacattataagtctacagtaatcaaaacattgtggcattggcataaagacaaatagatcagtgaaacagaatggagagtctatatataaagccattcatgtatagacaagtaatttttgacagagaggcaaaggcaattcagtagagaaaggatagtgttttcaacaaatggtgctggaataactgaatatccatatgcaaaaaaatttgaagcatactttttttactgtataaaattaactgaaagtggatcatagagataaatgtaaaagctaaaattataaaacttctggaagaaaatattggagaatattatttgatcttggtttaggctaaaactgtaaagcttgtaggaggaactagaggataacttcttccaaattttagggtaatcaataatttcttagacaagacacagaaagcactaattctatanaaaaaaaaaaaaa

SEQ ID NO: 54305 - DNA, 191 bp, Homo sapiens
  misc_feature 14: n = A,T,C or G
aattaacgcggggnaaaaaaaaaaaaaaaaaaaaaaaaaaaaaaaaaaaaaaaaaaaaaaaaaaaaaaaaaaaaaaaaaagaaaaaaaaataaaagcggccgccaccgggggggccctcctttggccccttccgtggggcgttttcctgggccctctttggccggggttttaccccttttttttttggggg

SEQ ID NO: 54306 - DNA, 305 bp, Homo sapiens
  misc_feature 49: n = A,T,C or G
gggtaccgggccccccctcggagtacttctagaattaattaacgcgggnagcctcagcaaagtcacaacaaatctttatacaatagttcttcacttggcagcataagggaatcatttggggaactttaaaaaatgctgatgtctaagtcctactcctagtgattctgattttaagtagtttcaggtaccagaatatttaaaagctccccaagtgatcgtgatatacatccaaaaataagaagcactgctacagaaaaacgtgggccaagcgttttgaggcctaacctctcaaaaaaaaaaaaaaa

SEQ ID NO: 54307 - DNA, 569 bp, Homo sapiens
cccccccctgtacgtacttctagaattaattaccgccggggtagaatatataataaaaaaaaaaaaaaaaaaaaaaaagaaaaaaaaaaaaaaaaggcgcccccccccgggggggacctccatttccccttttagggagtcttttacccccccctcattgcccgtttttttacaccttggggatgggaaaacccttggcttacccaaattaattcgcttggaaacaattccccttttccccggttggtttaaaacaaaaaaggcccgcccgattcccctttccaaacatttgcccaccttgatgggcaatggaaatttgaaagctttatttttttgtaaaatttcgctttaattttttgtaaaatcattttttttttaacccaatgggccaaattgggaaaattcctttttaattaaaaaaattaccccgagatggggtggagtttttttccatttggaaacaaaattcctttttaaaaaaccgtgccctccaccgtaaaggggcaaaaacccttttataggggcaagggccctttacgtaacccttccccttattaatttttttgggg

SEQ ID NO: 54308 - DNA, 346 bp, Homo sapiens
ccccccctcggagtacttctagaattaattaacgcgggggaaaaaaaaaaaaaaaaaaaaaaaaaaaaaaaaaagtaaaaaaaaaaaaaaaaaaaaaaaaaaaaaaaaaaaaaaaaaaaaaaaaaaaaaaaaaaaaaaaaaaaaaaaggggccccccccggggggggccccccatttccccttttggggttttttttacccccccctttttgcccgttttttaacacctgggggccgggaaaaccctgggtttccccaattttattcccttggaaccatttccccttttccccggttggctttttaccaaaaggccccccccggttcccctttccaaaatttggcc

SEQ ID NO: 54309 - DNA, 552 bp, Homo sapiens
  misc_feature 38: n = A,T,C or G
ctgggttaccgggcccccccctcggaaatacttctagnattaattaacgcggggagctttcaaaataacagttttaaagaatccatactatcacaaatctgtactcataatatatagataagtaatttaaaaactgattgtaatatgtaataaaatagtagtagttatggatgtgtagtgaatatttaaaatttatttctgagttttggataattaacatgctttacttattatcaaagtaaataaggtaatatttaaaattagacattgggcaggtgcaattacataggtaatttaatctcagctaataataaaataagtaattagaaagactagcctagaaataaaaagtgaaatattgtaaaacatatatatcaatgcattatttccccaagttatgttacaccatgtgtatttatttttgcattatgaatgtattaggggaaaatgcaagcattaaattattttatgtataatttaatgttaattcaaaaatatttattaaccatcataattagtaacttctgaattagccccaaaaaaaaaaaaaaa

SEQ ID NO: 54310 - DNA, 555 bp, Homo sapiens
  misc_feature 523: n = A,T,C or G
cggggccccccctcggggtacttctagaattaattaacgcgggctagttaagaaaagtttctctttgagcaaataagtaaaaaaattaaaatatgaaagaaatttcaaataaagaaacattttgagaatttgtttaaatagttataagaaagtgaagaaaattataaaatacctttttaatatccttatcaatattcaatatcattctacttctataaaagtagattattaaataataagtaataaactttgtgaggaaatatttattggtgaacaaaaaggtaatctttgcctcttaaaaggcagtttgttagtgagccatagattagttactggaaaagctctatcagcacatttgaagataaacagagaaattttctcaataatcagagattaagaataaaaatagaaatgatgagacagaagaacaaaaaatgacacacagaacagatgcaggagataaaatatacatagaatataaattccagaggaaaagaaaaactaagagagagattgtaatacnttaaacaaagtagtagtagaataacatgaaca

SEQ ID NO: 54311 - DNA, 413 bp, Homo sapiens
acttctagaattaattaacgcgggggagggcaggaaaaaaaaaaaaaaaaaaaaaaaaaaaaaaaaaaaaaaaaaaaaaaaaaaaaaaaaaaaaaaaaaaaaaaaaaaaaaaattaaaaaaaaaaaaaagggggccccccccggggggggactccaattccccctttagggagggggtttaccccccctccctggccggtggttaaaaaattcgggggggggaaaacccgggctttacccaattttattggtttaaacccatgttccctttttcccaggtggggttaaaagaaaagggccctccccgttgggctttttaaaagaggggcccccccggtgggggatttgaaatggggggcgttaatttttttttaaaatccggttttatttttgttaaattaaatgcatttttt

SEQ ID NO: 54312 - DNA, 368 bp, Homo sapiens
attaattaacgcggggtaaaaaaatataaaaaaataataaaataaaagaaaaaaaaaaaaaaaaaaaaaaaaaaaaaataaaaaaaatataataaataaaaaaaaggccgcccccccccgggggggaccccaaatcccccttaaagagatttttttccccccccctcctggcccttttttaaaaagggtggaaagggaaaaaccctgggattaccaaaattaattcccttgaaaaaaatcccccttttcccggggggggttaataaaaaaagggcccgcacaaatcccctttcaaaaattttgcccaccttaatgggaaaaggaaaattgaaccctttattttttgttaaaattccccttaaattttt

SEQ ID NO: 54313 - DNA, 372 bp, Homo sapiens
  misc_feature 16: n = A,T,C or G
taattaacgcgggggngaaaaaaaaaaaaaaaaaaaaaaaaaaaaaaaaaaaaaaaaaaaaaaaaaaaaaaagaaaaaaaaaagggagacgccacccggggggggccctccatctccccttttaccgattctttttttcgcccccctctctgttccctgtttttccactttcgggcctgggaaacccctggccttgcccatttttttccctttcccccctttccccttttccccctctggcgttttaccaaaaaggccctctccgttcgcctttcccaccatttgccccttctgattggggaggggcatttgtaaccgttaattttttgttaacttccccgttacgtttttgttaactcacctcttttttta

SEQ ID NO: 54314 - DNA, 519 bp, Homo sapiens
  misc_feature 13: n = A,T,C or G
gccccccctcggnagtcttctagaattaattaacgcgggggccgcagctgcaaaaaaaaaaaaaaaaaaaaaaaaaaaaaaaaaaaaaaaaaaaaaaaaaaaaaaaaaaaaaaaaaaaaaaaaaaaaaaaataaaaaaaaaaaaaaacgcggccgccccacaagggggagcttccttttcgcccttttttgtggtctttttttcccccccccccctgcccgggggtttccccccttttgcccctgggtaaaacccttgggtttccccccctttttgcccctggctgcacatccccctttgggggcctccctttttgcccaacaggccctttccgttcgccctttccccctttttcccggccgggttgggtattgggaatggtccccctttttttttttttaaaattcgcttttttttttggggggggggggtttttttttaccccttttgtcaaaaacgccatactcccttttttgtgaaaacagtttttctttttagggtggggggttttcccttttt

SEQ ID NO: 54315 - DNA, 481 bp, Homo sapiens
cgggcccccccctcgaagatcctttctaaattaattaacgcggggaaaataaaacatctgaatttaaaaaaaaaaaaaaaaaaaaaaaaaaaaaaaaaaaaaaaaaaaaaaaaaaaaaaaaaaaaaaaaaaaaaaaaaaattaaaaaaaaaaaaaaagggggccccccccgggggggacccccatttccccttaaagggattctttttaccccccctcattgcccccctttttaaaactttggaactggaaaacccttgcggttccccaattaattccctttgcaacaattccccttttcccaagttggtttaataccaaaaaggccccccccaatcccccttccaaaaatttgcccaccctaattggcaaatgaaatttgaaacctttaatttttttttaaaatccccgtaaaatttttgtaaaaccatcttttttttaaccaaataggccaaattgggaaaattcctttttaattaaaa

SEQ ID NO: 54316 - DNA, 198 bp, Homo sapiens
cccccccccgggggggacccccattgccccctatatgggtgcgtttgcccccccctcatgggccggggtttcccaacgtcgggatgggaaaacccctgccttaccccactttattccctttgtgccctacccccttttcgcccgcggtgttattaggaaaaaggccccccccagctccccttccaaccaattgccccc

SEQ ID NO: 54317 - DNA, 520 bp, Homo sapiens
  misc_feature 12, 24: n = A,T,C or G
gccccccctcgngggtacttctanaattaattaacgcggggattgagaaaaaaaaaaaaaaaaaaaaaaaaaataaataaaaaaaaaaaaaaaaaaaaaaaaaaaaaaaaaaaaaaaaaaaaaaaaaaaaaaaaaaaaaaaaaaagaaataataaacattacagaaatgggaaagattattttattggggccccccccggggggggccccctttttccctttttgggggttttttttgcccccccttttgggcggttttttaaacctttgggggggggaaaaccctgggtttcccccatttttttcttttggggaaaatcccctttttcccgggggggttttttggggaggggccccccccctttttctttttaaaattttccccccctttttgggggaagggattttttgcccttttttttttttttaaaatcccccctaatttttttgaaaaacaccttttttttttacccaagggggggattggggaaatttttttttttttttaaaattttccccc

SEQ ID NO: 54318 - DNA, 456 bp, Homo sapiens
  misc_feature 36: n = A,T,C or G
ctgggtacccgggccccccctcggggatcttctagnattaattaacgcgggggtctcaatatcctgacctcgtgatccacccgcctcagcctcccaagtgctgggattacaggcatgagccaccgcgcccggccaaatacaagtacacacattttaaataaaattaagacaaagaaaaatgagaacaaatgtacttaacgataaaaaagaaagctaaaagcatattatatatgcttttatatgatgtctatatagtaaaaaattatgcattttccttctaaacatgtttttttaaaggtaccatgtcgaacccattaaactagaaactaagccaagcactgtggttcagtaatcccagcactttgggaggtcaaggcaaacagatcactcaaggccaagagttgaagactaacttgagcaacacagcaagactccatctctaaaaaaaaaaaaaaa

SEQ ID NO: 54319 - DNA, 382 bp, Homo sapiens
acttctagaattaattaacgcgggggaaaaaaaaaaaaataaaaaaaaaaaaaaaaaaaaaaaaaaaaaaaaaaaaaaaaaaaaaaaaaaaaaaaaaaaaaaaaaaaaaaaaaaaaaaaaaaaaagaaaaaaaaaaaaaatacgcgcccccccccgggggggacccccatttccccttattgggatcatattaaccccccctaattggcctgtttttaaaactgtgttgaatgggaaaaacccgggtttccccaaattaattcgtttggaagcaaatccctttttcgcagatgggggtaaataaaaaagggcccgcccttatgcccttcccaaaagtgggcccatctggaggggaaatgggaaattgcaaccttattttttt

SEQ ID NO: 54320 - DNA, 462 bp, Homo sapiens
  misc_feature 43: n = A,T,C or G
cgggccccccctcggaagtcttctagaattaattaacgcgggnggaaaaaaaaaaaaaaaaaaaaaaaaaaaaaaaaaaaaaaaaaaaaaaaaaaaaaaaaaaaaaaaaaaaaaaaaaaaaaaaaaattttaaaaaaaaaaaaaaagggggccgccccggggggggccccccatttccccctatagggagattttttccccccccccatgggcggggttttaaaaccttgtggagggggaaaccctggcggttccccaatttattggctttgcaaaaattccccttttcaccgcttggcttaaaaacaaaaaggcccgcacggaccccctttcccaaaggtggtcaactttaattggaaatggaaattggtaggcgttattttttggtaaaaatccccgtaaaattttggttaaaccacctcttttttaacccaaaaggccaaactgggaaaattccttttt

SEQ ID NO: 54321 - DNA, 585 bp, Homo sapiens
  misc_feature 10, 551: n = A,T,C or G
cccccctcgngaagtcttctagaattaattaacgcggggcctggtgtgtgatattcccctccctgtgtccgtgtgttctcattgttcatctcccacttatgagtgagaacatgcggtgttctgttaatttaaataaatatttaattacaaataaatatttgtaattaaatattagctcattgtattattacaaataattatttgtaattaaatataatattagctcataagttcagaacattttctgaaaactgtcaacataacacactgcaataactaacatctctacacatgtcaggttgtacattgaagtgttgtggaattaggccaggcatggtggctcacacctgtagtcccagcacttgggaggttgaggcagacagttacttgaggtcaggagttcgagacaagcctggtcaacatggcaaaaccccatctctactaaaaatacaaaaaattagctgggtgtggtggcaggcgcctgtaatcccagctattcaggagacagatgttgcagtgagccgagattgtgccactgcactccagcctgngcgacagagcgagactgcatctcaaaaaaaaaaa

SEQ ID NO: 54322 - DNA, 389 bp, Homo sapiens
cccccctcgagagtcttctagaattaattaacgcggggtcacaaaaaaaccttcacaaagttaactggaaattatacaaaatgtattctcaggatgttatgaaattaaactagggataaataacagaaaaacagaaagtatttccaagtatttggaaatacatggaaatttaaaaagcacatttccaaacaatatataggtcaaagaggaaatctaaaggaaattttaaaatacatagaactgaatgaaaattaaataccacctatcaaaatatgtggaatacaagtaagcagtgctaaaagttaaatttataccccatttgcttacattataaaagagaaaagattccaaataaatgatttcagtatctacctcaaaaaaaaaaaaaa

SEQ ID NO: 54323 - DNA, 177 bp, Homo sapiens
  misc_feature 28, 52: n = A,T,C or G
ccgggccccccctcgaaagtcttctagnaattaattaacgcgggcactgggnaagacacagaataattatgagtagggcatgacttgatcagtttagggattcagaaagatcacactgactgttttgtgcaggataatttgtgatgagatccagggagagtattatgaaaagctgct

SEQ ID NO: 54324 - DNA, 479 bp, Homo sapiens
  misc_feature 41: n = A,T,C or G
gccccccctcggggtacttctagaattaattaacgcggggngaaaatttatagaaaataaatttaaatataccaaaatcaaaaaaaaaaaaaaaaaaaaaaaaaaaaaaaaaaaaaaaaaaaaaaaaaaaaaaaaaaaaaaaaaaaaaaaaaaaaaaaaaaaaaaaaaaaaaaaaatttttaaaaaaaaaaaaaaaggggggcccccccccgggggggcccccctttcccccttttggggggctttttccccccccccctgggcccggttttttcccccgggggggggggaaaccccgggggttcccccatttttttcccttgggacccatcccccttttccccgggggggtttttagaaaagggccccccccgttcccccttcccaaaatttgcccccccttgggggggaagggaattttggccccttttttttttggtaaaatccccggtaaattttttttaaaacccccttttttt

SEQ ID NO: 54325 - DNA, 616 bp, Homo sapiens
  misc_feature 25, 595: n = A,T,C or G
ggccccccctcggggtacttctagnattaattaacgcgggccctgagatgataggatgatagaattagcatagaataactttaacacaactattatacacattaccaaaaattgaaaagatgtatgattttaataaatgaagagattaaaaattcaagtagagaaatggaagtcataaaggaaatctgatagaaatatagaagtaaaaagtatatatataaaatgtaaaaaatactggaataatttaacaaatatttagaaatgccaaaagaaatactttcgtgcattgaagatagatcaatttttttctgtttttttaggttcatggggtacatgtgcaggtttgttaccttggtaaattgcatgtcactgagtcttggtatatgaataatcctgtcaccaagatagtgagtgtagtacccaataagtagccttctaacacatgtccctctctcacccttcactttcaagtgctccccagtatctattcccatctttgtgtccatatttattcaatgtttggctcccacttataagtgataacatgcagtatttgtttgctgtccccacattagtttgcttgcataatggcctncagctgcatccatgttgctgc

SEQ ID NO: 54326 - DNA, 543 bp, Homo sapiens
  misc_feature 32: n = A,T,C or G
gtaccgggcccccccctcggaatacttctagnattaattaaaatagcttatatctgacttattttgaacattctattgctatcaagtcatctataaataatggcagttttatttcttcatttcctaagcttgccttattgtgctacctaggactttcagtaaaatatcagggaaaattggtgatggcaggcttccttgtgttactcctaatctcaagggaaagctttgaatatttcacaatgaaatgcaaggtttgctgaaagatttttacagaagttctctatcagattaatgaagttcccttttattccaagtttgctaagaaagttttcattaacaaaggctgaattttctaattgatttttctgcatcaatggtgatgcttttattaatttctccattattctgttaatgagataaattaaattgattttttgtgttatcaatgtataacatacatgcagaaaagtgcaaaaatcttaagtatataactcagtaaattttgacaaatctagagtgaccaactctcaaaaaaaaaaaaaa

SEQ ID NO: 54327 - DNA, 637 bp, Homo sapiens
  misc_feature 542: n = A,T,C or G
cgggcccccccctcggggtacttctagaattaattaacgcggggacacattcaaaccatagtaccaacatagtataatacaaaaataactagagatctatctcatttataaatattgatgcaaaaaatatgaaatgaaatattagaaagtgaaagaatagcactgttaaaaaataagacttcaggaagtagtggattatattccaggaaaacaaagatggtacaatatgaaaaaatattttttcttaatatatcaaaggaaataatcatataagcaacttcatatatctcccaaatttgtgatcaatttgctttagtgtatataatacagctatttagagcataaatatatttatatgtgtatattacccaaatctaaatttttgagaaatgaacacacaaaaacacataactaatgaaaagaaataaaaaatataggaagattaaaatattaaatataaaggctgagactttgaaaacaattaataaaatagataaaccactaactaaattaatgaggaaaatgagaaaaaataaaaacanaatcacatacacacattcaataggaggaattcacaacagatattctattaaacaaacataagaaatcatcacttcactagatgaagattaattgc

SEQ ID NO: 54328 - DNA, 375 bp, Homo sapiens
  misc_feature 45: n = A,T,C or G
ccgggtccccccctcgaaatacttctatattaattaacgcggggngaaaaaaaaaaaaaaaaaaaaaaaaaaaaaaaaaaaaaaaaaaaaaaaaaaaaaaaaaaaaaaaaaaaaaaaaaaaaaaaaaaaaaaaaaattttaattttaaaaaaaaaaaaaaaagcggccccccccggggggggaaccccaatttccccttttaggagttcttttacccccccctctttgccgtttttttaaaaatgggggtttggaaaaacccggggtttacccaatttttttccttttgaaaaatttccctttttcccagtttggttttttaaaaaaaagccccccccctttcccttttcaaaaatttgcccaaccctattggga

SEQ ID NO: 54329 - DNA, 519 bp, Homo sapiens
ccccccctcggggtacttgtagaattaattaacgcgggtatgctattttaatattgttcatagttgggaactgctagagattatctttaaaaacttgataatatgaggaaaggtataattattaagaacaataataaaaagaatcaaaacctttcaaaaaagaatcaaaacatttcaagataaaagaaaacacatacacacaaaaaacacagagcaacgaaatagactacaaagcaaaattaataaccataaggagaaaagaaaataatttaaaagtcagactaaatatgatttgtagtaataaatatagataacttaattttcatattgagaaatagttttagtctgatgacaaaacaaaacctaaatctgcaatgtcacaagaatctcatgaaaattgactccataattggccacagaaacatcctaaataaatccaaaaagaaattgaaaatagcacagaaaatactccaaatcaaaatgcaatggaacaaaaaccattgacaaaaaaaaaaaaaa

SEQ ID NO: 54330 - DNA, 404 bp, Homo sapiens
  misc_feature 31: n = A,T,C or G
taccgggcccccccctcggaagtcttctagnattaattaagttaatatatatgaagtttttttataaatagtaaagtagtatacaaatattatttattggcattactgctctaattaaagaaggaatggataataaaaaactaagtcaaagcaaaacacacaaatttaagaaacagtgaaacgcatggtgtttcctaggtgatatacttttctgtgctggtggaccctctgtagatgacttaaaatgttatctctatttcccattttgattttgaaacctgtaataataatgataatacttaccctaaaactaatattttctttagataaaatttttacccatcattcataaattttgacagtaatgtttatttaaaaatagagggaaaaaaaaaaaaaaaaaa

SEQ ID NO: 54331 - DNA, 315 bp, Homo sapiens
attaattaacgcgggggggggttaaaaaaaaaaaaaaaaaaaaaaaaaaaaaaaaaaaaaaaaaaaaaaaaaaaaaaaaaaaaaaaaaaaaaaaaaaaaaaaaaataaaaaataaaaaggaaaaaaaataaaaaggcggccccccccgggggggaactccaatttcccctttttggaagtttttttaccccccctctttgcccttttttttacaacttcttaattggaaaaaccttgggtttccccaatttattccctttgaaaaaattccccttttcccaatttggttttttacaaaaaagcccccccccattc

SEQ ID NO: 54332 - DNA, 419 bp, Homo sapiens
ccgggccccccctcgaaagtcttctagaattaattaacgcggggtttcatcaagatacccagaaatattcagcttatagaaaaatgattaaagttgttcaagaattatttaaaagttttgagtaaaaaacataacatggactattcaacaaaaggtgttaggaatgttaggaaaatttactattgaaaaaaatcaatattctacccacaacacattagaataaattacatatgtattaaagagataatcaaatattaaaatcatggaaaagtgatatctgaagagttcagagctttcaagtcacaatattattctacaaaagcaaacaaatgaaaaaaataagtagatttaactactaaaaaaaattaataacacataaaaagctaacataatattacacggcaaaaaaaaaaaaaaaa

SEQ ID NO: 54333 - DNA, 485 bp, Homo sapiens
  misc_feature 18, 29: n = A,T,C or G
cgggcccccccctcggangtacttctagnattaattaacgcgggggaaaaaaaaaaaaaaaaaaaaaaaaaaaaaaaaaaaaaaaaaaaaaaaaaaaaaaaaaaaaacaaaacaaaaaaaaaaaaaaaaagcggccgcccccgcgggggacctccaattaaccatttggggggcccccttgggggccccccctggccccccttttaaaacgttttttacggccaccccctggcgttccccaaataaatggcgtgggggaaaaacccctttttcccccctggttttttcccgaaaaggcccccccctttccccctttcgaaaatttgcccaaccgccccgcccaatggcctttttaaacgttaatctctcgttaaaaggccagggaaattttggccaaataattttttttttaaacccctgggcctttttgggaaaaaccccttttttttcaaaaaaatcccccaaaatggggttccctttttttc

SEQ ID NO: 54334 - DNA, 595 bp, Homo sapiens
  misc_feature 13, 24: n = A,T,C or G
gccccccctcggnagtcttctagnaattaattaacgcgggctttcatcaataacatactgtctcaatcattgtaggttcacagtacatcttgatattgggtaatatacctctacaactttgatcttgttttacaaaattgttttagctcttctagatcctttacttttcatataaattttagaatctagtatagataactataaaaaatcttctgtgactttgattacagaaccaaaatcaaatctgtatataagtttgcagagaattgccatcttaataaaaataaatattccaaagcataaacatagttttttatattgactttgtattcttcaagcttgctatactcatattttcattctagtagacattttgtagtttctttgatgttttccatgtagaaaaaacataagtttgtgaatagagacagttctgtttattcatagtaaatctgtatgattttattttcttattgtaatagctaggacatttgttgatgtgtataggtgtggcaagagtcatatctttgccttgtttctactttggaaaagcatttaatctttcagcattatataaaatgtttttgtatgtttt

SEQ ID NO: 54335 - DNA, 488 bp, Homo sapiens
  misc_feature 24, 33, 35: n = A,T,C or G
ctgggtaccgggcccccccctcgngggtacttntngtaattaattaacgcgggcaatcaaaaaaaaaaaaaaaaaaaaaaaaaaaaaaaaaaaaaaaaaaaaaaaaaaaaaaaaaaaaaaaaaaaaaaaaaaaaaaaaaaaaaaaaaaaaaaaagaaaaaaaaaaaaaaaaaaacaaaaaatacggggtatattataaattggcggccccccccggggggggtccccctttcccccttttgggggggtttttccccccccccctgggccggtttttttccccgggggggggggggaaccccggggtgtccccctttttttccccttgggccccttcccctttttgccggggggggtttttgcgaaggggcccccccctttccccctttcccaatttttccccccctttggggggatgggaatttttcccccttttttttttgttaaaatccccgggtattttttgtgaaaccccccttttttttcccc

SEQ ID NO: 54336 - DNA, 326 bp, Homo sapiens
cggggccccccctcggggtacttctagaattaatttaacgcgggggaaaaaaaaaaaaaaaaaaaaaaaaaaaaaaaaaaaaaaaaaaaaaaaaaaaaaaaaaaaaaaaaaaaaaaaaaaaaaaaaaaaaaaaaaaaaaaaaaaggaacaatataaaagggggaagaaaaaaaaaaaattttggggcccccccggggggggctcctttttccccttttttgagggttttttttcccccctctttggggttgtttttataaactgggtgtggggaaaacccttgttttccccattttttatcgctttaaaaacctcccccttttccc

SEQ ID NO: 54337 - DNA, 453 bp, Homo sapiens
  misc_feature 10, 12, 22: n = A,T,C or G
cccccctcgngngtacttctgnattaattaacgcggggctcccccaagcaaaaaaaaaaaaaaaaaaaaaaaaaaaaaaaaaaaaaaaaaaaaaaaaaaaaaaaaaaaaaaaaaaaaaaaataaaaaaaaaaaaaaagggggccccccccggggggggcctccttttccccttttagggggtggttttcccccccctccttggcggtgtttttccacctgggggctggggaaacccctggctttccccccttttttggcttggcggaaattccccttttggcgggggggcttattaccgaaggggcccgcccggttcgcctttccaaagggggggccacccggggggggaatgggaattggcccccgtaattttttggttaaattccgggttaattttttgttaatccccttttttttttaccctttgggccgaattgggaaagttccttttt

SEQ ID NO: 54338 - DNA, 460 bp, Homo sapiens
cgggccccccctcggaagtcttctagaattaattaacgcgggatgatgtgaaaatctgttttaacagcatgattaaatttggaattcttttttttgaagttttgtaaaagggaggcagaagtttaagggaaaaagttggccaggtaaacttggatagttttagatctattagtgacagaatactcaagctcttgaaaataggaaaagttgttcttgccatgtcaaaggacaagggctgccatatgctaatcactgtatctttactcagatcctataaaatgatttgtacagataagggatttagtaaatctttactaaattaatgttagatgatggaatggatcattgcggctgaaggagagagtagtgaaaatgaggatattaggaaaggaagtggatgatttgctcagatgttgttaaattaggttttgatagaaaaaacctggaaaaaaaaaaaaaa

SEQ ID NO: 54339 - DNA, 597 bp, Homo sapiens
  misc_feature 39: n = A,T,C or G
gactgggtaccgggcccccccctcggaaatacttctagnattaattaacgcgggctgaggcataagaataggtgaagaagtaaaactatctttatttgtagctgacaggaacatatacctggaaaactcttaaaaatcaatgatgaaactaacttttaaaactcagtaagttatttagatgtataattaacaaacaattaataggattatttaaagaaaagtttaaaacatttctgaaaaacactaaagtagacttaaacaaatggaaagatatttcttgtttttagatagggcaatccaacatcataaagatgttagtactgcctaagtttttctttaaattttaactcataccttccaaaaaatagcaactatttttaatggagttagactaggtcatactaaagttcatgtggaaaaaaataactgtaagaatagcaataaaaataatgaaaacagaaagtaggtggggacacgcttttccagacattactataaattctctatacctcaagtaatttggcactggtgcatggaatgacaaatgaaattgtgaaatagaatagagagccaagaaacaaactcagatacgtatgg

SEQ ID NO: 54340 - DNA, 555 bp, Homo sapiens
cgggccccccctcggaagtcttctagaattaattaacgcgggaactttcagatccatttactcaaccgaccctcaaacacctcttgttagatatcccatagacaacccaaattctatatattgaaaagtacctcaactttcacttctgacttttttccccctctattttccctgttccagtgactagcatcactaccagttaccaaaaccagaaacacaagggtcatcctgggccatatcctcttctttgcatctcaattggtcatttagatctgtcgttttgtacccgtattatgttataaatctccaatctcacaaccatggttaaggctttgtcattttctccaaattatctcaatagcctccttattggccttcccttctctaatcttcccaggtcagccagccagtgggaactttataaaatttgaatcaaactatgttgtccctctgcttagattttttcagtgactcattattgtctatagaagcaaatccaaacttcttagccaggaatacaaggctgttgataagctgacctatgcctacctctca

SEQ ID NO: 54341 - DNA, 406 bp, Homo sapiens
  misc_feature 381: n = A,T,C or G
cgggccccccctcgaaagtcttctagaattaattaacgcgggtggggaaagaaacacaacagataggacaaaaaggaaacaaacagcaagacagatttaaacccaaacatgtcggtggttaccttcaatacaagtgatctaaaaactgcaaagaataattgagtaaataaaagagatcccccttcctggctaacacggtaaaaccccgtctctactaaaaatacaaaaaattagccgggcgtggtagcgggcgcctgtagtcccagctactcgggaggctgaggcaggagaatggcgtgaacccgggaggtggagcttgcagtgagccgagatcgcgccactgcactgcagcctgggcgacagagcgagactccgtctcanaaaaaaaaaaaaaaaaaaaaaaaaa

SEQ ID NO: 54342 - DNA, 471 bp, Homo sapiens
  misc_feature 26, 36: n = A,T,C or G
ctgggataccgggcccccccctcggngtacttctanattaattaacgcggggaaaaaaaaaaaaaaaaaaaaaaaaaaaaaaaaaaaaaaaaaaaaaaaaaaaaaaaaaaaaaaaaaaaaaaaaaaaaaaaaaaaaaaaaaaaaaaaaaaaggaccaccaaaaaaaaaaaaaaaaaaaaaaaaaaataaaggccccccccccccgggggggccccctttttcccctttaaggggttttttttccccccccttttggccttttttttaaaacccctggggggggaaaccccttgggttccccaattttttccctttggggcccttcccctttttcccgggggggggtaaaaaaaaagggcccccccccttcccccttccccaatttgccccccccttttggggcatgggaattttgtccccctattttttttttaaaccccccgtccattttttgtaaaacccctctttttt

SEQ ID NO: 54343 - DNA, 264 bp, Homo sapiens
  misc_feature 9, 30, 41: n = A,T,C or G
aagactggngtaccgggcccccccctcgangatcttctagnattaattaacgcgggtctatggagaaaaataacataagaaacagagacataacataagaaacagtggaggtgtagctgggtggatttctcttttaaagagtgtggtaaatgacattctcactgaaaagatggcttttttctaaatgatttttattttacagtaacattaggcatacaatgtaatgaattagaaaacaaagactagccaaaaaaaaaaaaaaaa

SEQ ID NO: 54344 - DNA, 529 bp, Homo sapiens
ccccccctggacagtcttctagaattaattaaccagattaaaaaaccattagaaaacattattaaaaaaaaaacagtccactccaaatagcattccaccttgtggataggctattaaaattctccatatcctaagggaaaatgcatatagttttacttatgagctatggcaatatttggctaaaatcactgtaatatttaaataaatctactgaatttattggaatatatctctctatatcagaaatagattttgaattacttggcccttacaaaagggggcagggggggttggaaattcttcatttttatttccctaggacaaaaggggggggggtttttttggccttttatttatatttatgggcccactgaattaaaattttatataagcctgtctaataaagggtctctcaggacattactttccctccaagaaatttatgaaatagtgaaattttttttttaaaagtagtcccaaattatttttcaaatattttaaccatctaatttttatggccaaataaata

SEQ ID NO: 54345 - DNA, 519 bp, Homo sapiens
  misc_feature 41: n = A,T,C or G
aagactgggtttaccgggccccccctcggagtacttctagnattaattaacgcggggcaaaaaaaaaaaaaaaaaaaaaaaaaaaaaaaaaaaaaaaaaaaaaaaaaaaaaaaaaaaaaaaaaaaaaaaaaaaaaaaaaaaaaaaaaaaaaaaaaaaaaaaaaaaaaaaaatttttaaaaaaaaaaaaaaagggggccccccccggggggggctttctttttccctttttgggggttttttttccccccctttttgggcgttttttttaaaagtttggggggggaaaaccttgggtttccccaatttttttcttttgggaaaatttccttttttcccggttgggttttttaaaaaagggccccccccatttcccttttcaaaaattttcccccctttattggggattggaatttttaaccttttttttttttttaaaattcgggttaattttttttaaaaacccttttttttttaaccaattgggggaattggggaaattttttttttttttaaaaaat

SEQ ID NO: 54346 - DNA, 550 bp, Homo sapiens
cgggccccccctcggaagtcttctagaattaattaaccgggcgtggtgaaaggcacctctaatcccagctacccaagaggctgatgcaggagaatcgcttgtacctgggaggtggaggttgcagtgagccgagatcctgccattgcactccaacctgggcaagaagagtgaaactccgtctcaaaaaaaaaaacagtaaaataaaattaaaaaaaaaaaacaaccagcaaataggttgaaatggtactcaaagacaaactactctcttcccgccatccacccataaagagaattccagactaaaaagtactatgggtaagttttaaccaagtttttgagaactaatatctgttctatacaactggctctaaaaccagataaaaaaggaaagttgcctaattctttttctggaactaacataaccttagttctaattcttagagtataataaaatatatatgtattcctttttcattttttttcaaggacaaagtctcactatgttgcccaggctagactcgaactcctgggctcaagcaatcctctaggc

SEQ ID NO: 54347 - DNA, 374 bp, Homo sapiens
cccccctcggggtacttctagaattaattaacgcggggcaaaaaaaaaaaaaaaaaaaaaaaaaaaaaaaaaaaaaaaaaaaaaaaaaaaaaaaaaaaaaaaaaaaaaaaaaagaatataaaaaaaaaaaaaaaaaaggttctgatatgtaaaaacggggccccccccgccgtagaagcggttactgctctctgtggggtggttataaccacacccccctttgtgctaagtttaacccgcttgcaatggggaattaactgcatgatgccctttatattctactggatggcctgttccctttccagacgggtgcatgctattagaggccctgaatcatctcccagatgaatggttgagatttaggactttttatt

SEQ ID NO: 54348 - DNA, 396 bp, Homo sapiens
cggggtaaaattaaacctaaaataattgtttgttcctgtttaacaaaccttaaaagctgaccaaaagtttaactgtttctaaataacttacctatgtcccaaaacaaagcaaaagtgtttgggaatatacaaatttcctgtcccaaataaaaagattcacattgtttaccatacattcaaagataaacgggcttgcaaagaaaaaaaaaaacagaccgcttttggagcaaaaaattctttcaaacccaaaattaccaaagattaaaaatttttcttacccagggtctttaagggttattacaattttattccctatgttcaagaatgtaaacaaaacttgaaatatattttaaaagacttaaaaagataaaactcaccttgcctgagatgaaaaaa

SEQ ID NO: 54349 - DNA, 572 bp, Homo sapiens
acttctagaattaattaacgcgggggaggtacatatctatatttctatttttctaaaatatgtttaattataaaggcactacaattattagcatactgatattgacaatattttctaaatgtttaaatacactatatatttctgactgtattaatttttcctttctaatgtcaacacttatcatttcttagttttctttgatcattcttattgaaatttttcccattgaaatattttaaaatattatttccctagatttaaaaatctgtttttctcttttgagtttttagttaatttgtccctctttatttgtattatctccttctttctatggaactaatatttatttattatgttttagctttagtatttcagtgcttattttttttaacttattttgttaaaaaataatataaatttcctctaagtactgctttgctatctttctgtttgctttttggatatgtaagcccttgattaatgcaataattattttggatattgcctttatctttacatggttgcatttttttaaggagatgatgttaacattttattattaaacattcata

SEQ ID NO: 54350 - DNA, 311 bp, Homo sapiens
attaattaacgcggggaaaaaaaaaaaaaaaaaaaaaaaaaaaaaaaaaaaaaaaaagaaaaaaaaaaaaaaaaaaaaaaaaattaaaaaaaaaaaaaaggggccgcacaccgaggtgggggctccatttggccctgtgccgagtggttttaccccccctttttgcccgtgttttttcattttccgggccggggaaatcccgggggttgcccaatttgtgggcttggcaaccttgcccttttccccttttggcgttttaccaaattggccccctccggtgggggtccctaaaagttgggcccccggaaggg

SEQ ID NO: 54351 - DNA, 410 bp, Homo sapiens
ctgggtaccgcggccttcctcggagtacttctacattaattaacgcggggggaaaaaaataaaaaaaaaaaaaaaaaaaaaaaaaaaaaaaaaaaaaaaaaaaaaaaaaaaaaaaaaaaaaaaaaaaaaaaaaaaaaaaaaaaaaaaaaaaaaaaaaaaaaaaaaaaaaaaaaaaaaagggggccccccccggggggggcccccatttcccctttttgggggtttttttaccccccctttttggggggttttttaaaacggggggggggggaaaacccggggtttccccaatttttttgttttggaaaaaattccctttttcccggggggggtttttgaaaaagggccccccccgtttcccttttcaaaaatttggcccccttgatggggaaagggaatttttaaccttt

SEQ ID NO: 54352 - DNA, 499 bp, Homo sapiens
  misc_feature 14, 16, 27, 44: n = A,T,C or G
gggccccccctcgngngatacttctanaattaattaacgcgggnaaaaaaaaaaaaaaaaaaaaaaaaaaaaaaaaaaaaaaaaaaaaaaaaaaaaaaaaaaaaaaaaaaaaaaaaaaaaaaaaaaaaaaaaaaaaaaagaaaaaaaaaaaaaaaagggggccccccccgggggggacccccatttccccttttagggagtctttttaccccccctcatgggccgttttttaaaaacttgggaatgggaaaacccttgggtttcccaaatttattccctttgaaaaaattccccttttccccagtggggttaataccaaaaaggccccccccaatcccctttccaaaaattggcccaccttgatgggcaatggaaatttgtaacctttatttttttgtaaaaatccccttaaattttttgtaaaacaactttttttttaacccaatgggccaaattgggaaaattcctttttaattaaaaaaattaacccgaaatgggg

SEQ ID NO: 54353 - DNA, 419 bp, Homo sapiens
  misc_feature 28: n = A,T,C or G
cggggccccccctcgaaagtcttctagnattaattaacgcgggcagtcttataaggttaattgtttttcacagttttatttagactacacaatatacaggaatctaattaacctacactgaatcacatgttaatgacaaagtttagtctacagtacaatgtgagtggatactttttaaaaaattagatcactctgggtcaatttgataacaatattaaaaaatataataatctctgctttataccatacacaaaattttaagtatgaaagtgttctaaatgaaaggtatgcatatctatgtataaaacaaaaaacaacaaagtcttagaaaaacagcatagaacttttttttattaccagaagaggataaaatttcataaacaagatacataaagtgataaccaaaaaaaaaaaaaaaa

SEQ ID NO: 54354 - DNA, 436 bp, Homo sapiens
  misc_feature 38, 55: n = A,T,C or G
ctggggtaccgggcccccccctcgggggtacttctagnattaattaacgcggggnaaaaaaaaaaaaaaaaaaaaaaaaaaaaaaaaaaaaaaaaaaaaaaaaaaaaaaaaagaaaaaaaaaaaaaaaaaaaaaaaaaaaggagaaaaaaaaaaaaaggaataacagaaaaaaaaaaaaaaaaaaaaggtcgcccccagcagggggggcaacaaataaaacgggggggggaccgggggtaaggccccccacttggcccctttttttgaaatttttcgactgggaaattgccgggtttttaaaaattagtggggggggaaacctttcccctttcccaatttttggtttttggaaaaaggcccgttcaattgggggttttaaaaagtaggggggcctgaatgggaaattttaaaaaaaagcggcaatttttgggggaa

SEQ ID NO: 54355 - DNA, 275 bp, Homo sapiens
  misc_feature 8: n = A,T,C or G
cttctagnattaattaacgcggggatacattaataattattgaaactaggtaatgggtagattgagattattacattattctctctacttttgtgtaatacatgtggttagtgataaaaaaagcaagcaagaagtaagagagaggggaaaagcaggtgaggatcaatgacgagtctaaataaaagggtagaggtagttaacacagtaagtacatagttaagtacgtgagagtgctaacctattaaagtagaagtgaggttcaaaaaaaaaaaaaa

SEQ ID NO: 54356 - DNA, 529 bp, Homo sapiens
  misc_feature 38: n = A,T,C or G
ctgggataccgggcccccccctcggaaatacttctagnattaattaatacataatgcctatattacttgtatacttttattttatatctagaacactcataatatttacacctgtgtgcatataatctcttagtcatatgcacacaagtgtatatattataaatgttttctacatggaatcacttggcattcaatcctgaggctatttgtcatgttctttagattttacacttatcctctttaataagtatatggtatatttgagaaaaagtctaggaaaaattatgttagatttctattatttctaatcatacttttccaaatatatatttaattattcatacttcatttgtttgtaatgttaaattaagtatacacaaatctaagccaactcaaatcatggataaaccacaataaaacttacttcgagggaattttattttattaccaaatgaaaaagaaaagcactcagtgaatttgaagtaaaatcaagatggtgtattattgtggtagtaaaaaaaaaaaaaaa

SEQ ID NO: 54357 - DNA, 339 bp, Homo sapiens
ccgggccccccctcggaagtcttctagaattaattaacgcggggtatctgcaaaaaaaacaaaaaaaataaaaaaaaaaaaaaaaaaaaaaaaataaaaaaaaaaaaaaaaaaaaaaaaaaaaaaaaaagatatttaaaaaaaaaaaaaaaggggccccccccgggggggacctccaatccccccttttgaaaagagaatcacccccactcttggccggattttaaacaccgcctgaccagggaaacccgtgtggtggccaaattaacttcctttgaaaaacttccccttttggctagttggttaattacggaccaggcccaaaccaataccctttcca

SEQ ID NO: 54358 - DNA, 396 bp, Homo sapiens
  misc_feature 376: n = A,T,C or G
cccccctcgagagtcttctagaattaattaacgcgggtggggaaagaaacacaacagataggacaaaaaggaaacaaacagcaagacagatttaaacccaaacatgtcggtggttaccttcaatacaagtgatctaaaaactgcaaagaataattgagtaaataaaagagatcccccttcctggctaacacggtaaaaccccgtctctactaaaaatacaaaaaattagccgggcgtggtagcgggcgcctgtagtcccagctactcgggaggctgaggcaggagaatggcgtgaacccgggaggcggagcttgcagtgagccgagatcgcgccactgcactgcagcctgagcgacagagcgagactccgtctcanaaaataaaaaatatatttta

SEQ ID NO: 54359 - DNA, 405 bp, Homo sapiens
cgggcccccccctcgaaagtcttctagaattaattaacgcgggtggatataaaagcctttggtcaagtatgtgatttgcaaatactttctcctaacatggtttgtctttcattctctttacggtaccctttatatagcaaaatattttttgatgaaattcaattgatctttttctttatagatagtgcttttgttgttacctaataattctttgcctaacccaatgtcacaaacattttcttctatgttttcctaaagaattttaggttttaggctgggcgccgtggctcatgcctgtaatcccagcactttgggaggccgaggcgggcagatcacgaggtcaggagatggagaccatcctggctaacacagtgaaaccccgtctctactaaaaaaaaaaaaaaa

SEQ ID NO: 54360 - DNA, 612 bp, Homo sapiens
cccccctcggaagtcttctagaattaattaacgcgggtctttctccatctctttagttttaaccaatctgtgccattatatttaaagtggctttcctgtagataacatatggtagtggttttaaaaaaatccaccctgacaatctttgtcttttaagtggtgtattctgataatttatatttatttatttattttaatttttgcttttttttggtaactttaattttaaattcagggggtgcatgtgcaggtttgttatctgagtatattgtgtgatgctgaggtctggggtacaaatgatcccatcacccacgtactaagcatagtacccaagagcctttcgactctcatacgccctttcccatctagtagtccctggtctactgttgccatctttatgtccatgagtacccaaggtttaactcccatgtataagtgagaacatgtagtatttcagatcatttacatttaaagtgagtattgataaagttagattagtatctaccatgttgtaactgtcttctattatttgcattattgttattttttccccctcatttcattttatgctttctctaattgagaattttatttagctccattttatctcct

SEQ ID NO: 54361 - DNA, 490 bp, Homo sapiens
gggtacccgggccccccctcgaaatacttctagaattaattaacgcgggaggggggagggatagcattaggagatatacctaatgctaaatgactagttaatgggtgcagcacaccaacatgacacatgtatacatatgtaacaaacctgcgccttgtgcacatgtaccctaaaacttaaagtataataataataaaataaaataaaatgtttgaagcttgcaaaaaaaaataagtaaaaaataaaacaaaatctagaattgctataaaacactatctaaaatatctagtttacaaacaaaacttatgacgcaacaaaatgggaaaaaaaccctggcaatagaaagttactctgaatgggctcacatgttatattgagcagacaaagcatttaaagcgagtattataaatatgttaaaggaattaaataaaactatatcaaaatgattaaaggaatatatgatgatcatagtcagctaggttttatccct

SEQ ID NO: 54362 - DNA, 573 bp, Homo sapiens
cgggccccccctcggaagtcttctagaattaattaacgcgggtcataaatcaagataagggattcaatttgcagagaagatataacaaatttaaatatgtatgcacctaatagtatataacagcctaaaaataaagcaaaaacttgatataagtacaagagaaattaagataaatctgtcatcatgttgggcaatttcaacaccctttctcaagtggtaagtcaagcagcacaaaaactcagcaaggtcaagatttgaataatgttaacagtagagctttatctactgaataaatgtaaaattccccatccaataattagtccactttcttccaaaatgcatgtggaagatgcataaacttgattatgcactaagcaagtgttaacaattttcaaaaactatgcattgtaaaaattacattatctaaccacaatgcaattaagtcaggtgtctataataaaaaggattaaaagacaaaaacacacaccacttccaaatactgtatagaaaacacactttcaatgatgaaaattatattggaaattaagacactctgattatgaaacatgatga

SEQ ID NO: 54363 - DNA, 387 bp, Homo sapiens
ccgggccccccctcgaggtacttctagaattaattaaggcataatagaaaaatgagccattgagtatatggaaatgctaacattaaaaaattggctaaacaagctttgcaaaaaaatattaaaaatgaagtgaaaaatttaaattagaaataaaaaatgtcaaaataataatatttttgaataatagtgagggtaaataatagtaagggaactgatgaagctcaaaaaaaaaaacataaatatagatagattcatagagagagaattttagaaatgaagagaagacatggctgagtatggtggcccacccatataatctcagaactttgggaggccaaggcaggaagattgcttaagcacaggagttcactgaaaaaaaaaaaaaaa

SEQ ID NO: 54364 - DNA, 468 bp, Homo sapiens
  misc_feature 35: n = A,T,C or G
taattaacgcgggtcatgtgatgtttgaaaggccntatttgaaatccatgtgaagatagccaggaagcagctggatagagaaattacgaatttcagagaaaggccatttctggagagagagatttggaattcattgacatatagatggcatgaagtcacctagaatataagaaattaacctaactgtaatatttatctgggatgtttgattaaaatatgatttccctttgggaggccagggagggtggatcatgaggtcaagagattgagaccatcctggccaacatggtgaaaccccatctctactaaaaatacaaaaattagctgggtgtggtggagcacacttgtaattccagctacttgggaggctgaggcaggcaaatcatgaggtcagaagattgagaccgtcctggctaacacggtgaaacctggtctctactaaaaatacaaaaaaaaaaaaaaaaaaaa

SEQ ID NO: 54365 - DNA, 392 bp, Homo sapiens
aattaacgccggggtgatgttaaaaaaaaaaaaaaaaaaaaaaaaaaaaaaaaaaaaaaaaaaaaaaaaaaaaataaaaaaaaaaaaaaaaagggggacaccaaaaaagggggggccgccaccggggtggacctccttttttccctttccccttctttgtcggcccccctcacttttttttttttaccaactttggggttgggcaacccctgccctttccccccttttcccctttgcccggctgccccttttcgccggcggccctcttcgttagcccgcccggacgggtggccctcccgagcggtggcccgtattggttggcgaatggattttgtaaccgttccttttttgttttttttcgcgccgcttttttgttcccccacccccttttt

SEQ ID NO: 54366 - DNA, 257 bp, Homo sapiens
cgggccccccctcggggtacttctagaattaattaacacgggcacacagttataaaaattatgttacatatcaaaacaaattccacatgggaaaaagtgttatatattaaaataaattaaaataaagaaaatataattaaatatttatcaaaactctagaagggagatactttttaaaatttatcagtgataaaatatacctgaaagaaaagattagtgcttctatagatacataaaattagcaaaaaaaaaaaaaa

SEQ ID NO: 54367 - DNA, 141 bp, Homo sapiens
  misc_feature 28: n = A,T,C or G
cgggcccccccctcggggtacttctagnattaattaacgcgggggcggcaatacctaccgaacgtggcgctagctggttgtgcacgcatcttgcttagctcaacttggcatttgtgcacgcaaccctctacatcccctcgt

SEQ ID NO: 54368 - DNA, 225 bp, Homo sapiens
ccgggccccccctcgaaagtcttctagaattaattaacgcggggagctgtttctgtctgaaatataccttgctaagtaagcataaatgaataccaagacaataaatgaaaacagtcagaaacaaaacccaacaaaccaaaaaccttatcattaaagtaggttaaaatgaaaggtatggaaatgtgaggaagctcaattttaaagggagacaaaaaaaaaaaaaaa

SEQ ID NO: 54369 - DNA, 435 bp, Homo sapiens
ggcccccccttcggggtacttctagaattaattaacgcgggtctcatgtaacccataaagatatacacctattatgtgtctacaaaatttaaaaaagatcattgtctatttctaaaaccaaacaaccaagtaacaaacaaacaaaactttagcaagctttaaagactctgcaaacttgatctacgtaaaggatatcagtgactaaatagcaagaaacattatactataaagttaaatattggaagcatctctttgaagtcagaatgtctgtagcaagattagtatttaccactttgagaatttgaagacaaaacaatgagataatacataggacaactgggtataacttttggaaataattattttcagaaatataattatacaattatgaaaaccaagataaaatgaaaattccaagaatataaaaaaaaaaaa

SEQ ID NO: 54370 - DNA, 570 bp, Homo sapiens
  misc_feature 28: n = A,T,C or G
ccgggccccccctcgaaagtcttctagnaattaattaacgcgggatgattcttagttttttgtagacaacttctaacagattaaataagttcctttccattattacttcatcagagtatatattataaattatacattgaatgttatcaaatgataacattcctagaattaactaaacctggttttcaagtaatattcttttatatattactgaattcattttgttaatattttacgaattttcgtgcactggtttgtgagagaaaatgaactatatagaactatgcataaataatatgcataactacataaaaataatataacaataaaaaattttttagaatatttattttattatggtattcttgttaggatttggtatcaggcttaagttggccttattaaatggggtaggaaatattttcccttttcttattttctggaatattttctatgatattggagccatttcccaaataaatgtttgatacatattccagtgaatctctctggtttgtaattttctcagtgggagaatttgaaattactgattcagtttctccatgggta

SEQ ID NO: 54371 - DNA, 574 bp, Homo sapiens
ccgggccccccctcgaaagtcttctagaattaattaacgcggggtggggggaggggggagggatagcattaggagatatacctaatgctaaatgacgagttaatcggtgcagcacaccaacatggcgcatgtatacatatgtaacaaacctgcacgttgtgcacatgtaccctaaaacttaaagcataataataataaaataaaagaaaagaaaaagaaaaaagcaaacataattacattataataaatgaagaaataaaaagtcatcctagaataaatgttacatatgtatgaaaaattaacacagatattattatctgtgaagaagagaaacagaataataaagtggaaaaatatttaaagatataaacttaaataaatttttattaatgaaaataaacaggccaaaaattacatagtgcctaaaaacagttgaaacagagcagtcaaaacaaagaaatagactttgccaggccgaggcgggtagatcacgaggtcaggagattgaaaccatcctggctaaagtggtgaaaccccgtttctactaaaaatacaaaaaaaaaaaaaaaaaaaa

SEQ ID NO: 54372 - DNA, 301 bp, Homo sapiens
cgggccccccctcgaaagtcttctagaattaattaacgcgggattcctcatctttcttaacaaggatctcatagcatagacttttcataatttatgtagccatcactgtattgataggtgtttacattgtttctattttttctattacaaaaatgtatttgaaattcatgtctttttacatgcatgtttttacatgtgtacaaatatttctgtaagacagatttcactaagtagaaccaaaaagtgatacaattttttgttttcaaaagataccactaaataactccaaaaaaaaaaaaaa

SEQ ID NO: 54373 - DNA, 518 bp, Homo sapiens
  misc_feature 19, 32: n = A,T,C or G
taccgggcccccccctcgngaatacttctagnattaattaacgcgggatatgtgatattaatattaatgaatattaacaaataaatattcttacaattatttaaaaactcattcttcaataatcgacgccatttattttcaaaaatattatttaaatgtaataaatatttaaagaataaatgtcatttattaagaataaataataataattaaattagaaatattatttaaggaataaatgacattgatgaagcaattagtatataccctttagacaatgagtaggatactgcttccaaacaatgaagaatttaatagaaaatataggtcacagccagacgcggtggctcatgcctgtaatctcagcactttgggaggcttagatgggcagatcagctgaggtcaggggttcgagaccagcctgatcaacatggagaaaccccgtctctacgaaaaatacaaaattagccggcgtggtggtgcatgcctgtaatcccagctacttggtaggctgaggc

SEQ ID NO: 54374 - DNA, 479 bp, Homo sapiens
  misc_feature 28: n = A,T,C or G
ccgggccctccctcggaagtcttctagnattaattaacgcgggggtgggggtaagaaaagaaaaaaaagaagtcaaaaagattggtatttttttaggcactcccatagactgacacttggaaactggtaagataaaatcacagaagccctgctgacctgtgccacaaaactcgattatctacaatgtatgtgaaaaatgtctcattttgtgactagagggtgtgcgtctccaaggcaagttatttaacaacttcttctacttcatacagaaccattcttagtgtttttctttgagattggtataaactcttctaagaatattaattttttgtcctgtggtcaaatatttaaccagtttgccttttaattttgtatatagtatattattacttatctatagatttttttttttttgagacagtgtgtcactccagcatgggcaacagagcaagcccctggctctaaaaaaaaaaaaaaaa

SEQ ID NO: 54375 - DNA, 466 bp, Homo sapiens
cccccctgcggggtacttctagaattaattaacgcgggcaggagttcaagaccagcctgggcaacatattatctaaaaattaatttaaaaaaagttagccaggcatggtggcatgcaacattagtcctagctactcaggaggctggggtgagaggaatgcttgaccccagaagatcaagactgcagtgagctacaagtatgtcactatacccagcctgggtgacagagtgagactcagtctcacacacagacaaaaagatggttaaaatggtacattttatgttatgtatattttatcacaattaaaaaataaggaaaaaattaaaaacgagagagctaagatggtacattttctttgacacagtaattatactaagaatttttcctaaggaaaaaatgagatgtgtaaagatttagtcatatggatttttaaagagtagttttacaaaacaaaaaaaaaaaaaaa

SEQ ID NO: 54376 - DNA, 602 bp, Homo sapiens
cccccctcgagaagtcttctagaattaattaacgcggggatcctactaagtgcatgtgaagaatggcaaagaggccaaaggctgaggggatccatgagtgctaggctgtgatgcaagaagccaccggaagatttcgagcaaaggggtgacattatctgacttacattacaaaggatcattcaggctgcaccacaaggaatagactataggacatgagaatgaaagctaagtagagagaacatttatcaggaaattgcaatagcccaggtaagagatgttgagagcttctaggcatttggacacacttataaaaaatgtactttcattaaacgtacaaagacaaccaagcatggtggctgacacctgtaatcttagcattttgggacccagaggcagaattatcacttgagcttcaggagttcaagtccagcctgggcaacacagtgagactttatctctacaaaaaatttaaaatgatttgttgagtatggtgacacgtgcctataatcccagctactcaggaggctgaagtggggggatcacttgagtctgggaggtcaaggctgcagtgagctgtgtttgcaccactgccctccagccta

SEQ ID NO: 54377 - DNA, 447 bp, Homo sapiens
  misc_feature 18: n = A,T,C or G
ccgggtccccccctcggnagtcttctagaattaattaacgcgggggattccacttggcatacatgagacgctccgcccccaagtgtttaactgtgaccctgcttgttccttctgtgggctcaaagccactgcttcgggcttccaacatctgtgacaacctgctttcttgggctctctggaccaggatatttgattgttcttttagttcagacagtggtgcctgctcttacacgcctgtctactcttctaccatttgcctttagtcctcctcatattgaatttggagttatgactggcgtttttcctaaattcaggatccttacagggacttaccctgtggctctcctagtcgcccctgcttaaaaagacctcgcattggcggtgggccaccgaatccgagttgcctctttcctgtgggtaacgacacaactatccttcttcgcgtac

SEQ ID NO: 54378 - DNA, 498 bp, Homo sapiens
ccccctcggaagtcttctagaattaattaacgcgggtgagatagttttacatatatatttactaattcatgtaaataataaagtcatgggatgtaaacataattaacatttttataaataataactataggtttcaaaaataaatttagtgagccaactgacattgttttacatttctttaagtctctttaatatctggcttcaagcgggcatggtggcccacgcctgtagtcccagcactttgggaggctgaggcgagtggatcacctgatgtcaggagtttgagaccagcctggccaacaaggtgaaaccccatctctactaaaaatacaaaaattaactgggcatggtggtggatgcctgtaatcccagctactcgggaggctgaggcaggagattcgcttgaacccaggaggtggaggttgcagtgagctgagattgtgctattacactccagcctgggcaacagcctgagactctgtttcaaaaaaaaaaaaa

SEQ ID NO: 54379 - DNA, 475 bp, Homo sapiens
cgggccccccctcgaaagtcttctagaattaattaacgcggggtggggggaggggggacggatagcattaagagatatacctaatgttaaatgacgagttaatgggtgcagcacaccaccatgtcatatgtatacatatataacaaagctgcacgttgtgcacatgtaccctacaacttaaagtgtaataaaaaaataaaataaaataaaataaaataaaataaaataaaataaaataaaataggatattcattctaccctttaagaccattgcatgctttctttgtttgctatagtcaattaattgactgattttataataaatagtaaatatattttataattattgacttagtttctttgaattggattgggaaatattaaatggatgttttcagttcttctattaattagcaatattctataacagtaaaaatgtattgtattatgtactacgagtcaagatgaaaattag

SEQ ID NO: 54380 - DNA, 611 bp, Homo sapiens; identical to SEQ ID NO: 39734

SEQ ID NO: 54381 - DNA, 521 bp, Homo sapiens
  misc_feature 24: n = A,T,C or G
gccccccctcggggtacttctagnaattaattaacgcgggttgccagggtacatctgtggccaggtaagggccacagagacagtcgtgatccccagcagcttcaaagctgcaaaatgctgggctttttttttttttttaagatgaagtcttgctctgttgcctaggctggagtgcagtggcgtgatctcggctcaccgcaacctccacctcccaggttcaagcaattctcctgcctctgcctcctgagtagctggactacaggcacccaccaccatgcctgactaatttttgtatttttagtagagacgggggtttcaccatgttggccaggctggtcttgaactcctgacctcaggtgatccatactcctcggcctcccaaagcgctgggattacaggcatcagccactgcgcctggcctagggctttcttttttaaaaaacaagtcctaacaaaaggggggtttctaccagcccctgagccacaccttctgaaactcccttgcccaggatccccacagc

SEQ ID NO: 54382 - DNA, 535 bp, Homo sapiens
  misc_feature 513: n = A,T,C or G
cgggccccccctcggaagtcttctagaattaattaacgcggggacagttcagaaaataactattaaaatctttattaaaaaattcttccagccactgtgtaactcaatgttattactgtgagctcaaacttattgctgctcgggaggctgaggtatgaggatcgcttgagcccggagggcagaggttgcagtgggccgagagcgctccactgtattccaggctgggccccagggtgagactgcatctcaataaaaataaataaattaaataaagtggcaattttccatcagaggaagccctccttgtaccagaagctgccctgcagttttttcaaacttatatatgtctctcataccgtttcttttcattagtgagccattaatataggtagaaagaaatacgtttgtcccctcagatttgctaggacagaaaattggtcaagaacaactgagctaaaaagttaatcggtaatttgtttataaaatcagagacatgcactgattttagagcanaaagatatttagctaattgatg

SEQ ID NO: 54383 - DNA, 484 bp, Homo sapiens
cccccctcgagagtcttctagaattaattaacgcgggcagccagggtttattcttctgtgatcatgatagtatttgaagaactcaacaaaagaatgttaattctgacaatttataatagtgaaataattaacacagtcttaatgtcaaataatagtgtattatttaaatgatgtagggaacagttgtgcaatacaaaaccatggagatattaaatatggcttattagcatgtttaaaggtagaaaataccatcatacattaagaaaagatacagtttgaaacttgcacacaggatagttccatttctttatatgaagaatatatatcaacagtagtagaagaagtcttagagagatgaaattgtgggaacatttttcttttaactttattttctatatattctataatgacaatgtattaaattataaaaataaaaaatgagttttcttatcattagaaataacagtccaaaaaaaaaaaaaaa

SEQ ID NO: 54384 - DNA, 548 bp, Homo sapiens
  misc_feature 28: n = A,T,C or G
cgggcccccccctcggaagtcttctagnaattaattaacgcgggggttcatgctgcgggtaatccctgtccatggcgggccccactgcaagcatcgggcggcaggcggggtggggtcctcggccgggcagcaggcggcgggactccaggacccggggccgccggggcgtctatctgggcttctcatccgtggtggcggcggtggcggcagcatcatgatcttgggagggggcccgcgctttatcagcacgctgacacccagaggggatgtggcttccttctgaaatcaggtcttcaagggagtcgttgtaaaagagaacgatgaaggtgctggtggcccagacaggacaaccactgggaaggcagaacctcagacaggaccaagatccgggagaatccgaggaaccgggtaactgtgtccgcctcccagctctctcctgagtccgggtaactgcgtccgcctcccagctctctctcttgagtccgggtaactgcatctgcctcccagctctctctcctgagtccggataactgtccgcctcccagctc

SEQ ID NO: 54385 - DNA, 618 bp, Homo sapiens
cgggccccccctcggaagtcttctagaattaattaacgcgggcatcatcacaagtgattcattgactgtgggtcagaacatttcctactctcaaagaagttaacttgtctgaagtcatacaattagaaagcagcagaagaagaccggaacttagcctttctggctctcaagctgtccctggtgtgggaacgggatgcaaagtacaaatggaaaggatagatcatgaaggaaaaaatggacacgcttttactgagaaggaagagatcctggatgagatgcacgtgaggtaagtttgcagttgaagtggtaggtaggcagtaattgaaggaattttttaaaactaatgatcaggctgaggtgggcagatcacctgaggtcaggagttcgagaccagcctggccaatgtggtgaaaccccgtctctattaaaaatacaaaaattagccaggcgtggtggcaggcgcctgtaatcccccctactcgggaggctgaggcaggagaattgcttgaacctgggaggcagaggttgcggtgagccgagatcatgccattcactccagcctgggggacaagagtgagacttcatctaaaaaaaaaaaaaagcggccgccaccgcggt

SEQ ID NO: 54386 - DNA, 381 bp, Homo sapiens
tccaccgcggtggcggccgcttttttttttttttttcgcaactacctcccgggggggggagggggaaatttgcccccctgctgccttctttgaatggggaacccgtttttaaggctccttttccgaaataaaaccttaattccccgtaacccggggtcaccatggtaggcacggaaactaccccgcttaaataaacccgggggggcccaaggcaaatttttagggcaattcccctttttttctttaaaagggagggtttttgtctccaggctggcctttttaggttgggaaaaaaggcccataaccaatggaacactattttcccaacccttttaaaggggccggttcttatttcggaaatcaaccaaagggctgaaatct

SEQ ID NO: 54387 - DNA, 453 bp, Homo sapiens
cccccctcggggtacttctagaattaattaacgcgggggtcggcaccttcggcaaagtgaaggttggcaaacatgaattgactgggcataaagtagctgtgaagatactcaatcgacagaagattcggagccttgatgtggtaggaaaaatccgcagagaaattcagaacctcaagcttttcaggcatcctcatataattaaactgtaagctctgtttatattaaatatagtccagtcatcttttcatcttttttgttaacctacttaatgtgacaagtgagaaaaatgactggcacttctttttgtttcctaagggttttgaaaagtttcttccaccgcacccggcctccatatcccccttttaaaattctgtagtgtatggtaagtcatatcagatatcagacctaatttaaatttcattttagctttacaagtccaaaaaaaaaaaaaaa

SEQ ID NO: 54388 - DNA, 598 bp, Homo sapiens
  misc_feature 28: n = A,T,C or G
ccgggccccccctcgaaagtcttctagnattaattaacgcggggagtcactttagggatagaagattgcaagtactttccaagtctactttctatgagccaagaccctatctattgaaaaataatttcaactgtaccagaagagcccagtgcccagaaaccaatatcagttctatacagatacaaggtgatgctgattatttcatcaaccatcttggagttcccatcgtgcagtttgcttacgaggacatcaaaacattagagggtccaagttttctctccgaggcccgtttttctacacgagcaacaaaaattgaagaaatggatcgctctttcaaccttcatgaaaccattactaagctctcaggagaagtgattttgcaaattgccaacgaacctgttctgccctttaatgcacttgatatagctttagaagttcaaaacaaccttaaaggtgatcaacccaacactcatcaactgttagccatggcgtcacgcctgcgggagagtgctgaactttttcagtctgatgagacgcgacctgctaatgatcccaaggagagagcacccatccgcatccggatgctgaatgacattct

SEQ ID NO: 54389 - DNA, 596 bp, Homo sapiens
  misc_feature 28, 589: n = A,T,C or G
cgggcccccccctcgaaatacttctagnaattaattaacgcggggtgggggggagtggggaggcactggccgggtcttgcttcttgcagcaaagcatgctttgggcctacccaggtccctgccacctggggtcccaatgcccctacctgccctggagggaccggccccaccagccctctgttccttgcagctgtgccataagtaacgtgaagaaggtgtccctggaactgggcgggaagtcacccctcatcatctttgctgactgtgacctcaacaaggctgtgcagatggtgagggccgggcctggagggggcagggacagtgagcgggaacagggactgtagggaccaggaggccctgtctctgattccacagccacactcacacgtgtagccctggtggagtccatagcgtcatcacaagcatagcatggcaggcagcaggcttagggaagaatgacgtgtgccctccaaacatacttcccaagaagtttcatagctgccaggatagctgagatcaactgcctataacatatgtgtgtgtgtgtattacatataaatatgaaattgggaaacacacgccacagctncatctgt

SEQ ID NO: 54390 - DNA, 610 bp, Homo sapiens
  misc_feature 28: n = A,T,C or G
ccgggccccccctcggaagtcttctagnattaattaacgcgggcatgagatacatctgaaggcactgccacgttgtaaggccccatggctctatataaacatctgctgtgccgcaccagcaccccttgaggccatattgtattttctgaccaactaagggagaaagaaatgcaatgttagcatattggcaattacagataagatagcatctggcaaggccaactgtatttttatggaaggaattaaataatcaaggcttcatctgcctgaattctgaaaatacagtaattccatggtcaaactggagtagttttagaaaggatttgttactttaacttcattgctatatagtaaacagaggttgcaaagaaatatagttaactcagtgtcaaaggacttaagaggcttagaagaatgagcagacataaatgtgtaagccagaaaacagtgtgtaagcagggtgactgtcatctccatcccaagtgagcagagtctactggtggaaatgctagagggaacaaacaagaagagaaagctgatggtaataagaatagtggagaaattagcacattgtcaatctagcatgacatttactgcagaattacatccc

SEQ ID NO: 54391 - DNA, 465 bp, Homo sapiens
  misc_feature 28: n = A,T,C or G
cgggcccccccctcgaaagtcttctagnaattaattaacgcgggaggacaagagaaatcatgtttattcctcaggaatactgaagtgccctggagtaagctgccattcttctgtaacaatgttatcagtaatgctttaaactccagcacctggttatgcatttgaaaccaagtctgtttcttgttttgtattttctctctggaagttgtaaggaggtggtcttaaataaattaaacaaaaataaaaaaaaaaaaaaaaaaaaaaaaaaaaaaaaaaaaaaaaaaaaaaaaaagcggccgccaccgtggagaaactacaataaacacctataatgaataaaataacgacgcactaactgaccaaaggggcccccccccgggaggggaaaaaccctgccctttacgagattaatttaccccccccccatgccccttttttcaaatggcgtaatagggaaaaaacccg

SEQ ID NO: 54392 - DNA, 359 bp, Homo sapiens
  misc_feature 24, 37: n = A,T,C or G
ctgggtaccgggcccccccctcgngggtacttctagnattaattaacgcgggcgtaaaatgctgtctgcatcggctcccttctattactgcttcctaaagttgttgtgaggattaaatgagttaatgtaggtaagcattcagaacagtgcctggcacataagtgctatggatgtgttaactgttattattgttaagaacgatctaaacacagtggtcaggaatggcaaagtcaagagttctgataggatactatggttatttagactcaaaagcaaagctgccaaaatccagctgaccttccttttgatatttagaggaaattctgttacctaagactgatatttcattatagccactc

SEQ ID NO: 54393 - DNA, 407 bp, Homo sapiens
  misc_feature 32, 50: n = A,T,C or G
gtacccgggccccccctcgaaatacttctagnaattaattaacgcggggngaaaaggaacagattgttcctaaaccagaagaggaggttgcccagaagaaaaagaatcccagaagaaactgaagaaacaaaaacttatggcacgggagtaaattcagcattaaaataaatgtaattaaaaggaaaaaaaaaaaaaaaaaaaaaaaaaaaaaaaaaaaaaaaaaaaaaaaaaaaaaaaaaaaaaaaaaaaaaaaaaaaaaaaaaaaaaaaaaaaaaaaaaaaaaaaaaaaaaaaaaaaaaaaaaaaaaagcgccccccccccgggggggacccccaattcccccttaaaaagggttttttacccccccccactggccttgttttaaaaaaccgggaaaggaaaaaacc

SEQ ID NO: 54394 - DNA, 559 bp, Homo sapiens
  misc_feature 22, 27: n = A,T,C or G
ggccccccctcggaggtacttnctagnattaattaacgcggggagggtaggagcctacctttgacaagcaacacttagcaaacacagataaccaatcacgttggccaaccttctccctaacatcttccagttctttgtgttgcctcaccccagggcttaaaactcctcccactttttttttccagagttgagttcaatgtccgctctattgaaatagtcctataagttttccttgcctatataactctattcagtgaaacttttctttgacaccctggaatatcttattgtgtgagatgagtctatctttataaaagaaagctagttaataaacgaagaataaatgaaagaattagacaactgtcatgctgtgaccctcagtgtactaactatttagccagaactatcaatggatgctataatcattaggtgaaaggttataggggaacagaatatatcagcagggtgcctaagtagtagcattcaggtcacttattcattgtaagaatcaaagtatcattataatagagagatctagttgttactaatttaactaaat

SEQ ID NO: 54395 - DNA, 625 bp, Homo sapiens
  misc_feature 571: n = A,T,C or G
ccccctcgaaagtcttctagaattaattaacgcggggtatactcaaatattacaatattaaatcgttgattcactgtagcaccttgtagtaacaagcactttcaggcatatggtctgatttactcttcttgatacctttgcagagaggagtgtaatgtgtctcttttatattaaagtgtttatattaaataaataaataaatgtatttattagatgtatttatgtatttatttttcttttgataactttagtacccaagcacacttattaaaatctcaagggagagaagcctgttttagagatcttctgtttaattctcctttagatcccttctcagcttttgtccaaagattcaagaatgtagtgcactgctagaaaagattgtccacttcatgagaaggggatttttgcctgttttatccacttatatccccaatgtgtagaagaatgtcttggttcatggtagatgctttgtaactatttatttaatgaatgacttaatttttgttattttaacaatgagtttttataatgttccttgataatatctgccttgtgtaataaatgtctntaatgaattggcacttaacgtttattggtatatcatgcacatgtaaatgaagag

SEQ ID NO: 54396 - DNA, 324 bp, Homo sapiens
cgggccccccctcggggtacttctagaattaattaacgcgggaatgatttttgaatataaagtttataaattatattttttaaaatgtataaaatatttctgattaatagatgaatttgggtgagctgtaacaaaataatatttatttaaagttgattatatgtcttccaggttttattacataatgataaaatattccaagttcatataaaactgaatttgatcttttcatgatctaaactttctaaattttatatattgatcaaatgggccaaacaagttactgattcaatcagttgtataagattacaaaaaaaaaaaaaa

SEQ ID NO: 54397 - DNA, 587 bp, Homo sapiens
ccgggccccccctcggaagtcttctagaattaattaacgcgggggagtcactctttaataaatactgaagaaataagggggtatcagtatggaattgccttacatctgtatcttataccctacaatgaatttgcattagcctacgattgatgctctctggatattttttgtaaaatcattaatgcacagcaacaagctttaaaatcaaatgaacctcagctcaagtcttgatattaccgtttatttgttgggaggtttgaagattacctctgagcctcagttttctcatttgcaaaacataatataccatccttaagtgctgttgtgggggattaaatgacataatgtgtgaaaggtacacaggcatgtgcttgagggttgtaggcacttagtatgtgtatacttacttagtgtgtatgtatacatatacttagtgtgtatgtacataattaatagaatatgcttcagagagagtatagtatagtggacagagtcaaatatgtgaaactgaacagatccagattttaattccagttctgccaattacaaacgttgtgattttggacaaataatttcactttaaaaat

SEQ ID NO: 54398 - DNA, 408 bp, Homo sapiens
ccgggccccccctcggaagtcttctagaattaattaacgccgaggtccaggtcctcaataattttagagtgtaaggggctcctaagactgaaaagcttgagaattactctactatactaaaaaacaaaggaatgtccttgatgacacagattgcaaaataggcaattctgattcttagatacctggaaagccagtctttcctcattttatagatgaggaaactcagagccgagagatgagtgacttgcccacaggtcacagggctggctaactaaaaatctagaaatagaatcaatgcagcatcattgccactaaccaagcacttgccttctctttttttcctaccaattttgataggagttcacaaaaatccggtcagcaacaaaataaaaccaaaaaaaaaaaaaa

SEQ ID NO: 54399 - DNA, 611 bp, Homo sapiens
cgggccccccctcggaagtcttctagaattaattaacgcggggtgtacataaatagaagtttcagtatttccttcctgcactgccatggacggtcttgcccagaccccagagtgtgcctacccttccttggagaccattgccgtctggggttgtttggtcttttccagacacatttgagtggtccttctgaaaataacagaatgctttgcttacaaacatcagctccatgtacagctacattatttgcagggcccagtccaaaagaaaacatgggactccttgattgacaatgattatgaatttcaagatggtaagagcagagcaataaagcaagcatggggcttgtctatgcatggagcccagtgcacaagtggcacatctgtgaaaccagccctgctcgcttcttattgggagatgacagaaaaggcgttaaagttctcactgacttcttataatggctatataaattatggcagtcaacatttataaaaaaatgcagtgtaaattaacactcagaatgggactagatattcaaatttggtgacgtggtggcagcagtcccctagtgcatactttaggagtgcttctcagacttgggatgctgggcata

SEQ ID NO: 54400 - DNA, 162 bp, Homo sapiens
cgggccccccctcgaggtacttctagaattaattaacgcgggataaaaagtctttagagaatcatttggctaaaacccatatgtcccttttattaggaaaaaaacatgggttaaaaatgctggagagaagtttctccgcaagaagaccaaaaaaaaaaaaaa

SEQ ID NO: 54401 - DNA, 582 bp, Homo sapiens
ccgggccccccctcggaagtcttctagaattaattaacgcgggtagtaacaataaacacatgtaatatccactatgttcagatacttttccaaatgccttagtgttgacttacttaatattcagaacaaccctggaggaaacaccattcgtagcaccatgttacagacaatgacactgggacaaagaaaggctaagtaacatgttcaaaattgtatcactagcaagtgccaaggccaggatttgagtccaggaattctaaaagcaaaggcttaaccactgatgaggttacttccgtatctcagaggggttgttgtagggaaaactacaactaccatttattattgctaatattattttcattatatgcaagcagaatgagaactagggataaagttacagaaagaacattatcccgggagtcaggagaccagggttggggtcatggctctatcagcaatcatatgactttgggaaagttactcggccccttggaatctcagttttcttcctcaatgaaatggaaatccagcctaggcaacatggcaagaccctgtttctacaaaaaaatttaaaaattagcc

SEQ ID NO: 54402 - DNA, 547 bp, Homo sapiens
ccgggccccccctcggaagtcttctagaattaattaacgcgggcccacagtggtgcccgactctgcccaggcccagccggccatcctggtagacgtccctgactcatccccgatgctggagcctgaacacacacctgtagcccaggagccaccaaaagatggaaaacctaaggtcagactaaaatccctctctatatttacaaggctcattggagtttgcattgcaggtctcagacaatatgaagttgcttgcagtgtgaccatgggcaagcagcttcacatttctgagtatcggttcatcctttgtaaaatgaggatactgttacccacttcacagctttgttacaggatcagaaggttaatgtgcatgaaattaaagtgctggtcaaatgtgacagtaatatttaatggaacggaaactcttcttaattcattagcttggaaaggccatgggtttcttcctccaagtgtgttccacaaatatttaggtcctactttgtacaagatcatatgggaccaagaagatgcatcttttggattccaaaga

SEQ ID NO: 54403 - DNA, 564 bp, Homo sapiens
cgggccccccctcggaagtcttatagaattaattaacgcggggatgtaagaaaaactggtatcatgagcctatcagcaatttacaattaaaatatctattcatctataatccagttactgtctagttaaacagtgagttttctttaacaaagaaaaagcaaaaaagaagaaggaagaaagtcctgcaaaggtgtgttgtcttggttagtagtaatgtttttacaaaattgtgtaggaagaagtttaatgtgagcatcactttaataattgttagtgatgggctggctgcacaatggctcatgcctgtaatctttgggaagccgagatgggtggatcgcttgagcccaggagtttgagaccagcctgggcaacatagggagaccccatttctagtaaaaataaaaaaaaaatcagcccagcatggtagtggatgctggtagtccccagctactaggtaggctgagaaaggaagatctcttgaatctggaaagtcaaggctgcagtgagccgtgatcatgttactgcactccagactgggcaatagtctcataaaaaaaaaaaaaa

SEQ ID NO: 54404 - DNA, 538 bp, Homo sapiens
cccccctcggaagtcttctagaattaattaacgcgggcaaccggggtggctatgcgctagcctgcaggtctccaacctgtccagcccagttgtcttggagatggggatgggaagtgggcagagagaagctctcaatccttctgacttccttgaaaatgtccttggagccattgtacttaacagtaaatctttgccttctgcacagggactctttgtcttaaccctctggggccgctggctctgaggcagtcgctgttgtctagatcaagtttctgtctgtacacctctttctttcttgctggcagagacaccatttgtatgtgtgtcacactcctcccaggggctcaggaaaatcattctattctacccagctcaaggggtaaatcctgattggtgtaggctagtcttctttgcagagattggtttaggagttggcatgtgaatcaatgagatttgagaaaaggatggggagggagaccgtattagtcctttcctgccactgtaacaaaataccttagactggaaaaaaaaaaaaaaa

SEQ ID NO: 54405 - DNA, 594 bp, Homo sapiens
ccccccctcgaaagtcttctagaattaattaacgcggggttctccttcataccagccctcgcagttagtatgcagggctgccaagccctcgatggctacaacaacaagttttctctaggcctcctcttggctgggtctaagtctctgctttttatggtggaagcaatgagggtacatggctcacctccacattgcagctaaataggcagcccaatgcacctgcaccacacccttgctgcttaagaaacaagagccacaagtgcctcacagctgtccgtggcaactgtccaggaacatcacactgccttcctcacctgctgcccttctgggcactcagccctctcttctccactcagccctctcttctcttctcaattttagctcctgtccctagcccttactctctgttggagctcctgggtgaggggctgaatccaagccctctctccagactcagcctggagctctcatctctgcatcttctggcctgggcattctggagagaagtcactctagttttggttcttgggtgaaaagatgtatgtaccaagaagttcattgcaacattgtttacattaacaaaaaattggaagg

SEQ ID NO: 54406 - DNA, 413 bp, Homo sapiens
  misc_feature 28: n = A,T,C or G
ccgggccccccctcggggtacttctagnattaattaacgcgggggaggcggaggtggcagtggaccaagattctactgcactcccactccgtctcaagaaagaaaaaaaaagaattggaaggaaagcacaaggagagttttattaggcatagtaactcaaaattatgtggaagagctgaaaagaatagagattaggtacagaagtaaaatcaagaacctggatttctagatgttaagtctgtcctacctcgtttagttactttctttccttttaaaatagataaaacaaagcagtccaagttaacaccttgcattatagaaatcttttttggttttttgtttttttgagatgggtgacagagcgagacttcgtctcaaaaaaaaaaaataaataagtaaaaaaaaaaaaaaaa

SEQ ID NO: 54407 - DNA, 633 bp, Homo sapiens
gccccccctcggggtacttctagaattaattaacgcgggcaggtgaacagatacgtcatcatttattttaatgtagaaaatagtattaatgagtctgaagcccctgacgcagctgggactagagtgtgccctgcttctggcaagacatggtggttgcatgggcacagggtggccagcacccctcctcaggtgcacttttttgtggttctgaagtcagctatgcaggagggatctcttaccagtctacacgatcttcctgatagcatcacctccccctccctagggagcatctacatcttggccaaacattatgaacttaatatttaatgttaaaagagaaactgtttagaaagtctagaaacctctcatgtgcctcgtggcaattataagatccctgggccccccttaaacaaagagctttgttcttttaaagcaattaccagaagtaaaaaagcaataatgccagtaaaacctttaaaggcacatgtgcaggaagacaattggagttcaggctgtctgtgggtagctggtgatctagccatggcacaggaagatgctgtcttctggagggtgaaatcttagtgtccctacagccattgctcctgcaaaccccatctgtggttggtggagaca

SEQ ID NO: 54408 - DNA, 580 bp, Homo sapiens
ccgggccccccctcgaaagtcttctagaattaattaacgcggggagactgaatatagaagcagatgtcttttatttaaactccatacatttaaagagttgccaaaatgtaaatattgccactcttcctactaaatgttttgtttcagaaaatagctatttttcataaaaatgtcatttatgttagcatgtaatgagtttatcatttttaaataaatgagttagtaagtatcttcataaaactttagtcttcatttctattacaataagtaccaaagcctgcaacccacataaacttaaagttctctggagtccttaaaaatggtttttaaagtgtaaggaaggccagacacaaaaaggggttgagaatccatcttaaacccactttttttgaagactgaaagtatgcaaacaaactgtaagatgaccacttatgtgtagtgagtaatttccatcaccaaacattcctcttctagatataagaaaaacgccccccaaagtcctccaaaataattctgaagtttcgtgcatgagaggattgagacctaaacactacaagaaagaactctcccaaagagatgc

SEQ ID NO: 54409 - DNA, 495 bp, Homo sapiens
cgggccccccctcgaaagtcttctagaattaattaacgcgggggagggatgctggcatctagtgagtagaggcaaagcatgctgctaaacatccttcaatgcacaggataaaggaccatctagtccaaaatgtcaagaaccaaggtcgagagactctgacctaaacaaaggattttgataggtgattgtcagtcttccacagaggttatgccaatgtgttttcccaagagcaatatacgacagtatctattttccttgcctcacctgagtgaatataatcagatatatacatctctagaaataaatatagacaaatatctatctttgtcataggaaaaagtgatataagaacttcaacatgtgtttctccagtaataattgagggaatctcttcacatttacaagagtcatttctagttccttatctatgacctatctgttcatattctttgctcatttttctgtatagctgttgttctttttctcattgatttg

SEQ ID NO: 54410 - DNA, 598 bp, Homo sapiens
  misc_feature 511: n = A,T,C or G
cgggccccccctcggaagtcttctagaattaattaacgcgggtgacaggttgggaaggtggtttctatagttaacagaattggtgaaacagagggaaggagaggggaaggctagaaagaatgaggaacgttttaaagaggaaaggcccttactcttccgaaattcaaatggacagataatgttctaacaatggtagccaagccttgaagtatgaacaacttcaatcttaaagaacagggccaagaagaaaggtctgaagcaaggggcatgaccaaaaggagccccaggaagtgcacagttcaagttgtagacttgtgtctttatccataaataagaaggttaaagataggatatgtgattcattgccagtacatgtgccgaaattctttcacttaggcaaaatctaggcaattggtcaaccttattgtctgctgccagcacagtgggagtaggtggtagcgctggagatgaggggagatggaaaaggtgagacttggaaggacaatcctgnggtacggagggaaaacaaactgctctgattcctgaagcccaaacaaacataactttccatcttctaacaactagaaagcagaagtct

SEQ ID NO: 54411 - DNA, 585 bp, Homo sapiens
ccgggccccccctcggaagtcttctagaattaattaacgcgggggtcttgagttctgaggattgttccagtatttctacttgctttttattagctccacacctaagcaaccccaaattgagaacgattttcattataatagattttcatataacattttattatttaattcttcctgccttcttttcattaatttatgcagcatttgagggtttattatgtactagggtactgaggtggataggtacttctgttttatttgaatgatataaattcttatttctttaataatatttttattataagactaatacatgtttattgtggagaatttgacaataaacaagtgtatagagaataacattaaatcacctataatcccactctacagggctgttggtagcaaagtgatattttcctctagtgtttttcttgtatatccttactttttaggaagacattatgtattcagtttggtatcctgcttgttcactcaagactgtattatgagcatgtttctgtgccattaaatattcttggaaaacattttaatggcttgatagtcttttattatatgaaatataaa

SEQ ID NO: 54412 - DNA, 601 bp, Homo sapiens
  misc_feature 28, 44: n = A,T,C or G
cggggccccccctcggggtacttctagnattaattaacgcgggnaattacatgttcaactatgattaaagcttcaataaacttggttgttcatctacttcaccaaaacgagttaagaattaaaaattagaagagccttcataggcaagtacaataactaaaataagaaatgacagctcaaagcttaactacaaggaaaaactacccattacccttgctcccaggccaacaatacagtttaacttaaaacagtgggggcatttagtttaggggcattttctatacatctcagtattactagagggtatttcactgatcccccacaataaaataagttgcaagtatagcaatgactctgtcatcaaggtaacttttaaatatgttccattccttctgcttaaagaggcaataaggtgtgctatttatgaagtataaatatacacaattaagacttttgtaaaagggagttaactttactaccacgctacactaccaaagtataacactttaacttttgccttgaagcactgtgttgtagaaaatatactgcattaagacccatgaatcatactatctactacccaactgagtagatcactaca

SEQ ID NO: 54413 - DNA, 614 bp, Homo sapiens
ccgggccccccctggagtctttgaattaattaacgcgggagggggaaaaacagttttttgtatccctgttagagcctacatgtactactgatggacctcatatggggaatctttgactacagcagataattgcctttcaaattatgtcctgagtgagagcagaaaaacgactcactaaaggaaacagaaaatctgggaaaataaatcaatctaatacatcatcatgcctttatttccccagcacccatcataatgtctggctcagagttatttactagtaaatgcttgttgaaggttgaacatggagtaaactcataccacaatcctctgttgagatacaacatttccatggcacagaatagcatgaataaaaatcgcctgagtggcactatttaatgtaaaaaataaataaataccctaggctccacgaacattacgtttaatcaatgaccttaaggagaggcttatgtgtaactggagaactccaataatctcttccttagtgtcttaaaatagcccccttttgcaaactgagctatagactgccatttggagtctagcatagagaatgtcagatctgtgagaaacctaattatcactgaaagtacaatgtc

SEQ ID NO: 54414 - DNA, 606 bp, Homo sapiens
ccccccctcgaggtacttctagaattaattaacgcgggcaagacaaatctattagtctttatcaacgattcaagaagacatttagacagtatggaaaagttctgattccagtgcatctaataacttctggtgtttggtttggaacattttattatgcagccttgaaaggagtgaatgtcgttccttttctagaactcattgggttacctgacagtgtggtaagcatcctgaaaaactcccagagtggaaatgccctcacagcatatgccttgtttaagattgcaacacctgctcggtataccgtgactttgggaggaacatctgtcactgtgaagtatctgcgcagtcatggctacatgtccacgccgccacccgtcaaggagtatctgcaggacaggatggaagagacaaaggagcttatcacagagaaaatggaagaaacaaaagatagactcactgaaaagttacaagaaaccaaagaaaaagtttcctttaagaaaaaagtggaataaggtgccttatatagcagtatagaaaattcctgcactttaaccccttggaactatgggcaaagaacatgtgtctgattatttttttgggtagttg

SEQ ID NO: 54415 - DNA, 394 bp, Homo sapiens
cccccctcgagagtcttctagaattaattaacgcgggcatctccctcagcttttttaatagaattggaattgcttgcgataagcatgcatacttttttatttaaggagatattttacataccagaaatttcactaattaaaagtgtacaattcagtgcctttagtatgttgtgcaaccattaccactctctaattctacaacattttcatcacccccaaaataaacccattaccatcaatagtcacgtccacttttcccctatgcaccagccctaagcaaccactaatttactttgtgtctccatagatttgtgttttctggacattcgcttgcataatttttaaaacctgaaaaaaaatgtaaagctatttttatttcgaaaaaaaaaaaaaa

SEQ ID NO: 54416 - DNA, 574 bp, Homo sapiens
ccgggccccccctcgaaagtcttctagaattaattaacgcgggtatttatttgtatcataaacacttggaacaacaaagaccataagcatcatttagcagttgtagccattttctagttaactcatgtaaacaagtaagagtaacataacagtattaccctttcactgttcccacaggacatgtacctaattatggtacttatttatgtagtcactgtatttctggatttttaaattaataaaaaagttaattttgaaaaaaaaaaaaaaaaaaaaaaaaaaaaaaaaaaaaaaaaaaaaaaggaaaaaaaaaaaaaggagcggccgcttttttttttttttttggaatacggcacttttaataggcggcaaaccccagggggggcgtggacagaccctgtccacagcgcctggctcccgggctgcctgtccttccatctggaatgccaaacaaaagctcctctcagggggcatctggggagtaggtcccagtcctgaaatatacaaagtggcgcctcccactgggcagtggtcactgggctgcacggtcctttcaagtcctagggtggcccct

SEQ ID NO: 54417 - DNA, 578 bp, Homo sapiens
  misc_feature 28, 53: n = A,T,C or G
cgggcccccccctcggaagtcttctagnaattaattaacgcgggggggtgagnaaaaagccaccctcattgtgcctgccaacattttacatctggatctacatattatctgctgattttataaactacttccctcccagaaatccaaactagccttgttttatagatgtggaactgcagtctcctagtttctggatgagcttacactgggccctttgggcttctgtcttcccactaggccatgctatggagattgcacaatggacctattgcttcaaaggagagtcacacaacactccccagccactgtgttgacagccctgggctggaggaaaggcagcagtcttcacagagctcactttacggctgggctcacccttcaccccaagacagctttgatcactgggaagtttccacaaacacagaatgaatgaggaagaaggtgattatattttcggtgtgatccacgtggacgagaggtgttgcatgtttttacaaattgaagatctgtgacaaccctgggtcaagcaagtctatcagtgccattcttccaacactctcctgggtgcagtcaaagct

SEQ ID NO: 54418 - DNA, 442 bp, Homo sapiens
cgggccccccctcggaagtcttctagaattaattaacgcggggaagggacaaacctactgcctgaatccaataatgtgtaggtgatagagaattcagatttttctcaagcaactatgttgtttctgctaaaatgcctagaagaaatagtgtcaagagaaaaataaacccaagataggggaagagatttataagacagcatcttgctctcctcaatgattgaattacccaggatgcatgacacagggaaagggaaagccttgatttgtaccatctattgattcctgtggtgtaaatcctctcactacagctggtttcaagataccagtgtggagttgggaagagatgtacacagccggctctcacaagccagtaagagccaggtcctgtatatcactccctgcataagaactacattcctaaaaccagaaaaaaaaaaaaaaa

SEQ ID NO: 54419 - DNA, 201 bp, Homo sapiens
  misc_feature 28: n = A,T,C or G
cgggcccccccctcgaaagtcttctagnattaattaacgcgggggagattgtatctaggaaaaagtgtgaatgcttcaaaggagagatactgataattgtgacttgaaatagtgtcagatgaattatgtagctgatcactgatggaaccatctaatgaggcaggcttaaactctatttagtttcgtttggtttctcatatg

SEQ ID NO: 54420 - DNA, 593 bp, Homo sapiens
cgggccccccctcggaagtcttctagaattaattaacgcggggggtgtggtggcacatgcctgtaatctcagctacccgggaggctgaggcaggagaattgttgaacctggggggcagaggttgcagtgagttgagattgccctactgcactccagcctgggtgacagagagagatgctatctcaaaaaacaaacaaacaacaaaacaaaacaaaaataataaaatttgaaaaactgaataaagtaaataaaacaaaacctatttaaatatgaatcgatccaaactattcttaccgtgatcctggcacagtttctggaaaagcagagttgtcttttgtttctttgctttattgccgtaagtatctgattagaaagaaaccaggaaagcagataaaaaattataggattgtatcctctcctttaataaacaaatattttattcacatatagaaaatgttttcaataaatatgtatgtaagttggatttaataagtattatagaatatgtcccaaatcagtagtatcagtagaaaaggatatttttctcttagtaaaaaattgtttaaagtaatctcagcactttgggaggctga

SEQ ID NO: 54421 - DNA, 580 bp, Homo sapiens
cgggcccccccctcggggtacttctagaattaattaacgcgggtaccaagtatggccatggcagtcttgtgagtttgaatgtttaatgtaaagtgacttctgttggtcatagccacaaataatttcagatgtactaacttgataaacatattccagatgtttggttaaacctaaaaagacctctctggtggatgtagcagtacatcatttcatatgtattaatttcataactttttttttttttgagagggagtctcaactctagggtggagtgcagtggttgacagagcaagactctgtcacaaaaacaaaaacaaaaagtaaataaattatcccctaagaggagtatatcccaggaaagtgtaacacctgaaacttaaaagattatctgccctgatgataaacgatagaaaagagacaggccaggccaaagtttgtcaactggtggactgaagataagttttatttagcctctgtgtttttctaaattagaggctaacatctcaaacttgggagaattcactttaaaaatccagtttttacggctgggcatggtggctcacgcttgtgattccaatac

SEQ ID NO: 54422 - DNA, 586 bp, Homo sapiens
  misc_feature 28, 503, 576: n = A,T,C or G
cgggcccccccctcggaagtcttctagnattaattaacgcggggaggatggggctcactgtctctagcagtgggtgaaggcctgtgagtgaggaatgcctctcaccagctgtgcctgagctgcagcactccagccactgctgtctccttagctgctcacatatggatactttcacagttcaggattccactgcaatgagctggtggaggaataatttctggatcatcttagctgtggccatcattgttgtctctgtgggcctgggcctcatcctgtactgtgtctgtaagtggcggcttagacgaggcaagaaatgggaaattgccaagcccctgaaacacaagcaagtagatgaagaaaagatgtatgagaatgttcttaatgagtcgccagttcaattaccgcctctgccaccgaggaattggccttctctagaagactcttccccacaggaagccccaagtcagccgcccgctacatactcactgggtaataaagttaanaataagaagactgtttccatcccaagctacattgagcctgaagatgactatgacgatgttgaaatccctgcanatactgaaaa

SEQ ID NO: 54423 - DNA, 596 bp, Homo sapiens
  misc_feature 28: n = A,T,C or G
cgggcccccccctcggggtacttctagnaattaattaacgcggggggctggttttctggtttcttctcctttgggtaggctctgtctgagggaaggtctagggctgaaggctgttgttcagattcttttgtcccacggggtgttcccttgatgtaacactctcacccttttcctatggatgtggctccctgtgagccggactgcagtgattgttgtctttcttctgggtctagccactcagtgagtctactcagctccaggctggtactggaggttgtctgtaccctagtcgtctttaaatgtgattgatctcttctagcagattttgtttctttgagttttctgttattctgctttctctttcatttaatttcccttttcttatattttcctattcccttggcttatttaagatttatcttgtccttttcccccgagtttcttattaaggaaacttaaattattgatttaagatgtttcatcttactaaaataagtatttaatgcaatatactttcctctgagcactgattttgttgtgtccataaattttgtaatatggttattttagttttcgttcaatttaaaacactcttt

SEQ ID NO: 54424 - DNA, 594 bp, Homo sapiens
gggccccccctcggaagtcttctagaattaattaacgcgggggagatgaatttccctgggtgtacagggtgggagggaggtggggctggaagaacttgatctggagggatgatcccgatggctcccagtgaagaaggccaggaagagcagaggatggtgccaggaggatgatgtcgggggacacaggcagctcaggcctggatcaggcagtgactggtgtgtgtgtgtgtgttatgaagagagagggatggaaattgtgaccagagagttggagttgggacccctgtcttgatcacttgagcatcagcagctccagggaagaacacattctgaaggaggaactctccagctaggatttcatcctgtcctagaggacacgaagaggtggagaccacccccacaactaaacttgaggattactaaggcaatggggactgcctaggaatatttttgagggggtaaaagcaccccataattgtgctaagtaacaaaagacagaacaagcagccttaaaacattctacatgatacactggtattagaataaatagatcttaaagaccatccacttgaaaactggatttgcccctggtca

SEQ ID NO: 54425 - DNA, 642 bp, Homo sapiens
  misc_feature 592: n = A,T,C or G
gggccccccctcggaagtcttctagaattaattaacgcgggatcttaaacatttaaaatatttgagattacaaatattatattatctactcagaggtgctccagttagtgatttagatattacgtgatgggtttttcattcccaaaggaacgctttttcttgtctaatcaaatagtgttctcagtaaaagagcaacgcagtaggactgtctgagaccaaatgatgtcactggtatacatgaagatgttaaattcttacatcaagcccaatgatttttatcttactagtttcagaaagtgctttctctctgtggacatgaggattggattagaggagtggaatgggcagcctttggtcagtatgaaattttgctaatgcacatacaatgggaacaaatatgtgttacttccaagaaagcagccttttttgttttaatttttaagttttctttgtatgttatgtttttctgttgtcccaattagaaaggaggatgcttatctcttctgttgttagttggatggtagatgattaaataaattggtatttatcagatgacattagctgtcttgttcacatgcagaccttcttgaanaagtctttgtagaacttagtagactatatactacatgttgtaaacatgta

SEQ ID NO: 54426 - DNA, 336 bp, Homo sapiens
  misc_feature 11: n = A,T,C or G
gggcccccccntcgaaatacttctagaattaattaacgcgggggagaggagcagcggtctcgcattgccatgtgcaggggcaaaacagaaggacacagaaactacagtcccaagtttagtcattagtggggtggaaatctgatttttttaaaaaaatgtacagaacttagcttagggcccatccatccattcattttctgtccatccatctagtcaacaaatatttacaaagtacctaccgtgtccaggccttgcataccttggtgaggacaaacatggtccctgcccacctggagcttccagtctaggggggaagacagatgttgatcaaataat

SEQ ID NO: 54427 - DNA, 579 bp, Homo sapiens
  misc_feature 547: n = A,T,C or G
cccccctcgaaagtcttctagaattaattaacgcgggggaggacaaggacgtggctgccgactcgccaaaggggggtgccggctcctctgcagaagacatcctctggcagcctgctcttctgctgctccttttgctgctgtcccatgtgctcctgagaatgagaaccctgcctttgcaacaaaccatgccccggtaaatgcaaagccacatgctctgtgccccgagagaaaacctctaaccagcaaggaaaatgtattgatgcattcctccattttggcacctgaaagagagtcttggagaactgcaggagagggggaaaactggagaaaagaaaatttaaggaaagatatggagagagatttgaaggctgactcaaacatgccactcaacaattctagccaagaggtcacaaaggatctgcttgatatgattgaccatacaagcatccgaactattgaagaattggctggaaaaatagaatttgaaaacgaattgaaccacatgtgtggtcattgccaagattcacccttcaaagaggaagcctgngccctgctcatggaaaggagccctcagaaggc

SEQ ID NO: 54428 - DNA, 603 bp, Homo sapiens
  misc_feature 11, 35, 51: n = A,T,C or G
tgggtaccggngccccccctcggggtacttctagnattaattaacgcgggnggagatattatcaattttgaaaatcattcacaagtaaaaatcaacttgtaagtaatttgacagaatattctaattttgagagagatacaaaatgttcagttcattcaattttaaaaataaagaacgagttttaatttttttaagtgacaaaaaataatgcaatgtatacacttcagattaaaatacaatcagttaagactggataaagacaaaggaacagaaagggagggagcgagaaagaggaagacaatcagagaggtgagaaggaagagagaacataaaaaggattgaaaagggagaaattaaggtaaccagtttttcaaggattcaggcttgccttttagccagattgtaaatacgatctggcagcaaatcttcttagggtttatattgagcttttgcataattaaccatatgtcttacagttaaaggaaaccattttaaatcttatctgaagtgagatgaagtataaactatattacttcctattattttaaaattgttattttaaaattttatatatagtaaaaatgaaccttttgaatatacagt

SEQ ID NO: 54429 - DNA, 462 bp, Homo sapiens
cccccctcgggggatgcttctaggattaattaacgcgggggcacccacttctctcttaagtgcggacttttgctttccaataaaagcttcttgcatttcacttcaaaaaaaaaaaaaaaaaaaaaaaaaaaaaaaaaaaaaaaaaaaaaaaaaaaaaaaaaaaaaaaaaaaaaaaaaaaaaaaaaaaaaaaaaaaaaaaaaaaaaggaaaaaaaaaaaaaaaagggggccccccccgggggggacccccatttcccccttaaggggggcgttttacccccccccctggcccgtgttttaaaaacgtggggccgggaaaaccccgggcgttcccaaattaattgccttggaaccaattccccttttccccagtgggtttataaccaaaagggccccccccaatccccttcccaaaaagtggcccaccctaatggggaaagggaattttaaaccctaatttttt

SEQ ID NO: 54430 - DNA, 609 bp, Homo sapiens
  misc_feature 29: n = A,T,C or G
cgggcccccccctcgaaagtacttctagnattaattaaggcgggggagcgtaagatttggagtcagaagtctcagttctgtcatttgtcctggcagcaggttattgagtctctttgaatcttggttttcacatctgtaaaatggaaagtcctgcttgtttcatgggatgggtgtgggaataaacaataaatgtcaaaaaaaaaaaaaaaaaaaaaaaaaaaaaaaaaaacaaaaaaaactaccacaaaaatacaaaggagctgcaaaaaatgtaaccattccaacaacatatataagttattaaataaagatttgatttgaaagaatataaatgaagactttaagtaggtcttttctacatgcatattattcctcattaaagaaaaaatatgtaaaaaggccattggtaattgctttgttaacatttgtaggccgggcacggtggctcacgcctgcaaccccagcaccttgggaggccgaggcgggcggatcacaaagtcaggagatctagaccatcctggccaacctggcgaaaccccgtctctactaaaaatacaaaaaattagccgggcgtcgtggtgggcgcctatagtcccagccactctggag

SEQ ID NO: 54431 - DNA, 485 bp, Homo sapiens
  misc_feature 23, 36: n = A,T,C or G
tgggtaccgggcccccccctcgngaatacttctagnattaattaacgcggggggagagtgttagagggagaagtgcccccacctgctcctcagttccagcctgaccccctcccatcctttggcctctgaccctttttccacaggggacctacccctattgcggtcctccagctcatctttcacctcacccccctcctccttggctttaattatgctaatgttggaagaatgaataaataaagtgaatctttgcaaaaaaaaaaaaaaaaaaaaaaaaaaaaaaaaaaaaaaaaaaaaaaaaaaaaaaaaaaaaaaaaaaaaaaaaaggaagtcacactaaagcggagctcacttaaaaaccaataaaaaacgggcccccccccggggggggcccccatttccccttattggggtcggtttaccccccccccttgcccccttttttaccaccggggaagggggaaaaccccggggttccccaaatt

SEQ ID NO: 54432 - DNA, 590 bp, Homo sapiens
  misc_feature 24, 41, 47, 55, 64: n = A,T,C or G
gccccccctcggggatcttctagnattaattaacgcggggnatgggngtgtaggngttggtaangaaaaaaattcagggaagagcagcgatcagattatgaagaatttgtcttgagaaattacagaggatttaaaccagaatgttaggaatagttattctagcaagatgaatgtggaaagtgttagtgtgcatgtgatgagtcttgaagctggaaactaggtaacaggttcttaaatagttcatgtgaaaatcatgacagactaaggcaatggctgtggggctgtccgggagttctctacagaaaacatctaaaacttgaatgtgcaagtgagtagctaacttccaagcttcccatttctgtataatttaagcatgaaaatgagaacactgagatttgataggcatgtagaagtcagagtaagcaagagggcttgagttcatcgatgaacttcagtaactatccttgacttagtattggtggaaaccatttgtgaatttacagactccaaaaacaaaaagataatttagagtctcaaagtaagatttggggagatgtccattggagacagaagtggagagagggagaagt

SEQ ID NO: 54433 - DNA, 619 bp, Homo sapiens
  misc_feature 17, 28: n = A,T,C or G
cgggcccccccctcgangatcttctagnaattaattaacgcggggacttagactgcattgagattttagttggtgggtaaagcaaaaaatatgaatcatacataagtgaaattttaaggaatacagctgcaaaagtataccttttccattagaatggtttgattaccaggttcctgtaaaaattccttgtccataaaggtcgtattctttgtaaaggacatatgcttttagacgattgggtaatggaagaaatgacatgaagacagggcagcgcaaatgtaaccgtcccatgcatttccggatctttaggcggcacaaatgttttagggagcgagggtttgctaaaaagaaaaggcacattatccaaagagaaaaagaacttttttttttagtatcttagggttttgttagcaaacgtatttgatagcatttcatttgctgttactaaatggcaaagtcaatagggaaacagtttttcagttcttattgcaatccttgttgtagatatggttccagagccatgtcaagttagaatccaaagactggcatcaatcatggatctggcctgtgagatctgaagttcttaaatctgcatgtggccaggcggggtggctcatgc

SEQ ID NO: 54434 - DNA, 542 bp, Homo sapiens
  misc_feature 23: n = A,T,C or G
ccccccctcggaagtcttctagnaattaattaacgcggggggcaacagagtgagactccatctcaaaaaaacagaaaaaagtaacaaattgcctgtaagaaaaccaaagagcatctggcttcagacttctgctctatagcaccaaatgccaggaaacaatagagaattgtgagggggaaaagttgtgactttggaattttatacatattttatatgttaagatacataattttttagttatgataaccatccaggaaatatatgagctatgtaatagtcttacaaagataataagttgtacagcaacctacgaggcttgatttaaataaaacaatgtttgcttagtatcctaatttcagtgggctctgggctattaaataccaggacattatccactagaggaagggtatgtatgcttttaaatagataatatggctagaagctacatatctaaaagcacccgaagtcctcatatgaataggctaaattaatacaataaggtgtaataaatgccataccacagcatcatgtttcttcatttt

SEQ ID NO: 54435 - DNA, 418 bp, Homo sapiens
  misc_feature 378, 386: n = A,T,C or G
cgggccccccctcgaaagtcttctagaattaattaacgcgggggagttcagcttaagataaggagggatgtggaagccaaggttctcgctgtgtagatggagccttcagatttccatactactggcaaagatctcactaattagccctcatatattgacttctgttttcatttttcttctttatttatcctcaattgattggtgattccagccctttggtccagcactcaagcctggatcactcagtcatcatctttatccactaactgctgggctctaatgaaaagaaagctcttacctgcccaacttattgcctccaagtgtaccaagatacgtttctctctgacattgcctgtacatttgcctgtagaactgaantaatgccntaaaaattagtgccaaaaaaaaaaaaaaaagc

SEQ ID NO: 54436 - DNA, 552 bp, Homo sapiens
  misc_feature 28: n = A,T,C or G
cgggcccccccctcggggtacttctagnaattaattaacgcgggtatagttccagtgtgagtctgaggagccaatgtttcagctgagtctgaagacagaagacaccaatgtccaagctcaaaccgccaggcaggaggagttctttcttatttgcacaagaatcagcctttttgttctacttaacagactttctggtgattagatgagggccactcacattaagaaggacaatctgctttaactagtctactgattgcaatgttaatctcatcagaaaacaccctcatggaagtacccagaagaatgtttgatcaaatgtctgtgcaccccatgcccagtcaagtaaatgcataaaatcaaccatcacaccatgtatgagcctcacttacctcaggtaaaagggcaaaatgataaaaataaccttcctagggagttatgagaacccagtaaatcaacagttatgtattttacaatagtacctggtatatgataagcactatgtgtggatatgttgaactaaatacataagtaaaactgaggaaaaggagctgc

SEQ ID NO: 54437 - DNA, 622 bp, Homo sapiens
ccgggaccccccctcgaaagtcttctagaattaattaaattattgtcagtgttgtgagtgtgttgctttaaaaaaaaaaaaatttacaatcattctcctctaagcaggtatcttggttctggttttaagttaagttttttagaatccttactttttagggacaaggtataggatcaacatggttcttttttttttttaaaccattattgtttcttttaacaaattaaaagacaatgacacctaaactgctctagcaaaataacttatgagaaaataaattcataggattttgtccctcacagatagccaaagctctgcaagttctggagacagaaagaactgaactataaagcagtcaataagtagccagtttcaggaagactcagacttggttttgaaaaaggatgccttttagagctgggaaaggttattggattttgacttggttatttaaagattgccaaccttgtgaatgcaaataaccccactcttgtcttttcatctttaaacttccccttcccgcttccttctaatttcattattcctgaaaaaactgtcagtcagaaagcgttgggtcacaaccctaaacagctttgagattcctcagtccaccactgcttga

SEQ ID NO: 54438 - DNA, 593 bp, Homo sapiens
cgggcccccccctcgggggtacttctagaattaattaacgcgggaagctgacatctcctgtgacaatttctccccaggtaaacaccactctgccagcaaggacgctgctgctcggctggggcccctatgccatcctgtatctatacgcagtcatcgcagacgtgacttccatctcccccaaactgcagatggtacagatacttctagtacctaaaactagacccctctccatctttgttctctgtctcatctcatctcactttctggatttatgacctctgtgtcagtctcttcctttctgtgtttcttcctttggatactcacaaggcatagagcattagtttgcccccctaatcccccacctcgtctctgagtcataccaggctgctgcttgacattgcccaaacctcatgtgagatgacagggacagccagccagatggtgtagataaagactctgtgaccaggggttgagattagtccccaggctgggagcaggtgggtctggacaagagtatggctccatggactccgtgagccatgcatctccaccaactagtcagggaagcctccagggctgcagaactaaatgat

SEQ ID NO: 54439 - DNA, 574 bp, Homo sapiens
  misc_feature 21, 34: n = A,T,C or G
ggtaccgggcccccccctcgngaatacttctagnattaattaacgcgggccttcatttcttaaaggtaacatacaaacaatgtaaaaatttaaacaacacaaaacaccatgatgaaaaaacctcttgccatccatgagccccatttccctggtcccctccagggagaactggtttcttttataccctttaaagagcagccactcaagctcatgtgtgcataaactaaacgtggtccatccctacaagggggtattattcagccatcaaaggaacatggtacccatccatgatatagcacggatgatcctcaaaaatatgatgctaagtagaagccagacataaaaggccacatattggatgattccatttatatgaaatgtccagaataggcaaatccatagaaacagaaagcagattagtggttgctagggaatgggggtgagagagagggactgattgttcatgggtacagggtttcttttctggaggtgatgaaaacattctggaattatgattgtacaaccttctcatatactaaaagccactgaattgtacacttcaaaatggcaacac

SEQ ID NO: 54440 - DNA, 461 bp, Homo sapiens
  misc_feature 22: n = A,T,C or G
cccccctcggggtacttctagnattaattaacgcggggaagtcttttgattgaaagcaagtcattgtattgcaagatccaggagatcaggcattagacctaagttctggcacagtgcctggcgcatagtaggtactcaatatttgtttagtgaatgctatcaaagcagcagtgattttggcattggcttttcccatttgtgcatttaccttgcacccaagtgatttggatttgctcccctagacaagactttatgtgctcctgtggtctttgtgaaaacagccaaatggaaaagttttgtctcagggagcttgcgttacaacttagtgtaatgggagcgattgaaaccctaactgtacatttcttgcgggtaaaagccccctggaatcaggcagagtatttatggcacttctcctgtgctggttcccatttaaagatggtgaaatctcaaaaaaaaaaaaa

SEQ ID NO: 54441 - DNA, 442 bp, Homo sapiens
gggtaccgggccccccctcgaaatacttctagaattaattaacgcgggggagggagaggggaactgttatctcccaagattaaccttcacttttaaaaaattattgtacatgtgattttttttttttcctgttcatacatttgtgctgcccatgtactcttggcacatttcaataaaattgtttggaaaataaacacagcaaaaaaaaaaaaaaaaaaaaaaaaaaaaaaaaaaaaaaaaaaaaaaaaaaaaaaaaaaacaaaaaaaaaaaaaaaaaaaaaaaaaaaaaaaaaaaaaggggggccccccccgggggggacccccatttccccctttagggagtgttttaacccccccccacgggccgtcttttaaaaacgtcggaactggaaaaccccgggcgtacccaaattaaatcgcttggaacaaaatccccttttcc

SEQ ID NO: 54442 - DNA, 274 bp, Homo sapiens
ccccctcgaaatacttctagaattaattaacgcgggagggacatattctttagaatctattttattaactgacctgttttgggacctgttacccaaataaaagatgtttctagaaaaaaaaaaaaaaaaaaaaaaaaaaaaaaaaaaaaaaaaaaaaaaaaaaaaaaaaaaaaaaaaaaaaaaaaaaaaaaaagaaaaaaaaaaaaaaagccgcccccccccggggggaacccccaatccccccaaaagggagccgaataaccccccccaacgg

SEQ ID NO: 54443 - DNA, 626 bp, Homo sapiens
ccgggccccccctcggaagtcttctagaattaattaacgcgggcaacagagtgagacttcatctcaaacaaacaaacaaacaaacatgacttcaagtaataatagcactttctgtgttccttcctagcactttgattaaatgtgtcgtttaatctgtacaacatccctgcaagtagcaattttttttttttttgtagttggcacatggaagagaaataacttgtctgaggaagcacagctagtaatggacagatctgggatttgaagccagttcttccaaagtgcacacatttcccctgcacttctctctatgtattctagctaaccaagctgttgctctaatataatttgtttagagcatcaaaccacataatccaggtttccgggtgtagtttttttatctgaagtatttggtactaaataattaaattagctaagtgtcaaatccctctttgttttaggatttatagatttaaataaaattagaatagatctttccaatttttttttttgttgttgttactgtaaagagctttttgtggtggaactaactttggtgagcaacagaataagaactcagggaatgtcgaagcaggaaaattggtacagaatttcagaacatgctc

SEQ ID NO: 54444 - DNA, 543 bp, Homo sapiens
aattaacgcgggagttctatttacacacagtctctttgtgaggaacaggacttcagatcagtgaggaaggaatctgctgaaatttcatgagcatgccatgcctaatgcagcagacttcctagaaaacccctaaaccatggtatttgagaaaacagaataagaggcggaccttgtgtatcaggcagcggggagcaaacgagcactggaagggaagtctaatgtgtgctttaactgcagccacccactcaaccctccgagacgagtagagtatttgctgtttctctgccaaagttttaagggagtgttttaagggctttgaagattagcaactggaatccagggtgcattcacagccctgtgtgggtatttccccccaaaacctgcacagaagtgagaatgacaaaataacgacgttccttctgtctggaatttaattttcttatgaaaacaaagacagaaaaattaaaatgacccactgccaggataacatttcctttttttttttttttttgagatggagtctcaaaaaaaaaaaaaagcggc

SEQ ID NO: 54445 - DNA, 547 bp, Homo sapiens
ccgggccccccctcggaagtcttctagaattaattaacgcgggttcttccttctcaatcagcataccttcagtttccttttcttgtctcatttcattatgacttccagtaaaatgttgaaaagaagtgttgaaaggggacatatttatattcctggtcttaggaattttctagtttctcaccattaaatatgttgtagctttttctagatattctttatcaagttgaacagtttaacttacatttctagtttaatgcctcaggattttttacccataggagaaattgttcttttcatgtcatttttttgccacagtttggctcttagtacgtattctttctctacactgtatctcagatggaatcttcctccctactgccaccactgctgtctcatcacatctcacctgaatagcatagcagctttctcctcaattcaattgaatgtacttcctctctcttctgttctgttgttccacacattaaagtcacactttcctcctaaagcactggatttattttgtcacatggctttcttttgcctgtca

SEQ ID NO: 54446 - DNA, 539 bp, Homo sapiens
  misc_feature 422, 485: n = A,T,C or G
ccgggccccccctcggaagtcttctagaattaattaacgcgggcccaggtaaattctgagctactcgccacttactttgaagcctacaggaatgagaactttattaggagagaaagaaacttgagaatatctacacgcaaccgctcgcctgacacaccctgagcttctccacttccgtgttcgggatgccctttctcaccctttcctcttgtcgaattgctaatctttcaagacatggctgattgtgattgtgtcttggttatggcctctcgaagtgtgcgatgggtttcagaggttttctgtgcagatgtgtacatatatgtaaaggcagctgtgtgactacaagacaacatgaataaacacataaagacagtaaacagagacgtaggaacaccacgtgtacacatatacatgcaagcggngaggtgaagattcagggatttgggtgctttctggtgcatttcctgttggatttgctgacccangagtctgataagaaccctgtttttacttctctgcacaatcaaaaaaaaaaaaaa

SEQ ID NO: 54447 - DNA, 607 bp, Homo sapiens
cgggccccccctcggggtacttctagaattaattaaaattaaaacttcagatatttgtggattacaatcctcatttacttccaatgtgactaaaaagagaaaaaaaatcactgtgtcactttaaagaaaaatcttctaagggatttggattttactttctttagaatgacaagtgaatcatattgacattttacaatcttagatttttctttttttttcttttgagacagggtcttgatccgtcgcccaggcgggagttgcagtagcatgatcaggactcactgcagcctctatctcccaggctcaagtaatcctcccatcttagtgccccaagtagctgggactacaggggtgcactaccacaccgggttgaattttttttgaattttagtagagatgaagtgtcactatgttaccaaggctggtctcaaactcctaaactcagatgatcctcctgcctcggcctcccaaagtgctggaattagcctggccaatcttggatttttaatggaatatgtgggcacaaaatgacagaacataggacattctaaagttccttgatttgatcattataagaagtgtgggactcaagcacaggaaactgaac

SEQ ID NO: 54448 - DNA, 604 bp, Homo sapiens
cggggccccccctcgaaagtcttctagaattaattaacgcgggcatgtgggaattatgggagctaaaattcaagatgagatttgggtggggatacacccaaactatatcaataacgttaattacacctgcaaaactccttttggcatgcaaggcaacatattcatatgctccaaggatgaggcattcttcagcttaccacacagggtgatgacagggataggggatttatgatatgacccctctctttccatctttttttcttccctgtatctcacacaggcccagtgttgactcttctcaatattactcttgtttacccttggcaactttctaatctatttaaggagcaggaatgttcatcttccactttgaaacagttctgtaatgtccctttgtgtcctgatccactgattggaaagtgatggtacaagatatctgcttgtttcatatctttttgtagcaagagaaacatttgtttgggaagccctcttattttgtgtgtaccatgatcatgactaacacagttgtcttttaaacatgtctctttcctcacagttcttacatgtcatgggtcacagtgatatttttacctctaagtgttga

SEQ ID NO: 54449 - DNA, 512 bp, Homo sapiens
tccaccgcggtggcggccgctttttttttttttttggaaacacggattttcccttttgtcccccaggctggagggcaagggttaaatttgggttaaccgaaacctccccctccttggtaaaggcaattttcctgcttaaccccccggagtaccgggctttacgggcttccccccccccccccagctaattttttggttttttaagaaaagagggggtttccccccttgggccgggctgatctaaaacttttgccctaggggaacccccctgcctaaccctccaaaagtccgggaataacaagggggaccccccaccccgggccttatccgggttttttaaaggggaaaaacggaaatctgttttaaacccattggcccttaatccccttggaaaccggggggaaacagttccccctttttttaaacccttcccagggaccttatggcctaaaaggctttggaacccaatttaaaaccaaaaaaaaaaaaaaggcccttttttttttttttcc

SEQ ID NO: 54450 - DNA, 493 bp, Homo sapiens
  misc_feature 322: n = A,T,C or G
ctccaccgcggtggcggccgcttttttttttttttggggggtttttttgaaactttttttgaaaaaaaacaaaaaataattgtttaaaaaaaacacacagggggcgggggaggaaaaaccaggggcggaagaagggggggccttccggcttaaggttttattggggggaagaaaaatggatttttgcagttttgggcccccaaagttgggcccggttaaataaatttaaaaattcctttgagggggggccccgccccccactttttgtccctttaagagagggtaaattcccccctggcccaaaaaatggaaaaacctgttnccctggggaaaaaaaaaaaaaatccccccccccacccagtggttggggtaaaaaaaaaaattttttccccccccccatgaagcccccccccccaaaaaaatttttgggggggccccttttataaaaatttataagggggggcaccccccccccggaaaaaaaaaaaaaaaa

SEQ ID NO: 54451 - DNA, 523 bp, Homo sapiens
  misc_feature 32, 67: n = A,T,C or G
gtaccggggccccccctcgaaagtcttctagnaattaattaacgcgggacctcattttaattttatnacatctttgaataccctgtctctgaatacatcccattctgaggtactgggcattaggacttcaatgtgaatttttggtggggaacataaatcagcccttaataggcacagaggggctaagtaacttgtgtgtagacacagagctataggagaagatggcaggcattctgactccagaatcccctggttctgacagaatcccctgacagttctgacagttcgagaccagcccggcccacatggtgaaaccctgtctctaccaaaaatacaaaaattagccaggcatggttgtgcacatctgtagtcccagctacttgggaggctgaggcacaagaatcactggaacccggggggcggagtctgcaataagccaagatcgcaccactgcactccagcctgggcgacagagtgagactctgtgtcaaaaaatttaaaaataaataaaaaaaaaaaaaaa

SEQ ID NO: 54452 - DNA, 579 bp, Homo sapiens
  misc_feature 108, 532, 538: n = A,T,C or G
cggggccccccctcgaaagtcttctagaattaattaacgcggggttatgtttctaagtaattcatattgataatggcattttctccaagctatctatggtgttacatngaaaagaacaaaacacagaacagtatactatattttcttgaacatgcctagaatccctctgaaaagacagaggatggtaactgggtgggaagaattttcacctttcataattttgaatcatgtcaatgtctttatcttaaaaaagacgacactgagcataaaaaaataaggttttattttcagctgattttagaaagctcagaaaaaatttaaagaaaatttatctataattccctgacccaaagattaccactgtcagatgtgcacacaaacatcttggtgcatcgcttggctttaaaacaaactggggtcaggacatggtggctcatgcctgtaatcccagcacctcgggaggtcaaggcaggaggactgcttgagcccaggagaccagcctgggtaacacagagatccagtctttacgaanaactgncacattagctgggcgtggcagcatgcacctgtagtcccagc

SEQ ID NO: 54453 - DNA, 595 bp, Homo sapiens
ccgggccccccctcggaagtcttctagaattaattaacacgggtctagattggcacgtacataacgctcgcttctctgtgtcgatggctgcattgcatggacgcgctgtaactcgagaggcagtgacaccccaccttctgggggcttcgttcaagtcccagccctgctagatggcctcagtgtagccttgggcacattattcggcctctctgtgtttgcatttcctcctctgtaagcttcagctgactttgttgggtcagtgtgtgtgaagtggacagcaggcccgggctcaagggtaagagtgtgcacttgcttgcacgcaggcttttcctttttttctctcgttcctctctctcccccacccctttcttgctcttctcctttctctccctttcctccctctctgtttcctttcatttatatctttatgtgaacctctgagttgccccagtggttgttggctgtcgcatcctgcacacgcacaggcgccggcatatccacggggaaagccctagatgtgcgcactagtgtggatccctgcagtctgcagtggagggagtggggtcaggagaactgggtgggggagagagaggaa

SEQ ID NO: 54454 - DNA, 591 bp, Homo sapiens
cccccctcgagagtcttctagaattaattaacgcggggaagtgggaaaggtataaatgcaagattggtcacaagatgacaactgtttaaactaggcgacaggcacataggggttcattatattattccctctactttcatttatgtttgaaattttccacaatacatactttttaaaagagtaatgcatgagccaggcatggtggctcatgcctgtaagcccagcactttaggagaccgaagcaggcgaactgcccgagctcaggaattcgagaccatcccggccaacatggcgaaaccccatctctacaaaaaatacaaaaattggccgggcatggtggcatgtgcctatagtcccagccactcaggaggcagaggttgcagtgagccgagatcatgccactgcacttccagcctgggcgacagagcaagactccgtctacataaaaaagaaaaaccaaaaaaagattaatgcatgaatatatatttctgattttcctgctttatcagtttttcccctcaattaactaagcacatcataaccaaaacttactgtataggagggcttctattggagataaaagaaaagcag

SEQ ID NO: 54455 - DNA, 507 bp, Homo sapiens
  misc_feature 16, 18, 30: n = A,T,C or G
cgggcccccccctcgngnagtaccttctanaattaattaacgcgggaggattgtttgagcccaggagtttgaaaccatcctgagtaatagagagacccccatctcgacaaaaaaaaaaaaaaaaaaaattagaaacaaaaaaaagattgtttctctttcatcagttaaggaaattaaaacttggcatgcattagttcatatgtatgaggttggctgtgtccccaaacagcaattgcttgtacaagatagaagtttgcttctcagctgggcatggtggctcatgcctgtaatccaggctctttgggaggccaacgcgggaggattgtttgagcccaggagtttgaaaccatcctgagcaatagagagacccccatctcgacaaaaaaaaaaaaaaaattagaaacaaaaaaaagattgtttctctttcatcagttaaggaaattaaaacttggcatgcattagttcatatgtatgagggtggctgtgtccccaacagcaattgcttgt

SEQ ID NO: 54456 - DNA, 582 bp, Homo sapiens
  misc_feature 28, 78: n = A,T,C or G
cgggcccccccctcggggatcttctagnattaattaacgcgggtaggtaaagtcttcaggttagtatggcagactagnagaaagtttactttgcttcatttataggcattcttagcattttaagatatgaacaaattcatgtagaaaactaattatatttttaaaagaaaaatacaaattaagggaaattaattttaaaacctataaaaactaaaataaaattataatgatgacgattcatatcatcactgtataggggatataataagtgacaagggaacaccctggtaactcattcagtatgataagaaaacatccagtttctcctcataaaatatcatttatttaaagtgcaacgtaaagagcttcaacacttgcaaggcagtgtaattttgttttcaaatttatagttgacagaaaaaggtgcatgtacattacaatagttgtgctttgagggagacaattatttttgaccattgctaactatcaacatgtgctatcaaaaatgacatcttataccttgaacatcttgcaaaagtacactggcccaggacctacgtgaagaattggtttacggtgaag

SEQ ID NO: 54457 - DNA, 574 bp, Homo sapiens
cgggccccccctcgaaagtcttctagaattaattaacgcgggtctatatgctcattgttaatgtaaggaaatagtctgtgataggaatataaggagtattcatcacaatattattatttctttcaatactaggggaaagattgaattgtatatccatagtatggagttattataatggctacaaaatgtggagagtttttagtagaaaaatgataatgctgtgttttggaaaagaaaaaattaatctttgccttctaaaacttggtgaactttacaggttactcccctgccaaaaaaaacaaaaaaaaatcaacacttaaatcctaggtaactcggattcatactccaccagaatttaaaaaaaaaattaactgagctttgtggtagaggaatattttaaagatatattcctgaacaaacatttcttcctattttgaagagacaattgtgttctttaaagctgggcttctgccaggcacagtggctcatgcctgtaatcccagcactttgggaagccagggcaggcggatcacctgagttcaggagtttgagaccagcctggccaacatggtga

SEQ ID NO: 54458 - DNA, 560 bp, Homo sapiens
  misc_feature 492: n = A,T,C or G
cgggcccccccctcgaaagtcttctagaattaattaacgcgggccatcaccactgtccagttttagaacattttcattaccccaaaaggaaactctgtacccattatacagcttatgttacgtttggtttgctatgggggtctaatctctttcttctggatgtaaagccagttttcccaatgtgatttgttgaatatatcttctttttttccacaaacataaaatgctgtctctatcatctggtgcctatgtgtgctgaggtttgttgcagggctgtttattcttgtcagttctattgcccagggattttaggaagtaaatttatatttataaatacattgccttatggtgcatccctttggttgttctctctctatagttattatatatgcatattttccctaataaattataacagatatccaaaggcttttcatgtgactaggttgccaggactttccaaatttatgtactggctttattgaaacttangttttatgtattgcatgtaaagtcatatgttcctatgtagatcattctaacttgatattttaaaatgc

SEQ ID NO: 54459 - DNA, 547 bp, Homo sapiens
ccgggccccccctcggaagtcttctagaattaattaacgcgggactctcaaccaatataaaatatttaaacttgtatatttttctcttttattatattttaaattttatatctttaatttttccagtgaaaaagattaaagtgatttatttaaaaaaaaaaagtccttgttgagatcaatgccacagactgtctgagaggagcacacaacagtactacaatgccaagagatgtataaaagaatgaaatgaggctgggcacggtggctcacgcctgtaatcccagcactttgggaggccgaggcgggcagatcacttgaggtcaggagtttgaaaccagcctggccaacatggtgaaaccccatctctactaaaaatacaaaaattacccaggagtggaagtacacacctgtaaacccagctactcgggaggctgaggcaggagaatcacttgaacctgggaggcagaggctaccgtgagccaagattgtgccattgcactccagtctgggcgacaagagcaaaactctgtcaaaaaaaaaaaaaaaa

SEQ ID NO: 54460 - DNA, 449 bp, Homo sapiens
acgcgggggtgcattcatatgatgacgagggatgataaaggatgactgtgtcctgtaaagaatgccaagatatgtgtgaaagacataattagaactgaagatacaaatacaatgtatacattatgatgcattatgtgtaaatcaaattgatggacagttaagttgctggacatatattagattgatggcgctataagtaaatagatgaaaatagattaaacgtgtgttctttgtggaaggcactacaatcattgtaaaaactaaatcacattggaagtgtattgctaggataggacagggatgtaaagcagagaaataaggctttcatgtgtgattgtgtgtgggtttgatataaaaaatgtgcagaatgaggcatatgaactgcttattgaacatgggattaaatataacagagaaaagtgtatagcataacagaaccacagaacatg

SEQ ID NO: 54461 - DNA, 496 bp, Homo sapiens
cgggcccccccctcggggtacttctagaattaattaacgcggggatactaaagcgacggagcccggtggacggaagtgggtgttggaggctttaaggtagctttaaattcgtgttgtcctgggagctcgcccttttcggctggagtcggactttacggcgccggatggctctggacgtgaagtctcgggcaaagcgttatgagaagctggacttccttggggagggacagtttgccaccgtttacaaggccagagataagaataccaaccaaattgtcgccattaagaaagtgagttacctttttatgttgtttttaagtctccttgaagatgtctgtattattaattgactgatagccattttattagtcttgaccatactctgataatgagttactcatgtcattttcagagacaaaataattaattagtgctttgtgttcccaaacggaactctagggttgaccccgtttaatttctattaaaaaaaaaaaaa

SEQ ID NO: 54462 - DNA, 438 bp, Homo sapiens
  misc_feature 36: n = A,T,C or G
tgggtaccgggcccccccctcggaaatacttctagnattaattaacgcggggggttttttttttcttttttttttttttaatgtaaactaacctcctgcatgacagaggttaaaattttgtctgcacttgagttcacttgagtttacatttgaaatgtgcatgtttatttatatagatttcaataaagctattcaaggccttaaaaaaaaaaaaaaaaaaaaaaaaaaaaaaaaaaaaaaaaaaaaaaaaaaaaaaaaaaaaaaaaaaaacaaaaaaaaaaggggagcaaaaaaaaaaaaagaggcgccccccggtggggaccgcccattcccccaaaagaaagcgggtttccccccgcaaacccccggcgttaaacaaccttggggccggggaaaacaccccctttaccccccttacccttttggcaaaaagccccc

SEQ ID NO: 54463 - DNA, 555 bp, Homo sapiens
aattaattaacgcgggggctgcgtcagaccttgggatcctcagaggctgaggaggccttctctagccaaggccggtcgaaaccaccttgtttgtgatagccacacgaataacggagctttacaagatcccttatacccaaaatagaggtggcagcattggctagcatctctgcgccccttcgccctgcattccggcctcttcctttagcctcggcgcggcttgcgttccgcgtgtaccaagggaagtggcggccgacctgagcgcgctttggcgggtggaagtggtgactttgttgtcctgtgtggacgaatgtgtaatataaagtgaccctcaaggaatctggagagggctgctttacagtatttgaagaacacagggctgtggaccctatcggttcccaaatgaaagctccccggggagcgtgtttttgccagtatggggaagtagggcggaggcataggaatgaccgcgagagtggctgctttcatagctccgcttgcgaaactcctgcccggcctttgacaccgccacggctttcagtaatctggaaaatc

SEQ ID NO: 54464 - DNA, 269 bp, Homo sapiens
cgggccccccctcggaagtcttctagaattaattaaaatttaagtcattctttacacttcacaattattttcacatccacaatcacattcaaatgtcatgaaaattctgatactgaagtagatgagtaaaatataatgaaagttatctcaattttacagaggaacagagaggttgagagacttgactaaggacacacagcagtactagggtgtgaattctttttttgttttcctttactctaaatcagttctacccaaaaaaaaaaaaa

SEQ ID NO: 54465 - DNA, 510 bp, Homo sapiens
  misc_feature 481: n = A,T,C or G
attaattaacgcgggaggccagacctgctgctgctaaacatccttcaaggcaagggacagcctcccgcaataaagaataacttggcccgaaaagccaaagttgggaaaccttaccctaactaattctcttgcctcaattagagaatgtgctgtcccttgggctgtgctggcgatttgacattctataagcccttttgggattcatcacccatgaacttacagaaagaactgtgtttcacagctacttttacaaaaggagccgtgatttgcccccgatagtactgactagagaagagcaaacagggctgtaagtcagtagtaccttcaatacttttccatctcgtggcagataccagcctggttgggctttgattagtgcagcaaactcctctttcaagaaatctggagaagttagactttcctccctctaggctaaagaaagttagctatcacagaactatttcttcaagaaccatggcanaataaccatgggaacccatcccagttcca

SEQ ID NO: 54466 - DNA, 602 bp, Homo sapiens
ccgggccccccctcggaagtcttctagaattaattaacgcgggatccttgatttatagttcttgatcccttttcttagatcatattttggaagcaattctaggacagttctggaaatctctctaattttcttttagtacttagtctccagtttggcatgggttttagacactattgaagtgcactcctattccttgttctacttctgaatacttattctaagggaatctattaggttgtgtacaaaaatttagttataaggatctttactgcagaattgtttgtaagcaaaataaaagtttgaaacagttttatagcaaaaatattaagtgatgataatttcatacattagactaatacatggctagtaaaagtgatgttacatatatttattggcatgaaaagataatagatacatttttgttttgttttgttttgaggagtctcactcttgcccaggctggagtgcagtggcgcgatcttagctcactgcaacctctacttcccaggttcaaatgattctcctgtttcagcctctcaagtagctggtattacaggcgaccaccaccacacccagataatttttgcatttttagtagagat

SEQ ID NO: 54467 - DNA, 492 bp, Homo sapiens
  misc_feature 24: n = A,T,C or G
gccccccctcggaagtcttctagnattaattaacgcgggggtggagcttttaactttgacagcctgggtgacagagcaagactctgtctcaaaaaaaaagagttggttctgttaaacaatatttatttctcataataaccctatgaaagcagatacagacttctggctttttaggattggtatttcacttgttgaacacctacccttgtgtcagatgtatagcaggttaacaaagtcaatacagtgatacacttgacataatctttgttctgagtttttttcccaattatagtaaaattggaggtcttaactgttctacattagataaatatatgcatttgttttaaagagctaagcaatgagaatcttacaactagagctgaagttcaagaaataaatgtccaatgattaaattttttccactgctgttcacatcatgatttgttgtgattaatgtatgtggatgaggacataatagaaaaaaaaaaaaaa

SEQ ID NO: 54468 - DNA, 645 bp, Homo sapiens
  misc_feature 28, 45, 83: n = A,T,C or G
cgggcccccccctcggaatacttctagnaattaattaacgcgggnaactctaacagaaaattttatctatattatttactatngaaaaatggataagttttcaaaaattagcatgtatgtgtacaattcaagtcacccttaactaaccaaaaagtgtttaaaaagcagtgcagttgtgtcctactggatagttgtaagcatctctttaggcacttcactggttcattgacataatacaaattaaagctataaacacataatgtgctctctgaagatagtctaatcaagcaacgtaaaccaatgcaaaaatgtgactttttggccgcttattcctcccctatgacttaataacgtttttaaaccagttgtccaaggagatttttctggggaagggaatgctttggcattatgaaaggaacattgttcaatcccagaaaggtaaaactgaaaaaagcctgtgcaataaagaaatttgaaaaaaatttctttatggctctgtttaaaaggacacttttgcagtgatatgacagggggaaagtttagttgagtattttttgaacatattgcactctgtttttgtagttcaatcacattaatgcatagaaacacaatttttacctttgaaaaataaactgtctaacctat

SEQ ID NO: 54469 - DNA, 493 bp, Homo sapiens
  misc_feature 11, 23, 36: n = A,T,C or G
tgggtaccggngccccccctcgngaatacttctagnaattaattaacgcggggggggaaagtcgcgaggtgcatccgcttcggctgcagctatttactgaggacccactggatgtcaagcattgtgcatagttttcttcgattgttgcaacatcccttgcgagtttctggagcagcagagctgaaggaacccaaacttggactgaagtgactctactaaggtcagctctatggctcttccacatgattcaaacgaaacttcctatttgctgcctcccaacaatgaggactggggcgggcaaaccattcctgactttgtttatgggcagaaggatctcacggcagaagggattcagtggccaaggaatgcacctggcatcccagatgctctgccacaatctccctttgatgctgcactctgctctgcctggaagcagcgggtggagctggggctgtttcgctaccgtctacgggagctacagacccaaatcctc

SEQ ID NO: 54470 - DNA, 623 bp, Homo sapiens
  misc_feature 25, 38: n = A,T,C or G
ctggggtaccgggcccccccctcgngaatacttctagnattaattaacgcgggtgagcataagccaagcatacgttattccaaactagagctcaaagcaactgcaacacgcagctggaatttcgaatgtcggaaacatttcccactgcaccgctgggtgggtaattccctgaccaagctgaaaaagggacctttacaagagcctccaaggtctgaatgaaatgttttccctggctctggactcccaccctggattaacagcagagacattagcaaaacactgaccgcaggtttttattttcttttctgtggaatgtggcttggtcctcagaactgatggtgggttatttctccttacataaccatttcttctctggagaccatttagatataaataggaaaggcaaagctctttttgtggacctataagctggaccacctatttgaagaagccccaacaatagtaaagacagtccgggttggcccaaatctgagaagggtgtaaaagcatatatgctcagtgaaaagggaacatgcaggttttgacatccagcactcattcagagatacacacatatacatgcattcacacacacacatgcatacatacaagcctgtagaaag

SEQ ID NO: 54471 - DNA, 383 bp, Homo sapiens
attaattaccgcgggtaggcaaaatctttttttttaataaaataaaaataaaaattaggttgggttgtggtatcttcatgccttgaaatcccacccctttggggaggccaaggcgaggggatcacaaggtcaggaaatcgaaactttcttggctaaccccgtttttattaaaactacaaaaaattacccgggcttgggggcccgtccctgtaattccacctagtcgggaggctgaggcaggaaattcttttaaacctgggaggcaaaggttgcagtgacccgaaattgtgccattgcatcccagccagggcaacaaagcgagattttttctcaaaacaaaaaaaaaaccggccccccccgggggggacctccaatccccccta

SEQ ID NO: 54472 - DNA, 374 bp, Homo sapiens
cgggcccccccctcggggtacttctagaattaattaacgcgggggaggcggagcttgcagcgagctgggatcgtaccactgctctcccccctgctcgactgaccaggactctgccttgtaaataataaatactggataaagctatctgtgagtggggtagcgaccaatcaaccttctaactcatgaagctgaagtatcgtacgcatcactcgggcccatgagctcaccgctttatggagctatattcacgccactatttatccagtctgaggcagaacagacctacgcatcctcttccgataacaggtcgtcccagatcaaatctcagttccactctaaatgctcccacagaacattttaaatgttctcgacac

SEQ ID NO: 54473 - DNA, 554 bp, Homo sapiens
  misc_feature 28: n = A,T,C or G
cgggcccccccctcgaaatacttctagnaattaattaacgcgggtgaagagatcatgatgagtaattatgccagtaaaccactgggtggcagagtcttgtctatatactctcactctgtatccatttaaggaataaggaccttgcataaaaatctcctgaaccttttgttcctttacccagactttcacttcctcatgaagctgcgggttgtccctgagaactgggtttaggctgtctatgtcgtcctggtagggctgaaaggcactatcttcagttaaaaaatccagttgcttatctacaaggaattctactgcagtgactgaactgggtatatttctttcaaccagaggtttgaaagttttgttcttgagaattttaaagtatctttaaatctcagaaatccacaacaaggctttaaaggtcagtaagtatttgctgaaatttctattttgttctggaagagtatctagtgtaaatacttctttagtcttcaaaaatcacaggcaaatggctctcaaaccaagcatttctgagctcacttgcagcggcgtca

SEQ ID NO: 54474 - DNA, 390 bp, Homo sapiens
ggccccccctcgaaaagtcttctagaattaattaacgcgggaaaataaagtaaaattaatctggtaatttgtcacggattagttgtacaactagttagaagtttcagaataaacatgcatttcataactgtcaaaaaaaaaaaaaaaaaaaaaaaaaaaaaaaaaaaaaaaaaaaaaaaaaaaaaaaaaaaaaaaaaaaaaattaaaaaaaaaaaaaaaagccgccccccaccggggggaacctcaaatcccccctaaagaaagtcaattaaccccccctaattgccacacttttaaaaacctcaaaattgaaaaaccccggcctttcccaaattaaaccccttggaaaaaaatccccttttcccaagttggctaaaaacaaaaaaggcc

SEQ ID NO: 54475 - DNA, 238 bp, Homo sapiens
  misc_feature 28: n = A,T,C or G
ccgggccccccctcggaagtcttctagnattaattaacgcggggggtgaggacaggaaagcaaatcgggagttcagaattgtgacaaacctcaggtgactactaccccattgtagacaagctacagactggtattagcagaagataggccataaacaaactctccatttcctctcaacgctttgggaacataattctattattccagctagctaaaaaaaaaaaaaaaaaaaaaaaaa

SEQ ID NO: 54476 - DNA, 534 bp, Homo sapiens
ccgggccccccctcgaaagtcttctagaattaattaacgcggggttgaacattgtaactaaagcataaagttagaccaattacatgcagagatgtttatttaatattgtgtgagctgagtccttctgtataaattatttgcacacttttcttgcatgatgaactgattttttatagttgtttgtaccagacggtggcatatttttgtaaaaaacttttgacactgaattgcaataaatgtttttccaacaacaaaaaaaaaaaaaaaaaaaaaaaaaaaaaaaaaaaaaaaaaaaaaaaaaaaaaaaaaaaaaaaaaaaaaaaaaaaaaaaaaaaaaaaaaaaaaagggggccccccccgggggggacccccaattccccttatagggagtctttttaccccccctcattggccgttttttaaaaacgtgggaatgggaaaaaccttgggttacccaaattaattgcctttgaaacaaatccccttttcccaagtggggttaaaaccaaaaaggccccccccaatcccctttcc

SEQ ID NO: 54477 - DNA, 640 bp, Homo sapiens
gggccccccctcggaagtcttctagaattaattaacgcgggggagcatgagtaaagacacacccccatgattcagttacctcccaccgggtccctcccacaacacatgggaattgtggaagctacaattcaagatgaaatttgaggggggacacagccaaaccatatcaagagggaaatataaaagaaagagagaaggaaggatgaggaagggagggagagagaagcttgggagctatacagcattgtttcagaatataaagactgctattattgggtatgcttaacaatggaaatgtttcactagcgcttttattagcgggcaataaaagacatcctggagggaaataattcagtcactgtcagacgttcccacttcaaccataggccttcaacttttggtaggaacataaagtcttaaaataggcaaaactgaaagctgtcataatcaactatcatcagtcatcagtcaatactaatttcttatagaaatagcattaattcttttcatctaagagatcttgtttataaaggagagaaattgtcacccatttgggctagccctgcctgaaaatgaaatgatgaacttgacttctcaagcccacatgacttctagagcatgagatagtctgctgttctgc

SEQ ID NO: 54478 - DNA, 489 bp, Homo sapiens
  misc_feature 33: n = A,T,C or G
ggtaccgggcccccccctcggaagtcttctagnaattaattaacgcgggtatgaaatgaaattccacagggggattcgaaaggaaatgagaccgggactctccgtgcttctcggcccgccgcccttcctgtctcggggacacggtttctaaataagaaactgatgctctgagaggccaagcagtttgcccaagattacacagtcttagccgtgcctgggagaaccttctcttcaactctgccgcaccactgtcaagctcacctttcttctaaggttttattttagagttaacatcctccaaaaagccttcctcaggagttgaaggtgcccctaatatcacagccatggcatcctgtacactggaccttatcgtctgtctgcctgttgtaccttgtatgagtctataagcaaaacctataagaagtcacatctggctattctatgtactcaaaaaataattggcaagtgaaagaatgaggaaaaaaaaaa

SEQ ID NO: 54479 - DNA, 371 bp, Homo sapiens
  misc_feature 76: n = A,T,C or G
aactgggtaccggggccccccctcgaaaatacttctagaattaattaacgcggggggggggggggaggtggccaangatgctggagctgaatcagacgctgacagttcttcaggcatttctatttcacaatcgaattgaacacattggccaaataaagttgaaattttaccacctgaaaaaaaaaaaaaaaaaaaaaaaaaaaaaaaaaaaaaaaaaaaaaaaaaaaaaaaaaaaaaaaaaaaaaaaaaaaaaaaaggaaaaaaaaaaaatgggggccccccccggggggaaccccaaattccccttatagggagttttttaaccccccccaatgggccgtgttttaaaaaggtgggaacgggaaaaaccc

SEQ ID NO: 54480 - DNA, 524 bp, Homo sapiens
cgggcccccccctcggaagtcttctagaattaattaacgcgggctgtcattataactaagttacgccattgtaataactttcaattttaaaaaagagcatactgaatgacagcagcaatcagcatttgttattggtactctgcaccacagagcagcatcataaatgtcttccatgaaatacagacagaagatgttaaatcaattgctatcacaatgatgagccaagagaggatttctactgcccaagaacaagatgaaatgtataattctataacctatactacttaccttgtctttgaagatatgtggattttggtatatgaaatctcggtagctttctgttcgtattttgtcctagggtggagagaggaaaacgctgtgtttataggacagtctaaacaaataaattttttaagggagatatttgccatattaacacacattgctagtttccacagcagtttttatacctgggataccaagcttatttttctcctaagaaaacaataaagaatagaaatagc

SEQ ID NO: 54481 - DNA, 605 bp, Homo sapiens
cccccctcggaagtcttctagaattaattaacgcgggcagtcaatgactggcagccttccttaatcatctttgcaagagttcccattgctcctcgccactttggatgcttgcttttgtggtgttttgcttttggtaaagatgcagtatcatcttctgaatcaaaagatcataagcattccaaaggcttgaaagcagagttgctctttagtggcagtcaggcatctgtcctgcaaagtgagatgtctgcaatggagtcagtagagttccaggagagtctgaaatcacagcatttcagtcgtcagttgaaatgccactaacacagaagttctggaatgcaacctgaattatttcctcttaaatagaaagtcccttgtctttttgactcatgactcttcaacaagtagattttcatttgctctagactaaatgtagaaccttcttccacatggctggtattgttctgttgagtttgttacaatagaaagtaaaaatatcacttaattaacgcgggtgtgtggcttagatgaaagggagagtaaattttcataccatgctctctcctactcagtttgatctctctaaaattgtagtttggtttgattta

SEQ ID NO: 54482 - DNA, 544 bp, Homo sapiens
  misc_feature 17, 93: n = A,T,C or G
ccgggccccccctcggnagtcttctagaattaattaacgcgggctcctttcaagttgatttcagcaagcttcacattttgggggcaggcaggnggaagaattctagaagagaaacagggtattctagtgagacaagccaatgctgactgtttaagagatttaggattgaaatctgcttttgaactcgcattccggcggtcctctttggtgttctcaccaagggcaaaaggactcaaatcctcagcggaggacagaaggtggcctctcttctggcaaaacatggtaagtatttttggagcacgatgcaaagcctcatctgcacagacgtcatgctgaggaagccaccccagcccggcccccgcatgccaccaacctccttctgaaaatggtgattaaaagctaatcatggggccaggcgcggtggctcacacctgtaatcccagcactttggaaggccgaggcaggcggatcacctcaggtcaggaggtcgagaccagcctggccaacatggtgaaaccccaactctaccaaaaaaaaaaaaaaa

SEQ ID NO: 54483 - DNA, 638 bp, Homo sapiens
cccccctcgagagtcttctagaattaattaacgcggggtataaatgtcatgagcaaagttctaggcatcttggtgctcaacaaatactggttgaataattggaatcctcctcctttgcatttccagccattctcaccttcctgcctccagttgcctttatttatgagaagaccattccaataacatttcagcagtaatgccatattcataatttccttttcaatttgttggctagaattttttttgtaactttgtattcaaagaaatgtataacttttaaaagatgttaaattgtaataatgaactaaataacatttgttattagaattcttttaccataacatgaattattgtttcttaacttctacatgtctttggtcctctgtacttccctccctggcttctgtgatttctaagtttgtggtggtgtgtggtgatggggagtatatcatctacacagcaatggcattgagaaacaagagctttggatctgctcaagagtttgcatgggcccacgattcttcagagtatgcaataagagagagcaacagcattgtaaagatatgtaagaactgtaaggaaaaaaaaaaaaaaagcggccgccaccgcggtgggagctccattcgccctatagtgag

SEQ ID NO: 54484 - DNA, 592 bp, Homo sapiens
  misc_feature 26: n = A,T,C or G
gggccccccctcggaagtcttctagnattaattaacgcgggatactttattaggtgactttatttaacagaaagtttgtcatttctggtatttctctcaacacagaaaagccaagttgtgtgttaattttggttatgtttaaataagtttgtaacctttgctgacctcacaacttatgttttggtagggaaaactaaagctgaacaatatttgggcatttggacttagaagagagagtagtggcttgttactctttttaaagcaagctaaaatcgttttaaatgtaatgctttacaggatctattttaaacacacactcttcctttacagaacgctttggataaacaagaagaattgacacctcttggagtccacttggcacgattacccgttgagccacatattggaaaaatgattctttttggagcactgttctgctgcttagacccagtactcactattgctgctagtctcagtttcaaagatccatttgtcattccactggtaagaaaaatggaaataaaaccgagttattttagatgtgaacaggagttgcttagatatatttttcattagcgttttattagaatgt

SEQ ID NO: 54485 - DNA, 381 bp, Homo sapiens
  misc_feature 28: n = A,T,C or G
ccgggccccccctcgaaagtcttctagnaattaattaacgcgggtagatgatttctagcaggcaggaagtcctgtgcggtgtcaccatgagcacctccagctgtactagtgccattggaataataaatttgataaggtggtgaaaaaaaaaaaaaaaaaaaaaaaaaaaaaaaaaaaaaaaaaaaaaaaaaaaaaaaaaaaaaaaaaaaaaaaaaaaaaaaaaaaaaaaaccacccccaacaaaacaaaaaaaaaaaaaaaaaaacacacacaacactgccccccccccccccccgcgggaacccccatacccccaccgaaacaaatttaacccccccccctcccccccctattaaccccacccggaaaaaaaaaaaaccc

SEQ ID NO: 54486 - DNA, 291 bp, Homo sapiens
cgggccccccctcgaaatacttctagaattaattaacgcgggtagatgatttctagcaggcaggaagtcctgtgcggtgtcaccatgagcacctccagctgtactagtgccattggaataataaatttgataaggtggtgaaaaaaaaaaaaaaaaaaaaaaaaaaaaaaaaaaaaaaaaaaaaaaaaaaaaaaaaaaaaaaaaagaaaaaaaaaaaaaaaaccgccccccaccgcggggaacctccaattccccctatagtaagtcgaataaccccccctcactgcccgt

SEQ ID NO: 54487 - DNA, 610 bp, Homo sapiens
cgggccccccctcggaagtcttctagaattaattaacgcggggaattgcttgaagcaaggaggggcaggttgcagtgagccaagattgtgccaccacactccagcctgggtaacagcaagactccgtctcaaaaaaaaaaaaaattcccaaataggaagatattttctaaggaagaataaaatgctggacccctatattcagactattagtcttaactggtagtttatgtatatattttaatactttgtcatcatgtacatatcttaagatttattatgtgaatatctgcatgtgtgttattaaggattacaaagttgtgctcacacaggacaaatggaaagattttcctacttctgtaaagataagtttcattatacttttgtcttacaattttattcttaggtcaatggttatttattataagttcagattgcacaattttcataagaccctttggatttagcacatgaaattaacacatattttaaagtattaaatacatggaaagcatctggcattatgcctgataataggcacttagtaaaatgtacttttctttgaatcaacatttgaattcttacagtcttgtcactagagacttaaaaggac

SEQ ID NO: 54488 - DNA, 511 bp, Homo sapiens
  misc_feature 24: n = A,T,C or G
gccccccctcggggtacttctagnaattaattaacgcgggtatgtgcttagaaaatatacattttttgaactgaaaaataataattagaagtgcattataaacttgcatggcgccctcccaaaataaatacataacattttcaaatcactggcaacttccctactccacgaagtatgtaagaataaacaagagtttacttagtcttgagaaacagacagtaattagagtcctggatcttcaatttactacttctgagacttggaaaaattacctaacttccccaagcctccatttcattacctataaaatagggataataataatggtgatttcagtgtaatgtttggatttctcttcctcctcttctttctcttgttctttatcatcattcacatcagccaagatttagttaaatttttgttaaagaaattctaaattttaaaatttttatttaaaatcttgccttgtttagttttcagtaactatggatgcagtacctacatgatacca

SEQ ID NO: 54489 - DNA, 607 bp, Homo sapiens
cgggccccccctcggaagtcttctagaattaattaacgcgggcctcctgcctctacccagtacattttcctttgtggcatggtggcctgaaaatactgtgaggtttaacaatgaaggcaggtgactggtgaggagagttccagccactggattctccctcagtcccctgtgctgtggcccttggtgacccctagatttcagtgcccctgcctgacactggagtccctctataaagaagcccctttctagctagctagctgttccatcccgcacacccccacagaagccttttgctgccattagtaagcacgcctctattttctcacctgtgattgatcatgcatgattgagttttgtctattaaagcaattgttaagttactaaaatggcaccaaaagaaattagaaaaaaattgttgcaaatgtcagtgaaatcttttaaaaaactgtcgtacttagaagtgcctcaagtgactaatggaggcttaggactctgaatggtgtcacaaggaaccttatgcacagggacactgacatcagcctgtactgctggtaatgtcagagtgaagcaaatcccacctgaaggcactctcttgcttgaccgtgac

SEQ ID NO: 54490 - DNA, 596 bp, Homo sapiens
  misc_feature 25: n = A,T,C or G
ggccccccctcgaaatacttctagnattaattaacgcggggaggttagaaggatccccaaaagggaaagcacctgatatctagagctatggtggcctgaaggtcatgggcacagaaaaagtgacccttactgctgattcaccagttcccagattggctgttagcagttatggggtgggaggagggactgaagacccctgctctgcaatcctggacttcaaagagagtccattttacctgacaacacacttcattttgaactcactgtcattgtcactgtccttgggtcctctgtggacttcatgatggggatgttccagctaaatttctttagtgtgaataccaaaacatgatcttctctccctgtgaaacctgaagtcttcaatagagcaatttattccaagaacatgaatccaaccaagggtccccctttccacctctgagtaactctgtgtatataacttcttcttcccaccaaggggaagggatttgaaagattacacactatagcatttttctcaaagtgcaaaatgcatgtgccctctagacccagaatcctgtgaaatgaagttgttaatgtaataataaaatgtagca

SEQ ID NO: 54491 - DNA, 617 bp, Homo sapiens
cccccctcgagagtcttctagaattaattaacgcgggtgagcagagcttaggcagccagaacctaaggggacaagttgctaatactataatataaattgtttttctgatcctcttgaccaggggtgcctggcaaacttctgtaagagccagatcataaatattttcagctttgcaggccatgtagatttcagtttcaattacttgactctcctactgtagtgcaaaagcagcaataggtaatcagtagatgaatgggcatgagtatggctgtgttctcatataattttacgcatggacactgaaattggaatttcctagacttttcaccagtcacgaaataatgttcttcagatttttccctcaaccatttaaaatataaaaacattccttagcttgtgagatttggcctggggtctgtgggttgctaacccctgctctcaacgaggtctatgtcatcactctgataattccctcaagctttgcagaaatggaacacgtcagaattagcctgtcccttcttccattacggcaaactcctcgacaaaaacattacgaggaacatcacaggtaacgaccacattgtactaacttctggccagatcatctttgatgtcta

SEQ ID NO: 54492 - DNA, 608 bp, Homo sapiens
cccccctcgaaaagtcttctagaattaattaacgcgggaattaaagggagaaggaaaggtgtggaagaagagaaaaaaatagaaaaaaaaaagtcaaagatgaggagataaaaccaagcaaagagcaatacggaaatagaaaatcgaaataaaggggcccggattatagttacagcatgccttatacctatgagatgaccaatttcaatgagtatattttgaaataaagtttaaggattcaaggctttcattccaatactcaaatgttagcgggtgctcagtaaaacaaagacactttctaagcagttgtgtttgcctacagagcatttggaaaacaccaggataaagcataccagtggtgtgaacaaggaacgagaattaagatctaaaacccaggagagaggaaaacaaatctcaaccacagcatctcttcttcagtacctatgtggtggtctttcttcctgcattctctgcttcctctgccactcttttacccacctcctagtacctgtagtctaacagtattgatgtcactcactttgtgactacagatttggactagaagtaatagaaaccacctatatttggaggttatctcatttttcatg

SEQ ID NO: 54493 - DNA, 583 bp, Homo sapiens
  misc_feature 486: n = A,T,C or G
cgggccccccctcgaaagtcttctagaattaattaacgcggggatcgctcctcagggaagcttgctcagttaggtaccttccttggagcacaggtgttttctccatccgagctattgaaatggtttgcctgtatgtctacctagattgtaaactccgttgaatcagtaaccatgtctgttcagtttctccctagggccttgcagtagggtagatggtcagtaaatactgtttaaggcattaatactttttattttaatcctggccctggatatcagcctcaaaagtttgcagttttctgcatttaacttcaaaattatttacgtgattggtaatgcatgcatgtggttggcctgtgctgtaatttagatgtttgttcccctaaacctcctgttgaaatttgatccccaatgttggaggtggggactaatgggcagtgttgggtcatggaggtggttccttcaggaatagattaatgtcctccctgnggagagggtaaatgagttctctttatttccaccagagctggttaaaaagaacgtcgcacttcctttcttcttttgcgtcctctctggccatgtaatc

SEQ ID NO: 54494 - DNA, 365 bp, Homo sapiens
cccccctcgagagtcttctagaattaattaacgcgggagccctcagccaacataggtatcttacacggctggcacataatgtttttaaaaacttgagccaacatttaaaagtcaatgtggagatggcctaaaaatttaggtaactagcttctcataaaaatatggtagcatctggcaacactgtccatattaacattcatgcccagccatagagctgaacaccaggtacccctggaggtgggagctgtactctccagctgaccacagtccccacctctccctattctttccacagcatcctattttcttcctttgtgttacccgctttgcctttattggcatgtatgagatcccctcatatagat

SEQ ID NO: 54495 - DNA, 305 bp, Homo sapiens
cgggccccccctcgaaatacttctagaattaattaacgcgggtagatgatttctagcaggcaggaagtcctgtgcggtgtcaccatgagcacctccagctgtactagtgccattggaataataaatttgataaggtggtgaaaaaaaaaaaaaaaaaaaaaaaaaaaaaaaaaaaaaaaaaaaaaaaaaaaaaaaaaaaaaaaaaaaaaaaaacaaaccaaaaacaaaaaaaaaaaaaaaacaaaacccccccccccccccgaggaacccccatttcccccaaaaaaaagccaattaaccccccc

SEQ ID NO: 54496 - DNA, 590 bp, Homo sapiens
cgggcccccccctcgaaagtcttctagaattaattaacgcgggactgaaatgattctctatgttgtaaatgatcaactacaatattcagggaagcacatttattcagattctcagtaaaaatgaagtttttgtaggattaatttttaaattatttccagtgtctatgttgaaaaaaagggttatagtgtaatatcaggcctaaagtttcagaagagcaagcacaaagtaatttagctttccatacatttttagagtcagagataactttgaaatttcataagtttgatattcagtggatacaaatagaacatgaattctaagttttgggtaatgttaactcagaacacttaatcaaattgagctatgtgccataaggtaatcagaccagagtccaagttgtatgcaaaaaatctataatttgattctcataaacatattaataaagtataagtgatgttttatatgatttttaaaaaaaattctcaagtgcaatgtgttttaaaataagcttgcaaatgacagcagagacatttacttctgcagttagttaactttataggagttgtgattcttttgatgaattaatgct

SEQ ID NO: 54497 - DNA, 506 bp, Homo sapiens
acttctagaattaattaacgcgggaggtggaaggaagggagagacaactaaattctcatgctcagaagtgggaagtcaacagataatgctgaaactgaaaaatcaataccaaataccaaagatcaactaaaagaatacaaagtggtctcctctaagagaaggaaaatgccaaggaaaattaaggagctggttgtcatttaacaaatcctggtcaagctattaacactttaaactacagttatgcatcacaaatgacaggaatgcatcgttaggtgatttcatcattgtgcagacatcagcgtgcttacacaaacttagatggtatagactactacacacctaggctatatgggatggcctattactcctaggctacaaacctacacagcatattactgtactgaatattggaggcaactgtaacacagtatttgtgtatctaaacatatctaaacatagaaaaggtatagtaaaaatatagccttaagaaaaaaaaaaaaaaagcg

SEQ ID NO: 54498 - DNA, 526 bp, Homo sapiens
  misc_feature 28, 132: n = A,T,C or G
cgggcccccccctcgaaatacttctagnattaattaacgcggggaggggaacggcagggcagtcaagtgtgaaagagaatttcctgggttcaaagttaacgcagtcaccttataagccatcttagaggtganccggaaaaaataataataataaaggtgtctagcaggttgtggctgggaaggaaaaataatgcctgcaagatgagtgtgccgattcgtagccctatattccctgcccaccagttggaatacacatagattcacacatccagcaaatgcaaactccatcatccaaagacgtgtttgtcccggccataattgctccaagtgcttacaggtcaatttcatacatggaacacctcgaaagtgggtgacctgatctccaagcccaaccggcttgtgccgcttgccgaattgtaaatctcagcaaaacccaaacacaccggaactccagccgtttcctgggagcgaggaagcgggagtaatgctaaaaggggaaaagaagaacagtaaaaaaaaaaaaaaa

SEQ ID NO: 54499 - DNA, 378 bp, Homo sapiens
  misc_feature 28: n = A,T,C or G
cgggcccccccctcggggtacttctagnaataattaacgcggggtttaatggaatatttttgtacccgatgtttacagatgctgttgggaagttatcaataaaaagacaccattactaaaaagggaaaaaaaaaaaaaaaaaaaaataaaaaaaaaaaaaaaagcggccgcacaccgaggaggagcatcaaaaaaaacctagcgggcgcccccgtgggggcgctcaatttccccctatctacaacggggtgacccccccaacccggccgtggggtaacaaaatcgccccgggaaaaaccccggttttaccaacctgagtcgtggggaacaagcccccccctaccccacttgccaaaaaaagaaaaacccccttgccga

SEQ ID NO: 54500 - DNA, 268 bp, Homo sapiens
  misc_feature 16: n = A,T,C or G
ccgggccccccctcgnaggtacttctagaattaattaacgcgggtaggtatataagtaataatttgaaggtcacaactagatgactttttgtgtaaccgtatcttgaatggaacaaacattttctttctacgtaattatacataaataacccaatgctttttaatacccacgaaaagccattagctcaaagacacttgcaaacttgtatcaggttgttttccttggtgtgtattaagtttgaagcaaaggggattttcacataccaag

SEQ ID NO: 54501 - DNA, 514 bp, Homo sapiens
gggccccccctcgaaatacttctagaattaattaacgcggggtattttataagcacagacaattctaatggtaacttttgtagtcttatgaatagacataaattgtaatttgggaacataaaaactactgaataaatcatgtggcctaatattaaaaaaaaaaaaaaaaaaaaaaaaaaaaaaaaaaaaaaaaaaaaaaaaaaaaaaaaaaaaaaaaaaaaaaaaaaaaaaaaaaaaaaaaataaaaaaaataaaaaaaaaaaaaaaaggggcccccccccggggggaaccccaattccccctaaaaggaaggtaattacccccccccaagggcccgtttttaaaaaacggggaaagggaaaaaccctggggtaaccaaaataaaaacctttgaaaaaaaacccccttttcccagggggggaaaaaaaaaaaaagcccccaacaaaacccctttcaaaaaattggccaccctaaaagggaaaagaaaaattgaacccttaaatttttggaaaaa

SEQ ID NO: 54502 - DNA, 558 bp, Homo sapiens
  misc_feature 9: n = A,T,C or G
acttctagnattaattaacgcggggtccttccaaatggtcttactatcacctttgtttttctcaaagaagctttaaagtatatttaatctgttatattttgtcactcatccaaatatataatatacctctctttttgttcaagtatttttgtctcttggtaaagttttcaccttttcttcttatactcatttctagatatttatgtattttgttgtgattgtgaatagatacacatttaaaaaataatttctacttcctttctgttgtattgagaaattattaatttctttatatttatcttacatcaacctattttactacagcaaaggtatatagtattatactttatactataagtattatagcatatttttccctggaattttaagaatacattgacattgcctgcaaacctcccatatgtctgctcccaaataaactatattcaaataaacttattagtcaattaattacaagagctaaactttctcagtgatattctctcgtgaatggcaaattcacaccagtgatatcttgctagaaaatacaccagtcta

SEQ ID NO: 54503 - DNA, 591 bp, Homo sapiens
ggtaccggggccccccctcggaagtacttctagaattaattaacgcggggggatgattttagcttgtcctaaatcttgctgtccacccttccaggaaagggacattgtaaatgaataaaacattctcaactcctcttgaatctatcccccaagaaaccatcttatccctgtaataaatcagcatgtatttattgaaaaaaaaaaaaaaaaaaaaaaaaaaaaaaaaaaaaaaaaaaaaaaaaaaaaaaaaaaaaaaaaaaaaaaaaaaaaaaaaaacaaaaaaaaaaaaaaaaattaaaaaaaaaaaaatggggggcccccccggggggggcccccaattgccctttaaaggggtggtaaaagccccccccctggggcgttttttaaaaaggggggggggggaaaaaccccgggggcccccaaattaaatggggaggagccccaccccctttccccttggggggaataaccaaaagggcccggcaaatggccccttcaaaaattgggccccccccaaagggggaggggaattttggccccctttttttttttaaaaacccgggcgaaaatttgggcaaaaccccttttttt

SEQ ID NO: 54504 - DNA, 605 bp, Homo sapiens
  misc_feature 31, 597: n = A,T,C or G
gtaccgggcccccccctcggggatcttctanattaataacgcgggaataaattttgcctagaattcccaaaacctttataggtgattttgttttctgggctccttaacttcataaatagctagtatcttccagcagtagtaacagtctggataacttcttccatatccctccctctttgtttttttgagacagtgtcactttgtcacccaggctggagtgcaatggtgtggtctcggctcactgcaacctccacctcccgggttcaagtgattctcccgcctcagcttcctgagtagctggaactacaggcgtgtgccaccacacccggctaatttttcgtatttttagtgtagacggggtttcactatgttgcccaggctggtctcgaactcctgaccgcgtgatccaccacctcagcttcccaaagtggtgggattacaggcgtgagccaccgcacccggcctccatatcccccttttaaaattctgtagtgtatggtaagtcatatcagatatcagacctaatttaaatttcattttagctttacaagtccaaaaacacagaatttatatattcagatactctagcactaattntagtctta

SEQ ID NO: 54505 - DNA, 348 bp, Homo sapiens
cgggccccccctcggaagtcttctagaattaattaacgcgggagagccaaaatagcaaaacaaacatattaagtgtgtttactaaacatattgtgtgtttactaacacacttaatgtttatatacctaatatttattatgccatatctgaatttattaaaaacaacacagaaatctcctgctctgatatagttatgtaactgatctcttaatctgtagcatagaagtattttggtattttaaggtctcttgattagggatttgtagcctcaggtttgaatcagtcacctaggggtaagagaaaaaccacaacataagacctgaaaaacagaagcaaaattgttgcact

SEQ ID NO: 54506 - DNA, 595 bp, Homo sapiens
  misc_feature 22: n = A,T,C or G
cccccctcgaaatacttctagnattaattaacgcgggcatttttaagtgtacagttcagtagcattaactgtttacattgttgtgcaatcagtctgtagaatgcttttcattttgcgaaactgaaactgtacacccaatttcccaactcgaaatttctctcttctttcagcctgtggcaatcacccttctactttgtctttatgaattcagttattctgtatgttatgtaagtggaatcatgcagtgtttatctttatttggactgattttacttagcataatgtctgcaaagttcatccattttgtagtatgtgtcagaattcctttctttttaaggctgaatactattccattgtatgtatataccacattttatctgtttatctatagttggacacttgggtttcttctaccttttagctattgtggatgaggctgctatgcaggagggttattttggaaccagtactgcaccatggtggctggaagtggaatgttttatgatcaatattttaactagtgcctaacttacaatttctgtatgattttgaacttaactcagaaatagttctatagaggtgagacgttgtggct

SEQ ID NO: 54507 - DNA, 622 bp, Homo sapiens
cgggccccccctcgagagtcttctagaattaattaacgcggggaatgaaggtggatatttgggaatcataatttgttaactgaagctaataagatgagagcattcagagagaaaagaacggaaagattgaatatcagtttcccttctttaaaaaaattgtggatatgtgatctagcttcttgagcatcacagtgactgattggctcgtggtaattgatcgctatgctgacaatcttatctccacctatgtcattcaattttctaagaggcaaaatccttaatcaggaggagagtttagctctagctaaatttcccttgtccagcatgctcctgctcccccaacttgtggaaacagctaaaggattggactaggagcagaagtttggaatggttaaaatgtagcaacatgtgtttcctgaaacaaaattccactataataaaaaaagcatttgaatgctcccttgtaattctgttggagcttgttgccttttttatgacacaaccataatcagtgatagacagtagcataaagaagcaagagcaaagcaattaagtaataatagcactacaaaaatgtgtgctgtagcttaccaaacacaacatttatgaattattagatagg

SEQ ID NO: 54508 - DNA, 530 bp, Homo sapiens
  misc_feature 78: n = A,T,C or G
cgggccccccctcggggtacttctagaattaattaacgcgggcgtgagacttattcactatcacgagaatagtatggngaaagaacagtccccatgattcaactacctccccctgggtccctcccactacatgtgggaattctgggagatataattcaagtttagatttgggtggggacacagccaaatcacatcagttcataaaaagaatctgcattgagatttctgaaattgtaaagcagacaaagaagcttcttaaaatcttccgttctatgtcatatgctattatacactaaatttaaaatagacattgagatatagtctattttaacacatacatttctcaaggaaccatgaagcacaatcaattaattcaatctataaagttagtatattaaatccaccaagtaggccgggtgcagtggctcatgcttgtaatcccagaactttgggaggctgaggtgggcagatcacctgaagtcgggagttcgagaccagactgaccaacgtggagaaaccccaccactact

SEQ ID NO: 54509 - DNA, 564 bp, Homo sapiens
cccccctcgaaagtcttctagaattaattaacgcggggaatgtcttaaccatcactgtttacaggatttcaggactcaggcaacgttcagtattgtcacacaccaaggtttttacagtctgaagaaaactcctgcagtcctaaagtgtcagttctcaaagcccttaagttcctcctgctgattctgattcccagagggtctccgcttcttgcaccgaaccccaacttgcacaggcacctgtgtcttcctcttgcagcaaatgcagctgagaaggctgtggctctgtggcagtaatgataccatcgcagccctaacaccacagcagagcaatggctctggcctgaatgtctgtccccaaaacctcacgcacactgaagcaatctccgatgggatacgttaaaaggtgtggcctttgggaggcctcgctctcaggaccggggttggtgtccttgttggaaggcctgaaggagccctcctgctccctccgcacgtgaggcccagtgagatgttgccgtctgtgagcaacaggtcctggggcaccagaatctgcaggcaccttgacct

SEQ ID NO: 54510 - DNA, 600 bp, Homo sapiens
  misc_feature 34: n = A,T,C or G
gggtaccgggcccccccctcggaatacttctagnattaattaacgcgggcaccacaatcaagatatggaacagttccatcaccacaaggatcccccagttggcctttcaataaccacacccatctccttcccacaaccctccaccccagcaaccactaacctattctccacttctatcatttttttttcaaaagtatcatttacaaatggaatcacatcaagttcaaaagcttctgcaaagcaaacaatcaacaaagagacaacagaataggaaaacatatctgcaaactatacatacatctgacaagagattaataaccaaaatatttaaggagctcaagcaactcaacaggaaaaaaactaataatctgatttttttaaatggacaaaagatctcagtagacgtgtctcaaaagaagacatacaaaggacaaacaggtatatgaaaaggtgctcaacatcatgcattgttggagaaaagcaaatcaaaacttcaatgaggtatcatctcaccccagttaaaatggcttgtatccatccaaaagaaaggcaatgacaaatgctggcgaggatgtggagaaaagggaaccctcataaact

SEQ ID NO: 54511 - DNA, 609 bp, Homo sapiens
  misc_feature 31: n = A,T,C or G
taccgggcccccccctcggggtacttctagnattaattaacgcgggctggagaggggcggggaatgcagataagcccctacaatgcagaatctaaaatagtgtgtgcatttgcccttgacttgcattatatgattttccccccagcagactcaccttgctaattttattttgcttcggctgttattaaaatgagtttgcaatcccagagaaccctctgatggttacagaggccgggtagtgcttggtggcaagtaaagccagactgagagtctaaatttgtcttggacaagcctaactgaaagccgatgtactctaagcatgaatgttgtttttcttttaagttaatattacattttatttttttgcttttgtgaagcaaggtactttctactccccagcaacacagagaagaaagattttgtttcttgctaaaaatccttcttctcacctccatcatctcccatgattaacacattctgtacagtagataatctctgtgataaacaaggagatttcttcgaggttcaaaaccactgtgggagtggcctggaattacctctggctatgagtgggaaaattgaggctcagaaagagagaccagtacgggt

SEQ ID NO: 54512 - DNA, 606 bp, Homo sapiens
ccgggccccccctcgaggtacttctagaattaattaacgcgggcaaatatagaagactgtattttttactatgatatccattttccagaattgtgattacaatatgcaaagagtcataaatatgccatttacaataaggaggaggcaaggcaaatgcatagatgtacaaatatatgtacaacagattttgctttttatttatttataatgtaattttatagaataattctgggatttgagaggatctaaaactatttttctgtataaatattatttgccaaaagtttgtttatattcagaagtctgactatgatgaataaatcttaaatgctttgtttaattaacgcggggagctacaacaggcaggcaggggcagcaagatggtgttgcagacccaggtcttcatttctctgttgctctggatctctggtgcctacggggacatcgtgatgacccaatctccagactccctggctgtgtctctgggcgagagggccaccatcaactgcaagtccagccagactcttttatacagctccagcaatgagaactacttagcttggtaccagcagaaaccagggcagcctcctaagctgctcatttact

SEQ ID NO: 54513 - DNA, 439 bp, Homo sapiens
  misc_feature 24: n = A,T,C or G
gccccccctcgaaatacttctagnaataattaacgcgggtagatgatttctagcaggcaggaagtcctgtgcggtgtcaccatgagcacctccagctgtactagtgccattggaataataaatttgataaggtggtgaaaaaaaaaaaaaaaaaaaaaaaaaaaaaaaaaaaaaaaaaaaaaaaaaaaaaaaaaaaaaaaaaaaaaaaaaaaaaaaaaaaaaaaaattaaaaaaaaattaaaaaaaaaaaaaagcccccccccccccggggggaacccccaatccccccaaaaggaagccaaaaaccccccccccccggccccttttttaaaacccccgaaacggaaaaaccccggcgttcccccaataaaaccccctgaaaaaaaacccccttttccccagtggggaaaaaacaaaaaagcccccccccaacccccct

SEQ ID NO: 54514 - DNA, 595 bp, Homo sapiens
  misc_feature 560: n = A,T,C or G
cgggccccccctcggaagtcttctagaattaattaacgcgggcataatatggagattggggaaaatattatcagaagagatgaaataaatcagcttaactctgcagtctttaccctttaggctgagcatggagtaggcatccactgcccatcagttcctgtctcttggcccagtatgatcttgaactgagaatgatgaagatgaagaagatgatgatgataccaacatttattgagtttttgttatatgccaggtatttcattaagcacctcataggtattattttataatcttacacatccctataaggtaggtaatatcctgttttacagatgaggaaactgaggcacaaactgcccataaaactaataagttgcagtactgcaatgtggatctaggtagtctgatactaaatcttctttcttatgcattgatagagattttagtaggtttcttgctattcgtgctgttctatgtctgagtgaatgctagaaatatataactgggaaaaaatagtgttctaaaacaattatcacgtattttcatcaggtgattatgtntgaaaaagtagaaacagggcagaaaatcgcagcat

SEQ ID NO: 54515 - DNA, 282 bp, Homo sapiens
ccgggccccccctcgaaagtcttctagaattaattaacgcgggacaatgatgaggcattttatataatttataaataggttgttaatgtaaacgtatctactccatggacagtaaagttaataaaaatgtctatttaaaatagaaccaatcaattttaaagtgcttcttattttttatgcagtatgcagtatcaagtaattttaaagtgaactatttttgctttttgattatctattttctggttatacagcaatttttaatttaataaaaaaaaaaaaaaa

SEQ ID NO: 54516 - DNA, 599 bp, Homo sapiens
ccgggccccccctcggggtacttctagaattaattaacgcggggtttcttttttttctgatttattttgcattaaatgaggttttttttttttcctgtacctcactttaaccctttcattatttttagctatgatttatttcatattttgtggtaggattaaaatatccaagcttaaattatcacagtccaccttaaaactttaaattaatattttaccacattacacacaaatgtgaaaatcaatataattcctcctctcttttgtgctatagttatacaatttatttctatatatttataaaaccaagaatacaatgatattattgctttattaaatttaatttctatttaaaaataagaaataagataaaaatctttaaaattagttcaaatatttactatttatagcatctttgttcattttttaatatctgaagtttccatatatataaattccttttagtgtgaagaatgttctttaacatttctcatatttaaagtctgctggggactaattcattgttttcgtttttctaaaactaccacttttaaaggatatttttactagatatagaattctatcaccacatggtctga

SEQ ID NO: 54517 - DNA, 522 bp, Homo sapiens
  misc_feature 456: n = A,T,C or G
cccccctcggaagtcttctagaattaattaacgcgggccattttgattaaggtgtagctttatagtcactgctggtttaatctgttgcctgagacttctacttgcaagcttgattttaaatgaaataagagcacagtaactatttaataaccatgctgaatacataatatttataattatcttaaaccatacacaaaaattaagtttcagatgaattacagacttcaaaatgaaaagtaaactttaaaacctttgaaaagaaaataatgagaatatataccaattttatggtatagaagatttcttaaacatgatataaaaggctcaaaccataaagacaaaactggtaaaatttaactacattaaaactcaattttcttcaaaggatacctaaagatggtgaaaaaacaagtcataaaccgagagaagggattttgcaacagacatataaccaanaaagattagtatccagaatgtgtgaactcctctgattaataagaaaaaacctcaaacccaagataa

SEQ ID NO: 54518 - DNA, 497 bp, Homo sapiens
  misc_feature 11, 483: n = A,T,C or G
cccccctcggnagtcttctagaattaattaacgcgggattttacaccattttataactttattagaatgacataatctgagtgaagtggttgtgccaggcacttactaaacacacagtcaatgagtatgttctctccgaagtttgttagcttagggaattgggaggatgccactgataataatggtgactcttattcagaggaaaactaattcagttttagacatgctagagtttgaggtagccaaaagagtttagtcatatcacttggaagcaaaccaatgtgaaatagtttcaaataagcaaattttaaaaaatgttaaatgcaaagcaaacagtattaaagctttggggacttaatgattgagtctccttacacctacacaagattggctaaatacacatacaactggtgtcactctaccagatttctgttaacattctccagaattaaactgcagaatcagtcatttggatgactggtngtctctattagcag

SEQ ID NO: 54519 - DNA, 535 bp, Homo sapiens
  misc_feature 28: n = A,T,C or G
cgggcccccccctcggggtacttctagnaattaattaacgcgggtacagtaaatacctcagaggttttagcccccacaaaaaaaacttggagattttctagctagcatatctctagcgtttaaccagtgaaattatgtagttttatggggatattcttgagttttcagatgtctgtagtatttttatgtctatagcgcagtggtcctcccaaagaggaagtgtttgttttgctagttaaatcttagtatctcagtgattgcaactgggttcccaagttttaaacaatatgttgaatcagttttttgagattctggcttatctgagtcaagcctacttgtctgctgtttatgaaatctatctcctttcaactggaggtaataaagtatttgctgtttacccttttggcacttcttcatgatttcttggaagtagttgtttcagaaatcaagttggtgcgaagtgttttctcctccccatattcccccacctgccagtattctcaaatatgattgatgaagttaggacacttggata

SEQ ID NO: 54520 - DNA, 613 bp, Homo sapiens
  misc_feature 530, 555, 565: n = A,T,C or G
cgggccccccctcgaaagtcttctagaattaattaacgcgggcagagagatgcacagctattttatttttcctgcaggcatggattttcatggaaacagtccattcacatttatttgagagagctgtgttttgcatgaaaggcttctgttgacattttcaaaaattgagaccctttgcagaaatatcagagaatgacaattatctccttaatgtgtgaagtttagatgtagctccaatctaggttaagatcaaaacaatgtaaagcttataattcaaatgatactagtgaacgtgttggcaattaaaaaaacacttgtgcacacataaggtcacattccctgttttaaatcataggatgtggattcttaatgtaggtgtaaagtcatcaggtgaacatgtaaaaataaatgtttatactttctggcttagtttctctactgcttaaaatggaagagcccactcaaccattccaaggctactttgccttgctttttttcaatactgtaccattataaatgacttttcattntaggtacacacactcacccataatntaaaaaattntattcacatactatgtggatagtagactcaaataggaaaagttaattt

SEQ ID NO: 54521 - DNA, 464 bp, Homo sapiens
  misc_feature 32: n = A,T,C or G
taccgggcccccccctcggagatacttctagnattaattaacgcgggcagcacgggaaacattatatcttataagaagggcaacaaattgtcacaatttgaaaagcccacataagttttctcttttaagagcagaatcttgttaattgcatcccaaacatcacggctcacacacactggaggcctttctttttacgctctgagactaaatgagaggaatagaaaaaaacctgaaatgattgactaaccaattgtcataattactgattaaaactcctcaaggcacattgaaatacttgaaaacttctcatttatgtctattgatgatgttatcctgcacgcgcaattattattatattgttttataaatggatgtacaggatatcacctgaattattaatgaatgcccaggaagtaattgtcttctcatactgctaaaactactgcctatcagagtgcacacac

SEQ ID NO: 54522 - DNA, 615 bp, Homo sapiens
  misc_feature 29, 84: n = A,T,C or G
ccgggcccccccctcggggtacttctagnattaattaacgcggggaactctaacagaaaattttatctatattatcttactatngaaaaatggataagttttcaaaaattagcatgtatgtgtacaattcaagtcacccttaactaaccaaaaagtgtttaaaaagcagtgcagttgtgtcctactggatagttgtaagcatctctttaggcacttcactggttcattgacataatacaaattaaagctataaacacataatgtgctctctgaagatagtctaatcaagcaacgtaaaccaatgcaaaaatgtgactttttggccgcttattcctcccctatgacttaataacgtttttaaaccagttgtccaaggagatttttctggggaagggaatgctttggcattatgaaaggaacattgttcaatcccagaaaggtaaaactgaaaaaagcctgtgcaataaagaaatttgaaaaaaatttctttatggctctgtttaaaaggacacttttgcagtgatatgacagggggaaagtttagttgagtatttttgaacatattgcactctgtttttgtagttcaatcacattaatgcatagaaacacaatttt

SEQ ID NO: 54523 - DNA, 606 bp, Homo sapiens
  misc_feature 38: n = A,T,C or G
ctgggttacccgggccccccctcggaaatacttctagnattaattaacgcggggtggggtgaggtaaagaaatagtgtgcatcgccaactttgatttttgtgcaaaaattgattggtaatgtattcattcaatgaacattttatataatatgtcacactttcacctcattttcagatgaactctgagttttgattgatgggaaattacaaatatttgatatatatttcacttcatttgtttaacagatttatattgaatgaaagattttgtaagctaaatatacacattttaaacttgcttatttcttattgaaacttcagtatggacttttcattcaatctagcttctgccacttgctaactagcaattttgggtaaattatttgacccttgttacatttcttcatctgtaaaacagaggttattatctaccatttattgaatttttcaattgtatcaggcactttgttaagcactttacaagtaatacttataaaatattacttttatgaatgtaacatctattctacattcttaaaggcatattttatgcgttattgagttgttttagaattaaagtatttaaactccaaagataccattatt

SEQ ID NO: 54524 - DNA, 614 bp, Homo sapiens
cccccctcggaagtcttctagaattaattaacgcgggtaaggcctgtggatgacagttatgaccaaagcactgcatacagaggaggcaaatctatatccagtttaagtatctagcctggtaagaagaaaacgttgcctgtttcatgataaaaagcgatccaaagtgatccaatgtaattaatctgcatatatatgtaattaatctggacacatatgtgtataatacacacacaaataaacatgttggagatgtaaggtaaacttacttcatttaaatatagaagcttgttcttctttcaaacaaatatattagtcttagatgttatgtagaagaagaaatgttcctgaaaggaaggtctgtaaaatttggaaattagataaataacactttccgatattcatgacaaacataattcatacatggaatatgtataatgcctccaaaagagcattctcaggtttttttttggtcctaattttctcatcagcagtagcactttctttttaagaagttgcagtgaaaaatgcaaatgtgtcacctagataaagtaacacaaccccaaaccattaagtatcagaatagaaaatgaaggcttctcaagagaatgagcctg

SEQ ID NO: 54525 - DNA, 277 bp, Homo sapiens
cccccctcgaaagtcttctagaattaattaacgcgggctctccttaaagttatcaaaaatccatcttcaggccaaatccatttgtcaatgttcagttcctcctcaacacctgcttcatctgacatttaatctccttaaactctcccctccctcagcctcagcctctgggtgatcagtctttgttttctttttctttttatttgtctcttctccagtaagtcccttaaacttttctgacccttagtatctttacctttaaaataaaaaaaaaaaaaaa

SEQ ID NO: 54526 - DNA, 422 bp, Homo sapiens
cgggcccccccctcgaaagtcttctagaattaattaacgcggggataaccaagtagccattttcctcttaaggtttcctctacaaccccaaggactttcatgattatcctcagggacaggattggaggcattgagcgtgtttattaacaaattgtttttggtaataaaataaatgcttggactcttaaaaaaaaaaaaaaaaaaaaaaaaaaaaaaaaaaaaaaaaaaaaaaaaaaaaaaaaaaaaaaaaaaaaaaaaaaaaaaaaaaaaaaaaatgggggccgcccccctgggggccctcaatttccccttttagggactggaaaaacccccccttatggcccgttattttaaaaaaaacttatggggaaaacccctgctgtccccaaactaaatcaccttgaaaccaatccccctttccc

SEQ ID NO: 54527 - DNA, 296 bp, Homo sapiens
  misc_feature 28, 240, 250: n = A,T,C or G
cgggcccccccctcgaggtacttctagnaattaattaacgcgggagtcaggttcactaagtttaatcacataaagactattggctttttccatgttcttgatccatttattagcctgactttgaggatctatcatcagaggccaccttcttgcattcctgaaaaggaggagaaagacgatgctggtcaagccatgatttgtttctacactacttaatcatgttcacatcacaggtcactntttaaaagtntgccctttattgtaaatatttactttttaaacttatgagaaactat

SEQ ID NO: 54528 - DNA, 574 bp, Homo sapiens
cgggcccccccctcgaaggtacttctagaattaattaacgcgggccacctcaaggcagttatgaaagaagttaacaattgtggggatgggaagtggtagacaagtattccaggaagatgcatcagaaatggaaatatttacttgttaaaaagaaatcaacaacaacaacaaaccctggctgaagtgtaatttgaagctaaggaagagtgtgaaatatgaagctagtaagtaaaaaatagagagggaaagaccttataatttatcctaaggagtagattctatcgtaaggatatcctccaaagcagtctataaggtagtgaaaaatttgaaactgtataaattttccactttagatgtttcataattaaatacaaaattcatggtgggattgtagtggcatattttctttataattttatgttcccttccaaattctctagaataaacatattttacttctagtaatataacacacttttactttaaaaaatagtgtatccaagttcttacaggagaagtaagctaagcaccattgcaatcactttgatctttctactcaaaaaaaaaaaaaaaa

SEQ ID NO: 54529 - DNA, 609 bp, Homo sapiens
  misc_feature 41: n = A,T,C or G
aagactggggtacccgggccccccctcggggatcttctagnattaattaacgcgggggctgctaacagctagcatctgcaattaccctcagtcctgcagattaccctcagacactgtagggagccggaagtatctcggagttttatgtttcacctcgttccacaaccctggatagccaaagacaggctgatgaagagcaccaaagcccagctcctttgtgttgaggcaggaaaaactctgaggtgtgttctttgttctaaagcttcccgtgtgatcaggctgagtgtaggacttcggaaatcatgctctcgcttggcttcttcccattccctgtccttcatcccccactcctttactgttcttttcctaggagccccccactttttttttttttgaaacagagtttcactcttcttgcctgggctggagtgcaatggcacggtctcgaagagccctttcttaacaagtcatttgcatccaaatctttggctcagggcctgcttttgcaagactccacctaagacactcgctgactcttcagatgatgaaaatggcatgcacacttgcagacagctaaggattctgtcttcgtctttctgttgctatagc

SEQ ID NO: 54530 - DNA, 615 bp, Homo sapiens
cccccctcggaagtcttctagaattaattaagcggggcttcttgggaagaaaatttatgctatgaaagaaaaagaatcaggcagataagctggacccttaaaaaattaattataagaaagggtagtagattctgaggacaacgtggtatttgttactcaattttgccttccatgaactcatgtctaaaacctgactgtggcagtaggagaaaatagagttattttgccagaaatgtatttcttcataaatattctcggacttacactgactgagaatgccttctaaatccatcatgtagtcagaggactgaagatgagagccagggataaaatggagaattctgggtcaccttcttttacattttctctgatcttttatctactttataattaaagacagtatattttagtacatggctacatgtgctgtataatcaaacgggcttcaatttaactttagctctgccatttaatagctgcatgatcttgaacatgttatttatcccctctaacccttgcattttttactgataaaatagatgtaacaatattaactatgcaaagcttgctgtgaagattaaatgagttaatgcatatatagtagatagcacaaga

SEQ ID NO: 54531 - DNA, 367 bp, Homo sapiens
cgggccccccctcgaaatacttctagaattaattaacgcgggggcgattggtgggaggaaaggagaaaaggctcatggcagagttattggtatagtggacaaaacaaccgactttgtaatcatgtagatgcatatgctggctgcctttggtcgcgtggtgatcctatgctaggcccttaccctgtctgagccttaacgtccttaactataaaatgatactaacgctctgttttcctcgaacgggtgtaaccaacgtacagaggatagaatggtgaccgccctagacttgtaccccttctaactcctgtaccctgtgaatgtgaccttactggcaaaaaggctttttgcgaatgtaattaaggatgtc

SEQ ID NO: 54532 - DNA, 607 bp, Homo sapiens
cccccctcggaagtcttctagaattaattaacgccgggtctcttacacagctttcaaacccttacctggggataccttggttcctactcttctccaattaccccacttaaaacggcacaaggaaatctctgctgctactcctctcttaactagcaaccctctagaactaaagcgcctcttccagaacagccatccttaggttgttcccacagcagcgattaactttttgtgccttgacagtctgataaaccctacgagcctaatagtttcataaatacataaaacacacactagtacaaaggaaaccaactgtactgaaacaaaacactttaaatgtcacgttctatgacattacaggacaaacaagacttggctgctaatacaataactaccctaattttgaagaaataagaatgcgataactgaaaacatcttccataactgtaatgttgagatatgaaaatatactgaaaatgctaatgtggtggtttttttcggggtttagggggagcaattacactgttaattgaaatactaaacttgggagatagaaaaaaaaatcttcctcaatttcacgcaccgtctcaattaatgcactgactctaga

SEQ ID NO: 54533 - DNA, 586 bp, Homo sapiens
  misc_feature 24, 552: n = A,T,C or G
gccccccctcggggtacttctagnattaattaacgcgggcagcagaaaggagacgtgctgagcaaaagaaaaataccctcttattaaatcatcagatctagtgagaactcactcactatcatgagaacagcaaagaggtaactacccccatgattaaattacctcctaccagttccctcacatgatacgtgaggattaggggcactacaattcaagatgagatttgggtggggacacagccaagccatatcagttagtgacatctgtattctcatattgcatgcataagaaagtgagttattttacagctgaactgggacagctctttgcttatttccagagatgcctaggtgtctgtttttgactcttggccatgatatgggtagtaggctaactaactagctaacaaatggtttatggtgagttctttaaagttcaaaatccctcagtggaatccagggtcaatttgtttattgatagcttccatatgagataattacagatcttgtctctgctgtgtgaccagacacagataaaagactgcaagaaatntcagtttcagctctcatgaaaccaagtttcatct

SEQ ID NO: 54534 - DNA, 382 bp, Homo sapiens
cgggccccccctcgatagtcttctagaattaattaacgcggggacgaaaacatgaatatttgttataagcaaatgaaatggagctgcagctatcactatgtactctgtgggcctttaatacagtagggattcctttatagatatacatagatttaaattgaaaaaaatggtctttgctgtttgagctcagttgtttagttagcctttaaaaaaaaaaaaaatcaccagataacttatcgtaaatgttgtgtgtgtgtgtgtgtctgtatgtatatatataatttttttagtaccctcatctcctgtcaacctgtttgccagattatagactgtatcatacccatggaccttgcataactaatatctagaaaaaaaaaaaaaa

SEQ ID NO: 54535 - DNA, 594 bp, Homo sapiens
  misc_feature 28: n = A,T,C or G
ccgggccccccctcggaagtcttctagnattaattaacgcgggaccaactctggtgtttctctgtatggccctcccattacctggattgtcccttcttttgggatctgtaagtctaattgtattttcagaaatagttatttcctgacctattggcttttccatacctaaatagtaataaaacctatactttaaaacacgtacagacacacatatgtacattaatggctaacaaaatagttacctttccatttatagtatctagtaaaagatgaacctgatttcaaatcccacattctaattttggtttaattcttttgggaaaatgtaggactcaatttcattcattgttataaaaataggacaatagaaacttgcaggtaattctaagaaaaaatgcatttatgtatgcgtgtgtgtatgtgtgtgtttagaaggaggaagaaaaagaaacttcttataaagtatagctacattaaagtcagtgtgtaaagaagaaaaccttgcattatcaatgctacccttgaaaattacttaggaagcagcctaatgattttctatgcgccatttttcagtgagtccagtaaaacaatctt

SEQ ID NO: 54536 - DNA, 589 bp, Homo sapiens
  misc_feature 558: n = A,T,C or G
ccgggccccccctcgaaagtcttctagaattaattaacgcgggctagctatcaatgtgatatccctgaacgcggattcgggaagagatgtgcaagatcggctgtcatgaccggcaaacacactgctccatcccttagggaggaggaacggaagacagtccgctctttcaatgctgtggctatcttggagagctgctgcttccggaggcactcactgtgtgacattggcaagtcacttcacctctctgggcctttgtttcctcctctacaacagataacgtggaagatcccctgtacctctaacattttaaagttctagaaggcattgcctcctgttttttccgacatccaaatgccttgaagcgcctttctggaaaaccaagttagcactgtgctgcatccaaaagtgcctccaatttcatctcctgagcataaggtttggaaaggagtgacttactcccttttgcctctttaaatgtgtagccaatggggcatcatacattttttacacttcttttgctagatgtgagatccaggaaggaaagcatggatgttccanggctttcttgttctcctggggtgggaggctg

SEQ ID NO: 54537 - DNA, 604 bp, Homo sapiens
ccccccctcgtacgtccttataaaataataccgcgggctaaaatgatgatggttgcacagtgtggtgattgtacttaatgccattaaattgaccactcataaagggtaaatatggtaaatttcatgttttatcataaaaaatatttaaataaaccctgtctcttggctcccaattctcccctccctcctagtatggggtctttgacttttttgtaaaggtaaaccctacctgcactataatttttgccctattctaaactttttttaaaattatagggctattttttatatcaaaatttaaatccacccctaaccagggttttaaaaaaaataaattctaaaccttaaaaaatttaaatctttaatttttctttaacctatataaccatgtcatcagctaaagagaggttttattggttatgttaaatctgattattccagtcttcttgccttggctaaaatctctgagtcagggtggttaaaaaaagatgatttaaggtatccatgtctgttctatgatttaaactgaaataagccctgccccactaaaaataataattgggggtagtggggggaaaattaagtttatgtcttaaattccctt

SEQ ID NO: 54538 - DNA, 515 bp, Homo sapiens
  misc_feature 10: n = A,T,C or G
cccccctcgngggtacttctagaattaattaacgcgggattgtcagtttgtttccagactccctgttggagatgtggaaataaaaaccacctaaacaagaaaaaaaaaaaaaaaaaaaaaaaaaaaaaaaaaaaaaaaaaaaaaaaaaaaaaaaaaaaaaaaaaaaaaaaaaaaaaaaaaaaaaaaaaaaaaaaaaaaaaaaaaaaaaaaaaaaaaaaaaaagaacaaaaaaaaaaaaaaaacccgcgcccccccccggggggggccccttttccccccttttgggggggtttttccccccccccgggggggggttttttaaagcgggggggggggaaaacccggggggccccccccttttttcccccggggacaattccccttttggcccggggggtttaaaaaaaaaagcccccccccatccccctttcccaaagggggcccccccggggggggttggggaaatgggccgctctttttttttgtaaaaacccccccttatttttttttaaaac

SEQ ID NO: 54539 - DNA, 415 bp, Homo sapiens
gccccccctcgaaatacttctagaattaattaacgcgggggaggggggagggctcgcctgaaaaccatccatctgcggaaatgacagcggagaaggtctttatgtgcctttttgtattcgtaaaaaaggaacacccggaaagactgaaagaatacattttcatatctggatttttacaaataaagatggctattataactggatcataaaaaacacctacaaaactttctggaacatgataagtatcacctacataaaaatctccagtcagttccatatgtcagcttttcatttacaatcattttcttcttttctcctacctcagggggcacgcactctctcctctcaaccttcttgttttccccccctttcactgctgccttttaaactttaatgtagggaaaacccacttgtt

SEQ ID NO: 54540 - DNA, 604 bp, Homo sapiens
cgggccccccctcgagagtcttctagaattaattaacgcgggaccgcacccagccacttgagccctttctttaatcaatcaatcaatcaacctctgcttctgcctcctctctatctctgtctctcacacacccacaaacatacaaatatgattgtaacaatttcacagaaaatagctttaaatttaatagtggaccaggaaaatggcaagaaagacatcaaacagactcttcttcaaatatactgttagttttgagcaaaaacagtgctatggctgcataaaatgggttatcagcaggctcctccaccctctctccttatgacccatctagaaaagactcattttccaagacctattcaaatcctcacttacctctgacatctttgactatcctatcagtttctttctctcgtacgttttctaagtacttattaactatatgattgttagatattcagctgtattttaactttatcattttgttactacaattcatatctattaaaatttgttgcatgcctataatctgtgaggcacaacacacacattattctgattttacaagcctccatcaaggtaagcagcatgacaaacattttgctgc

SEQ ID NO: 54541 - DNA, 421 bp, Homo sapiens
ccgggccccccctcggaatacttctagaattaattaacgcggggtggaagatgggtagtcttaaattaggaacattaattattttataaaatcgtatgtagcaattgcatttaaaattaagagatcctaatttgacagccaacagaatgacaaactatttgatttaatgtcagcagtgttcatcttctatctggtgattatgtgacatttatcagtctttgttaacttagattacatttagaactttttttgttgttgttactgtcaaaatgtggttaaccctgagatccattgaaacaaaaggcctgagtgacttgactgtgggtttaacttgggggagggggtgcatgataacagaaatgtgagtgctcatcaccactttttctttggaatgtcttcttataacaaaaaaaaaaaaaaa

SEQ ID NO: 54542 - DNA, 604 bp, Homo sapiens
  misc_feature 502: n = A,T,C or G
cgggccccccctcggaagtcttctagaattaattaacgcgggggtgggggggcttgtgaacagccttgctaggaaaagggaaaggaactttaggtctcagctggcaatcaggaaacttcagcgtctcaggcgtctttctgcactaaccataggtgaaaatatctgctggcaccagattctaacagtatctcatagatcggaatttcacaaacctgccacaattgacatttggggctggatacttctattatgggcagtgtcttatatattgtaggatgctttttgcagcatctcttgtcctcatctattagaaataaataggccagtcacagtggctcatgcttgtaatcccagcactttgggagactgaggtgggaggatcgtttgagcctaggagcccaaccagcctgggcaacatagcaagaccccattctctacaaaaaataagaaaaaagaatttgccgggcatgatggcacattgcctgtagtcccagctactcanaaggctgaggcggcagggggtggggacatggaaggtcgaggctgcaaagagctgtgatagtgccactgcattctggcctgagcaacagagcgagactgtctc

SEQ ID NO: 54543 - DNA, 575 bp, Homo sapiens
ccgggccccccctcggaagtcttctagaattaattaacgcgggcttatgagttaaagccataatgaaaagacatgaattcgtttttgcaggcaataagcattttgttggcaaatagtattcctgaatcagtattttcctcagaatatagacttgtttctgctaataatgtttctatttaatggacagaagatgacaactaaacaagaaagtccaattatttttgtaatgaattttaatatctattggcacatactttttgttttgttttgttctgagggattagaaactgagtgagtgacctttaaattgcggataaccttttttattctcagtgtcatggaaaatgaaaaatttttaagcaagcatagcttacaatgtagttttgaacaatggattaataaacgcaggatcatctccaggaggtaatactgttacctggcacataccacaataagggaaaagacctaggagctgacacaaattctctcaagcctctgtaatgtacttgaaaataacactggggcttattgagcaaattggagaactaatcaatcaaaaagcagactcaccaata

SEQ ID NO: 54544 - DNA, 466 bp, Homo sapiens
cccccctcgaaagtcttctagaattaattaacgcgggtagatgatttctagcaggcaggaagtcctgtgcggtgtcaccatgagcacctccagctgtactagtgccattggaataataaatttgataaggtggtgaaaaaaaaaaaaaaaaaaaaaaaaaaaaaaaaaaaaaaaaaaaaaaaaaaaaaaaaaaaaaaaaaaaaaaaaaaaaaaaaaaaaaacaaaaaaaaaaaaaaaaaaaaaaaaccccaaaaaaccaaaaaaaaaaaaaaaacccccccccccccggggggacccccccctcccccttaaggggggattaaatccccccccccccggcccgtttttaaccaacgagggcccgggaaaaaccccctgccacccccaattaaaccctttaagccaaatccccttttttcccgttggttttaaaaaaaaaaacccccccaccttcccccttccaaaa

SEQ ID NO: 54545 - DNA, 452 bp, Homo sapiens
ccgggccccccctcgaaagtcttctagaattaattaacgcgggccaggtgaacagtgtttgctactcagtgcagatgaaccatccattagctatgctactaagccacctaatccagattactcgaacctgattctacatgctcattgtatgtgtattacaagcatctgaacactctctcttgctgcactgatatgcatatagtgactttgaccacacatggtataccaaactctactatttttaaactgtacactcaacttgtagtagcgtgtaccctggtccaatgcataaattatagagttaacagtacagtggaggaatatataactttactatttactgaaccctcttgctataaactgtgactccacatctcttgcatatcttttaccgctctgtataagctaaacctgtaatcagctgtatcacaatacctgcggaaaatcttcag

SEQ ID NO: 54546 - DNA, 596 bp, Homo sapiens
  misc_feature 542: n = A,T,C or G
ccgggccccccctcgaaagtcttctagaattaattaacgcggggggatgaaaattttttttttaccaaaacagaactatagtaaaattaaaaattttaacaataaaatacaaaataaccgaagacattagaaactacatatataacatacaaaaatatctattcaggatatgtaaacactattaatcaataaaattggccaaataaccaacagttttaatgaactagttggatctttatgtatcaatacggataaatctgaagagaaaactgctgattagaaagaacatctcatgaaataattgtgtatactacaattctattcatgaaaattaagctaaaatacagaacttagaatatattttttatgggtagatatataataaaagtacaaacatatggactggctataataaccatatcagttacctctagaaaaggaaggaaatggaactggtgagtgtaacaggtgtatgaatataatctgtaaggtttcatttctttaaaaatttcaagggtcgcacatggtggctcatgcctganatcccaccactttgggaggccgagttcaagagatcgataccatcctggctaaca

SEQ ID NO: 54547 - DNA, 354 bp, Homo sapiens
  misc_feature 15: n = A,T,C or G
gggccccccctcganaatacttctagaattaattaacgcgggtgccatgatgaaaagaaccttagaaaatattgaaataagctcaaaacttaaaaaaaaaaaataccagaaataaaagctagtaaaggtgagaggtgtggggcttttggaacatagagcataataaatcagaataaaaagtaaaaataagaaagagaaaaaagtggccctgattaaattataaaattaagcatatcttgaattctaacgagccaaacaaaaattctactaggccagtataatagggcctgcagagcctgtcatgggttcagggttttcccataaagataggtgtacctcagatactactccagc

SEQ ID NO: 54548 - DNA, 597 bp, Homo sapiens
  misc_feature 14, 25: n = A,T,C or G
ggccccccctcganagtcttctagnattaattaacgcggggaatatagcagggaggcctgctgaagtcagagagggtgatctttaggaaaggctttcctgaagaagtggcacttgtgaaatgatggctgaagcatgaatagaagtttcctaggaaggctgggtgtgtggtgtgtggtgtggtgtgtgtggtgtggtgtggtgtgtgtatgtgcgctcatgtgtgctttccatactttatcatgtttactgctgccagcaccctcaggaagtagttatgattaatttccattttacaatatagagaaactgaggaccagagaagtccaagtgccttcctcaagttcctacagctagcaggtaggacagccaggattttaacacatggatccaaaactcacacccttagccacccggctgtgctgcattgcatataataggcacttcaacgattattgaggtaatacagggtttcagaatcaactttgccggctgggcacggcagctcactcctgtaatcccagcactttgggaggccgaggcgggcggatcacttgaggtcaggagttcaagaccagcctggctaacatggtgaaata

SEQ ID NO: 54549 - DNA, 611 bp, Homo sapiens
  misc_feature 26, 479, 570: n = A,T,C or G
ggccccccctcggaaatacttctagnattaattaacgcgggagaaaagtctgctgactactgagccagacctccattacctccatccctgttggattatttaaagaaagcctcagacagtaagggctttttttaaaagaataaaatgacttggtttgcgcttggaagcaggggaagcattcagatgagcggtttctgcattaaccctgcctatcacgcatctcgtgtcctgtgtggctggcgagccccccttggaaggttctggtgcttcagctggctcctgcagagtccaccccgcctcgtggtgggaatgcagagccctttgctttccttcttgccgcctgcttcctgttcctggggacccgctgggcctttggtctgcatcccctggccaggtccctcagggttgatgcgtggagaaggactttgagcagtggtgggcagcagtggcctcctggccagctcacactcttgtcctgngaggggcagcctgatctcacctccacctagtaccttggggactgaggaccttttggcttctctggagcctgcaagcctcttcccatgtgtncagctgctcttcctgctacaaaggggactgctcacagtggc

SEQ ID NO: 54550 - DNA, 372 bp, Homo sapiens
ccgggccccccctcggaagtcttctagaattaattaacgcggggttttttaatgatgcagaaattaagaaatcacctgttagttctactcaagagattgacagtgggaaaaacagccaggcatccgaagatactgtgacatcccgttctctgaacagtgagtctgaaacacgtgagagaaggttagaaaataccatgaaagaccaacaggacctcacaagaacgggcatttcaagaaaagaaccccttctcaaattggaaaacaaaaagatagaaaatccagtgctggaaaatacttctgtgataagcttacttggtgatacctctattcttgatgacctttttaaaagtcatgggaacagtcccacacaac

SEQ ID NO: 54551 - DNA, 613 bp, Homo sapiens
  misc_feature 13, 26: n = A,T,C or G
ggccccccctcgngaatacttctagnattaattaacgcggggctgctggggccttgttattctgggcggtggccaccgtttctcctgaaagtcctggttggagagggtttctaacagatcttcagctcggtgccaaggtaaagaagataatcacagctggcttatcaatattgctgtttgatgcgatcctgaccagtgcaaccacgggatgatgtacttcccttctttgtgaatggaaccaaccagtatattctgagacaaagaagagaacttggaactaccaccagtcactgtaaagaaaccatcctgtggtaccagcaaacagcaaaggatgcctgcccttccagccaaagatgaggacctgttccctgcctcaagggttgccctgtgaactggtagtgtcactcagcagcgctcatctctgccccacccccacaccttgctggatcctcccaagcgactctgaggaccccggaaagtgagaggcaaaatggagctgtgtgtggtccaggtaccttcctcagctctgttggaggtgtcctctctcctgagcctggtaagcagagtgccctgaagaaagcgctgagagacagatgataacaaaggctcaaga

SEQ ID NO: 54552 - DNA, 528 bp, Homo sapiens
  misc_feature 28, 389, 463, 502: n = A,T,C or G
cgggcccccccctcggggtacttctagnaattaattaacgcgggaatctttttctttttatccataaattcaaaatctgtgaagaaaacggttatattttaaatgtagttgtacaagaattttatgacattttatttttattttgtaggtagtttccttttcttctatctggtaactattcagttagctgagattgaaagagtgctctgcgctagcaaggtcatgaccatatgtgtgatatcatgggcgtgctgggctgactccatctgttctgtggtcatagattgtgctgcttacttctgccagtggattaaacagtgggccactgggcaaagaagtgctggagctgggctaggcccagggtaaggcaagtgaggcacgtaccttgngtgcaaattttaagggacccccaaaaagtaatcaacataaataatattttatgcaatttttttaaaaaaccaanattaatgcagaaattcatgatgtacacaatgctaaaatnttaggtaaagacaggatcagcactac

SEQ ID NO: 54553 - DNA, 338 bp, Homo sapiens
gccccccctgcgaaatacttctagaattaattaacgcgggtagatgatttctagcaggcaggaagtcctgtgcggtgtcaccatgagcacctccagctgtactagtgccattggaataataaatttgataaggtggaaaaaaaaaaaaaaaaaaaaaaaaaaaaaaaaaaaaaaaaaaaaaaaaaaaaaaaaaaaaaaaaaaaaaaaaaaaaaaaaaaaaaaaaaaaaacccgcccccccccccggggaacccccaatcccccctataggaagtcaaataacccccccccactgcccctcttttaacaacttcgaaactggaaaaaccctgccttacc

SEQ ID NO: 54554 - DNA, 606 bp, Homo sapiens
cccccctcgaaagtcttctagaattaattaacgcgggcagcacctgccccagcagcgccagctgagccccggaagctgggaaggcttaagctgactcttctgctgcacatagcaaaaaatggtcatttctgtagttgcagctccagatctacaataatcaatctatatccatattttatggggtttttttgagacaaagtcttgctctgttactcaggctggagtgcagtggcattatcatcattcacttgtagccttgacctccctggctcaggtgatcctgtcacctcagccttccaagtagctgagaccacaggcatgcaccactaagcctggctaatttttcaatttttatttttcgtagagacagggtctccctgggttgcccaaactggtcttgaattcctgggctcaagcaatcctcctgtcccggcaccccgaagtgttgggactacaggcatgagccactgtgcacagccctttttgtttttgtttttgtttttgtttttttttaaaggtaatttcccagtggaatcctcgagatttcttcatgtttttggaaaaatgagttacattttagattgttttcctttttggaatttaatg

SEQ ID NO: 54555 - DNA, 411 bp, Homo sapiens
acttctcgaattaattaacgcgggcttagtggacattcctatgatctaattatgaagcattcacaactggataattaataaattaaatctcttctaagctacacattttttactgaacataggaaatcatttttgggggttaatttggtagattaaacattgcaagaaggtgttaacatttcgttttcctctttcttgcatttcttttattccttcatccatccattcatttatttgtctcaccattcatcaatctagctcctagtcaacccatccattcatcattgatctgtctactcactaccctatattctattatccataaattcctccacttacttactcatacatctatctacttatctaactttccacccattcatctctccctccatatacccatccatcatg

SEQ ID NO: 54556 - DNA, 542 bp, Homo sapiens
  misc_feature 35: n = A,T,C or G
attaattaattatatgctttgaaataccataatangaaagtattttagtgccatgggacttatagaaaaaaaatgaataagaatttgccatcatttttctaataatgtgtatgtgtttattttgagatgtgtatgtgtatgtgtttctaataatgtgtatgtgtttattttgagatgaatagttgcataaacataaaaatttgaataacacacaaaggtataaaatgaaaaataaaaatctccctatcttttctacctcctttgtcagagataatcattttagaactttttttcctatttttaattgtctcatcattatgccagttttttatataatatactaaactttaaccttcagtaacctaatatctccccattgtgaaaaatagaaggatttaacttttaatactgatcctaccttcttccttttattttttggttgcctttatgattaaacttatagctgtttaacagttaactttagagtgttcagacattgtctctaaacttgccactttataagttgtaaaaaaaaaaaaaaa

SEQ ID NO: 54557 - DNA, 624 bp, Homo sapiens
  misc_feature 17, 28: n = A,T,C or G
cgggcccccccctcggnagtcttctagnattaattaacgcggggaccttcctagtaaggaataattttattttattggaaaaacaccaatatcatgaccattaatcataatggaacatcatttagaagactggagattgatatgtttttattactcagaaatttgagggatgtgaattaaacatagcatcattcatcaaatcaaattggtaattcttagcttttgtaaattgatggttcagttccattcttaagagcatattttctagagtagcctcattcttttattctttgtttttgcagttgaaattttattaaacaatagtgacttttggtttcattcatttggaaaccttgatataatcttgtttaaaaaatatagttttatttttttataattatattttgagaaaatagtcagcttttctctcttagtataatgcctttcataatcctttaacatgcctattaacagatacgaaaaccggtgaggtccaaacattgtggtgtgtgcaaccgctgtatagcaaaaaaaaaaaaaaaagcggccgcttttttttttttttcgagaaaagcaaaacttttaatagttttacaaaaataatcctctttatgaacatgctga

SEQ ID NO: 54558 - DNA, 564 bp, Homo sapiens
acttctagcaattaattaacgcgggcagaagatagaggttgttttcgtttcttttctttttaaaaaaaaaaaatttatttgaccgacatggccggaccagttctttctttgttgtttgtttaaactaccttccactggtgttttacatagtgcaaaaaaaaagagggtggggggagttgtctctcttttctttaaatgtgtattcattgatagcagaagcttgtacctgctgtgtttagcagtttcagcatgaagagttctggatatgaactgattcatagagccaagtggctttaaattctgtgagcttttctggtttctcactagctgtcttgaatagtgaaacctgtattgatggccactagtaaaccaagatgcttatttaacaggtggaatattctttatatgaaatttcagctaaagacactttctggacctggtctgaaaggtcatttgtcaaaaaagcttagggatattctgtgaaatggtgagtggtctcctggaaaggtctcattgtatttgaacaatagtcttccctctaaattacaacaccctttggttttg

SEQ ID NO: 54559 - DNA, 488 bp, Homo sapiens
cgggccccccctcggaagtcttctagaattaattaacgcggggggacccggaaggcggaggaaaggggccggggacctgtgcgagttttgttaacactcctccctcttgttgaggacctggatagaactgtttgtggagaccattgcaaaagatgcctactgttgcgctcagcagggaaaaaggaaaacccttcagaggagagacttggataatgcaatagaagctgtggatgaatttgcttttctggaaggaaataaccaggaatgcaaagagcttatcacctcattatttacaacagtgaaaatggaaaaagtaagcctaaatcgggtgatagttaatcaaattatagtagacacctctagacatattttgaaaatataaaaattattatacagaatttttaatgacaacagaaaaatgttaattttaacgaaaaaaacaaaactatagtgtgtttctgaaatgtatatataaaaagtgttgcatc

SEQ ID NO: 54560 - DNA, 559 bp, Homo sapiens
  misc_feature 25, 38: n = A,T,C or G
ctggggtaccgggcccccccctcgngggtacttctagnattaattaacgcgggctttctttaattttgtaattctttactgtggaatagctcagaatgtcagttctgttttaagtaacagaattgataactgagcaaggaaacgtaatttggattataaaattcttgctttaataaaaattccttaaacagtgaaaaaaaaaaaaaaaaaaaaaaaaaaaaaaaaaaaaaaaaaaaaaaaaaaaaaaaaaaaaaaaaaaaaaaaaaaaaaaaaaaagaaaaaaaaaaaaaagggggccccccccgggggggacccccaattccccttatagggagtgttttaaccccccctcatgggccgtgttttaaaaacgtggggatgggaaaaacccgggggtacccaaattaaatcgcttggaaaaaaatccccttttccccagtggggtaaataccaaaaaggccccccccgatcccctttccaaaaattggcccaccctaaagggcaaaggaaaattgaaacctttattttttggtaaaaatccgggtaaaattttggtaaa

SEQ ID NO: 54561 - DNA, 548 bp, Homo sapiens
ccgggccccccctcggaagtcttctagaattaattaacgcgggcacgtgccttggaagaatttagtaaaccttcaatagatggcctaagatactaacaggggccatctcattaagctacacagttatttataaatgaaagtataatctagaacttacatgtcaaagtcttccactagaaagatggcaatatttgactaaaactgcaaagtttgtcccagttgacaaaactctaatcaagcccctgcccttctcattctgtttttccttttaaactttttcttatattttaatttttcatttgacaaatgcatatttcctctttataccatgcttccaagtgtcactctgatacataccttcaatgagcagacacaggattgtggagtttgttgtggacactcatcccatgaatagggagactccgataacctgaacagacggctctagaaaagaaaggaaactttcttttccttccatacagagcttccccccattatttcagtgtacacaaaccaacatcagttctttaacacaaaaaaaaaaaaaa

SEQ ID NO: 54562 - DNA, 612 bp, Homo sapiens
  misc_feature 555: n = A,T,C or G
cccccctcgagagtcttctagaattaattaacgcgggagtgactaagaacagaggccggaaggtagagtagttgagagtgggtactcctgagcctgaggctggcttcgaatcgtgttccaccacttcctagttggctagtgacaactgaagctctcagtgtgatcgtttttccatctgtaagatgaggattattgcagtaccaaactcataggattgaaagcattgaaggagctcataatatatttagaagattgcctagcgtgcagtaagcattgagatgttagctgctattattattattatagctatgaaaatgtagtttataagatttttattgaacatgaaaatgatcataaagttaaataagaagcaacatattatcagtatattctgagttacgtaaaacaatgtacataaaaggaaggaaatacttcagaatgttcccaattatctctgggtggggggcctgtgagtaatttttattctttcttttatgttgtttgcaagttttctatacagaacttgtgtcactttcataactagaggaaaatatntatatctacctgaaatagatatttgaaatttctaagggcccaaaaaaaaaaaaaaag

SEQ ID NO: 54563 - DNA, 394 bp, Homo sapiens
gggtccccccctcggaagtcttctagaattaattaacgcggggaggaccccaccactgccatctgcctacttgccatgtggccagggcttaggtttctctgtgcatgcccacctcgcagaatttctgataattaaataaattaggacatgcacacactgagcccgagacagtgttttaaagccttcaataaattttggccagttgtcctattagtattgaaatacttaatttattattattatttttttagatatgggtcttgctgtgttatccaggtttgtctcgaactcctggcctcaggtgatcctcacatgttggccttccagagtacttggattagaggcgtgagccactattctcagctttcatttcttaaatacaaaaaaaaaaaaa

SEQ ID NO: 54564 - DNA, 624 bp, Homo sapiens
  misc_feature 561: n = A,T,C or G
cgggccccccctcgaaagtcttctagaattaattaacgcggggggctatgaaagtaaacaactattaactcttcttttaaaaaatatgtataaactgtatttaattgaatgagcaataaaatattaagaaaatgggatacataagtctgcgtgggaaacactgatgtcagttaagtatgtgggttgaaataaaaatatgataactttagtctgactctaaaagtaaatgtgtataaatacttaaacattcatagcaagaagtttaaagtgatttgatttttattgaatttgatgaaggtattacattctggggtgtttttgaaaaagtgaaagagaaccagtaaaagatcttatcagttaacttttactatgtaacaaaccaccccacaacttactgagccaaaacaaccactatttatttagcttatgagtctgtgggtgagcaatttggattgtgctcagcgggccagttcttttgttcacatctggcctcatgaatgcatctgagttcaactgccaggtgagctggggaactaaatatttgaggatggcttctgctangacagctcctctttgctcatgtggtctccatgtccagtagatagtcgatgctttttatatgcc

SEQ ID NO: 54565 - DNA, 541 bp, Homo sapiens
cggggccccccctcgaaagtcttctagaattaattaacgcggggtgggggctggggggggtgccgccgaccgttccgctcttccggccaggtgcttttctgtcaatttctatggaatgcaaaaggaggtttttgttttattttgttttttgtaaagcttaagaaaaaaatctacatcttatacttgagcctccatacttaaaaaaagaaaagaaaagaaatcaataaaaagaaactggggcgcagttaaaaaaaaaaaaaaaaaaaaaaaaaaaaaaaaaaaaaaaaaaaaaaaaaaaaaaaaaaaaaaaaaaaaaaaaaaaaaaaaaaaaaaaaaaacccaaaaaaaaaaaaagggggccccccccggggggggcccccaattccccctttaggggatttttttacccccccctattggccgtttttttaaaacgttgggacgggaaaaacccggggtttccccaaattaattcctttgaaaacaatccccttttcccgagttgggttaataacaaaaagccccccccccaaaccccttt

SEQ ID NO: 54566 - DNA, 600 bp, Homo sapiens
cccccctcgagaagtcttctagaattaattaacgcgggccatgtattctcattgttcaattcccacctataagcgagaacaggcggtgtttggtttttggtccttgtgatagtttgctgagaatgatggtttccagagagtttcttaaaattttttttcaaaggtagaaattgaaaaggaagaaataattgtcttgtttgttaaatggcttacccttctacatagaaaatcccaaggattgtaaaataacctcctaaaactcatgagtaggtttgccagtgataaataataaaaaaaaatcagcatataaataacaataatattcatatatactgtcaatagatatttggaactaaaattaacaaaatgtgtataatacattaacaaatcaaatacttagaaaaaacagaacatttgcaggatgtatatgtggaaaactaaaatattatggaattaaaattcaaagaagatttaaataactggagacagacagtgtctatggattgaaaactcaacataattaagattctaatttcccttatgtttagatgtagtgcaatttcaatcaaaacacagtagggtaattatagttaacattaa

SEQ ID NO: 54567 - DNA, 523 bp, Homo sapiens
  misc_feature 421, 422, 423: n = A,T,C or G
cttctagaattaattaacgcgggtatgtattttaaagatgcatgtggcattctagcaattacacagtctcagtgtgatataagtgtaaattagtcttaccagattctgtatttaaaattgtagtgtaaaactatatacattttaagggtgaatcctactgttagagaaaaataattgcatcaattttcaataaactttgacaaatatggaattaatctaagttaactactaagaccctaaacttaagtacctgagaacttagatatttacaaggtaatggttattaatcagaaagcctaaaacttataaaaatatcattcagtattagtgttcttatagtattttctagtttcaatttttagacaaaaattttggtaacataatttggaaaataaaaatgatgaagtaattaaatgtcctnnnaaaaaaaaaaaaaaaaaaaaaaaaaaaaaaaaaaaaaaaaaaaaaaaaaaaaaacccccaaaaaaaaaaaaaagcggccccccccgggggggacccccat

SEQ ID NO: 54568 - DNA, 617 bp, Homo sapiens
  misc_feature 9: n = A,T,C or G
cccccctcngaaagtcttctagaattaattaacgcgggcttcctaccactgcatattagcttatgttgacaaaataagtaaggcatttttgaattggaaatttgcaaactcccaaaaccgtttgatcagagacttatgatgtgtccaggccttggactgcacatttgccttaacccctttcctgctttggtccagaattttgtgtttcatagcaagtggctagcgctgacttgcagatttggcagtgcagtgctttgtagaagtcctaaataaaacaattggggtttcattttttcaccttcaatttcacagtagcacacattggctcacccacacattcttaattattgcctggtatataattgtttcaagtacgtgtatgtgagtgtgtatgtgtacgtgtgttcgcatgttagtatatgtgtgtctaaaattcccatgacgccactttggtggcatggtccacttcttaatccactctgatttgctcgcagtagctaagaggaatagcagtattaggagcatggatgctgaaaccaggcattgatgctctccatttgggtcctgattctactgtttgccaggtttggaaggttattcatcttcagttttcccat

SEQ ID NO: 54569 - DNA, 353 bp, Homo sapiens
ccgcggggaaaaaagaaagccacaaaggggaagtcacctactcttaacctgttctaatatgaactatcttatttatcaccaaggggatggccctacccttccatgagggccccccccccattatttatttacctcctgcctggcctaacatcctatttggaaattcacttttcaacttgaaattggaaggggacaaacggccaacccacttaggggatttttcttgggacaaataaggaaaactattttggggacaaacgcagagcacattttactgagggacccctgccctggtaggaaaaaaaagaggtaagaaaaaagttgcaaacacaacctggtctacctggctgatt

SEQ ID NO: 54570 - DNA, 555 bp, Homo sapiens
  misc_feature 25: n = A,T,C or G
gccccccctcggaggtacttctagnattaattaacgcgggatttcagtcccacatcattgtcctggaatcaatgcaaaaacagtctgcttgcctcatttgtcactctgaatcaaagtcattgccaagccaagcaatagctgcataataataattgcaaacatttatatagtactattccagctactctgtaggagttttgtttatattagctcacttaatcctcaaacaagcctatgaagcgagtgagaaggtatgattactatgatcttcctcattttgtagatgaaactgactgtggagagatcaagcaatttgcccaaagtgacaacactagtaaactctagagctggaagtcaaattcagtctagcaccggaggccattctcttaaccactctattcttcctctgctctgctgctagttgacatcttttaagagatgccaggaagagaaataccctcatgagttgatgaaggccagttagctagcagtgcattcacacagcattgtcatttaactgcatgatttacccggttacctcaaaaaaaaaaaaaa

SEQ ID NO: 54571 - DNA, 581 bp, Homo sapiens
  misc_feature 23: n = A,T,C or G
ccccccctcggaagtcttctagnattaattaacgcggggacacaaaacctggcgtcgctcaaatgtagcaccgtcgtctgcgtgatctgcttggagaagcccaaataccgctgtccagcctgccgcgtgccctactgctcggtagtctgcttccggaagcacaaagaacagtgcaaccctgaaactcgtcctgttgagaaaaaaataagatcagctcttcctaccaaaaccgtaaagcctgtggaaaacaaaggtgggttggttgacttcaaacaaatctacaagggacttcacatagaataagtcgaaggaaaaggggagagtggggctggtcagggaatccagaacaatagcttcattgggaaggaacagcttccttagccttgagcatcaggagtggggccatgtcatcatgggtgatattgaggcaacagcctgaaagcagtattcaggagaagaaaaatgggcagaagacagagatgagaaaggccatggctgtggtttggggggtttgcggtgggccctgctggcaggagccttttctagccatagctgctggtctcctccatgaatctggctgg

SEQ ID NO: 54572 - DNA, 442 bp, Homo sapiens
  misc_feature 39: n = A,T,C or G
actgggttacccgggccccccctcggaaatacttctagnattaattaacgcgggggaaaaggaaggcggcctagtaggcacctggggcccgtaagcgctgctgtgtgcctaggcagcaccgccctacccactgagggccaggcacgcaggtcctagtgccactgtgcgtgtgctacgtagagccagcacttcctccatgaatgacgccacacgcctgaaagggggacagccacaccctcaaggggaaaaggcctcttgaactccccacaatcagtgtgtgccagcagccctgggaggagtgatctgtgtgtggcaagtaacccagcgtgccactataacaaagaagcctgggcattgtgaccacaacttccattttttttttttttttttctttcctgagacagggtcccgctctgtcacccaggctcaaaaaaaaaaaaaa

SEQ ID NO: 54573 - DNA, 599 bp, Homo sapiens
  misc_feature 499: n = A,T,C or G
cgggccccccctcgaaagtcttctagaattaattaacgcggggggtgctccagattgtcagtccttcagattcaagctgaattacatgactagctttcctggttctccagcttgcaaatgtcagaatgcaggccttcccttggcctccattatcatgtgagctgattcctgaaataaatctcatatatgtatatatactctttctctctcctctctctctcctctctctgcatgctctctctcattctgtgtgtgtgtgtgtgtgtgtgtgtgtgtgtgtgtgttctgtttttctggagatccctggctaatacaccttgcattagcaataaactttccagcattccaaagtgatcccacattcatcatattttaaactcacctggggtagtaaaagtgtctttcttacatctggcagatgaagagactgaggcctcaagaaattaagtgacttgcataatgtcacatggactgtgacagaatcagggtaagaactcangcacctattgattgcattggtgtgagctcaaataataagattcttccagcagggatggtccactgggtgacctcacgaccataaactgcacatactcatg

SEQ ID NO: 54574 - DNA, 615 bp, Homo sapiens
  misc_feature 32: n = A,T,C or G
taccgggcccccccctcggaaatacttctagnattaattaacgcgggtatccaacaattcagttaaattctgccaccatgcaaaatagtgggatcccacaagttaaggggtcccacaaggctgccctcacttcagatgcaactcacaagtcccaggggcaacccatatgtctgaaacaaccagctatagatttggggattcccctaaactcatcaggttacttaattcactagaatgactcagaatttaaaaaaaaaaaaaaaacactttatttactatatgcaactcaggaacagaccaatggaacagatgcatagggcaaggtatgggaagagggagtacagagcttccacttgactgttcctcagttttctcttttataataaactggtaatagtaaataaagcactttcctgagtttcgtgagatgctctagcaaatcccatttagagaccaattatgacgtctttttttctaacaccacttctgacaccaaatgtctgagggtttccaaaccaattcttcaacatcaagcgggtatccaacaattcagttaaattctgccaccatgcaaaattagtgggatcccacaagttaaggggtcccacaaggctg

SEQ ID NO: 54575 - DNA, 576 bp, Homo sapiens
  misc_feature 545: n = A,T,C or G
cgggccccccctcggaagtcttctagaattaattaacgcggggtttgcagatggtatattgcccaatggtgaagttgcagatacaacaaaattatcatctggaagtaaaagatgttctgaagactttagtcctctctcacctgatgtgcctatggtaaggaattcaaagaataacttaattgactaaacaaaattttatttcgtagataattcctggtgtgattattagagtgctttttttttttttaacactttgagcttcctaaaataagagatgtattgatatagtgaatatattttagattttaccccctttaaaaaaaagagagagacagtcttgctgtgttgtccaggctggagtgcagtggcataattaccagtcactgcaggctctaactcctgggctcaagtgatgcttccacttcagctactaggggagacggaggcaggagaaaatcacttgaacccaggaggcagaggttgcagtgagccaggattgcgccaatgtactgcagcctggacaacagggtgagactccatctcanaaaaaaaaaaaaaaaaaaggaaaaaaaaaaa

SEQ ID NO: 54576 - DNA, 610 bp, Homo sapiens
  misc_feature 574: n = A,T,C or G
cgggccccccctcgaaagtcttctagaattaattaacgcgggcttgttagccagcgtcctatgggacttcttctctgataggctaatgagggagggtccctatgcaccatatgaagtggaggctgaagggattactcgcgcctgcactggtcaggaaagcgaaaccttgtctaaaaaaacgaacagcaccgtccaaacaccgacatctaacgacatctatacacagatacatctcatgcggctggtgtgctgtaacctacacttgttcctcgctgagtgaacatgacacaataccacttcaggcgagtgttactagctggcctgatatagactttttacatatcattaataacataaacttatacctctgcgccctgagaatgacacttcccatctagagctaatgagtcgagaaagagctatcaatctgtcaatcctgtccgtgtccgggccgggtgaggtttcccgtgttgagtcaaattaagccgcaggctccactcctggtggtgcccttccgtcaattcctttaagtttcagcttttgcaaccatactccccccggaacccaaagactntggtttccggggggagtatggttgcaaagctgaaaa

SEQ ID NO: 54577 - DNA, 601 bp, Homo sapiens
ccgggccccccctcgaaagtcttctagaattaattaacgcgggcacctgagtagctgggattacgggcacatgccaccacacgtagcagtttctgtgttttttagtagagacagggttttgccaaattgtcctgactggtcttgaactcctggcctcaagtgatctgcctgtcttggcctgccaaagtgctgggtttacaggcatgagccagcctgcctggcctcttttgcttactttctaattggagttttttttttcttcttacccctgaagttttaagaattctttacatattctatatctgagttctagtcagatgtgtggtttacaaatattttttccccagtctatagcttgtctttgcatttctttcgtagagcaaaagtttaatttgataaaggcgagtttattgagcaagaacttttccttcatgggttgtgtttttgatgtgtcaaattttttaccaagctttaggtactgaaggttcccctctgccattttttaaaagttttgtctattttgaatttttatataatgtgtgagatttaggtggagggtttttttcttgccttttttgttttgtggggggtgtgtgcgtgc

SEQ ID NO: 54578 - DNA, 596 bp, Homo sapiens
cgggccccccctcggaagtcttctagaattaattaatgaatttttaaatgcactagtttttaatatcctttttctgatctaggacccatcctgaagttggacgtgttttttcttcagttgcctccagccttgaatatttgctcgatcttacgttatattttatgtccttaatgaatattaacttttcgtcactctaatgagaaaaaaagttttcccagttaaagagtgagaaaattatttggtatcaatgaaatgtttttccttatcaacatacatttcctaattattagacccatgattattatatagttctgagttgacatgctttctgcataaaacttttggtttcaatgactcattatatagctatatgatttgcatgcaatcacatgtattctatcatgactataattttccttctaatttatattttctgttatttaatctgcactttccttttcagtttttagtgataccaaattccagtttagcagtgtattttttatgagcacttaatcttctagtttccactgtttttattgtcccgcgttaattaacgcggggctcccaagatggcggagacagagtgaagaaac

SEQ ID NO: 54579 - DNA, 400 bp, Homo sapiens
  misc_feature 12: n = A,T,C or G
gccccccctcgngggtacttctagaattaattaacgcggggggaaaagttttttgagaagtttgtcttgcaatgtatttataaatagtaaataaagtttttaccattaaaaaaaaaaaaaaaaaaaaaaaaaaaaaaaaaaaaaaaaaaaaaaaaaaaagaacaacacaaaggaggaaacaccataaaaacctatcgcgcccccgggtgacgcgcccttactgggccaacataatacaacgccgccccccccccgggcccgggccccccccccccctttgggggggggaattcccccccccccccgcggctggctttttcccgccggggccggggccccccccccgttcccccccttttaccccctgcccgcccccccccctttcggggcgggggttttt

SEQ ID NO: 54580 - DNA, 421 bp, Homo sapiens
  misc_feature 51: n = A,T,C or G
gggtaccgggcccccccctcgaaagtcttctagaattaattaacgcggggnaagaaaatgaattaaattgattgattgaaaaaagcataggagtgaatttgattaggcatgtatgtacacatttaaatatatcttgtactttgtatgctcaacagcctggatgaacacacagcatacattatagcttaagctcccttcctgtagcagtgtttaatctagttagcagtaattctagaaaaaaattatatccaaatgcatttgaagatgaaatgtagataagttatccagtcttctagtgttcagaaacgcaaactgacctttggacagtgaatccattaatgttcagatgagttaaggataattgcaattttcagcttctgagataatcacataatcagaccgtatgaagtcaacactttat

SEQ ID NO: 54581 - DNA, 601 bp, Homo sapiens
  misc_feature 37, 554: n = A,T,C or G
ctggggtaccgggcccccccctcggggatcttctagnattaattaacgcggggatgagaaagtaaagggcttggaccagaaactgtgccatgcaaactccatcattctggttactgaccctcaggcttccacgactacccactgacatgcgctcgtcttcatcagaagcctattaaaagaaaggacgagaacaaccgtgaaggaatcatacaacatacatgaagaaccagtgcccaagtttcagggggatgctgggaactgaccccaacccacagcagtgagggggccagccacccctggacatctcaggggacaccagtctaggtcctccacagcatgggctttgtggatctctgtctgcttatgggcaatatggatttaaagtaatttcagggccaggtgtggtgtcatgcctgtaatcccagcattttgggaggccgaggcaggcagatcacttgaggtcaggagtttgagaccagcctggccaacaaggcgaaacactctgtctctacaaaaaatacaaaaattagccgggtgtcatggcacctgcctgntatcccaggtactcaggaggctgaggcatgagaatcacttggaccca

SEQ ID NO: 54582 - DNA, 476 bp, Homo sapiens
  misc_feature 146: n = A,T,C or G
ccgggccccccctcgaaagtcttctagaattaattaacgcgggtattgggatgccttctttaggaataagactttcctttaattttcaagttccacaacttctaaattattttgctatctcgaagcagcagaatattgatcatttntctcagtttaggctaacacagtccacaccattaccacttaaataaagtaaccgaatgctaaatattatccttatcaaacatccatcactttgttgctttttatgagatggtagattgctaaaaactttttgagctagtagacgttacctttaagcatcaatgaaatgcaaacagtgaagacctcaaagaaagagttacctcattttctctacatgatctccaatgtagtctcagatagggcccatacatagttaaaagctggtaacagctctgaacagaagtatgtattaaatgtttcaaacttgtatatatttttgaatgcttttgttt

SEQ ID NO: 54583 - DNA, 611 bp, Homo sapiens
  misc_feature 25: n = A,T,C or G
ggccccccctcggggtacttctagnattaattaacgcgggtataacatctttcctgccttttcttctaccacatgtgactccagcctgagaaatgatctgcctttaagacttacgtgattaggttgggatcacccaggtaagtcaggataattttcctattttaagatccataatcttaattacatcttcaaagtctctttgatctaaaatgtaacatatatacatgggtttcagtgatgagagtgtggacattttgtggggtggggagtgagcggggtgattctgcctaccacagacataggctgacattaaatgttactactctggacttctttaaagattatgacaaacatatataacttaactgccattgacttttgaatagctttgagtactttagaagtaatgctaacaacctgactgtaatgatatttagattatgtaagcatataatttgagtttatctttaaattatgtgtcatacatgtctttgtatgtgttgctataaaggaatacctgaggctgggtagtttatggagaaaagagatttattttgcttatagttctccaggctgtaaaagaaacatggcaacaacatctgcttctgatg

SEQ ID NO: 54584 - DNA, 595 bp, Homo sapiens
  misc_feature 33, 539: n = A,T,C or G
ggtacccgggccccccctcggggtacttctagnaattaattaacgcgggcaagtatcttgctatattgcccaagctggtcttgaactcctgggctcaaccaatcttcctgcctcggcctcccaagtgttgggattacaggcatgaggcattatgcccagctaacattttcaagaataaattatttaacacagtccaggaaaaactagttaatacctggttctgtcaggccacccagctactagaaataggatttttaaaaacagccttgctggtcacatatcctaagtaaattattttcccttttatatttcagaagcctgtgattcttataaatctggatatgtctattctgaactcaacttctgaaatttacagaaacaaactacatctcagggtaagatgctttttatgaagctgatttccatgaacaaaaagcaaacttgaggctgaggcaggtggattacttgaggtcaggagttcgagaccagcctggccaacatggcaaaaaccccatctctactaaaaatacaaaaattanccaggtgtggtggtgtgtgtgtgtagtcccagctactcgggaggctgaggcaggag

SEQ ID NO: 54585 - DNA, 562 bp, Homo sapiens
ccgggcccccccctcggagtacttctgtattaattaacgcggggatttaaacttttgacaaacctgttccctcctcctcatcaacttccatagtctcccccaccttcaacctgtacatctggaagccaaaaaaactttgccacataacttttaaaattcttagcccatgctgtagcagaacagcagcagttaagaatgtgtttattaggtaccacacactattctaagtgctttacactcattaactaaattctgacaacagccctaagaggtaggcaccattattactcccatctcatagaggagaaaactgggtcagatagaagtaacttgccttacatcactgagctagtaggtggcaacctagttccagagtttatgctcttaaaccactacactaaacacatagcagtgttaaagtttgacctctttaaaagtctgtctctttatctgttaactggttacattactacctagctttgcaggctaaagaactgagactaaatgtatagttcctggcatacagtgaatcatcaatagcattattttaatctacaaaatg

SEQ ID NO: 54586 - DNA, 601 bp, Homo sapiens
  misc_feature 555: n = A,T,C or G
cccccctcgagagtcttcttagaattaattaatatccgactacaacatattcagaagaaataaacacttgttaaaaatcaagctgtaggcaaggttgcatcttctcccctcactagccaacgctgtgaccttaaacaagtcacataaactctaggagcttcagtttcctcatcacagcaggagaaattctaaactggcttagatggcatggtaggtcctcatggactttccctgactaatttgctcagccttatctttgtttttccaccttctactcacgtccgcactccacacattcacatctgatactccaagaatactcaactacttgtagttcccagaaaatgctctattttcccatacctcctgccttcacatgtgcttctctttgtgctcaaaatgcttccatctcagcagtcattttaaattagttcccttcactttcagcttcccctgacgtgccccctcctctgagaagatgcagtgttctcttaggtgtggggtttctgctggcgatgtggatactataccttttccctctgcttttcatgactntaatgacttgaactttatcaaggatctgattaaggctatgctctca

SEQ ID NO: 54587 - DNA, 504 bp, Homo sapiens
  misc_feature 13, 443, 463, 465: n = A,T,C or G
gccccccctcggnagtcttctagaattaattaacgcgggggagagagagacagttctcttgttctctattactagagctgagaattttaatatctaagcttgccatttgctttctctaaaatacccagaagaatccaccccaggatagtgtcctttgtagtcatcattactgacacaatggtcaggggcagtagccactttttccccaaaggcacttgcttcactagacactttatcataactaagtacatgtaagatagtttagagattgaatttgacatgaagttggtttgggcaccaaacttactctgccaccaccaagaaaaccttttagacttagtggcctttcaatgataaaactgtggataaaagatgatgaatctgtggtattataactatattgaggggagaatggagggggttgattgtgtaactaaactcanatgttgatttttcacagcananattaaatagaaaatttctaaggtcgaaaaaaaaaaaaaa

SEQ ID NO: 54588 - DNA, 605 bp, Homo sapiens
cgggccccccctcggaagtcttctagaattaattaacgcgggggaaatccttgggtttacagtgcagggcacaaagctgtaccacaaagcacatctgttatagcttctagagagatgatttggcaataatgagttgtgaagctgaaagaaacttttctaaaccatcagtaataacaatagtacattttgatcaaccatgagaaaaaaaactaaattgtctttctattcttgctgtagaaaatattacaaaattgtcataggaagagatagtaaagaatttacagccaaaaatgtaagggaaaatactatagcaagcgtcaggtatttaattttgtaatgtttattacttctacccgttttttaaaacctgtattttgctgcgatttgttggtatttacaattctgtatctcgttttgtatctttcactttatattctttgtctttaataaatatcaaaattttaccagcttttgccctttcaaaattgagttctggctaggtgcagtggctcacgcctgtaatcccagcactttgggaggccaaggcaggtggatcacttgaggtcaggagttcgagaccagcctggccaacacagcgaaacaac

SEQ ID NO: 54589 - DNA, 417 bp, Homo sapiens
cgggccccccctcggaatacttctagaattaattaacgcggggggagaagcagtcttcacaaacttaatactactgcctgtgattcaaggctactgcgcctaaaataccattagtggcttaaaaaaatgtcaccatatccatctggcaagaaatatgaagaaacgattttaaaataactttaacctgtgaagtgcgaaattaaagtaactacctctagttaattttttgtttccaacaaacagaaaaactgctacaacaattccaatggttctcaaactttaccatctatcataatcacctgcagaactagtcgaaacacaggctgttgagtccccactgccagactttctgattcattacgtctggggtaagatccatgaatgtagcggcacaatcttggctcgctgcaacctcca

SEQ ID NO: 54590 - DNA, 593 bp, Homo sapiens
ccccccctcggaagtcttctagaattaattaacgcggggagggtgggcagcgtggtactggcataaggatggccataggacaatagattcgaaatgagagttcagggaaaaaacccaaaacatgtatctgtggtcaatcgattccggacaagggtgccaagactatttgatgggaatagtcttttgaagaaattatgctttaataactggatacgcacaatgcaaaagaatagagttggacccctaattcatatcatatacaaaaattaaatcattatagatcaaccacctcataagagctaaaactgtaaaactcttggaagaaaacatgggtataaatcttcatgaccttagctcaggtaggcagcagccttttagatatgatacctttcaaatatgataaacacagcaataaaagaaaaaataatgaaattgtcctttgtcaaaatgggaagctttatttctcaaaggacaccattaagaaaggaaagacaacttacaaaatgagagaaaatatttgcagatgtatatttgataatagccttgtatctagaatatataaagaactcctacaactcaataatgaataagac

SEQ ID NO: 54591 - DNA, 506 bp, Homo sapiens
  misc_feature 192: n = A,T,C or G
cgggcccccccctcggaagtcttctagaattaattaacgcggggatcaagggtaaataagagaaagtgaaggcagaaaggggctgccatcttgagaaaagaaatggattaaagaattaaaaggttgtaggctgtgaaataggtataacaggactggcatgggataggaaaaaggaacaaagactatggtcangaaaaatgttatttatttattattttattttttattcttgagacagggtctcactttgttgccaggctggagcacagtggcacaatcatgctgcagtgagccatgaactcctgggctcaggggatcctcctacctcagcctcccaagtagctgagactacaggtgtaaaacaccatgcccaactaatttttaaaaattttttgtggagacagggtcttgctttgctggaccagatgtttgaggcccaggatggcctcaaactcctcgcttcaagtgatcatcctgcctcaacctcccaaagtgctggaattaca

SEQ ID NO: 54592 - DNA, 460 bp, Homo sapiens
cgggccccccctcgaaagtcttctagaattaattaacgcgggccaacttcattcacatgtacagtttgagttctatgggttgtcaaagttcatgtcactatgttagggctggcttttacagttgtacttctcttaagtgtggctgtcccaaagatatatgaaaaaaatactttgctagagtgccccaaaaccttttgtctctgccaacataaattctgaaactgaaattcaaaacaagatttgtttaccactattacagaatgtgcttataaggctgagatgtttattttaatacctttggcatttaacctttaacctcttatttactttgtaaatatttcagcatggtgagaaaaagaaaaaaaaagtttttaaaaactcaccattaagaaacattttaatcacagattggtaaaaacacaagttgctgcattttcgcaaaaaaaaaaaaaaaaaaaaa

SEQ ID NO: 54593 - DNA, 594 bp, Homo sapiens
  misc_feature 22: n = A,T,C or G
ccccccctcgggagtcttctanaattaattaacgcgggcaggctgaagggaaataatactagagggaaacacggaacttcagaaatgaaggaagagcaacagaaatggaaaatgtttgggtaaatataatagattattttatttcccttaggttatttaaaatatgtatgattattaagcacagagcataacattgcctggtaggttttcaacatatgcacctgtagcacatgacaagcatatgttaaaggtggaaaaagtaaaaatatctatgtggttgtaagagttctgtattttatttgatgttataatatgttcactctgtacagactgtgaaatgatatcaatatagtaacccccaagacaacactaaacaaaaagaatgcaaagagatacagtctaaaaggcaatagataagccaaaatggaatgccaaagatattcaaatcacttcaaaggaggtagaaaaagcagaagaaaggaacaaagaaacaaagagagagaacaaataataaactgtagacttaaagtcagtcacttcaataattagatgaaatgtaaatgaattaaaagacagccatcatcaaattggata

SEQ ID NO: 54594 - DNA, 612 bp, Homo sapiens
  misc_feature 13: n = A,T,C or G
ccgggcccccccntcggggtacttctagaattaattaacgcggggggctggggattggggactctttctcctgacgtggggccattctggactggtccctccatgttccggtccctccatgttcctgcaagaaatgcagacaagaggcggctcacagagccactggctggaaggaaggggggctgggggcagcagaagtccccagcgacaccgtgggcccctcgcccaagcccagctgtggcaggttcccatccacactgcaagaggcttcttccggacaatgcctttcctttcccgttttctccctagtttttttttccccagttaattttgttgcagaatttctacctttttcgggtggctgtagagcgtttcatacatctgtgtctatcttgttgggtgtcacaggtgtggggaaggttgaactgctacccagggtccagttcaaaccagaggctgcgtgttcttccctggacgctgccacaccacgcctaattcaggaggaaagccacaccagaaggacgcagcctcagaccgagagccttgctaggctgcaaagccatatttttcaatcagtaaagtatccaaaaaaaaaaaaaaaagcggccgcca

SEQ ID NO: 54595 - DNA, 472 bp, Homo sapiens
  misc_feature 13, 29: n = A,T,C or G
ccgggcccccccntcgaggtacttctagnaattaattaacgcgggaggtactaaaagaaaactaaaaggaaggccaaaaatagtcaaaatttactcagacacagatgtctaaaaccacacaggatgtgttggtaaatgaaaatggatataagcttgttaatatctggctacaattctgtgaatttcaaggtaaaggtagctagtgtgttccactgttttcaacaaatggacttgtgtgttcctgccacttgtgtgcggtgtattagaaacataattccttccttcatgtcttttataataaagtaagagaaaaaataaaataaaacaaataatctctaaacaaacagaacaaatgtctaggtaaataaaaattcaaattaaaaaagttaaaatagcaattttgttatttgggacatatttgactagtagagtccaaataacgatggttagatgggacaaaaaaaaaaaaaaa

SEQ ID NO: 54596 - DNA, 575 bp, Homo sapiens
  misc_feature 503: n = A,T,C or G
ccgggccccccctcggaagtcttctagaattaattaagcatttcttagtgcataactctattcattaacatttttcaatttaaggaataatctcatctcagctcatctgaggtgtggattaagtgttctttaagcctttatatacacgtgatcacatacggctcgttttttctgcttgggattataaaaatctccgtaacaccaaatacagcttttgaagtcacatataaacagacgttgacatgtatattaacaaacatatataaacaaggtgatttcacatgttatctacttaaaagagggaagtaaagtagttttactaaaatatgcgattatccacttgccagctcacctgttagtggagccccatgaaatgtctgtgacccctgatatccatcaggcaccgagtctggtccataattctctgtgggccaacgatgaggggatgctgagttactgctatttagtttcaactcctgcatttctttctattggaagaaaanaaaatcaaataattttaaaacatttaattatatcatgacagaaacagtgctggggaaacttactcttttaac

SEQ ID NO: 54597 - DNA, 557 bp, Homo sapiens
  misc_feature 503: n = A,T,C or G
tgggtaccgggcccccccctcagagtacttctagtattaattaacgcgggacttacattgggatagtactccatcacaagcaaatattccatgcgtccatctgcagtgactctctcatctccaactataaagcgggcaatgttgtcatgttccatcaaaggcactctgtaaatgttcttttcgttgataaaattctgacggtttgcaaaggaaaacacttttacagcaactggacgctcatccaaggagcctttatatactgctccatatcgacctcggccaatcagctgcaagtgttttaaagaaagcaaggtattaatatcacaattgaacaatcaaatttactaaataataaagtacaaatttaaacagaatgctacagctctctgttgcttacagtttattccattatcaagaaattaataaattctgttctagtatggctgatgaagctcctaccagacccagcctgcccatagagaacatttataaatgctggacanaatttaaaaaaaagaaagatctaaaggcagatagatcttgagaggcattaaagc

SEQ ID NO: 54598 - DNA, 561 bp, Homo sapiens
gggtccccccctcggagtacttctagaattaattaacgccgggtgctgtgtggctcatgcctgtaatcccaacactttgggagtccaaggcgggcggatcacgaggtcaagagatcgagaccatcctggctaacacggtgaaaccccatctctactaaaaatacaaaaaattagccaggcgtggtggcgggtgcttgtagtcccagctactcaagaggctgaggcaggagaatggcgtgaacccgaaagcagagctggcagtgagccgagatcgcaccactgcactaccgcctgggtgacagagcaagactctgtctcaaaaaacaaacaaacaaaaaatactaagaccagataatggaaagttttaaagatttaggtgttaagggctaccaataaataagacggaaattggttgaagttccagtttcagagagctgggcctaaagttttggctcccaccccagtcctgggcttacatcaaggtattagactggagcaagctctcaagtcggcctaaaggagacttggggctctggagtccatggattgattccacaggtg

SEQ ID NO: 54599 - DNA, 593 bp, Homo sapiens
  misc_feature 27, 566: n = A,T,C or G
cgggccccccctcggaagtcttctagnattaattaacgcgggggggcagcgtttctgacaggagcggccataatggctgtgggaatcactcttagtcacctcagtgcctttctctcttcgttgcaagggacactcaagagtcgggtgcccagccaaggccaacacggcgcagtggcattctattcagcctgctgtggaaaaaagatggcggcgccctttgtgcccattatagctgagagtggagccttagctggagcaccatgggcacggccatcttagaggaaggcagcagccgtacggcagagaagatgctcatatccaggacaatttggaaaaataaacaaggtttgaagaagtcacggtgctggccaggaagcggtcacagagttgccaaaaccagtggtcactgaaagtgttagatttggggatagggcgggggttctgggctgggtaaggcttttgtgggttagattagactctgactgaatggacgaagccgagaacaggagtgatgctccattaaatgctaatacccacatggggcttgctattaaaaccactgccantggggaaggggatgaggaggtgaaggt

SEQ ID NO: 54600 - DNA, 426 bp, Homo sapiens
tgggtaccgggcccccccctcggggtacttctagaattaattaacgcggggtatttccacttttgtaatatgtttcaacttttccctaataaagacaaactttaagtacctcctcttccctctaataaaaagctatcaaatttcatcagtctaagacatttccttaaagttagatggggaagaaaggttgggagaacataggaattaacttttatcttccagttgcctacatggcatctacctgtgtgacattacattgaatgccttctaggtctaaaaatataatatactacatactataaagcaagggtcacaaatctctgggccacagtccagtatcaactcatagcctgttaggaacggggccacacatcatgagagcggtgggtgagcaagcgaaactgtatgtgcatgggcacctgctcc

SEQ ID NO: 54601 - DNA, 540 bp, Homo sapiens
  misc_feature 460: n = A,T,C or G
ccgggccccccctcggaagtcttctagaattaattaacgcggggagttctgctacaaaaggttggggaagattgggtggcagtttgacatgttattctctgtgaaatttctggggaaaatatttaaatttggggattttgatagactgtttcctgggtgggatcttaaatgaagatgctgaaatcccaatgaggtcttagaaacagaccttaaaaactttgaagttggcaagagacttaagttggagcctagaaagtccaatttttgtcactgctggggttttgcattttttttaactttgaatcctgttagtcatgcatttgtttaattggactgaagagacatgaaacagggtgttagatctttctttgtataatgaaaagacattgatcccaatctttggtgtttgtccagatgaggcttgagcctataattgaagatgcagttgaacatgagcagnaaaagtgcagcaagcggactttgccagcagactacggtgattctctggcaaagcgaggcagtgtaagggacttctgcttc

SEQ ID NO: 54602 - DNA, 609 bp, Homo sapiens
cctccctcgagagtcttctagaattaattaacgcgggctgtggtacaatcctgtcattaacatgtactgcaccctgaaaagaaaaagagagaatgtgaatgagattacattactatcatcacagtttgggagctaatggtcactaaccctttatgaagcattggaaaataacacttgggagttttgcatgatataaaaaatactgattatatgctaccaccttggctgtagaatcaacacactcaaatgtattcaaatttaaaaagtaaaaacatgaatacataaaatgatctgtcacattcccttcccttttagggtggggtcagaatatattacaagtgtgactactggctctgttgcatagccagcttttttttttacatttctttggcaacataacattatgtttggaatactaattccaaagaatacagttttcacacagggaagataaaagacactacatatttgcacattaaaattattattggataccagatttggtttactatataatcaaaattgcaactgatcttatcaaaagcagtcaatattggccaggtgtggtggctcatgcctgtaaacccagcactttgggaagccgagatg

SEQ ID NO: 54603 - DNA, 527 bp, Homo sapiens
cgggccccccctcgaggtacttctagaattaattaacgcggggtgtaagataactaaatctgcacctatataaaagaaagtaatataaatgtctaaaattgataaagcaagagagaacagtgcagtatttagaaatatggaggttagctaccaaagtgaatggctaaaagaaaaaactggttgcctgtgaatactggggaggatggggaatgagaagaggtggaatagaaaactgtttttcattgtaagcacaatgaccatgtaatttattattcaaaccagaacatttctgacagtcaaagggaatatggttaataactaagccaaggtgacaggcataagctgagactatgagcaccctaattataagcctctaggtactgtttgatttctaacaaagtcagtcttctactttgataaaccacttaaacttgaacctgggaggtggtggttgcagtgagccaagattgtaccactgcactccagcctgggtgacagagtgagacttcacctcaaaaaaaaaaaaa

SEQ ID NO: 54604 - DNA, 257 bp, Homo sapiens
  misc_feature 26, 43: n = A,T,C or G
ggccccccctcgtgggtacttctagnattaattaacgcggggnagagaaaaaaaaaaaaaaaaaaaaaaaaaaaaaaaaaaaaaaaaaaaaaaaaaaaaaaaaaaaaaaaaaaaaaaaaaaaaaaaaaaaaaaaaaaaaaaaaaagaaaaaaaaaaaaaaaaaaaaaaaggggcccccccccgggggggaacttcaatttccccttttaggggttttttttaccccccctatttgccctttttttaaaacctttggg

SEQ ID NO: 54605 - DNA, 509 bp, Homo sapiens
ccgggccccccctcggaagtcttctagaattaattaacgcgggtatcaacctcttattctcctcttaccaagaataattactgatgtggtcccatctccaacctcttcatcctgggtccggctaatttcgatcatggacttggccgctggatgctggacttgaatctaaaaaggtagatcactagtgaattcacactattcaaagacctctgaactcatgaagcttggccctaactcttgggcttcttgcttctatacgtacttactttccctttaatgttttaccatatcttgaaagattaaaattggcaccccaaatagcttaagtaaaccactttccaaatcctttttgggaaaaagtgtattacatgaactcaactattaaagctgccagaggacagaacgatatcttttagcttatttactggaagcactattgtggctgaattgtgttcttcagtaagatacgttgaagccagctgggcatggtggctcacatctgtaatctc

SEQ ID NO: 54606 - DNA, 420 bp, Homo sapiens
gggccccccctcgaaatacttctagaattaattaacgcggggtaagtcggggtaagtagcaaggcaagtcccttattccccctaatccaggtaactagcatatcccagcacagcagttgcaattccgtgggtgccacccataacattgggtggggagggtccatgggaaggggagatagacttcctctccctgcagccacgtaaggcaagttggtggcccagtggctggcaagaggaggaaccctgcttagtccatgaagccaggggattttgcatacactaagtaacaaagcagggactccaggtgcccatgggggtctgtactcctccatgaatattcccaaactcaagggagtaagatataaacagcaaataaaattacaacaagggagagactgtaaaaaaaaaaaaaaaaaaaaa

SEQ ID NO: 54607 - DNA, 608 bp, Homo sapiens
cttctagaattaattaacgcgggtcccggatatttcctcatttgatcctcttagcctgataagagaggaacgattactaatccatatttttctagtgagaaaactgaaattaattactatttttatgcaggaaaactgaggtgtagtttaagtggcttgtccgaggtcacacagcaagtggtgcaaccaggatttgaacccaggctctgagatttcactcatgcaacacacacatatttagaggctctgtggcagtgctggaccccagtgttaactgcagagaacaagacaggcaagaccttttcccttaggaagcttccattttagtggagacaagtaaataaataagatcctctacaatgtgaaaagtagagtgcatacaatgcaacaaggtcattgcaagtggggggaaggcaccgtgttagatggggttcagagctaaccactgtgctatgccattctcctgacctcctctagtccccctcagagttacagaaaaggaaacagagacagggatcagagtggggaatctgctggcccaaggtcgcagagccagcaagtactggtctggaacttgctccctccatgcccagcttcccacatccctg

SEQ ID NO: 54608 - DNA, 617 bp, Homo sapiens
cccccctcgagggtacttctagaattaattaacgcgggctttgtgattaaaggagataaattaaatacttcctaaatagtagccagataatgattgagaaagtgactgtgacacagagacacaattaaatgaatatataaatataggcatctagtacttgtcaagtgttctggagacacagagataagatgacttcttcaagacaagaactattttatttgcaagcaaaacagaaaaaagagtaagaagacaggaaaagtaatcaaattgttccaggagtcaagaaaacaaaacaaaatgaaacaatgcatcctatcaggaggatacgctgatcttagaaaaataaggagtttttctaattttattccactgtggtctgagaagatacctgatatgatttcaattttttttgaatgtattgagacttgctttctggccaagcatatggtcaatttgggggaatgctccacgtgcagatgagaaatacatattctgcagttgttgggtagaataatctgcaaatgtctattaggtccatcgggtttgagcttaggctgacccagccagctgacagcaccacagctgacacccacctgcatgtgccaaaagatggagcc

SEQ ID NO: 54609 - DNA, 301 bp, Homo sapiens
  misc_feature 22: n = A,T,C or G
ccccctcgggggtacttgctanaattaattaacgcgggtaggacttaaactaaaatgtatttatttataaactcatatagaaccactttgtaaaagcatttctactttttcatgcttaaagcattatactaaatgccatatacgattttttcttcatccatttcagaaacagtgctgatgaagtaccaggttctatatcaggtcctggggatacaaaaatcgataagacatggtccctttccttaaataatacactcttacagagaggaaaccatgtaagtaaaccaaaaaaaaaaaaaaa

SEQ ID NO: 54610 - DNA, 603 bp, Homo sapiens
  misc_feature 24, 576, 583: n = A,T,C or G
gccccccctcggggtacttctagnaattaattaaaaaaaaaaagataacaggtcttattggcctttcattaactagtactgtccataatttcagaacattccatagaaggtggaaagttgaggcccttgcctgggaattgttgatgccaaatatcaacacatttccaaatattagactgattagtgtcacaggtttaagccacctggtcaaataaagcaaatttttcacccttattagagtaggttaactgctgtaacaaacaaccgtaacacttcagaggcttaacacaatatttattacttgttcaagtcaagggccaaatacagttcagcaggccaagggctctgttctttgcagggatttaggaacacagtcttctccatctgtggccccaccttccctaggatctctgaatctttccacttggaaagaggatgaagatccaacaggggagatttttatggggcaggctcaggagtggtgtacattgcatctgctcacattctgttggccagaactctgttacctgacccccagccaactgcaagagaggctgaaggctgaattgagctcanagcccanagcagtatcattgagcatta

SEQ ID NO: 54611 - DNA, 589 bp, Homo sapiens
  misc_feature 43, 566: n = A,T,C or G
cgggccccccctcgaaatacttctagaattaattaacgcgggngagaaaagcaacaaactttagtgaaaagctgctaccatggcaaacacccaacatggcatggcacaaaagaagagtagatagcctcagaatccagaggtaaagactggagaagaaaataatcatatgtagagtgcatactgtggagagggtatgcattgtactaggcaccttatacacatcaactcatgtaattctcacaagaatactataaggcaagtttttatattattttgcagatgagaaaatggagattcaaaaagatcagccaggtacagtggctcacgcctgtaatcccagcactttgggaggcagaggtaggcagatcacttgaggtcaagagtttgagatcagcctggccaacatggtgaaaccctgtctttactaaaaaatacaaaaattagccagccgtggtggcgggcgcctgtaatcccagctactcagaaggctgaggcaggagaatcgcttgaacctggaaggtggagactgcagtgagccaagattgcgccactgcactccagcctgngtgacagagcgaaactccgtctc

SEQ ID NO: 54612 - DNA, 616 bp, Homo sapiens
cggggccccccctcggggtacttctagaattaattaacgcgggctaggggatagaacaagattctgcctccaaaaaagagaaaagcaaagaaaagaaaattttatgtcgtcaaaatatttttacaaaaccaggtgttagtcttgcagaacttaatgcagttgagttaatttattcaacctactcaatttagtacacagtagggttgtactactgtgaacatagtttcatagtctgattggaatgaatgaagaaagatggctgagagacaaaataaatcaataaatcagtactatccatcttctctcaaaatataatgcaggaaatccttctccaaatccaccttcaatagtagccctagtagtgatgtaaacaagagtatttcctcagcatactcagtccctttactaaactttacactacatttcctggctgcgacggcttagcatggatccgttgatcagtattgtcggtgcaatcctggagagacactgcttttttgcttctcttgttaaagtggttaaagtgaatgttaagtagaaaaagggcgtggtttgctagggtgaaagcagcacagagatagaaaacatcagggccaccctgagtaatgcacattta

SEQ ID NO: 54613 - DNA, 435 bp, Homo sapiens
cgggcccccccctcggaagtcttctagaattaattaacggcggggcagtgaggcttcaaggagatggtatcataggatgctcgaggtagtgaggttgggtggggtgggaacaagcctagttgatggcttgggatcctatcagtaggagatctgacttgatggagcatgtcagggtctgggtatgagcaagagttgatgttagctttatcttccccagcccctctcacttcctgattctacctgggtcatggtttgaaacaacctcttctctcacctgccctctgaaagattaaaacattcaggctgggcacagtggttcacacctataatcctagcactttgggaagccaaggtgggaggatcgcttgagcccacgggtttaaaggcaggctgggaaacatagcaagacaccatctttaccaaaaaaaaaaaaaa

SEQ ID NO: 54614 - DNA, 347 bp, Homo sapiens
ccgggccccccctgcggggtacttctagaattaattaacgcgggggaaggcacgtaataacaaccatgatcatacacatggctgtacttatatatatagagatgctcaattgtattataataatgttgtcatcatactggcctcatgtgtgtgagcagagacgaatctactcaactattaaacatgcctggatatacatgaggtaaaagaccgcggcgcaaaggctcatgcctggctatctcagctctcggggagcaccaagctaaggaactggcgttgaacccagaagtatggatgagcgagaccgacatggcaagatcccgtctctacaaaaaaaaaaaaaaaaa

SEQ ID NO: 54615 - DNA, 593 bp, Homo sapiens
  misc_feature 481, 483: n = A,T,C or G
cgggcccccccctcgaaatacttctagaattaattaacgcgggtttatgtgaacattttgcaacccattgaaatggattctggcactgacacatatcatttccagacaagtagagaaactgaaactttcagaacacaagggtgatgcctgttaatttatttgtgctttggcctttatatattcactgtactagagaaattaatgttattctaataacttgaaacagtaaatgcttccctctaaattgatatgacagaatttcttaaaagctgtaaagcataccccgtctttttcactttcttgcccttattcttaatgactagaaatttatctatcaacataaataaaagaggaccttattgaaaaatacatatattagtctgtattttttaaatttatgtatttatttctttcagtaaggtcttttttattatgtaggtatgtgtgtgagtgtatatacatatatatatatatatatgtngnatgtatatataatgcatttgtatatgtatgcaaatacatagaggtattagtattaaatacgtcccacaagaaagaattgacttatttgaagaggtgagtcatcttaagat

SEQ ID NO: 54616 - DNA, 560 bp, Homo sapiens
  misc_feature 28: n = A,T,C or G
ccgggccccccctcggaagtcttctagnaattaattaacgcgggaggactcagacaccctgctggactctagccaagctctgaatggctcttcccactggcctgaggccatcaactgggcacctctgggtttgggcccctgggaccatccatttactctaagggcccatgggaccaccctcccgccccctctgtgcccacagacaaccacgcaccatcattttatggaccacgggaaaaggtcagaagcttttgtaaaactaggtgcaatgtgcaaactatctaaaaatgaaaatgaacgtccttcccctccggtcaccaggacaatcctgtcccactggttaaattttcatttgtgttccaatcgagggcgcaaaccccagaaactttctgaattgtttctctccccagctgtctactggcctcttgctctctttccaactctttctttcttggcttctttttttaattattattattttattttttatttccccctcttggtcaggttaaagcgctcctgagggggaaataaaaaataaaataacaaaaaaaaaaaaa

SEQ ID NO: 54617 - DNA, 602 bp, Homo sapiens
cggggccccccctcggaagtcttctagaattaattaacgcgggactatatacattttcatgaatgctatgtatcatatacatggatgtataatttacatatttgccattcaacttttccgtaagaaacttcaagaatccctaagcaacctgtgcgttgcaattgtcactttgaactttagaacaaagcagagactgtaaaaccagtttataaaaagtattatgagataccacaactggcatttttacgaccttattaaactacattcaagtggcataaattatatgtaatgaaagtgaaaaggatctctgacccgattttaataatgggtgcatgcttattagtttgagtttttttctgaatagaaaccttttttcaaacttcagcagttgatattatgtggaagtcataaatgtcagattacattaaactattttggttcatagaagagccattaagttactagagagtaatgagtaggtcttctcacaaagtaaagccaaaggtgttaatttagatttgaaacattccacctcattataaaagccaaattaatttgccatgtgtagaagcagcaaaaaccaatatttgaaatgtgaaagg

SEQ ID NO: 54618 - DNA, 568 bp, Homo sapiens
cgggccccccctcggggtacttctagaattaattaacgcggggggatttcaggatcattgcccttttgaaaatgttggttctggcagaaatggcctggaaaaatgttaacatcaaatgattatcagagcatactggagcagcaaaataatatgcggcttactaactcatcagattccaacccagtccttgcctacttgctagctgctgaataaaataatgacttgatacccacagtgacctgtaggggaaggttttaaaagtataattcctatggaaatatttattcataatcattcaattcctgataacctgttaataaaatggtagcctactttgtggacccaccacaaagctcaaaattgaatcaagtgagaactatctcttctactgaaaatggtagtttgtagtatgtgtagtaaattagtcaaaaccttttcctaaggaaacagctacagtggttcatttttgcctttctgttcattacaagatcaacagtttacttacatcactgtagtttattcggttgagtttggctaacatgatttctggtgtatcaggcatgacatg

SEQ ID NO: 54619 - DNA, 591 bp, Homo sapiens
  misc_feature 22, 27: n = A,T,C or G
gccccccctacagagatacttnctagnaattaattgaacgacggggaacagtaaaaccaaataccacatgttcttactttaagcgggagctaaacaatggatattcatggcataaagatggaaacagtagacactggggactactatagggtggagaaagggatgagacaagggctagaaaaactaattattgggtacgaagctcagtacttggttaatgtgatcaattataccctaaacctcagcatcccacaatatacccaagaaaccaacctgcacatgtatcccctgaatctaaaatagaatctaaaattattttaaaatgtttttcaataactattaattgaacatgtaatgtcaattgctctgcttagttcttaacagagattacctgatttagtcttcattacactccctgagcgggttattatttacattttatagaggaagaaatggaagcccagacaagttgattcacctgcgcagtcatatcccttggaagaggcagagccaggatttgaacccatgctattaagcattgtgttaccttgtctgcctatggttctcccccagatggccttggttggatgt

SEQ ID NO: 54620 - DNA, 538 bp, Homo sapiens
aattaacggggctgcttgggtatcctaaggacatggcagttgtcttcccccaaggtgggtaaacagacagtgagtaaaacagagagaataagggaaaaaactacaatgtcttttacagcccacactcacgggaaggggaattaggttccacattttgaagagaggagtatcagagaatttgtgggcatctttcaaaaccaccacacctcctaagcacatttctctgctctttccctagttctttctcagaactatgtaaagcattggacttacaggacaatcatagtcacagttatacctaaatgcacttatttcagtatctactatgtgtcaggtaccattcaacacacataaatgaaacaaaaaagtccttgctcttataaatatagtaagagattgacagtaaactgataaatataatatggttgtgataactgctatgtaaaaaaacagactaagaagttagaaaagtgtgagtgcttaaatagctgaaaatacttcatattagcgtatcacatattatgtggatacactgctt

SEQ ID NO: 54621 - DNA, 509 bp, Homo sapiens
  misc_feature 11: n = A,T,C or G
cgggccccccnctcggaagtcttctagaattaattaacgcgggccctgtggaaactggagcctagagggaactctcacaaattccgataactgtggccactgctattgctatgagcaggaaaactgtcactcactcaggagtcttgtgttatctgccagcatccatgaaattgcagcaggctaatttgtaatcttgcaaataggagaacattcagaccctgcatagttcttggcatgtttgtagcagcttctttcctaattgtcctgttaaacaaggtttatgggaggctgttgttttggactagtctcctgcactgggccccgggagactagatcaaaccagaatgtagtcacttgtactaactgccacataatcaaactgaacattgacatgggcgagttttcctaaaaatcaggagattccagtcaacttgagtcagtataataaggaatttacctctgttcagtactgcaaggaaagtgactgaaaagaaccatctgcttttttc

SEQ ID NO: 54622 - DNA, 560 bp, Homo sapiens
cgggccccccctcggaagtcttctagaattaattaacgcgggaagaaggttgggcttaaatctactcaaaaaatgaaaagcttaagttgtttattataataatcactaattttaaggcattcccatagtatgaattttaagaatagtgttacaaagagctttattctccatgaaaagatttaataaaatacagatgaacaattaccatttatattatttaataatcatgacttaaattgtcaaggaaaataaatttatatagagaatagactatacagatattcatatattttccctgaaagttccaaggttatttttattgactatggcctttagcctctttatggtttaataatgactccttattaaatgtcagaaactaacctgaaccagaccctagcacccctcattctttttctttcttttcttaatttttaatctttatgaatatataatagtcccacacccctcattcgcattctttttcactttgactcataatctacattaaaccctttatggaaaaagaaaaaaactttttttcgcaaaaaaaaaaaaag

SEQ ID NO: 54623 - DNA, 636 bp, Homo sapiens
  misc_feature 34: n = A,T,C or G
gggtaccggggccccccctcggaagtcttctagnaattaattaacgcgggtttataaaagaaatatctgcatttttgtgtttttctcctcttctaagagtgcttgcagcagggcttggaaaatgggcagtggaagagaaatgttcttaggatgtacgtgataaaatgattaggaaaaagacaagagactgtggagaaaattagagacaaaaatttcataacgggtgaaaatgatgcaagaaagttaccacttgaaggaacttcgagggaaaggaaaggatagtctaggggtctgacactcagtaaaagtggcagtcctgaaggtgttttagaaaggtcaaacgacatacacacacagccccagatgaagccacattgtaaagcttcatctttaaagatgaaggctctttaaaaagagccatatgaaattcattattttatctattcctatctgatgtatcctagccttaacagtaggatttaaggaaggaatttcagccagatccagtatgaggagaaggcattcttctcccaaacatctgtttaatttttcttacaaatactgtgaaacttataatgaattgtgatttcctctttcctttgactgctaggaatctcagaacaaaatttagtcact

SEQ ID NO: 54624 - DNA, 364 bp, Homo sapiens
  misc_feature 28: n = A,T,C or G
cgggcccccccctcgaggtacttctagnaattaattaacgcggggggatggaaaggatactcaaggcaaagcagagccactcggcctattccctagaaaggttttggacaaattatggtggaaaagccactaggaattcagcattgtgctgaaaacaaccctctttggtagccatatatataagtaaaatatgtaatattacctccagtttatagttgaggaaaccaaaacttggccaggcgcggtggttcacgcctgtaatcccagcactttgcgaggccgaggcgggtggatcacctgaggtcaggagtttgagaccagcctggccaacatggtgaaaccctgtctctaaaaaaaaaaaaaa

SEQ ID NO: 54625 - DNA, 587 bp, Homo sapiens
cggggccccccctcggaagtcttctagaattaattaacgcgggcccacaaaacattgattccaaaagctcagaaagatattacaagaaaggaaaattactggacaacaccttaggctgggaaatttagagaagcacatgtgagccaacttggtgagcaacaacagtctccactgcagttcactcttctggccattaaatatccctttgttcccttcgtcctgaaggtagagcatcttccaccactcctcacgaaagacaatccaaagtccaatctattatagctttgcatttcttagtcctctctatcaggaaaagacatggcttctcttacacctgtgaactgaaaagtcaagatgtctgcctcatatccatgtgatatgggttggctgtgtccccagccaaatctcatctggaattgtagctcccataattcccacatgtcatgggaggggcttggtgagagctaattgaatcatggggttgggtattttctcaggctgttctcataatagtgaataagtctcacaagatctgatggttttataaagaggaattcccctgcacaagctctcttgcctgctgacat

SEQ ID NO: 54626 - DNA, 461 bp, Homo sapiens
  misc_feature 28: n = A,T,C or G
cgggcccccccctcggggtacttctagnaattaattaacgcgggggtgggtctggtgcagcgtgaatctgctgcttgcttgcagtggggagttggagggagccaaactgggaagcagaggagtctgggaggccagtcacctggctctgtgatcaagaggtgaaattgggttgggtgcagtggctaacgcctgtaatcccagcactttgggaggccgaggtgggtgggtcacttgaggccaggagttcgagaccagcctggccaacatggtgaaactccccctctgtaaaaatgcaaaaattagctgggcgtaatggcgcacacttgtagtcccagctacttgggaggctgaggcacgagaattgcttgaacacaggaagcagaggttgcagtgagccaagatcttgccactgcaccccagtctgggcgatagagtgagaatctgtctaaaaaaaaaaaaaa

SEQ ID NO: 54627 - DNA, 614 bp, Homo sapiens
  misc_feature 33: n = A,T,C or G
ggtaccgggcccccccctcggagtacttctagnattaattaatgataaggaaccctacatttaagtctttcagttatacttgcatcagtcctctttgcctatcagaatgcggtttgtttctgccaacgaataactatcaaaccactgaggcctaactgatgtgtgattaatgtgggctccattaattgtgtggctgagttttatgcatgaagctgtatccttgatttttcacctttaatttcctcctgtttaactgctggtcataaaattgtttcaaatgtatctgctgagtctgagagcaagttttgcaacttgaaaagtgcctgagtcagtttgggcatcttgtttggtaaaaccgacttgggggaactcttaacgctgtaagatgaattgctacttggcttccactcccagccctgctggctcccttcctgccactgctcactggcactgcatctcatctattatcattaagcacatgcatagcattgataatggcaaaaggcttaataactttctttctgatagcccatcatatgtggctctattcaaccttattttagacagctagagatgatgacatctgtctttctggtctttttacattcatttac

SEQ ID NO: 54628 - DNA, 613 bp, Homo sapiens
cccccctcgagaagtcttctagaattaattaacgcggggatagcgatgttcactggactatccatttgctcctccacattccccagacctcttatacataggcagggtcatgtgactggccagtgacatgtcaaccagagtgaaatgcatccgttcttctgctgcatggaaaagcagatattggattctctagcctctctctgtctcactgccaggaccgatgatgacagtgttccacatagtgaagtcttcgtgggtttggggcctgcataagtgcccctctctgctacttgtagtgaactcacattacatatttttgctgtgctaagtcacagagctttttttcttgcagcagagcaacctagcctaacctaagcaatatgctatttaacaaattagccaatgagcacttggtttttactgactcacttgttcatgagggccccgaagagtccatagataaccaaggagaagttgaataaaggaagatttcagctcaaacataaaacaatacttttcacagagtcatgtggagatgaatgtgctgcttcaggacatggtgccatctctacttttgaacagatttgtagctgaggccatatggctttttgca

SEQ ID NO: 54629 - DNA, 596 bp, Homo sapiens
  misc_feature 27: n = A,T,C or G
cgggccccccctcgggagtcttctagnattaattaaccgggagacggaggctgcagggagccgagattgcaccactgcactccagcctgggcaacagatttgagactacatctcaaaaaaaaaaaaagaagattaaaactgtatgtgcctatactgaatggaactgaatttaagaaaaacatgctttcacagctgttctgatccatttcttctcaacagtgtattaaaaatatacattctaaatcttgctttaatgatatgcttgtctcatacataatatgaactgtagtttacaatatttcataagacactgaaaagtctaaatgccttatttatgaagatataatagatggtaaagtttaatgtgtattataaaagcaagattttatcactctcggccttctggttaagatcaagtatataaaagcaagattatcaaaataataattaactcaagaaaaatctagaaaagcttagcaaaaatgtatatatagctcttaaggaaaaaattaactcacgttacaccaggatgaagattatatttcttctttccaaatcgtgtttgctgagcaaagaaatcataacgttcagatttt

SEQ ID NO: 54630 - DNA, 482 bp, Homo sapiens
  misc_feature 28: n = A,T,C or G
ccgggccccccctcggaagtcttctagnattaattaacgcggggggggggtgcataacctaccatcgaacttttgatacatcctactactgagtgggtcctatcctcacctttttgtgggtgggggaaacaattcccatcatgttattattgtaatacacctcgcttctgggtgcactgtgacttcctgggggtgggacacagggggaaaccttcttgacccctcatgtgcccggcttctgcccaaaccagaccgcagatagccttgctattctgcctaacatcgggccatgatccttaacataactttaaacgtcctccctctatgacacaaatgaattgagggtaggaggagggtgcacataacccttaccctacctctgccaaaaagtgggggctgtactggggactgctccgatgatcttccttattgctacttctttcagccgcccctgtagcgacaggtctaacatctgactgcct

SEQ ID NO: 54631 - DNA, 596 bp, Homo sapiens
  misc_feature 23, 545: n = A,T,C or G
ccccccctcggagtacttctagnattaattaacgcggggtggaacggttggataatgtggtaggtgtatcccaaactgttttccaaagtgactgtaccagtttacattctaagagcagtgtatgaaggtttggtttttctacactgccaaacacttggcatgatcagtctttaatttctgccattccaatacatatgtagtggtatttcactgtggttttaatttgcatttctctaatgactaatgttgaacattattcatatgcttttattgggttgtttccttatcaagttgacagttcttcatatattctggatataaggcttttaccgatacatacgctttatcttggccaactttatttaaaaaaaaaaaaaaagtccgggcacggtggtctggacttctgagattcatctgtgtcgtacgtatcaataattctgtcttcatcctggaatactattccattgttaatccatttgcctgttgatagacatctgaattgtttccaatttggagctgctacaagtgaagctgttctgaagatntgtgtacaagtctatgtagacaggctttcttttctctagttaggggtggaa

SEQ ID NO: 54632 - DNA, 619 bp, Homo sapiens
  misc_feature 7, 27, 40, 598: n = A,T,C or G
gactggngtaccgggcccccccctcgngggtacttctagnattaattaacgcgggttcctgctgttcctttttgcatatgtaaatttaggcaaaaattttaaactttcacttgtatatacacacgcatactttggacactgaaatcttcagtgtatttggtgcttacatttaaataaaatgtcacattttataaattatcatataatgtatgtatatttcttgtgtaataacgtgatgaaattcttcagaaataaggtcctcactacacagatttttaaactagggaaagggtagaaaaaggaaaaaaactaggagtcaaaagtaattctattaagtccagtcaaaatagagttaaaagaaaaaaaaagtggaactctgccaaatagaggggcttgcccaagttctcttagtgaactctggtagatagcattaggatataatttatttcctggtgtcccctttgaactactttgtatccaagaagaggagttagacaatgagagagaaagtgaaagaacgagagagatgtagggagaaagagaagggggtaggttgattgagatttcaagacaatggaagtaattagcaaggataacnacagtgtccctatgctgccag

SEQ ID NO: 54633 - DNA, 585 bp, Homo sapiens
  misc_feature 24: n = A,T,C or G
gccccccctcgaaatacttctagnattaattaactactttgtactccagtttcatcctctgtcaactaaggataaagtagttcctcatagggttcgctggtgaatttaacgaataaagtatatagaacaatgcctgccacacagtaaatgctaaatttatcattgtaatatgctgactcttgataatgatgttggggcagaaaattttaacccaaagcaaatactgtattttttaaagagaataattaacaatattagcctcacttctatttattttttaaaaaatgctctaaaataaaatttaaatccaaatctcaaataagacaaatataattctaaatgccccctaaagttacaagtaattcttattgatataaaaaaattattatttgtttcctagtcaagccacaactgttttaggagccctgctcatcattgtcatgcatatgtaaaagtgaaatttagttcttcctaatttagttggaaataatactttaaaagcttaacagttgccattattttctcataatttaatataaatgacttatctttcccctattattcaaaggcctaagaaatacacta

SEQ ID NO: 54634 - DNA, 600 bp, Homo sapiens
  misc_feature 31: n = A,T,C or G
taccggggccccccctcgaaagtcttctagnattaattaacgcgggcgtattcattattaattcacatttacataagttcaaggttaactgaccaccctccacccacactataacactgtaatagattttcttgtattgcatcctagatatatgcctgtatttgtggattatgtgtgtgtgtgcgtgtgtatgtgtgtgtgtatgtgtgtgtatttgattcccagggatggcagaattagataaaagtgtctgccttattcacaaatattaagaaacatattcctatatatttgtggagtttcataatttttagcagtgaataagactagactttttcatacttttatgctagcacttagaattttcaccctctgaattatgttaatgtgaaagttgggtagttaaatcttagttttttaatttgctttttcctgaatattaacaaaattgagtgaatttttttgtattctggacatctgaatttccacttcaattacttattaataacaatgccccagtttaaactaagttattattttgtaatcaaatgtagggttttaaaaaatattttgaaactatttattttactgtcactagat

SEQ ID NO: 54635 - DNA, 535 bp, Homo sapiens
  misc_feature 23, 36: n = A,T,C or G
tgggtaccgggcccccccctcgngggtacttctagnattaattaacgcgggggtgtaatattcacagtctaggtgcagatattgctagtgtgactcactattagtgatggaagtgcgtcatacccttcctattgctgggaaagaaaataggacatgacctatctggtttcatatacccaagtaaatcataagggaaaaaaatttcctaaccactatcagctttcacgaaggaagctaggatagaaactacttgagaattcatatatttattaccacatagctgagacagactgtgagacacatggagcagatccagctatgttcaaccatatttaacctatgccaaagactccatggcattatcccagacactttactgttctgttgagtatcaacttagtttattctggactaggaaagggaaaacttacttatttgtcaagcttagtttttttctggactgggaaaagaaacacacttgactgtgatcaaatctgttacaatctctccaccactcttcctacaccgctgatca

SEQ ID NO: 54636 - DNA, 542 bp, Homo sapiens
  misc_feature 30: n = A,T,C or G
ccgggcccccccctcgggaagtacttctanaattaattaacgcggggaggaggaggttgcagtgagctgagattgagacactgcactccagcctgggctgatgagtgagaccctgtctcaaaacaaataaaaaaaaagataattttttttttctagaaagataaataatacacccttactactttgatctcaattatgttttagaaatcatgacatttctattagtctttaatcttaacagatgatatttagtaaacacatagtgccaggtactatagaatgactcaaatggttatcttcttttaatcatcataacaattcaataaagtaagtgctattattttcattcctcagaaaagaaaactgaagttcagagagttaagcaaccagctagggtcacacagctggtaagtcacagagccaggattgaaacattagtacatctgcctccaaagcacatacttctacactacctccatacacatatatgttattcaggcatccgaaaaacatctgtggagtacctattatgtgcaaaacta

SEQ ID NO: 54637 - DNA, 564 bp, Homo sapiens
  misc_feature 491: n = A,T,C or G
cggggccccccctcgggggtacttctagaattaattaacgcgggggggcatggattttctgtttaagtccttcaggaatcttcagctaggtggtaaatttaataagagtttctaaaaattgaaatgtttaacttttaaatattctggagatagaagaagaatataaaatgaaaccaggctgatctgcatgcagtggcatttacaactaactgatcacaaccaattatagattccttattttgtttattgcgaggcagagtctgactctgtcacccaggatggagtacagtgcatagctcactgcagtcttgacctcccaggctaaaccaatcattccacttcaccctcccaagtagctgagaccacaggcacacaacaccacaaccagctgattgttgtactgcttgtatagactggatctcactatgttgcccagactggtcttgaattcctgagctcaagcagtcctcccacctcagcctcccaaagtnttggaattacaggcgtgaggtacctcgcccagccccagttacagatttctttgttccttctctctcccactgc

SEQ ID NO: 54638 - DNA, 570 bp, Homo sapiens
cgggccccccctcggaagtcttctagaattaattaacgcgggcactatggtaataggtgttttatgattctctcctttgatcaacgtgtccggttatccaacttgtgaagctcttgtgagggcttctaaagtatgaagatgagaacaacaggttagttaatcttggcatgaccctagatacccagtcattatttgcatttaacgtgggatatcagaagtgtccttatgcgaatgctgtgtgcgtctattcctaatgaactgcttagtgtgatgtaggtagtgcctacgacacttcttctttgctcctctattttgctgtgtgggtctaattctaacacaaggccttttcgtcactgtccttacgcccgaggcctacctggtgatgatcagcttctgccccttcacttccatgctggcctctggcttctcagggtcctttcctggtctctcattgaagatgtgtatctttggttcctgcatgaactggcctagcaaaacagaatcagacattgattgacatgtaatcatagttaaataaaaagaggctcgttattgactccatgctacctt

SEQ ID NO: 54639 - DNA, 618 bp, Homo sapiens
  misc_feature 38: n = A,T,C or G
ctgggataccgggcccccccctcggaaatacttctagnattaattaacgcggggcgttctccagaatgccaacgcagatgagctctcacagtgaggtcttcccataaactttaccacatcctggtatatgacaaatgtgttgcttctttttaccaagattggtacctctaaaaaacacacatagaataatatatacttatatgaaaatattcaaatggacattaccatttacatcatatatccccatgttgaattttaaatagaagacattatcattacaaagtcaatcagaaaccaaaaccatttaaaatcagtttaaatgaaaatttatgtatttcaagcatatacattttatatattaaccttactccagaattaatgtgattgttgtccaaatgtaaatatgctcaagaattatgtaattaaaaggacatttcatatgtaaagaatgtacaataaagctatttattcttctatcagaaccattcacaaattctacgcataagcctgatccacttaattatataggaaactaaatgtggtctgtattcagaagtcgtcggataatcaaaaatatatttaaaccaaagaatgaatacgtaactgatcacaggtaca

SEQ ID NO: 54640 - DNA, 614 bp, Homo sapiens
  misc_feature 17: n = A,T,C or G
ccgggccccccctcggnagtcttctagaattaattaacgcgggggcgctgcatagagagagagaaaaaaaaggtaatggttttgactagtacaccatagccccattcccagctcagcacagaactagtgggtgaaatttcttaaatctaggcttctttctggagaagaaaatagttgaaacattcatctaatattccggctttttgaaaggtgaaggtgcccaggagactgtcttcagaatctcttgtctaggaacacgtctacaagggctgggaatattctatgtggctgggggccactttcaacaaggtcaacagtttggaatagtatgcattcactgtcagagtccctctcctggttctatgggacatgattaggaaatctcatagtcccccaatatctacctgggaaggaaagagaaaactgaagatctatttactgtctagtctttcaggtggctgcttttaatcttgcccatcccagaattctgattggatctagctaagtctagatgcctggtggccacagagaacagcaacaacagaaatagttcaatagtgtgctgcctctccagagggggttcagtacaacagatggattacagagggatcaag

SEQ ID NO: 54641 - DNA, 603 bp, Homo sapiens
cgggcccccccttcggggtacttctagaattaattaacgcggggtaggataggcggtggagtcagcagcctgggccacagggggagacaccttctcttaaaaatattttttggccacgcccggctaatttttgtatttttggtggagacgtggtttcaccgtgttggcaaggctggtctcaaactcctgacctctggtgatccatgcgtctcggactcccaaagtgctgggattgcagacctgagccaccgtacccagcccacattgccctgcttctaactgagattcaactttatttaagcaaaccaattccatgctcaacagagctaaaattaaaattctgctttaaggtagttttgtttttgttctcagaaaattttgctgttcacagatttatgattttcacttttctccgaggttaagcgtgtcatttattaaatgacttactagaatttatacgcctttttttttttttttttttgagatggagtcttgctctgtcacccaggctggagtgcagtggcgcgatctcagttcactgctacctctgcctcctgggttgaagcaattctcctgcctctgccccccgagtagctgggatta

SEQ ID NO: 54642 - DNA, 606 bp, Homo sapiens
cccccctcgagagtacttctagaattaattaacgcgggaggtcaggagatcgagaccatcctggctaacaaggtgaaaccccgtctctactaaaaatacaaaaaaattagccgggcgcggtggcgggcgcctgtagtcccagctactcgggaggctgaggcaggagaatggcgtgaacccgggaagcggagcttgcagtgagccgagattgcgccactgcagtccgcagtccggcctgggcgacagagcgagactccgtctcaaaaaaaaaaaaaaaaaaaaaaaagaagcagaaatagaaacagacccacaaagaaatagacccacacaaatatgcttaactaaattttgacaaaggtgaaagaaaacaatttaagagagaaaagacattcttggtcccgaagcaaacggacactcattgagaaaacaacaaaaaaaacaactagcttatatgaaaattaatttaaaatggaccatgaacttaaatgtaaattataaaaactataaaatttttccacacacacacaaaaaaaaccattggcatctaaagctaggcaaagtgttcttgttaaacttaatacaaaaaagaacaacctataaaagaaa

SEQ ID NO: 54643 - DNA, 433 bp, Homo sapiens
  misc_feature 17, 28, 44, 45, 361: n = A,T,C or G
cgggcccccccctcganatacttctagnattaattaacgcgggnngtggggagaaagaaggggaaaaaaagaagaatgcctatttgcaattaatgatccattccaaaacctttgactttaattttttttagtgatggaactgtttgcacaggttaatgtttaaaattcattttaaggtcaatcttttgtcccttcaagatagccactcattaacatatacagtgaaataatcttggactgagaacaaaggcagaggaaaagagctcataaatgttaaaaacagcaagaaagaggtgaccgcctagataataatttcaatttttttttaatggaacgatgattctgaggttgtgagagcatngaattttattgccatttaatttattgatcaaaaacaatccaaattgaggaatctccagaatataacttgatc

SEQ ID NO: 54644 - DNA, 577 bp, Homo sapiens
cggggccccccctcggggtacttctagaattaattaacgcgggttgggtggacaatatcaagcagatgggaaattcagagaaaaagtaggaaagacatctattttaactgggagaaaaataaaagagaagcaaattaatatatacagaaagggttatgtagctcttatagagaagtaaaaagaaagcaatcaaaactatggactgcattgcattgctctaaggattttaaagtgcagaattaaagttttggaaaactgcacagagtccattcccaggtgctcttgcaatgagagcactcctcatggtaatagcattacaagtctggagatgacttggggaagaatttgtgccatgaaaataaagagacaatgaaatttaaaattatatataaaaagtactgcattaaaatgtcgggtcagtgcaggtaataaagccgtagttgcttatccatatgatatcacctgttccactaattgatatttcttcctagaagcaaatctcaggagccaaaggtgcacaggtgccccatgtcactgggcctcgaataggaagaatactatagtatctacttatatt

SEQ ID NO: 54645 - DNA, 534 bp, Homo sapiens
  misc_feature 25: n = A,T,C or G
ggccccccctcggagtacttctagnattaattaacgcgggggatgtatatcattcctctccactgagtttcccctgcacaaacctgatcggaagataaaaagcgttacaaaaatttgagagacacaggtactagcttctatcgtgtcattaacctgaactatggcttgggtaaatcatttaatatcatactttctaaaatgagattaaagtccattcttctgatttgttgggcacacacttatcgtaacagatacatgttctacatggcacccagctatgtgcctcaaagggttattacaaagtccatgtagcgccattgacagtgacactaaaagagagaaaacttggtcaaaggaaaggtgtttgaccttagatttgccagattctggttgcacaggtgatcacacttctgctaggatatcctgtatgtatattactaataggttaatacacatgtgctgggctaagataactttctgatgcatttttccaagagtgtgaacagaattgagagataccttatgacatacacg

SEQ ID NO: 54646 - DNA, 591 bp, Homo sapiens
  misc_feature 16, 550: n = A,T,C or G
cgggccccccctcggnagtcttctagaattaattaacgcggggttcagcctatgcttgactgatcgcactagtgagggactcactacttccagaaataaatcattccatgcttggaaagctccaattgctaaaaatttcttctcagattgggctgaaatctgtctcccagtagcttctatatgttgattctagatctacctcttaaaagtgtatagaaaatagcttatttttcttccacatgacaactttcatatatttgaaaacagtttcgaaaactcctgaattctttctctctcatgctgaacatccccaggataaattattgagtggataggtaaattgcataaagaaaaatgtcaaagaaagaataatgtggaggggattgaaaaaatagaacagaaattcaactgagcatagcttcaaaacaaagattaagcagactgtcaataaaaagtagaagccaattaagggacataaaggtaaaatgggcgtagtcaagagtagcactgcatgctcgaatgcttttttttttaactcctaaaatatttntacctcttgagactgctttaggtaatcactgatttgtatag

SEQ ID NO: 54647 - DNA, 505 bp, Homo sapiens
  misc_feature 23, 58: n = A,T,C or G
ccccccctcggggtacttctagnattaattaacgcgggggcgggggactcttgccaanaagctatttagtggttctcttagagccttatctctatctaggctggagattaactcagaacatttttttagtctgtttacctctaaaatgaaaagaaatatatattaagaataaggaggtggcgtggagctttcactgaatgtatttcaactggagtattgaacgttatagtgatggatacagttaatccatcacaaccaccatttcaaaggaaagtggggaaaacctttgtccctgtgtgaaaaataacttaggaaattttggtctgacagttgtgagagggttaagaaagtcaatcattttgtaaccaggcacagcaatcttgtatgaaccatgtcaggatgttgtctgcatgccgtctttgctgatcacagtaatcgggtcataagagaaagggaagtaatagagtgtctcttagcaaccaaccccagtaaaaaaaaaaaaaaa

SEQ ID NO: 54648 - DNA, 585 bp, Homo sapiens
cgggccccccctcggaagtcttctagaattaattaacgcgggtatttaattgaatgcaattattctccaaatatagtcagattttcaattcctcagcctacaacagtttttgactgtcacaactgggagggaggtgttactggcattcagtaggtggagaccagggatgctgctagatgtgctacaaaacccagggcaggctcctaccacaaagaattacctggttcgaaatagtgctgtggctaacaaatctttatttaagattaatatgatagtgcaggggaaagattactgattagaaatcaaagaaagagaattctagtttaagtgaaatatgatgaggtttctcacatacataatgaagatactaccacatatgctacctaattgatggcgttatggtgaaaactaaataacatcatacatgtaaaatgatcctgtaaaccaaataaagtatcaaaatgaattgaaacacagtgtgaatcctttgagtttaaggaaaccaagatagaaatctgataatattatctgtgtaggtggttttcacatagaatatgtaaagattttaagtaagttatttaaacc

SEQ ID NO: 54649 - DNA, 347 bp, Homo sapiens
ccgggccccccctcggaagtcttctagaattaattaacgccggggacacaaggaagattccatattgcattgagaaatcatggtaaatttctttatgtggctacaaatatttcatctttaggagcagagatcgaggagaacatatgtagagtgcaccgaattagagaaaacatccgagcctattactttgttaagtttgccaaagaagtttttcacatagttgtggtagttatgtcatgtctcttgtttctaagacctgtgagtacattaaactttgttattttgagtctgtcctatgtcccctcttgtggaaacaccttactgattatcacaaaaaaaaaaaaaaa

SEQ ID NO: 54650 - DNA, 544 bp, Homo sapiens
ccgggccccccctcggaagtcttctagaattaattaacgcggggagatgcagagaaatgattgcagaagcttctgtctttactgcagccattgtggccagaagatgaagcaagtggctgggacccagggggcagatggggcctggtggatctggggtgatgataaagtggtctggcatccaattcaaggcacatgatataaatgtatgaggactattctgctgtcaggaaacataagaacatccttgtggaggcagaatcttgtggtgggcaggagttccagctctggaatttgaatcccagctcctgaatttactagctaggtgaccttgggcaagtttcatatgctttatgggcatcggttatctcatctttatagtagagaaaataatagcacctaccacccaaggttgttgggaaatttaaatgagttaatagatccacaatacttgcaacagtgtctggcacagactaagtgccagataaacataagttattgctgatattactgcctactaggagcctatgtacatgatgaactgata

SEQ ID NO: 54651 - DNA, 308 bp, Homo sapiens
gccccccctcgaatcttctagattattacgcgggggagactaattttagaaaacttgttgtattgtttagctcattgtcagggaatgtatgtttagaattgctcccaaaattctgttcaaggaatgaagtatcaattatttcctctgaaaagctgtttttctatgagttcttaatgaaaccatccttagcattaattgctctctcttttttaactttatttttgcatatgcttgttagtagttgttaagtagtctgccctgatattcttactatgaattttcattctgtctctttttctggtttcttt

SEQ ID NO: 54652 - DNA, 609 bp, Homo sapiens
cgggccccccctcggaagtcttctagaattaattaacgcgggggagggaaactagctgatgatactggtgcaagggaagtcctaacctagctcctcaatggctgtgctggggaaggacttcagcatcagtctctcctaagtgagctctgcctctgctctcttctctgtcataggccaacagttttttccaaactgcatgtctaaccattgtcaagatgctgcaggttgagcattcctaatacaaaaatgctaaaatctgaaatgctccaaaatctgaaactctctgagcaccaacatgatgctcaaaggaaatgctcattggaacattttggattttggatttccagattagggctgctcaaatggtatgttttctcaaatattccaagacccagaaaaatccaaaatctttaacattgctggtcccaagcattgttcagataaggaaaattcaatttatatttcaaactgccaagtttctcctctattatttaagcttagcctctctgcattaaacaaggagcttttggagagcaggaaccgtgctttgttcatttttgtgtccccggtacccaacccactgtttggcatatggtagatgctaatgtt

SEQ ID NO: 54653 - DNA, 540 bp, Homo sapiens
acttctagaattaattaacgcgggcattgtgtgtagtgtgtattttttcttaaatgtccttataaatactgagctgtgggggaggggagaggaggagcaactggtgcaggcacgctagtttctttagaaatgtcagctctgccagatcacttaagacttgttaaaagtacagatttcctggctctactaaacatcgtgtgatttctagaggccccaggtcatttttgacataaagctgggtttgtaaaccactgctgtgtgatatacagggagaatttaatttctgggtggtatttaataggtcacagtacagtcatatatatcactgcaacaagttagaaaaccacaattggatgaactttaaaaatcaatactaaaaaaaatattggagagctatggatgtaatgaggactagatgaattagaattccagaaatagaagagatctttataggtgagcagaggattgctgacatttgctgattctggacacacactgaaggaaagggaactagagaggaagtgcattttactaaaactg

SEQ ID NO: 54654 - DNA, 487 bp, Homo sapiens
ccccccctcggggtacttctagaattaattaacgcgggggctacctttctcaatgttttcgttcagatggcaattcctcttggtgtcggcaccaataaccttatcattctcatccacaacaatcagcatttcctccaagcgctgcaactgacgcctgtcaacccagtcaagatttatgtcagacatagctgctggctgtgacccgacctgaaatagatgcacacaaatgcctctttatgtgaaagatattgccatctcgtttttgctatgtgttaccaaccacattaggatttagcatacaccttctctacaagtgacagcaattgtgttgaagcagcacagttctgagatatggaaggtgaatcatctgtttctaatgtggtgtctctctgaacgggaaatcttgggtacatacatactcctcatgtgttccaggtttccttgagtgacgagttaaagaatccccgccccaccacacacacacaca

SEQ ID NO: 54655 - DNA, 575 bp, Homo sapiens
cccccctcgagaagtcttctagaattaattaacgcggggggagagagatggaagggggagaggaagagggggaggaaaaataaataaattaaataaataaatatataaataaacaaatagtggcattgagctacaaatgacatgcttagcatgtcattttcccctttaatgatcatttatccagcaattttatggtcaagcactatttttagggttccacatgcattaactgattcagtcctcaaaacaaccccaagaggtaggcactatttataattgtccccattttatagatgaagaaactgaggtcgaataatctggctgagcttacacagctagtaagtggtggggttggacttgaatccaagcagttcaactccagggtctgtgctcttaaactctacattatactgcttttgatcaagaatacgaagtggctgggcatggtgactcacctgtaatcccagcactttggaaggctgaggcaggtgaatcacgaggtcaggagttcaagaccagcctggccaagatggtgaaaccccatctctactaaaaatacaaaaaaaaaaaaaaaa

SEQ ID NO: 54656 - DNA, 610 bp, Homo sapiens
  misc_feature 516, 561, 569: n = A,T,C or G
gggtaccgggccccccctcggaatacttctagaattaattaacgcggggattaagtgtttccttacattattttttaaaaaccaaatcatttttctttaactaacttctattttttttaagaaaaaaaaatagactggtgggtactcacagaaaagttgtataagtccccctgttgctatttttgatgatagagaataaatagggtttttgaaacctttgtagtgttttttcttaaaatccactcttggcaatgcaataaaaaaaaccgtcaccataagccagtgacacctgactgaagctttttgtctttatcctgggaaaagtggcagcttgcaaggaacattacaaagtgcacttagaaattaggtggttaaactgtgccaattgttttcgttgttttataatatcattttccaaaactgtccagtaagttttattatttttaaaactagtttttcaactcattagttctaggctgtactctcttgtaagctttatgataaccactttagttntgtgaataataaattttattcttttgttaatacttgtatacaatntaattganaactgtagcttgcacactggaccagatgagtccctcactgg

SEQ ID NO: 54657 - DNA, 557 bp, Homo sapiens
  misc_feature 27: n = A,T,C or G
cgggccccccctcggaagtcttctagnattaattaatctgtatacttaccttcgctgcagatttccctaaaggaataaggctatgcattggtttcaaggctttatctcccctagttttcagttgtgaatgctgttgacactccaagcaattccttactgcgactgcacaaactgtaatttattttaaggaaaagatagggaaagaaaagttaatatttaagattatggaagtgaaaaacatcaactacacaatatgatttacataagattttattcaaaacagacgacattcagcttattcctaaaatgtccctagactttatcgcctagtgttggttgtctgatattgttagcttccatgctgtggcccagttaagatttagggaggcagtatggcctagtggtctaaacgtttagggtttgctgaaaggaaatcagttcaggaatcttaacaataggctactatttcttagatttacacaacagtaatctctatgaaccaaatatccacttttgtgagtgctgtttacatttgaggggacgggtatgggaggaat

SEQ ID NO: 54658 - DNA, 599 bp, Homo sapiens
ccgggccccccctcggaagtcttctagaattaattaacgcgggggtgatggttgcacaacagtgtgaatatacaccaataaattgggtggaggccgagagctcggggccgtgagcaagcctccaacgctccggtcccccggacccgccttttaaactcttattctaattcctttgtcttcgctggactcggggtacccgccgggtggtgtggggctggtttccccaacaacttcactctagcctgggcaaaagagcaaagctccgtctcaaacaaacaaagatagaaaccaaccagcagctctccttgctgagttctttgccacgtggccaccattttgtgcccacaggctttttgggggtgctgggaaaaggtgaaattttaacactgatgaaaaattagaggaattaaattcaaacaaaaaattaaaaataaaaagaacagcagaatttgacgcaccatcaaactggttgtgtcacccatcttcaagctgaaggtagtccaaagcctggaactgagtgtcgggggcacacacagagactcgggagaaaccctctgattctggctcgtggagcagaaaaggaaactcctaaccctcag

SEQ ID NO: 54659 - DNA, 575 bp, Homo sapiens
  misc_feature 12, 24: n = A,T,C or G
gccccccctcgngggtacttctanaattaattaacgcgggtccttttctacactaagactaaaattgtacctgtgggttttttttgtagctttttattataaaaacattcttccaaaacacaaaagtagagagagtagaatagtgaactttcatgtaactatcacagcttgaagaatgattagcagtctatatttttgtttcatctatcccatgcctaattatttttctgaagttttctaagaaaatctcaagtatcataccatttcattcattaatattttaatgtttctctaacaggtaaggccattttattgatgtgtaatatatacattaaaatatatggctcagccagatgcatgtaatcctagcactttgggaggcctaggtgggaggatcccttgagttccaggagtttgaggctacaatgagctacgattgcaccactgcactccagcctgggtaacagagtaagaccctgtctaaaaaatatctatattgctcaaataattttcacaaaatgaaaacactcatataaccacatcccatattaagaaatagaatattaccacactct

SEQ ID NO: 54660 - DNA, 475 bp, Homo sapiens
  misc_feature 32: n = A,T,C or G
gtacccgggccccccctcggggatcttctagnattaattaacgcggggctgtgacaaacagaccaggagccagtgtggagccgaccataggtcaaagttgtgacaatctgaacctcaaaaagaataatgagtttagtggattgaaacagattgaatcaatgaaaagtcaatgagtccataatgatatttttaaaagaaagtcatagaaacctcattcgtcaccatttgaggtgggtattaaaacaactctttgaaaactgggaaataaagtgaaagaactgatcttttattttctgcctttctgctagtaactgggtttcagggtaacaaatttgcccacctggtgaagaaaccttttttacatagaaatcctggccgataaatgaagaaagagtggtgggattttaaaaacattgtagaaactctaattaaattaactgcttcaagcaaagataatcaattggtgtcacaacaa

SEQ ID NO: 54661 - DNA, 586 bp, Homo sapiens
  misc_feature 28: n = A,T,C or G
cggggccccccctcggaagtcttctagnattaattaacgcggggaaaatatttgggaaaggcacatataccgactagtaattggggcaaattacttaatatctccatgtcagttccctcatcaaataaagaggataatgttagtgatgaggattaaatgagatactgtatgcaaagtgcccaaaagagtacccagtacagggtaagcattcaataaacatcaactctacttcccagagctcacttaatgcttccaatttggaaggggtttctaattttagctctgtgagtctgaaaggtccaaaacaaatatcagcagatacaaaaccacttgaaagcatgacaatataggttctgttttttggagacgaagtctcgctctgtcatccaggctggagtgtagtgacacaatcctggctcactacaacctccgcctcctgggttcaagcaattctcatgcctcagcctcgccaggccagtctcgaactcccaaccctcaagtgatctgtccacctcaggctcccgaagtacagggattacaggtgtgaaccaccatgcccgaccaacgttataatataggttcttat

SEQ ID NO: 54662 - DNA, 366 bp, Homo sapiens
  misc_feature 27: n = A,T,C or G
cgggccccccctcggaagtcttctagnattaattaacgcgggggaaggagttcagttttagacatgttgaactgcaaggagatttgatactataattaaggaatgtgttttaataaatttaataaacaatgaacacacattattcgcatttcccaaacaatttggatggtagatcaaaaagaatgagagtgaaaataaggggtctgtgaccactcaattaagattgagctaagagcaaggtcaagttcaaacccactataagcttcttgcatccatggtcactgactgttttcttactgttagctgtcctgttggacagtgtaacagtgagagagcatatacagattagcaaaaaaaaaaaaaaaa

SEQ ID NO: 54663 - DNA, 605 bp, Homo sapiens
cgggcccccccctcgaaagtcttctagaattaattaacgcgggcctttaattttctttatataatattagtgaatcctgggggaactgaaaatacaacaagaatattatggtacccatcttgtacttcccctggcagttcttatttgctgcttctgtttgtctgtgagctggaaattcagttaaccaagctttaaaggatgatttctgtatgtgaactaagtgggttcacctgtgaataaagtgcatggatttatggcatctgctttggttactcagagacttacctgcttatgatagtttttggcttgctagaacatttgcaggcagttgaggttcccatacaaggaatttctagataggtgatgtgttccttaatatttcttttacaatgtatgtaatcaaaagaaaaaaggtagctaacattatggatcatatacttggcattgttggtgagcacattcatatatgtattatctttttttttaatttttttttgagccaccatgcccagcctaaatcttttaaatccctactacagctaatataataaatattgaataaattgtagtttatttccttttccttgctaataaaagcgatgatg

SEQ ID NO: 54664 - DNA, 596 bp, Homo sapiens
  misc_feature 22, 510: n = A,T,C or G
cccccctcgaaagtcttctagnattaattaacgcggggggcagaggcaggcagatcacatgaggtcgggagtttgaggccagcttgaccaatatggagaaatcccgtctctactaaaaacacaaaaattagccacgcgtggtggcgcatgcctgtaatcccagctatttgggaggctgaggcagaagaatcacttgaacccaggaggtggaggttgcggtgagccgagatcgcaccattgcactccagtctgggcaacaagagcaaaactctgtctcaaaataaatagataaataaataaatcctgagctggtggtcaggtgtgtagaaacgtcagaaagcagtgtagcaaagtgctagtgggagaacccaggaagtgcacaaggtgttccttgtacaattccctcaactttgctgcatgtttgaaaactgtcctcataaaatgtcaagggcaaaaatatctttaactctcagaaatgtgcattaaattgctttctgtaatttgccttanaataatctttaaggccaggcgcggtggctcacacctgtaatcccagcactttgggaggccgagatgggcggatcaccttgagttgg

SEQ ID NO: 54665 - DNA, 573 bp, Homo sapiens
  misc_feature 498, 507: n = A,T,C or G
cgggcccccccctcggaagtcttctagaattaattaacgcgggggttcatgatcgcggttcccgggggcggcggcggccctctggccacaaccacagggagcagctgattgacatgcaccacgtgaattagagccaatgagtcaggatccccagagggcaatccatactgcccagccagtttacatggcaacacgtatccttttcagactacagactgacagcagggacctttgagcccagaaccctcttagcagacagaatccaaaactttgccaggctccattttctagagttagcatatgacatgaacctaaagctaaattttaaatatcagctgtctacacattcattcactaaggatgaattcctatttccccctatttatctgctcaatcaagtagacttccaggttcaaaatgaggcaaaaatcctagggtgctaccctcagaattcaacttaaaactaaaaataatgtactggaatcatatgagaaattntagagaganaaatctataaaccattctatacaggtatgttgagagtattaaaaataaggttaagacctatgaaac

SEQ ID NO: 54666 - DNA, 618 bp, Homo sapiens
  misc_feature 30: n = A,T,C or G
accgggcccccccctcggagtacttctagnattaattaacgcgggcaggagatcgagactatcctgggtaacacggtgaaaccccgtctctactaaaaatacaaaaaaattagccgggcctagtggcgggcgcctgtaatcccagctactccggaggctgaggcaggagaatggcgtggacccgggaggcggagcttgcagtgagccgagatcacaccactgcactctgtgacctgggcgacagagcgagactccgtctcaaaaaaaaaaaaagaaaagaaatgatttttcctcagctgtattttaagttccacatcagtgattcttaggaggagtgagaaaggtcccacgaagtaggtaattcaagggatatctcagaatccctcgaaatcctgatattccatttcagaagacagctttcctcaaccacccccaatttctccctgtcccccaggctggagtgcagtggtgtgatcttagctcactgcaacatctgcctcccaatgccccaaaattgaatccaatccctcaatcactaccagtataaatcaatgtaaatgacagaagtatagtgtgtgctaggacaaaggaaaaacaggtgaagaccttattctacat

SEQ ID NO: 54667 - DNA, 618 bp, Homo sapiens
  misc_feature 24: n = A,T,C or G
gccccccctcggaatacttctagnattaattaacgcgggccttatacttttgcatgatatttgaaagttttcagtgaagagcaattgtttatataatcttaaaaatatagactttaacttgatatacatctaacaaatgaaatatgttttctcttcaaaaatcattaaaatgactttggtaagaatacattttattcttccttacttattgaacctccaagcacatatccagtaaaatggtaaacggacaaaaggtggcacacagaagtattcgtttaactatgatttcaaattaactttaaaacacaatttcatccccacaatgaatgtgttcttgacaagtacatgtaaatccaagtttataaattaagctgcactatacatcaatgaaaagacattatttactttagggattctgccatggtcaataattaatcaagtatatgctacatatagatttaaatcttcatatattaaatctgttgaatatatcatacaactatagcttcacgtatttttttcttactgatggcataaatatattgaagcaaaaaaaaattcacaatcaccacataagtgtgtttagttttttttatttgaattttcaaacttttcact

SEQ ID NO: 54668 - DNA, 559 bp, Homo sapiens
  misc_feature 23: n = A,T,C or G
ccccccctcggggtacttctagnaattaattaacgcggggggcaaggatcgggaggccctggtcctgtagggccttgtagccttcgcagaggaagttgcattttttgtgtatgcattgggaagaagcagttgatggggtttaagcagggatggggcaggagtcgtgtaccagttttaaggcaatccctggctgctttgcagcagagattcaaggatgagctgaaagtctctatattgagaagttttgctcatcataatccgaaaggaaggggaagaaaacagtttggcagttcaccaacaagttaaacatacagggagtctctctgaacctattctggttcagggtctgcttgattgaaacaaaaaaacgaaaagaaaaagaatcaagttatacatagcatcactatatgacccaggaattccactcctaggcatacatccaagagaactgaagacaggcactcaaacaaacacctgtttatgcatgttcatagcagcagtattcataacagcaaaaagcaaaaatacacatcacataatactcattcacttttaacca

SEQ ID NO: 54669 - DNA, 617 bp, Homo sapiens
  misc_feature 23: n = A,T,C or G
gccccccctcggggtacttctanaattaattaacgcggggctctgggtaaactataaatatttcgggatgggtgaataaataaatgcatgtgttagtcatgaaaaaacatgtagaaatagcatagaaatattttcttctctgccagctcattactctgacatttttccagtatttccttgagaatatgaataatctttctattatatttaaagactgttcaagaaggggcttcagagaatactacttccacaaggaataagaaaagccgcaaataattttgctctgttgataacaatgagaatattctaagtaatctacaaaattataccttttttgagcctatcaaagaactaatcgttgcaaaataacttgatgaactgaattcaaaatggtaactaattcctcagtgggccacataaactgtttcacctttggtaaagtttatgaaacaaggtaacaaccagaaaagcagaaaagaagaaaacaactgaatttttttatgagttcttaaggatcccatgtaggggaacgtgacagtttagtctacccgaaggtcccagacactcctctaagggcttgattgcagaagctgtctttggatgctcaagagaaacat

SEQ ID NO: 54670 - DNA, 593 bp, Homo sapiens
cgggccccccctcggaagtcttctagaattaattaacgcgggagaatagcttttggccagtggatgtgctcttttgagaaagtcaattctgagctgaaatttcatgttggaacagtttcctctataagactcatcttgaaaggttcccgcagaagataaaatgtcatcctcacactgggcctgggcagtgcgcacttaactgggagggggcacaggcacctcagaacttaactggttttccaaactctcaatctcaaaaaaaaaaaaaaggcgggcggggggagcactttcagtgttgatgaaaccaaatgctcgtaacctgggaccaccgcccaacacctgcagtccagccttcccccagggttgacagcatcagcctctggaccctgcagttgcagttcatttctgcgcagctctaatcgttagaaagttctgccttaccggctgggcgcggtgggttttactcttaaaaacaaacaataaaaaaaccacacactattctgcagtctcttgaatcttctaagattaaaattaaatctgagaaaatttacttcaactttcccacccaccaaaaaaacagaattaactgaaga

SEQ ID NO: 54671 - DNA, 436 bp, Homo sapiens
  misc_feature 40, 89, 90: n = A,T,C or G
agactggggtaccgggcccccccctcggggtacttctagnattaattaacgcgggtaggtaaaagagaggggtactatcatatcagggnnattcgggagaaaaataaagagagagagagaggggaagagtgctgtggacccattgagctccagcccagctccaactctgtgggtcaggaaagactttccagcatctaagctgagtccagaaggatgagtaggagtgagccagctgaggaggagctggggtggaaggaaagcattccagagcagcagatagcttgtgcaaaggcacacaggcagctgggtgtggtggctcacacctgtaatcccagcactgtgggaggccaagatgggtggaccgtttgagcccaggaattcaagaccaacctggatgacatagtgaaaccctgtctctaccaaaaaaaaaaaaaaa

SEQ ID NO: 54672 - DNA, 608 bp, Homo sapiens
  misc_feature 28: n = A,T,C or G
cgggcccccccctcgaggtacttctagnattaattaacgcgggactcaccagaatttgcaaatagtaatgacaaagatgatcaaggtaagcatgagtgtataattgaacatgtaacatatgaagatgtgtgttttgtgtttcatggcaatttctgttactctgtcatttattcatcaccttgctctgttactctttaatgtcaacatctttaatcatcagatttagactttcccatcttaatcttggtaaaaagtgaatacatggtaaggattttattaaaccaggcaaatttttaaactagttccacagagaatccatagaatggacacatttgtagggatattgaaatgaatatataaatagaggtacaactggttgttctatggggtgaggaaagaaattgaatctttgctggacaagaaagttggaaattctacaaagagaactggtttgatggaaaagatttaagcagctttatatgtatatatttattatatatatgtgtatatattagcctgtgttctctctcccagttattttgttaaactactttaaagtcatgcctgactgagagtgcagagtaggaacatttgataaagattaaaaa

SEQ ID NO: 54673 - DNA, 572 bp, Homo sapiens
  misc_feature 9: n = A,T,C or G
acttctagnattaattaacgcgggctgggacatcatgatggacaaaaggactcggatctgggcagagtccccatgtgcacgccgcttctatcgggcactccagggtccgagaggattcccctagagctgcacgactccctggtgttatctgttcaaagttcacccaccatttctgatcaattagaccagggtttctcaacagggaccctactgacattgggggccagatcattctttgtggtgggactgccctgtggctcaaacgctgcctcttcccaccacctccccactattctgataacctccaccatctccacacattgtgagatgtcccctagagggcaaaatcacccccaggttggaacctcagagttagttcaggtgaggtaggaggcgggactcaactctggaggcagggctcagacactggacctaactgaggactaatgattaaaacaggtagggggcagggaggagcaacgtgagtgctgctctcctgccaagggctttcacggagcctctggtgcctggcgctgccctgaggagccagaagctctctgagtctgagtggt

SEQ ID NO: 54674 - DNA, 605 bp, Homo sapiens
gggccccccctcgaagtacttctagaattaattaacgcgggttcttgataaattggctgtatccaggtagcaggcaaaatgaaccccttgggtggttacaagaatatatcccagttgttaagcaacacatgactgtatttattaagtcttaactcttgttgtgacagtagggatacatgttataaaaagttagccatatccctgctttccaagattttctagtataatcattaagataacttacatcctgaaatttctggaggagtgctgattacaagtgttttatggctaagatatattgttacagaatttttcattttttttcttgaaaaagcaacaaaagtttgaatctgctgtttattaattagtgagcacacttgttttcaaatcatttaaaaaacacaaaacaaaatcctttaaatgctattaaacatcaaaatataaaagatgagatctgatacacgcaaaaacttcctaaagagacagaatggctcccagggcagaataagcagccaaaatgatggtattgatacacttaaaaagaggccaggcacagtggctcacacctgtaatgccagcactctaagacgccgaggccagtggat

SEQ ID NO: 54675 - DNA, 566 bp, Homo sapiens
cccccctcgagggtacttctagaattaattaacgcggggagtgtgtgtgtgttctaaagggaccatgaggtcaaataagcaaatctcaggagaactttaagaaacctttttgaactgaatgaaaatgaaatcacttacataaaattggagcggttccagctaaaggaagtttgaaagggaagtttatttcactaaatgcatatattagaaaggatgaaatgtctcagagagaaagaacaattttagctcaaataaaatatgagggaaataataaaaattaataaagaaatcaatgacaatgaaagcagaaaagcaataaaaacatcatttaaacgaacatccagtttcttttgaaatgattaatcaaattaacaagaatctgacaaagaaggaagatatattattaatatcaagaatgaaagagagcacatcactactgaacctacagatattaaaaaataagggaacactgtaaacatgctatgaccattaatttgacaacttagataaaatgaacaaagttcttgaaacaaataacaaagactggctcaaaaaatggtaatgtg

SEQ ID NO: 54676 - DNA, 575 bp, Homo sapiens
  misc_feature 28: n = A,T,C or G
cgggcccccccctcggagtacttctagnattaattaattacgccttcaaggaacaactcagcccagcctgagttttcttacagctaacaacaaaacaacaatgtgacacaattgctgttaccatacaacccactagaggggttacagatattctaagtctcaccacaaccctaaaaggtagttatattccaatagactgatgaggaaactgaagttcatagctagagatacaagatttaagcccagacctatttcattccaaatcccttaccatagccctgcatagcccagaaatatctacttctgcttcattaacataaacccaggtgtggttgaagaagacatcttatgagtaataaaagacactttttttcacctttatctggagctatttcaggaactaaagacaaaacccaaatataatcaaaaatgatcctatagctctaatcactgaggaaattacaagagttttagaagctgtaagccaggaaccatagacaatgaccaatatatatatatatttcttattatatcataatataataatatttctcatgtgaaagttacttatctat

SEQ ID NO: 54677 - DNA, 611 bp, Homo sapiens
gggccccccctcggagtacttctagaattaattaacgcgggacccttcctaggctagatcagtcctctctgcaataagcgctcgtggatcagtgttcctttcctttaggaccctgccctcagccggccagcacacattccttacgtgtggactgactattggatttatgacaattccctgcactggacagactgtaagctccataagatgccttgtttgcttttgcccatcattgaatcgccaatgcctagcgagatgcctggcacataatagttgctcagtaagcatgtgtggaaggaagtaagggaaaaaacaaaggaaaagaaagaaggaaaacaataagtccccagcctcacattttagaaaaccacatagcaacatattcacacagcaccaatattcattttacataatagctgaaattcagcaggcaggtttccaagttttatcttggttttatgggcttggtgaaatcgccaaagttctctaatgtggggtttcttttatttattttcacatacagttgtagaatgcctactaaatgcaaggtatgtgttagaagaatgcttctcaactgccgggcgtggtggctcacgcatgtaatcccagca

SEQ ID NO: 54678 - DNA, 609 bp, Homo sapiens
  misc_feature 28: n = A,T,C or G
cgggcccccccctcggggtacttctagnattaattaacgcggggaccaatgatgagtattctggggtgtctgaatcaatgattttgattaaaccctgtaactctgaggtccattttaagaggagacctagttaatacctatatggtaaatgatattatagtggaagttagaattatttgggattttgttcttaggtggttgaagttcataggtgtgcattgtattactagaaaagatttagtaaatgaaaaatgaaacaaatatgtaaataaaggaagacaagtagagccatatgttgcctaattatgagaatgtataatgtatttattattattaacacacttctgaagcactcagtttcaacataaattgattaaatctgatacctatttgggtaaggaatatacatacagagacaagtacctagaaatcagtattgtttgtcctgcattatttagatgttgctgtttcttaatgaacacaagaaaatatgatctagtctgggaatcatgagcaaatgacaggtgttaacgccattcatatttctgatgcaatctgtatgttcacagatattgatgatgtcatgagtgaatgtatacacaggagtga

SEQ ID NO: 54679 - DNA, 558 bp, Homo sapiens
  misc_feature 25, 542: n = A,T,C or G
gccccccctcggaggtacttctagnattaattaacgcgggggaaaataatatcaaaatacttagatttagcaacaaatgcagaaaagggtccatttattactaaagctaaacacactgtaacccatggtgatataatctgactaaattggcaataataggcagtactaagtatttctaggagcaccttttttttttgcttaaaaaaatcatcttaccaattgcagaggagaattctttgaagtttataaggcaatcagagttttcatctaacaatctgaatgtccataaagctagtgagtctttatttgcagaatgagcccagggactcaacaagtgatacaacgctctgaactgctggcagtcaatctgatactgttccaaatatggcagactggggtcatgatgcttcaatactgggcaacccaaacaccaataacaagataaaaacagctctttctattaaaaaataaataaaaaaggaaagttactaattagaaaaagtaattttggaagattttaaaaaccatgtctgctaaaatanagataaaaataattag

SEQ ID NO: 54680 - DNA, 619 bp, Homo sapiens
  misc_feature 23, 560: n = A,T,C or G
ccccccctcggggtacttctagnattaattaattattgaagatctagtgtggtggtaactgaatggttccaaaggcaatgcccctcaatcacatcatagtcagaatcattaatctgagaaatgaaaacaagaaagaggagagaaaaatcaggaattttgtggtcaaaaaggagaataaatacaataaaatttttggaatgtagagaaatctggaccactaaggtggctgcgcagtgtatgtttcaataagaatttctcaaccttggtactattgatatgctgggctggaaaattctgtgctttgggggtggtcatgtacacagtaggatatttagcagtatccctggcctccacccactagatgtcagtagcattcctctccccagaattgtgacaacaaaacatttctccaaatattgccagatgtttcctgggaggcatcctaccccagccttaagctatttggttaaaaagaagaaataggtattttcagaagcaaattgtaagaaatacaaggatggtaggtgaaaaagaaaacccaagaaataacacgaactggntaacaaaaaaagaagaaacttccaaagtaaatatcatattttaaatcataagcaaaaaa

SEQ ID NO: 54681 - DNA, 464 bp, Homo sapiens
gggccccccctcggaagtcttctagaattaattaacgcgggggaagacttacataaaaagttcgtatggcaccattttactccatacttcatttttctgatttttgttttttgttttgagacggagtctagccactgcgcccaggcttgtaagtctttaagttcatattgtcattaatgttaatggtagtaccttgcagaatttgtacatatacactgactattgtttactgcttactaagaacttggcttacatatattatctcatttgatcctaaccattttgggaagtaggtactgttatctctatagatgaagaaagggaagcttacataaatttaagtaacttgttcatatctctcaactagtaagaactgggattcaaagtagatctctctgactccaaagtcttgctttgttcgtattattttactctgctccctgtattataaaaaaaaaaaaaaa

SEQ ID NO: 54682 - DNA, 512 bp, Homo sapiens
cggggccccccctcggaggatacttctagattaattaacgcgggtcctctccatgtgaagacgaaggaatgtgagagagctggaagcagctcttataaaaagtctttttggatgtagagagccgcttcattactccttctgcagccttgtcagtgtgtggaccatggtcaggtagcatcagtatcacctaggaacttgttagaaatgcagattcccaggccccaccctgggtcaacagaatcaaaacctgcattttaaacaagatccctagatgatacacactcatatttacatttgagaagcccttgcctggctcaatgtctcatacctgtaatcccagcactgtgggaggcccaggcaagtagatgcaaggagttcaagaccagcctggccaacatcgtcaaaccccgactctactaaaaatacaaaaatttgccgggcatgatggcaggcgcctgttatcccatctgctcaggaggctgaaggcaggaaaattgctttgaactccggga

SEQ ID NO: 54683 - DNA, 454 bp, Homo sapiens
  misc_feature 383, 405: n = A,T,C or G
ccgggccccccctcggaagtcttctagaattaattaacgcgggggtggggaatctccaggatagtaccctacataccactctctgagtatgaatgagtctgtaatcatctgtccacctcaatgccccgtgaaattccctatagcccttcctagctgtgtaatctcaggcaggttacctagcctctctgagcctctggctttttgtcttaagaaaatggttactaagatctgcattgcagggctgagaaacaacacatgcaatacccctgccaggatggtgggcccagagtcgggctcaggcaatggcggctgttgcaggcccctgtgccatcttctcttatcaattcttcctcatttatgctctaaattttgttttgccctgngccaatacacctgtgatatatntattggaggttcttattccagagaatagagacaggagggcagagtgagc

SEQ ID NO: 54684 - DNA, 415 bp, Homo sapiens
cgggcccccccctcgagagtcttctagaattaattaacgcgggcctgtgattggctgaagcttggctactgtaattgagactcagctatttgttacaagaatatagtcttattaaggttgcagtttctttacatactaagttagtttgcagtttactctgtagggattcaaagtacaaaggcagccttaggacaaatttaatttaatttaacaaaataaatccataatttttttaaacacttgagatccagggaattttgtgttattctcagttcgagcaatgtgattgttctatgtgattatggatgacactaagcctgttttctcatttttcttcttctacacatggattttaagaaattggagattattgcagggtgtgtgtgtgtgtgtgcatgcatgtgtggggtttctg

SEQ ID NO: 54685 - DNA, 588 bp, Homo sapiens
  misc_feature 28, 556: n = A,T,C or G
cgggcccccccctcggaagtcttctagnattaattaacgcggggtagcgtggaccccaacgccctaagcatcttgtttatggtagaatcatagacttccctgacaaggcctgttcactggctggcctcttttagagccaccatttttccacctttgcttcccaacccccacccgcctccctttcttcctctagttccatggagcatttgctgactggtaattttaccaaccattgctgcaaacccagaagttcatttcgtcactggcaatcagctcctgtccgcagggaaacctaattaggtactacaggatttttgatgttgcttccatggtaacccccgtagtaatggtgtacatgcagaatatatgctccagggtgtttaaatttatatatgtatatatatatatataaaatataaaacatattgtatatataaataatatatcttaagaaaatctgtaattttttcttcttgctttgtttctgtgtcgtttttttaaatgatggaaattttcccggaagttcttctccccacagagagagaacagtacacanaaaggctttttccattttctctcccttaattt

SEQ ID NO: 54686 - DNA, 627 bp, Homo sapiens
cgggcccccccctcgaggtacttctagaattaattaacgcgggggtatactattgtaatactatacatgaatagcataatattacttaaaggtagatagcgataagttaaagatgtataccataaaccctaaaatttagagttggccaggcacagtgactcacgcctgtaattccagtactttgggaggctaaggcaggtggatcacttcaggtcaggagtttgagcctggccaacaaggtgaaacctcatgtttactaaaaatacaaaaattagccgggcatggtggtaggtgcctgtaatcccaactactcaagaggctgaggcatgagaatagcttgagcgtgggagacagaggttgcagtgagcccagatagcaccactgcactccagcctgggtggcagagtaagaccctgtctcaataaataaataaataaataaataaaatttagagtttatcacttaaataccacaacaaagagttatagctaataagccaacaaagaagataaaacagaatcataaaaagtattcagctaaaccaaaggaagacagaagagaagataaaaggaataaagaaacatgggtcaaataccaaacagggcaagatgacagcattaataaaat

SEQ ID NO: 54687 - DNA, 628 bp, Homo sapiens
  misc_feature 24, 37: n = A,T,C or G
tgggttaccgggcccccccctcgngagtacttctagnattaattaacgcgggagtggtgcaatcatggctcactgcagcctcagcctcctgggttcaagcgatcctcccacctcagcctcccaagtagctagaactaaaggggtgcaccaccacacctagctaaattttttaaattttttgtagaaccagggtttcactatgttgcccaggctggtcttgaactcctgggctcaagcaatcctcctggcttggcctccaaagtggtgggattacaggtgtgtaccaccacacctggcctacaaagtcctctttaaaattagaggtgccccaaaagttgtatgctactcatagagaacctagtagtacctaatgtggtgattctgaagggggcagaggagaccagggaaatgaattccaggaagacagggaaggccttttccaacaacatgaaatagattcagatgtaccctccagattctccagtatgcaggtcccttctattttcagaatactacagacccttgaacaacatgggtttgaaccgcgtgggtccacttgtatgcaggtttttttccataaacgttgcatcgaatgtgcctgcctctccttgcacctctgccaccactt

SEQ ID NO: 54688 - DNA, 589 bp, Homo sapiens
cgggccccccctcggaagtcttctagaattaattaacgcggggacacatatcttaagaaggaaatctttagagttagattttttgagttcaaatcctagtgctgttgcttgatggttgtgggaccttgggtaattacttaaccttactgtgcttcagtttctctatcagaacaaaagggataataattatacctagccctttggatagtcgaaaggactaaataaaataatacttgcaaaatgcttatcatgatacttggccataggaagtgcgaaaaaaatatcagcagttattacaaagtggcaggccctgagttaatatgttttgggctggctcaggtcctgatttggctgtcaaactgcatggatctgtggctctgaatatgaattaccaggggtcagctctcttcttagcaacacaccctcgccccccgctgataccatttaaaaattctggataaaatagaaaaatcattttactaaatgcaatgaaccagtaagaaagtaatgaatactcatgccaaaagctcagtgaagagggttcagttgagcactgaagctggatttgccttgaggacatttgccaaac

SEQ ID NO: 54689 - DNA, 502 bp, Homo sapiens
  misc_feature 465: n = A,T,C or G
ccccctcgagagtcttctagaattaattaacgcggggggtggcttagaatttactgctagaaaatgaggattgtggattttattttacgtaagagatgtgttgctttctttgcaagagaaaaaatatcttggacccaaagaggacttttctaaagagatagagatggctcagtaaaagcacacctcattactagaaaaacaacccaaaacatgtatattattaagagtgggttaacagtctcatttttacatgtaacaaagcaaaagtaaaattttaactccactgagagagccacttaagtggttgtagtgaccagatgagaacatgtcctggatttaaaaaaaaaaaaagttgtagtgaaaaaagttgtagtgaaaaaaaaaatagttgtagtgaaaatctgtttgaaagtacaaaatgagaaatgagtctatcttttcagagttaatattcaccaccacgtntttattcttactttgctataaaaattgcctaggcagt

SEQ ID NO: 54690 - DNA, 598 bp, Homo sapiens
  misc_feature 13: n = A,T,C or G
cgggccccccccntcggggtacttctagaattaattaacgcggggtccattctgaactatttgcagcatcgagaacatatcatttatcccacagctgtgcttttaaataagtttcctccttctgaaataccctgctttccaatatctgctagccctcaagactcagctccagggtcacctcctctggtgatctttatcctgaactttccaagctgaacgagttccttcttcgtacccccaaagtacactggatgcccctttcattgtagcagttactcaatgggctgtgaatattggcttagttgtctatctccttgactagctgagaggtctttgatggcaggcactcagaaatatttctgaatgaatgagtgaatgaatgaatgaatgaatgaaatccaccctccccctgcatatgaagcctttacaaacaaaaacttacttgagtatggccatttttccactgagtgttataacatatacagacaggacctttcctctatagtgttttactacgagtttcattaaactttagaaggtcattaacttaggatttcagaaacttccaggaccaggttatgaacacaaagttcttgta

SEQ ID NO: 54691 - DNA, 607 bp, Homo sapiens
  misc_feature 37: n = A,T,C or G
ctggggtaccgggcccccccctcggagtacttctagnattaattaacgcgggcccaaactgatctttctgttttgttttccattgcagttaaaagcttcatcatctactcagccaaaattaagagtctgtaagattttctgacttctccctctccatgatcctttctgttgaattagcatccaaatattgttgcttctttctcagaagtacctcaagaattcaaccctttttgttgttaaaaggaagttctttacaaccaaaagactgaggtttaaattctgtctccagcactactatctgtgtgacctggggctcattacttgaaaacttcctgggtctcagatttctggtctataaaatggaaataagtatagtacctctgtcatggggattatggaacttagaacagtacctgtatatgttaagtgctacagaaatattagatattattatttttatcatttaatcaatcttcactcggatagccactgacctactttatctcttggctagaatattgaaacagctttttaactggtctcctaattctagctctgcccattccattttctatccacagtaaagaggttatgtcagtcaggggcc

SEQ ID NO: 54692 - DNA, 561 bp, Homo sapiens
  misc_feature 25, 38: n = A,T,C or G
ctgggttaccgggcccccccctcgngggtacttctagnattaattaacgcgggaatgtgacattatttgaaagtaggggccgggcgcagtggctcaagcctgtaatcccagcacttcgggaggccaaggcgggtgcatcacctgaggtcaggagttcgagaccagcctggctaaaatggtgaaaccccgtttctactaaaaatacaaaattagccggtcatggtggtgggtgcctgtaatcccagctactagggaggctgaggaaggagaatcactgaatccaggaggtggaggttgctgtgagccgggatggtgccactgcactccagcctggggcaacaaagtgagactccatctcaaaaaaaaaaaaaaaaaaagaaaagaaagtagggtcgtttcagatgtaactaaagttgggaatgaggtcacactggagtaggatgggcctgtaacccaatatgactgatgtccttataagaagaggaaaagaaactaaaaggaaacttaaaagaaaataaaaaaacacaaaatccttctagtaggagatagctaaaaaaaaaa

SEQ ID NO: 54693 - DNA, 624 bp, Homo sapiens
  misc_feature 605: n = A,T,C or G
ccgggccccccctcggggtacttctagaattaattaacgcgggtttgattgaagagtgctgctctggagcataaccagaaccttcacccaggcatcctaggcctaggcttactctcctccttgcccattacccttagcacacagtcttcactccacctgctactgtcctcctcttcatggtcattattacaattagaattaaaatagtaatgactcctgtttatttaatgcatattatatgccaagtacataccatgtttatgagattatgaaaaaacaaaacaaagaagcctcataagaccatttggtttctttgttttttgtttgtttgtttttgtttttgttttgttttgttttgtttttaagcttaatttcacagtagaggaaaatgaggtttagcaagggtaagtctattttacaaagacaaagagctaattgtctgtggggcctgaaataaaacccaggtctgtctggcccaaagccaaggcttttcccctaacctgtgggcccctctgccggaagtcatttggaaatgtctggagacattttggattgtcaccactggagcaagagctactgacatctaatgattagaggtggccagngatgctgctaaacctccta

SEQ ID NO: 54694 - DNA, 486 bp, Homo sapiens
  misc_feature 25: n = A,T,C or G
ggccccccctcgaggtacttctagnattaattaaaagttatggtatttgtaacagaaaaatatttgctaacaaccaggtatctttttttattctacacatgggtagcagggtgaaactcagctctgtgaaaggaaaaaagagatactgaaatccagtcttggttgtaacttggttatgtggatttggccaattcatttaacctcttgtgccagagaagtctccatcaatattagagtattggattaaaccatctgcaaggtactttccagttctatgaatctgtaactgtaaataagatataacctacaccacattacgatattaagaaatattaagtttaggaaacagcacaaataactaggacataagcttataagctctgcttttctcactaccatttcactcaatgtacttctatctccactcacgcagttatctttttgaaaagaaatataaagcattcctaaaaaaaaaaaaaaaaaaaa

SEQ ID NO: 54695 - DNA, 615 bp, Homo sapiens
gggccccccctcggaagtcttctagaattaattaacgcgggcagaaaatattgccttaataactactgaagcaatgtgagtgtaatgaagatacttgcctgagctatgcctcagggtcgaaaggagaagagtcataagtcacagtggtttcattcgctattttagtgagattatataagatgttgataaaatatctgttgattggaaggggcctgatgcagaatttctctttaaaggatgaaacaataaaagcagctgacacttactgagcacttattgtgtgcaaagctctgttctgtgtgctcatttacttttttccagccaccctatgaagcccaggtagtactcatatttccttattttactgtaaggaaattgaggcataaaaaggtgaaggtgggaagatacagagccgggatttagatccggggagtctgattacagagtctgagattctgtgacatccacattcagggagaaactactatattgactcgtaagtggttgttattaagattgaagtccgctgtcctcattaagattgatgtgcgcttacatcatagagataatggaattgatgcagccatccaatgtagataccagtttcgtttacag

SEQ ID NO: 54696 - DNA, 496 bp, Homo sapiens
cggggccccccctcgaaagtcttctagaattaattaacgcgggggaaaggggggatgtcagttaaagggtaccaaccttcaagtataagatgaaaaatttctggaaatctaatgtacagcataattaactatagctagtaatactatactgtatacctgcaatttgctaagagagtacatcctaatgttctctctcacacacacaaacataaaaaaaattggtaactacgtaaggtgatacacgtgttagctaacttggttatggtaagtttcacaatataaacatgtatcaaatcaccatgtcatataccttaaatatacacaattttattgtcaattatacctcaaaaaagctggagggagaaatgagaaaaggaaaacaaaaactttttctggtaccaatgcattccaaatgaccctgaatttctaagtagaatattatactttttaaaagactttcagatgtaattcctaagctctaaaaaaaaaaaaaaaa

SEQ ID NO: 54697 - DNA, 529 bp, Homo sapiens
  misc_feature 504: n = A,T,C or G
ccgggccccccctcggaagtcttctagaattaattaacgcgggcagtgtgcattgtgtgggtcttgtcatgggtgcataagtggaaatgaatatgatttatgccatgatttgtcactgtgatgtcttgtaacacaatatcagggctgtaccatggtgtcagggctgctggctgaggtggttcaggttgtgcttttgcaaagttacaggggcactcttcacatcatagttaccacagatatatgtggatagataggtagctagatatagatacaggtagtaactatgccagttttctagcatatgatagcaaagcaccttgaggaacaaatatctgttgctaatccacacaaaatcaaacctgccatctgggctattgggggggagcagtaccatagagtgaagagaaaggctttggtgataaattcctagtctgccacttatgagctgggtgtgaccttgggtatatcatttaatttttctgaatttcaatttttttatttgcnaaatgggcatgatgatgatatttat

SEQ ID NO: 54698 - DNA, 593 bp, Homo sapiens
  misc_feature 27: n = A,T,C or G
cgggccccccctcggaagtcttctagnattaattaacgcggggagctgagattgcaccactgcactctagcctgggcaacagagcgagactctgtctcaaaagaaaaaaaaaaaaaaaagaaagaaagaaagaaagaaagaaaaagcaagtgtgaggatcccagagacaaggtttaggcagtagcagagaaattcatgatgagatgaagaaagacttccacttccactagtggtgggttaggctgtttggaccaaccctccttcgagaaacaactaaacatgctggatgaattgaacatcttagaagcacgtaagagttaatcatatagtaggatattaccaggccaaaactaaaaggaaaacaggaacccaaagagataagcagagctgggaagtcactttggaaccaagggcattggctgaatccagtaatttgaacttttgttttgatggccttgtgggataagagaggcagaaatcaaaagtgcagtctaattggagaccctctccataataacagagaccccaaagccctacactctcaggaaaaaggtgaaccaaaaataaactagacctagccaggctcagtgatg

SEQ ID NO: 54699 - DNA, 619 bp, Homo sapiens
ccgggccccccctcgaaagtcttctagaattaattaattttaatttcaaaaactgcaattacttttgcaccaacctaactgctgtgcttgtcactttttgtactttttgttgcttatcactattgattcccatgtttctgcaactctcttctcagcataatgccttttggttactgctactaataagctaaaggcacaaaaccccgtctctaccaaaaatacaatattagccgggcatggtggcgggcacctgtaatcccagctactcgagaggctgaggcaggagaagtgcttgaaccctggaggtggaggttacaatgaactgagatcgtgccattgcactccagcctgggcaacaagagcgaaactccgtctcaaaaaaaaaagatttctagtatgaacaaaagtcagtacgaagcattttacagtataaaagttctgtgtattaggggaaaggagttattctagagtggtgaggttgccaggagactagcctccagataaacagggtggttgaacttaacgctgttcaatacaatagccactagtcacatgtgggtatttaagtttaaattttcattattattattattattttttaagagacagggtcttgctc

SEQ ID NO: 54700 - DNA, 560 bp, Homo sapiens
  misc_feature 519: n = A,T,C or G
cggggccccccctcggggtacttctagaattaattaacgcgggggggggttgggaaagagcaccactgctagctgtctttttcagttgaaccttttcctgctcttcaagagaaaatcagtttagaatctaaagaaaggagcagggaggatgaaggaaactatacttacagagtgaggcttttttaaaaaattaaattaatgttagaacttaaattatatgaaacaaagtaaataatgaaggaaaaagataatgtttgctgaattataaagtatcttttgtagccaaacaaaatgtaaacagaaagaaatgactaaattttaagtagaatttactggagaacacaaaacaattttgaaaccaagtcagttatatgtgagacagctcattcactattggttccctcgttttacttaagacaaaatggttaatgccttttgtttttgttttgacacttgttgaagttagagaggattaattgctgcattatcgcccaagctattaagggagatgaatggcanattttagtggatcaactatgattacaaaaagtaattacttt

SEQ ID NO: 54701 - DNA, 621 bp, Homo sapiens
ccgggccccccctcggaagtcttctagaattaattaacgcgggcagtctcacaacattcacaaataaagatttaattctaggttataaaacagacattaataaatttaaaaaaaggaaagcatacgaaatatgctcttagactacagtggaatttattgaaaattaataacaaattatagctgtaaaaacccccaaaatatttggagattagaagtcttaagagaaatttttaaaattttgaatttaatgaaaatacaattccattacaaattttgcagtgtagcaaaaacagtgcttagagggaaatttatagcatcaagtgcatatattacaaaaggagaaagatcaaaattgcataatttatgcttccaactcgagaaagaaaattcacttaaatccaaaatgggcataagaaaataaataataaaaattagggcagaaaccaatacaatcttaagcagaaaaacagagaaaatgaaggagataaaatactgcatctgagtataaataaagagacgtattatacagtgttgggtcatatgtttatggaggctgaaaagtcccacaattggctgtctgcatgcgggacacccaggaaagttggtggtatacttcaaaag

SEQ ID NO: 54702 - DNA, 614 bp, Homo sapiens
  misc_feature 32: n = A,T,C or G
taccgggcccccccctcggaaatacttctagnattaattaacgcgggcattgaatgaacaaaagctgtagagtcattgcaagtgtcatgctattcatagagataagtgcttcccatccataatattctgcagtctttgtgtatgcctggccttagtaaaaggagggatgcccttagcaccctaaatattgcttctacccccatcttcttcctgtgttccttaaacctctatcaccaacttaaaaatgttctccaggcattgtaaatgaagaaacagcttagacctagttataagcttttatccaactacatatctgtctgatttaattacttggtgtttatgtttttaggaacatagctacagtgtaatggacagtccaaagaaacttaagcataaattagatcatgtgatcggcgagctagaggatacaaaggaaagtctacggaatgttttagaccgagaaaaacgttttcagaaatcattgaggaagacaatcagggaattaaaggatgaatgtctgatcagccaagaaacagcaaatagactggacactttctgttgggactgttgtcaggagagcatagaacaggactatatttcatgaaataatttcc

SEQ ID NO: 54703 - DNA, 537 bp, Homo sapiens
  misc_feature 15, 26: n = A,T,C or G
gggccccccctcggngatcttctagnaattaattaacgcggggagttctgctacaaagggttggggaagattgggtggcagtttgacatgttattctctgtgaaatttctggggaaaatatttaaatttggggattttgatagactgtttcctgggtgggatcttaaatgaagatgctgaaatcccaatgaggtcttagaaacagaccttaaaaactttgaagttggcaagagacttaagttggagcctagaaagtccaatttttgtcactgctggggttttgcattttttttaactttgaatcctgttagtcatgcatttgtttaattggactgaagagacatgaaacagggtgttagatctttctttgtataatgaaaagacattgatcccaatctttggtgtttgtccagatgaggcttgagcctataattgaagatgcagttgaacatgagcagaaaaagtccagcaagcggactttgccagcagactacggtgattctctggcaaagcgaggcagtgtaagggacttctgct

SEQ ID NO: 54704 - DNA, 617 bp, Homo sapiens
gggccccccctcggaagtcttctagaattaattaacgcgggccagtacacacatttatattaatcatacacactcaaacacacacagtttcatataacaatacttactcttaccatgtaagaaatactttaatttccattttactttgatttctttaatgttggtaaagctcttctgcaaattcataactcactactgagttgtgatcccagtttttgaaaaacaaattcaataaaccccttcttttaaaaggaaaacatgctcagagacattaagtgatttcccaagatcacaaagtgaataaatagcattgtcaaaaccagaaacagatctacttgttttcagcccatgccatctctatctcctagcctcactgaatcactaattattggtagagaggtgtgcacatgtgtcagtgtgtgtttgtggtggtaatggcaccccaaaatatatagcatccccaaaaaaaaaaaaaaaaaagcggccgctttttttttttttttttggtttaacttttccttttttgctgtctagtcatcctcgtcggtcttctgcttcttggtatcgacatcgtcatcctcatcatcttcagctgcccgcttgcccgtagctgactc

SEQ ID NO: 54705 - DNA, 564 bp, Homo sapiens
  misc_feature 28: n = A,T,C or G
cgggcccccccctcggagtacttctagnattaattaacgcgggggaagtttaggagttgagggaaagaagattaaagagcgcgaggagacagagtccctatcgcccaggctggagtgcagtggcgtgatctctgctcactgcaacctccgcctcccgggttcgagtgattctcttgcctcagcctcccgagtagctgggattacagacaaataaaaagaagtgttaagaattgcctttgggactctgaaggctgaagaattgatgaattgcaagtttgtgccccatagctgcacagactgcctgaagttacatttagagactgaaaacactgcaccttaaaaacaaaagattgagctgcactgtattcctgtaagtcaaagctttctgtaccttcttctgtgtttctgtgaccaacccaaaaaaggacaaaaacattggtaacatagtaaccagacatgagtaaaaatttgaatgtccctggagaaatatatgtttaaatgattttcttcttaaaaaaaaaagttgttggtctcaatattcagtatgtctttttttatccacct

SEQ ID NO: 54706 - DNA, 393 bp, Homo sapiens
  misc_feature 25, 38: n = A,T,C or G
ctgggttaccgggcccccccctcgngggtacttctagnattaattaacgcggggggaaatctcaaaagggaaagagagaacaggagactgcaggtctgaagtcacttgggataaaagtcaaggtggtattaaaggaacttttggtctgggtcagtagtacaagttttttcaccctataacccttctgatatctcctgcttaattcttcatgaattatccagtgatgtatatgctatttcatacctactacccagaaaggtttttgtcactatgggagtcaaagtgaatactggcatgtatatactcttccatcagtagcatgaacactttcttcttcctttttttttctttttttcctttttttgagatgcagtctcaaaaaaaaaaaaaaaa

SEQ ID NO: 54707 - DNA, 585 bp, Homo sapiens
  misc_feature 28: n = A,T,C or G
ccgggccccccctcgaaagtcttctagnaattaattaacgcgggatatcaagtttctatacatgaaatggtgtgtgtctggatcaatatacttgtctgttacaacggtaaattcgcccttctgtgaatcaacactttttactggccataaaatgcatttaatgtttcattaatgtgtttcactgtatagttcttgcatgttttttaaaaattttatttactactggataccatgtatctcataacagtaattttaaaatatattttgtttgtttctaataagtttaagtgcaatataatttttatattgatcttgtgataggccaacttgttaaattctcatgtttgttcagtaattgggctgtggattatttggcgttttctatgtagcaatcattttatctataattcatgacatttggggttttgttcaatacttatcctccttttcatttatgcataaatttatttctttatggcatagattatggccttcagtgcagaatagaaatagaattgtcttacacttgctatgaactgtagatttgtagcagtttattaaggaaagatgtttactgggcaacat

SEQ ID NO: 54708 - DNA, 570 bp, Homo sapiens
  misc_feature 29: n = A,T,C or G
ccgggtccccccctcggagtacttctagnattaattaacgcgggctggagagattatgtgaatatgttctacttccaaagcctattattcagaaagagtagtttatattgtgttggacactgcctagtaattaaataataaaaacaccacaaatgactcatgatacaaggtaaaaaaatagggatagtgcatggtgccactgaaacttgtcagagcagaaggaggagagcttgagctaagcacaactgaacacagtataaattgtactacagaaaagaaattctgtttcctttggactcatacgtttatagaggtattggggtaagtaaggaaaaactgacctaagctagattcaccaggtcatcagcaggctagcaagtttgtctccctacaattaaacaaatactcagaatgttaagtaaagaagtcaagaaaatttggaatgtgactctccaggacattaagacactcaaaagtagccacatgtatgggaaaacagaataagccacacatagacccaggaaaattcatgcctcaaaagacctgagaagaccttaagcctttacctaa

SEQ ID NO: 54709 - DNA, 272 bp, Homo sapiens
  misc_feature 35: n = A,T,C or G
gggtaccggggccccccctcggaagtacttctagnaattaattaacgcggggatgcacaggggatccctcggtagactacgcactgatcccagcgcctccgcctatccccccatactgggtctaattctctcctatcattccgtactacctatgtagtcaatgcacatacaccgtgcgcatcttaaagccacaccgccccatttcacgactacactagactgctcgctactgccagtccctctgcagtacaaccccgtctaaaaaaaaaaaa

SEQ ID NO: 54710 - DNA, 526 bp, Homo sapiens
gggtaccgggcccccccctcgaaagtcttctagaattaattaacgcggggatggatgatgagtggattgttaggtgaatgaataggtggatgaaaaatagatgcatgtacaactagatggatagttggatgggtgtaggtaagacagagtggaaatccccttacagtattaccaaggaacaagatgggctaaaaataataacccagattacaatacagtgtgataagagctctgagtaagattactacagatctatatcaggtgagttatttgtgcaatcttagagttgtgggatgatagagcctggaattcatcttaggtcttctagtcctagccttttattttacagatacagaaaataaggcccagaattatgaaatctcttgaggccttgggtaggtcatttagtctttaaaagttgttttagctcatgctgatgtttttttctaagcaaagacagaatgggtaggaagaaattggcatatgatataaaaccaaatcatcataattcatgcctcaacagatt

SEQ ID NO: 54711 - DNA, 588 bp, Homo sapiens
gggccccccctcggaagtcttctagaattaattaacgcgggtatatatatcctatatagtcaggagaatcctggctactgcagattttggtaccaaggagttctactgtatttttatcagtaatgtctgacattcaatcaaaagtcatgatacgaaatggcaaggacatgaaagacaagtaaagacttgggaactttcacagattggaggagactaaggagacattacaactacatgaaatacaatattttttattggatcatggcaaagaaaaactagggaaatccgagtaaagactgtagtttaatgaatagtattataccaatattaatttcttagctttgatcactgtaccatggttatataagggcttaacatcagaggaatctgggcaaaagatatactggaactctttatactatttttgcaacttttctgtaagttttaaattatttcaaaattaaaagcaagataactatgagatccacagaaagcaagaagatgtggcccactccgtgtcccctgaggaaagagtcaacagaagcagtcacggagatgttctagatgttggaattatgagagaaagac

SEQ ID NO: 54712 - DNA, 597 bp, Homo sapiens
  misc_feature 37, 584: n = A,T,C or G
ctggggtaccgggcccccccctcggagtacttctagnattaattaacgcggggacctacttttaaacctaatgtttctgaacttaatgcatatgttgaagcagaggcaaaaacagtcctacagatcaacattcttttactgtagtgtgcatcggaatcacctggagctttctggtgatttggtcaagagtggggcccaagatatagcatttcaacaatttcccagttgctgatgctgctggtctgaggctcatacttgagaacaactgctatggatttcagtagtcattctatcggtatttattgtcactctgaaccatgaagaaacatttgggttatgctcaatagactatgtaaggacacaaggaaacatgtaatacttttaagaaaaactttcatcaaaatatatattgttcgggagattcatcatcattcacaagtagaaaacttcattccctaaatttgtcctaaaagaagtgctgcccaattaagaatagatcttgtaacattttcaatgttactaatttatgtgtagtatgattatgtcaggacttacttgggcaatgccaataatacatataactntaagtgccaatct

SEQ ID NO: 54713 - DNA, 585 bp, Homo sapiens
cttctagaattaattaacgcggggggagagagagagtgtgtgtgtgtgtgtgtgtgtgtgtgtgtgactaaaaatcctatagactttgttttttattatcactctttttcttctcattttatattgtttcgtgaaagtttacaaaattatggcacactagttattagccagctcaaggctttgaggaggtctgaacatagggtttctcaagtaaataagtaaaatatctagcatatcagaagctttaaaaccaataatgtgatcttgcatttatttccttggattctgaacacaagtaaggaatgtgtttcagggtgttcaaggccagataaagtgtcagataagcctgttcggacagactgggaaagagaaaacctaaccactcacagaggaaatatggagggacctaaacagtccagaatacagacaggaatccacttaaactgtatagacctgttaataacagggggcaataatggctataggtattgtaagaatcccactagccatcttctcctggtggccctgaagtgatggagatgcttatgatagaggctctgtcagtgttacatggcttaatattgc

SEQ ID NO: 54714 - DNA, 614 bp, Homo sapiens
  misc_feature 504: n = A,T,C or G
tggggtaccgggcccccccctcggaagtcttctagaattaattaacgcgggggccgcggggggccgcgtgatcggagcctggccgcggcgtgatcgggcagggcgggacgcggcacgtgttttggtcggagcgaggggcggggcctgaggccctggaaaacagcattccttctgcgtggaacatgccaaccctcgtctgctttgactttgcaaaactgcatgagaccgccgggcgcggtggctcacgcctgtaatcccagcacttcaagaggccgaggcagacagatcacctgaggtcaggagtttgaggccagcctggccagcatggtgaaaccccgtctctactaaaaatacaaaaaaaaaaaaaaaagcggccgccaccgcggtggagctccaattcgccctatagtgagtcgtattacgcgcgctcactggccgtcgttttacaacgtcgtgactgggaaaaccctggcgttacccaacttaatcgccttgcagcacatncccctttcgccagctggcgtaatagcgaagaaggccccaccgatcgcccttccaacagttgcgcagcctgaatggcgaatggaaattgtaagccgtaatatttttgttaa

SEQ ID NO: 54715 - DNA, 531 bp, Homo sapiens
  misc_feature 28, 454: n = A,T,C or G
cggggccccccctcgaaatacttctagnaattaattaacgcgggggggtggagaaagtaaataactagggaacagaaaggagtcttcatagcatattcttaagagccgccagaattttaaaccatgtatatataattctttccaaacatgctcatttttcaaaatatatgatttatgaacctaaaagcttctgattttgaattttagaaatattcgtatcgcctatccttttactcacaagttttctaaacatcatgtcaaagtttgtcatctatatgttgaaaagagcacacaaagtaagaaacaaaatgttgacatcattctttttgttttcaaactgacctcaattcatgaacccggcctcttttacaaaattattcaacagttgaatctgtgaccagttaattagttgtgaatccactcaatcaaatcatctcaattcactatttccttnttttttttttttttttttgagaatttctataagaaccttttaatgtttgtattacctagtgaacctcactaaatcca

SEQ ID NO: 54716 - DNA, 541 bp, Homo sapiens
  misc_feature 39: n = A,T,C or G
agactgggtaccgggcccccccctcaaaatacttctagnattaattaacgcggggatgcacagctgggtgacggggtaagaaatcctgctacattatagctactgggagcatggccttgggaggtcgacttcctgggtttgaatctcaccttaaccacttcctaatggtgaattcatggacacagatatgaaatgggctaatactagtagctgcctcaaagggctgtgcgaattaaatgagatatatagaaagtgcttactaagtatacatagtgagcccagcaataaatatttgctgttatttcagtaaacgagtttttggatgaagctctcaagtctttctgtcaccctcattgctgcctgcttcctacaagtatggcgaattggcatgtttggagtgtgtgatatgtggacccactcgtgagcaagccagctttgccctgtgggagaaggaatacatgtcaaaggaataatgctggccgggcatggtggctcacgcctgtaatcccagcacttaggaaggccaaggtgggcggatcac

SEQ ID NO: 54717 - DNA, 593 bp, Homo sapiens
  misc_feature 17, 28: n = A,T,C or G
cgggcccccccctcggnagtcttctagnattaattaacgcgggtagggaatactaaagaagggctagatttgaggaacagcttgtacattttgttatgtttctttattttgggtctcatgctcttgagttcttggttgactcagtgtcagataagcaggaatctcctttcttcttcttcctttttttcccgcctcactcttactcttgtgtctctccctctcctgaatgtgctctactctcagaggtttgtgtatctggacatgtgtgaatctgtgttttaagaagcccatgaggccaggtgcagtggctcacacctgtaatcccagcactttgggaggctgaggctggcagatcacctgaggtcaggagttcgagaccagcctggccaccatggtgaaacccgtctctactaaaaatgcaagaatcagccagtgcgtggtgacgggcgcctgtagtcccagctactctggaggctggggcgggagaatcgcttgaacccgggaggcggaggttgcagtgagctgagatcgtgccactgcattccagcctcagcgacagagtgaaactctgtcttcaaaaaaaaaaaaaaagc

SEQ ID NO: 54718 - DNA, 474 bp, Homo sapiens
gggccccccctcggaatacttctagaattaattaacgcgggggggggagggcagacagagcttttgcagcataactgaaaagagaactgacataattcttgttcaatatctaaagatttgtcacataaaaaatgaaaaacatagaattaggactacaggagggcaaggaatgcatacactatgaaaagctacctaatattaagttgctcaaaactaccttgaaaaccaacggttccccacctctagagtggacgccaagcaaaggctgaacacagacaaatggagatgtaatggcgacctgtcaagactgcttcaaagatcacgtccatgcccctcaagaaggttgcacaaagctacttccaaccctgtgattccgtaattctggagatcatctatacccccgagtgtacaggtaggaaaactaaagccagatctgcaaactgccttgtttagttataacaatcattaaacagc

SEQ ID NO: 54719 - DNA, 575 bp, Homo sapiens
aattaacgcggggttccttttatgatatgactacaaatacaaagaaacatgaagggaacacacacctgaagttccttgcatactacagacaggaaagggaaaaggaaacaaaaattcataaactcaggtttttaacattggcattttatatctcaaatatcaaaactctcatctaaaaatttgatttaatttctccaattatcatcgaatgactgagcacctattaactaaaggccaagtgccaagcccctgcacatataaaatatggatgtcaataacattaaagagatcattaaatgtaagaaaatcttccacatactaataattctatgaactgttgaggattcagaggaaaatatttatgctcccttacactttttatatacatggcaactaagaaatgaatgagattcaaatgaaagagctatcactgtggtctcacaatctgatacgggggaagaagtatttcattgggattacagggaaaaaaaatctatatataactgaagagggaggagaaatacattccaagcttactttatttaaggaggtaaaagagaaagaatgtatgtggc

SEQ ID NO: 54720 - DNA, 374 bp, Homo sapiens
cgggcccccccctcggaagtcttctagaattaattaaagcgggggaggagatgaacgtcagtgatctatgcttctatctcaaaaagcctagaaaaagaacaaatcaaaaccacactacattgagatatttttcacccatcacactggcaaaaattcagaagttttataagactaaaacctcttagactgtggggaaacacactgccatacattgctaatgaaaatgtgaaatgggccgggcacagtggctcacgcctgtaatcttaccactttgggaggccaaggcaggtggatcacttgaggtcaggagttctaaaccagcctggctaacatggtgaaaccccgtcttcattaaaaataaaaaaaaaaaaaaa

SEQ ID NO: 54721 - DNA, 190 bp, Homo sapiens
ccgggcccccccctcgaaatacttctagaattaattaacgcggggcagacactgtaaaatgacaagtcaaactatcaggtttataatgcacgataacaaaattaaataaaacatgttttatactcttaaaaaaaaaaaaaaaaaaaaaaaaaaaaaaaaaaaaaaaaaaaaaaagaaaaaaaaaaaaaaa

SEQ ID NO: 54722 - DNA, 597 bp, Homo sapiens
  misc_feature 25: n = A,T,C or G
ggccccccctcggaatacttctagnattaattaacgcggggacaagttgacaggactaaggcagaggtaaacaagctctaaggttactgggagaatggtgtacacacctccctactggggaattactcctcaccatgttatcttttgaaaaacctctactatctctgctaggcagggtggctcacacctgtaatcttagcactttgggaggctgagatgtgtggatcgcctgagctcaggagtttgagaccagcctgggcaacatggcaaaatactgtctctacaaaaaaaaaattagccaggcttggtggctcatgcctatagtcccagctacttgaggggctgagacaggaggattgcttgagcctggaaggcggaggttgcagtgagccaagattgcgccactacactccagcctgggtaacaaagtgagtccctgtctcaaaaataaaaataaaaaataaaaaaactgctctctctccatttcagaacacaaataaaagctcttgtcactcacgctaatttcaattatctataacactggttttatacatggagttcatcttaagtacaaatctactaccttatattagcaat

SEQ ID NO: 54723 - DNA, 574 bp, Homo sapiens
  misc_feature 28, 524: n = A,T,C or G
ccgggccccccctcgaaagtcttctagnaattaattaacgcgggttaagaaaaacaaaacagtaagtattctgttttagaaagatataaaatcggtaaaatccaaaggtactagaatgtgtaggcatgtcttattctgatatgatactggattgccaacttttggatatttataatgaaacacaatatacttacctttgcaaaggtgacacatttctcaacagttcagaaaaaaattaactgtgattcagtgtaataaaagcataatgaatagctatcattgtattctttaaactgtaatatttcaaactttataaagtttacgaagtcacatgtagatttccttgtatttctaaaaagagactgactcatgccggtaaatagatcagactgatagtgagaggtttctggatctccgttttctcttcattctttactttttttcttaatgagttcaaaaatgcttgagaattcatttgtatttcatattttaaccttcaaagctggaaactattttgagaaggngcaacaatttttaaaaaaccaggggcaattagaaaaaaatgttaaaggga

SEQ ID NO: 54724 - DNA, 606 bp, Homo sapiens
ccgggccccccctcgaaagtcttctagaattaattaacgcggggattggaaaaacccgaataactatttaactattttatttattttagtaaatgaggcagaaaaatatctagagaattcataaaggaccaagtgatttcttaaaaatagtgttcgaaaaaagtgaaaaactaattctaattaaatcctattaatatcccaaacctaccctgggaaatgggtgctaggctaaagctgaattactgaacaaatgaatgaacacctaaatttgtcttttttcttccagtaaatatcttacaagtattatttaaggaaaacattttcttttacagattcacctttttggagttttgctggctattttaggaaacttggtgatcagtatttctctaaatattcagaaatattctcaccttcagctggcacaacaagagcacccaaggccatacttcaagagtgtgctgtggtggggtggtgtcctgctgatggccgtgggagagacggggaactttgcagcctatggatttgctcccattactctgatcgctccgttaggctgtgtgtctgttacaggtaagccattctgtattttgacaaatagaaact

SEQ ID NO: 54725 - DNA, 538 bp, Homo sapiens
cgggcccccccctcggggtacttctagaattaattaacgcggggattacagccaaaaaaaaaaaagactggaaattcagaaggaaagtttttttgtttagttttgaatagttttactcttaagacatctttttgtgtgttgtttacgagatgacaagcaaaatctgccacctcagagtgttctcttacattcctctaatggcggggagaagattctggttcttacctcagaaaagaaaaagcagaacttatttcaggaacatcaaggtattaactgtcagagagaaaaagctctgataaacctaccaggaggtgtgcaggcatctgcaggagactgaacaaatgtggatcgccttttggttggcatgggcaaagccatcttctgttctttatgctttgccagtgcagcctgaactgcttctgtgtggatatctgaaaaagcaaacatttgcatttattagcttccggctcttgaaagtgtttaccactgtgagctgaactatcactgcctcaattgtttaaaaaaaaaaaaaaaggta

SEQ ID NO: 54726 - DNA, 599 bp, Homo sapiens
  misc_feature 28: n = A,T,C or G
cgggcccccccctcggaagtcttctagnattaattaacgcggggggagagagagagcaagaagaaacacaaatatttacagttttgaaattatctactaattaggtgataagtagtgtgtagatagtggaaacagaataggatgcacagaagaatgttttgaatatagaaatgatacaaaacttgagcactgatcacaaatgctgaggcagacctgaagatggcacttcagggtttggacatatgaagaacgaaagttccattgatagaaatgagaagttgccagggggagctcatttatggtggaagaacattagtttagtattgagaacactgcctttggggcaatctggcacctccctaaatgctcagcctcatcttccactgtccccttaaggctccaatcacactgaaccacttgctgttgccgaaacatactgttttcaaaaccctaggtttcacagggatttgaaatgctcagccttctactgcggatagttgctctctcatttctccttcaagtccaagccaggtactcccttcttatctgtcccatggcaccatgtacatatgtctatcacgatgtactttaacttttat

SEQ ID NO: 54727 - DNA, 555 bp, Homo sapiens
  misc_feature 10, 45: n = A,T,C or G
cccccctcgngaatacttctagaattaattaacgcgggggggggncggaagagaactgatggtgggtgagtgtgtgtgtgtgtgtgtgtgtgtgtgtgtgtgtgtgtgtgttttaagtgacaataatttatagttcttacaagacactaattatttggctggtacccaatgtacagtcctggatccagacaggaccagctgggagtcaattagttcgtgggagaatttgttctttaaattaaatagttcttttttaaaaattaaattctgttttcccctctgcaaatccctaagtccctcaagcagatgattctagacattacttacagcaattcctgctattaacagactgggatcagaacaactgctaagtccccttgaaacgcccgcctgtcagagccaatttctggtggggagagagcatccatctgccccttcttccttcccctcactgatgagtgaatgtcaactgaggcttgacttcatttttgggttttaaagtaaactttggggagtctgcttttaacatggattccacggggctatgtgagtagc

SEQ ID NO: 54728 - DNA, 564 bp, Homo sapiens
  misc_feature 400: n = A,T,C or G
cgggcccccccctcgaaagtcttctagaattaattaacgcggggcaagtaagtgtgaacctaaaaagtgtgtgtgatgataaagaaaaataaataatgagttcatactgacttttccaattcaactgtaaaactacatagttataacttaactttgattttatatttcttctcttatactgaaaatcttgatttctaacaatgttcccgtaattgtttgtctgtttatctaatatatgtacacgcacaccatttctaaataatgtcaatattgctgttaagaatagttgaatgagattttaaggttttgaagctctatatggtgttagaatacatttaactacaggtgtacctccttctattgtgtttcactttattgtactttgaagatactgcatgtntttcaaattgaaggtttatggtaacccagaactgagcaaatctgttagcactatttttccaacagcgttggaatgtgttcactttgtgtctctgtcatattttggtaatattttcagtagttcagactttttcattattattatgtcctgttaatggtgatctg

SEQ ID NO: 54729 - DNA, 571 bp, Homo sapiens
ccgggccccccctcggaagtcttctagaattaattaacgcgggcacattctagaaattagctactttagttttaactagctcacttattattaagcaataaagtccatcttttcagaacgtcatttttctccttaggaaaagaaagtgcgtaagcaacataaatatacaactttgcgaatccagtggcaaattctcttctgttgcaaagcctacataaggtcctgaagaaaggtatgttcttgtcctgaaaggtggatcacacaggaataagataggtacctagtggcctggctgcagatgaggacaattatgaggatggggtaaaacttatcagaaaaatgagggagcttgagaacttcccatcctgcagtgccatggttttgacaggtcagtccctaaaccactgcactatctaagaccttgttagaactgcaaagtcttgggtcctatcccagatgcagtgaatcaaaaactctggggtgaagctcaacaatctacacaaaaatctactacaaaaaccttgcaggttgtaccgatatgggctaatgtttaagaaacaatgccctaaca

SEQ ID NO: 54730 - DNA, 539 bp, Homo sapiens
  misc_feature 22, 35: n = A,T,C or G
gggtaccgggcccccccctcgngaatacttctagnattaattaacgcggggaggactcgacagaagggagacaaagagaagtagaaaagaactgagggctggatttgggaagacccttggtttagtcagctgtttgtatcatcatcattaatgggcagcatccattcaatggaagacaggtaggaaaatagtttaattgacttgagagaactcaggcagcctgtaaccatgaccatcagtcatctttccctgatgtcgacaatggtaacaacagtaacagtattagaggaataacacattttcctagaactcccactttcaaagattcttttctcactcatttctatagactttcatgggcactatttcatttgccatcttcagttctccatccccaccccagggctcagacagaaggctgggcttatggaaaaggcaagggctgagaaacagacagatcttgattcagatctccactgtgtgaccttagacaaattactaaattctgactatcttcaggtttctcatctgtgaaatgg

SEQ ID NO: 54731 - DNA, 553 bp, Homo sapiens
  misc_feature 28: n = A,T,C or G
cgggcccccccctcgaaatacttctagnattaattaacgcgggatatatttaaatatatagcattatctcaatagatacagaaaaagcttctgagaaaactcaatatccattcaggacataaaccctcaggaagctagggctagaccttactcaactgtgtattctccatggcatggcatgattattcctcttagggtctgtgactataactatcttttcaatggcagttatgttgggttctgttgtccttgtcatatctaaacagtaataaaacctatatttgaaaacaatctgataaagttcatcaataaaacccctacagctgactcataattagtggtgtaacactgaatgctgtattcaaagaatgaaaacaagattaagtcaattctgtgagggaagagaataaaaggcattacaactagggaaaaaaagagataaaactgtgttttatgacaatcatctattagaaaaatctaagaaatgtacctaaaaaaactcgtagaattaatatgacttaagggtgtaagaaacgggtcaatatacaaaaat

SEQ ID NO: 54732 - DNA, 486 bp, Homo sapiens
ccgggccccccctcggaagtcttctagaattaattaacgcgggcactgatgcatgaatatcgcaagtgtcatgtgccaagaacctagggacataggtgtttggggagcttctgtacctactggagcacttgtgagggcatattcagtagtggaaaagatgaaggttgtacattgctcaaagaaattacttgatggtgatatttccaagagcatctgctatttgcttcttaaccaagaaccatttttcttccttttcttttttcttgtagacctcactcacaacagaagctcaaatatcacatacattctatcccagacttcatttctgggtttggtcctgtgattctagaaaaggcctatggggaacatgtatgtgtggcagagggggaggaggggtaagtttctaataaatgattaggttggtgcaaatttaattgcatttttttgccattgaaagtaatatctctctgtaaaaaaaaaaaaaaa

SEQ ID NO: 54733 - DNA, 519 bp, Homo sapiens
  misc_feature 11, 492: n = A,T,C or G
cccccctcggnagtcttctagaattaattaacgcgggtagccccagactatcaaactcattcttttattatcctaactgaaaaagagtttctggaagttctaataatagaaaaattctatcaaaatttattctctcatttcagtctttttaaaaaagagatatgattcactgaactttcaaatcatattcatttttaatttacaaaatgagagccaagaattgtattcagtgtcactttgtacatataaattcaacattaaaaaaaagtaaactaagaaattttgaagctagtttcatcataaagacaagaagtctacctaataaaatcctaccagagtggaataagcatgtctgataagcatatggcaaagaaatctctcacaggtaccttttttatctgtatttcttcgtagcagtttgtcgacctgagaaatggcctcttcccagcaattgttgcttgcttgaacgtggggctgaatcaactttaattnctggtctaggatggggatagcctctga

SEQ ID NO: 54734 - DNA, 577 bp, Homo sapiens
taattaacgcgggtccaatgcttttgtaacttaaaacacaaccactttattataccttattattttggttggttaggaattcaggtaagatctggctggctgaattttctgctccacctgatactaactgatgtcacttgatggtattcatcctgagaaattggttggtctgaaggggccgagatggctttattcatattcctgattcttttgcagagaatgctgaaaggctggcatcagctggcactaaaagtgaggttgcctatatatgttattttcagcatggtgatctcagactactaagacttcttacatgacatcccagggtctccagaaagtgttcgagggacacgaaatggaaactgttaatctattagagcctaggccctgaaattggcatagggccactgtcaccatattctactgattaaagcagccacagagcctaaccagagccaaagaaaggggacataggcaacatctctcaatggaaggaatataaaagaaattgtggccttctttatatgacaccccacattgaaagttatttattatatcaagctaaaatctgtctccc

SEQ ID NO: 54735 - DNA, 592 bp, Homo sapiens
  misc_feature 27: n = A,T,C or G
cgggccccccctcggaagtcttctagnaattaattaacgcggggggggggggaagggagagagggagagaggacatagggaagcttatggcaaaatttttgctgttatagctttcttggggaagaaaacacacgcgcaaatcctggtgttaggaatattttaagcacatatctttaatattattcatccaggaccaaagtaagtcctgatacaggaaatgagtgagtttcacagcttcctgagcccctactcgacccaggaaggccagcgggcacctcctctcactagcaatagtgtgcatatagggaaagagcacaagaagacaggaaaaaaaaagaagattaaaaaaagtgttatatgcaagactcttcttattctgcatttcatcataaacatcgtaattgtaatctgtatatcataaatataatgaggtaggggatattatctccattttacagaagtggaacctgtgttgaaatgatgcatgtggttattgatgaagttgtagatgtgagagctggttctgctcatgtctgactaacacagaggcttgtgataattgtcccttctttctcccaggccactgaaattt

SEQ ID NO: 54736 - DNA, 512 bp, Homo sapiens
ccgggccccccctcgaaagtcttctagaattaattaaaaatgagtataccatcacaggtatgtgataaagcacatatagaaaactgttaatccagaagataagtggtggatagacaggtgttcactgtacaattcaattttttggtatattgaaattttcctataaaatgttagaaggaaatctatattaccatcaggtaggatttcgtgtaagcaaaccactagggaacaaggtacaaaagagccaagagggttgggcgcagtggcccacgcctgtaatcccagcactttgggaggccgagatgagcagatcatgaggtcaggagttcgagaccagcctggccaacatggtgaaaccccgtctctactaaaaatacaaaaaattagccaggtgcagtggcgggcacctgtaattccaactactcgggaggctgaggcaggagaatcgcctgaacccgggaagcggaggttgcagtgagccgagattgcgccacacagcactccagcctggg

SEQ ID NO: 54737 - DNA, 591 bp, Homo sapiens
  misc_feature 27, 35, 503, 536: n = A,T,C or G
aattaacgccggggggggagggatggnatacaggngcaagaaaaaaaagcgagtagcccaccatgcctacctttctgaaaagggcagtggggaaaatagatacacaaaaatgccacattcattccccatcaaaattaggggcagagaatttagggatgaggattctagaaggaccttacaaactgtgaagaccagtgatgtgcaggcatggtttagctttcagtttcaaattaagttctgacaaatgcccataaatgcctttgagtgaaatgaagctagaggacttggagccccgtttgccaagtcttccctcttacctaccctctaacccacagaaatgcacccacagcctctgaggggtttctgtgggcttccaaaaagtagatatgaaaacctctgagcttgtccaaagccataatggacacacggaaaaaatgaaaaaccagggaagtaaagaaatttgccaaaggtcatatagcttgtcatcttccatggtgataganatcccaagatgtctgatttctagcccaaaagtnttcttcttgctcttaaattatatctgtttgaaaatttggaaatcgggcagacctg

SEQ ID NO: 54738 - DNA, 527 bp, Homo sapiens
gccccccctcggggtacttctagaattaattaacgcgggatgtaacatgtacaaagctaaactcatcctcctttgtaaatctactcttcttgcaatggtcccttcttattctgtgtcactaccaccccatcagctgcccaagctagagacctaggagtcaggtttgcctccactgtttcccaccgtccattgattccatctttgaaatttctcctgaatctggaacttttctctatttccactaccatcacactagtccaagctaccatcagctctttgccagggtgattgcagtagcctatctgatcttcttgcatatacgtttgccctcttccaatccactttccactctgcagccagggcaatcttttaacaaatctgatcatgtcaatcattggctcaaaactcttcaatggcttctcactgaccctaggataaagtgcaaattacttaacatgacttgaaggccctacaagatattgcactagtctacttcttcaaccacatctctcaccactgtatctttg

SEQ ID NO: 54739 - DNA, 624 bp, Homo sapiens
  misc_feature 95, 103: n = A,T,C or G
cggggccccccctcggggtacttctagaattaattaacgcgggggggggagaccacagccaaagcccacttaggggtcactcaggatccagtggnggtgcagngaaaaaaaggccacaacgtctcttcatatgttccaagatagtaagatgcactaatatttcacagtgatactggcccatgggaccggtattggaaggaagaccaggcgttccccttgaagggatggccatggctgccttactcacacgcttgctgctgacatgctgcaacaaactgcagcttacctgtgccaggttacggggatttacagatattatctagttttaactaaattaatcctcacaaagttggcaactggctcaaaaagatcctgcagagaaaccaagaatggaaggcagctctacagtggaagagccctgacaggcctgggatagcagagtcttactgccaaaaccatgagacgaaaacaacagccatctagtcaaatcttactgaaagtccacccagaaccacctcaaaattaccaaggtcaccactggaaataggggctacaattagccatctcaacaatgtgcttctgcagggcacggtggctcatgcctgtaatctcagcactttcgga

SEQ ID NO: 54740 - DNA, 538 bp, Homo sapiens
acttctagcattaattaacgcgggtgagtggagtgaaaagtttcccattaagcaaacttctctgatctgttgctatcattgagtttctaatttggaggaattgttgaagaaaagacctgcatggatgcctcattttaacctcctcactggcaattgccaagaacagtcagcagcttggcgtgccatgccaggctgctgcaggggcccctcctcccttcctgctgccaggaggccttaccagcttgtgtgtgcctcttacaacactctaaggtgggggtggtttcagtaaggtaggctttctcaacctcagcactattgacatttgggactggatagctcttggttgtgggggttgccctgtgcaggcagcataggatgtcagcagcattcctggcctctacctgctgcataaccggcagcagctcctcagttgtggcaactgaaaacgtttccttccagactttgcaaatggcccattggttcgaacctctgaggtaagggatgtgctgatgtggccttcggtgcctatctctacctg

SEQ ID NO: 54741 - DNA, 591 bp, Homo sapiens
  misc_feature 30: n = A,T,C or G
accgggcccccccctcggagatcttctagnattaattaacgcggggtgtgtattcacatttcacatgaagacaaaattagttgaggttgttcactttcagcttcttgaatatatcgtcttaggataccgattttctccatagaaacttgattctaaaaatccctttaaaatgttttttaaattaacttccaacgttcctgctatgcagactgaattcttcatctgattattttaggaaaagactagcctcattcataagctacgtctaaacctaaaaggggaaatacgtttctaaccagaactttaaaaaaaaaaaaaaaaaagagtaaaaaattgatgaaagaacgctgctgccacgtctttgcccctccccccttcacgtagtggctatttcatcccctccgagtgcattccaagcgaaagtccgagaaccactgctctcggagaaaccagaaacagttaagtggaaattggcaagtctctttggccttttagatcaattcctaaaagaggatctagctgcttcttcaaccctttcttaaagaaaacagtgcaaaattccaagagtcttcactctatccggaacgcgta

SEQ ID NO: 54742 - DNA, 567 bp, Homo sapiens
  misc_feature 28, 469: n = A,T,C or G
cgggcccccccctcgaaagtcttctagnattaattaacgcgggaaggatctatccaggtgtctgtccttgacctgtagtcagctgtcttcactccctcttctcatcaccttctctctgcatgtgcctgtctccaaatttcccttttttataaggacatcagccatactggattaaggcccatcctaatgacctcattttaacttgatggcctctggaaagacttttctccaaataaggtcacaccctgaggtgctggcgagtaggactccaacgtgctgtttttggcagggatgcaattcagtccttaacatactccagtccaatctccatgctttccttagagaaccctcaagcccagagtgactgacagaactgtcaacagaacacaggtttcccgacagccccctcaaggtttgaagggctttatacgctgtaaagggccgtgcgattgtaggttgcatggcggcngggatcccttaaagagcaggcgttctcgggaagggaacgcttttcaccacgggtggcaagctcctcggccccagaagaggaacggggaaaactccagg

SEQ ID NO: 54743 - DNA, 636 bp, Homo sapiens
  misc_feature 13, 38: n = A,T,C or G
actgggtaccggngccccccctcggaaatacttctagnattaattaacgcggggcaactaaaattgcatttttttcctccactgaaacaggtatttggtgttggagttccaaatccatatcgattgaggccgttccttggggccagagtccctgtgaatagcagtttctcacctataataaacatccacaatcctcacagtgagcctttacaggttgtagaaatgtactctagtggaggagaccttcacctagaactcccaacgggtcaacaaggaggtaccagaaaactgtgggtgagttgtaacctagttttctcttgtgtgtgctcccatgaaaccgattattcttaaattagaaaatatttaactccttaataggcttaacaaatatggatgacttctctttaatcgttgtcttaatgttaatttatgtcaagtatatatgaaaattggaggaggaaagaatataagtagtaatttttggaaagggcagtgagtaaaattggtgggaagtctaccccactacatggaaagaaagtaacttcagctattcttcctccgaattatatggggtaaagttggtctctgagtctgataatttatgatgtgctttacacataaaaaaatgttaatgat

SEQ ID NO: 54744 - DNA, 562 bp, Homo sapiens
ccccccctcggggtacttctagaattaattaacgcgggaggtgagaggcacttcttacatggcgggggcaagagagaaatgaggaagaagcaaaagcggaaacccctgataaacccattagatctcatgagacttattcactatcacgagaatagcacgggaaagaaaggcccctgtgattcaattacctcccactgggtttgtcccacaacatgtaggaattctgggagataaaattcacattgagatttcagtgggaacacagccaaaccatatcaaggattcagtaaaaagtgattttgtaaggtttaaaccaaatcataaaaaattgctaatagtcactgttttgggcttagaaaattggcaacttcctatagtcaacctgtaattataaactggattcacaaaaattcagcttacatacaacttcttaaaaacctactgcatacctctctgcttggcccaaggaggaaatcgattattcagatttcagagaaacagacctggagactctggattcaaacacatgacatagctgagagcagggattgagccccacatt

SEQ ID NO: 54745 - DNA, 596 bp, Homo sapiens
  misc_feature 23, 546, 548: n = A,T,C or G
ccccccctcggaagtcttctagnattaattaacgcgggtcccaggcctctactctctagatgccatagcacctccctcccttcagctgtgacaaccaaaaatgtctccagacattgccaaatgtcccctggggaggagaatcaaccctggttgagaaccatcactccagcagaaatactgcatgaagacgagaagcttgagacctctaggaaataggtgataatcaaatgacacagcataatgatgaccaacaaaatctgtgcataaaaggggcaaaaagaaagttccccaggcaggtgttctttgttcctgacctgactctgccagcatcttcacagctttggccttggccagttccagggccgtcacccagcgctgccgctcaacttctgaactagctttcagatggtaggtctgagcacccccattggaaatgatgaagttgcaggagtcctccacggtgatgttggctgtggcgaggttgatggtaccacggcaggtatgtctcatttctgccctttgatctgtaatacaagacaaagacantntaaacagaaaagtgacggtttatcctttatcacattccatttcttttc

SEQ ID NO: 54746 - DNA, 610 bp, Homo sapiens
ccccctacgagagataccttctataattaattaacgcgggccctgtaatctagatcttcaggttcagcagtgggggtgtgtgtttgggggcgggtgatctccctttcccacttccacagtttgggcactctttgaaaacagatgtagagctagacaattctggagggcatgcacctgtgggcgcacatgcacacacacacactgacagacagaaattatatcttaatttatttcatacagataacattagggtgataaagatgtgatacacaaaaaggggaaaatagataccagttgcacttaaatttaaagatgtaaaagtcataaattaacacaaatctaacagtgtaaactaaagaacaacacagcatgaccaattatagttaattctaaaactgaaaagagagtttgatgcaaagagcttcactcacataatttaacatatggctaggccaaaaatttgagtaaagtgaaattcatcctgaattaaaaaactctaagtaaattgaaaataatagaagactaccttagtaaagaatatctcttacaccaatagtactttgcacttttaaaacattccattaaaataagaaaatatatatgacatact

SEQ ID NO: 54747 - DNA, 609 bp, Homo sapiens
  misc_feature 516, 583, 597: n = A,T,C or G
cccccctcggaagtcttctagaattaattaacgcgggttcccactgcagtccaaactcacagacaggaaatgacacggccccatgttttaaaataataatgagccgtggtaagtgtgaccatagggacggtttccagatactgaaggtacaatgaagtgagattagtaatgatcccacttagtaaggattttaaactaagttattgatttaaaactttttgtaggggtcaggagttgctgctttgtcttttagggattaattattcgtggttcccaactggggacaatttagttccgagggatatttggcaatgtctagagacattttggttgtcacaattggaggggggacctatctaatgggttggggccagggatattactgaacacctcacactacacagcccctcacgacgaagcattatccagccccaaatgtcgatagtgctgaggctgaaaaatcctggcttaaattaatgctcagtacattatttaattttgacttgcttataaatntatatcacatgaaaacaaactcaaagataacatactgtttttcacttttgaaaatcatgaatgttangcatatgataattntaataacaagca

SEQ ID NO: 54748 - DNA, 512 bp, Homo sapiens
  misc_feature 463, 473, 476: n = A,T,C or G
cgggccccccctcggaagtcttctagaattaattaacgcggggcctgaggtgggaggatcagctgagcgcggaggtcgagactgtagtgagctgtgatcgctgcactccagactgggtgacagaatgagaccctgtctcaaaagaaaaaaaagtgtcaaagtgtattattttagccattctagatggaaatctttatgaaatggattacatgcttccttgtttcattttttaaatctatagaccataattgagtcgttattgatttagtcattatgaacctgaattactacgcagtgctaatgtcctcataggctgctgaagtctatagtgatgattagctctttcagaaagatatctgaatactgtgctttttttattttttgtatctgcctttattaagtttcctatttgctcatttgaagagttaactcacatttcttgctgatgtcaaagtggcctgcncacaagcatnctncaatgtctcttcttctaatctgtattggctaatcta

SEQ ID NO: 54749 - DNA, 144 bp, Homo sapiens
  misc_feature 34: n = A,T,C or G
aattaacgcgggggggtggtgtgtgtgtgtgtgnagagagaattacagacttcacatgcaaaccttgaactttcatttattttagctaaggcaggaacggatccaaattcagcatcttgggctgcgtattactctcactattat

SEQ ID NO: 54750 - DNA, 634 bp, Homo sapiens
  misc_feature 25: n = A,T,C or G
ggccccccctcgaaatacttctagnaattaattaacgcgggcttggtggtttcctgtctcacattggctgaggaggagttggtcccagggttggctaattgagcagcatgacaccagggagcatccatcctccaactctgctattttccatgtgtgggtaatatcaccccttgtggttgcacaatggctgcaatgattccaggtgccacacagatatttcaacatctaccaaagcacacctcccacatatctctttttattgtttaggaaaactgtacccaaaaacttcctacaaatttcccctgacatctcattgtccaggattaaatcacattacccatacctaaaccaatcaacgacaaaggaaatgggactgccaatatcatcttagatcaatcatgattcacctctggttcaccttccttgaacatatggtatggtgaccaccctacccaaacaaaactgagccccactggcaaagaaggggagggtgagctgggaattggcagttgggtagataacagtgtccactacacacaaattattatttcaacaaataccctctgaggaattattatcttcattttgtagatgaagaaattgaaactcagagaagtcaagtaaattgcccatg

SEQ ID NO: 54751 - DNA, 600 bp, Homo sapiens
  misc_feature 24, 37, 59: n = A,T,C or G
ctgggtacccgggccccccctcgngaatacttctagnattaattaacgcgggggggggngagattatataagagctctgctgttagtgacttacacacacacacacacacatacacacacacacacagagtgtgctttcatatctatttttctcctatcctaagcttttcttcttattctttggtgagctccctgaaagcagaaatattttattctttttcaacaaacatttacggcatgtatcatgtgtcctgattcagctcaaagtttgataatggtaataatataagaataaacaatgcacaaaggttagaacaacattcttacttcttaccattagcatgaataaaaacctcccagaaaagtaatatctgaactgagtctttaggaacaaatcagatttcccagtaagaaaactgggccatggggcccatggggatggacagaaatgccaggaagagggaagaggatgtacataggttatatgataagaaattacaggaaatgactgtgaaaggggttaaaaaggtgaagtggagggggtaaactgagaaaaggtaatgagtaagagctactaacaaacactaggtacactcaaag

SEQ ID NO: 54752 - DNA, 609 bp, Homo sapiens
cgggccccccctcggggtacttctagaattaattaacgcgggtgttctctaaaattatgtgcttttttatatgaataagtttaagtggccttttgaaagtaggaaaggtagacaacctaagagacatctgtacgtaaccatttcaggttttttccttaaatagtggttttcagtatcccattggccaacggtgaggattttatttaacatttttaaaataatgttgctcattaacagatatcttaacgaaaaattatataaattcaggagagtataatgtctcataatatcatattgtgttgtgcatggtcattcagctgttttagaatatgttcttatattacaataaatgatacccttacttacatagtcaaaagttgtgctgccttatttgtaaattcgttaagtgttagcttgagattaaagagttaaaagcagaagtactaacaaagagccctattcttcaaactgaatcttctgttaaagaatttgagttttgaagttgctaaagcaatgcagtgaacagtgtaccagaccatagtattagacacaggtcttgctcacagggttcttgccataaagtagacaagttatgtctgctgatgaatc

SEQ ID NO: 54753 - DNA, 637 bp, Homo sapiens
cggggccccccctcggggtacttctagaattaattaacgcgggtcttcaataaactaaaatgtaatggtcaacttccaaaatatacagacaaaaagcattcccccaaatttctgggctctaatactatttttttttttcacttttagaatcagtattagaaaaaaactagttttgaaactttatagatttcaaaatccagttcaatgaatgtttgaaacttaaaaaaccagatattgacttataatcttacttaaaacaaacagcttaatcccattcattctaaggagatagttttcgggcccatatgggactgagcatggaagagatggtcttcagggcataatgcccatctaaaacaatctttcagaatgaaaaagttgagaatcacttaattggggtaatggttctattttagagtattaacaaactgctacatgacgctgtatttcttccaagtattccccacccccatttaaaaaaagggaaaggttgcttttacaacaacttatgtttttgtgaatttaggaatttcaaagaactgctcaataatcacatataatactgtcctggcagcatgagagtcagcgaaagaattaatccctgatcgctccactgtatgtaatgaattcgctattt

SEQ ID NO: 54754 - DNA, 589 bp, Homo sapiens
  misc_feature 41: n = A,T,C or G
aagactggggtaccgggcccccccctcggggtacttctagnattaattaacgcggggcccagcctctgctctgactgctgagcccatgtagataagctcaacagtttaagctaagaatctggggggaaatgttacatacaatacactttttacatatgatgcactctaaaaagaaatgcatgtaagtgattattagaggagagaaaatgggaagatacccatggttctttctacaccactttattcctgttttaaatacataaattatacgaggcaaatgcttaatcatgagatgctatgatattccacatagacatatacccagtatatatatggaacaggaatacaacattattaatatgcccactccatatactcacaaatatgatccaaattgcccttgcctaaattgtcactttgagaggcaaaaaaggtttccgaaaaggggatagctttgaaatcaaaaatccttaattaacgcgggggaggcagagactgttttttttcatctgtaatctcatggggcagtgcatgtagatgtacaataaatggtaattacaatgaattatgctaaccaatccctgttttc

SEQ ID NO: 54755 - DNA, 500 bp, Homo sapiens
  misc_feature 449: n = A,T,C or G
cccccctcgagagtacttctagaattaattaacgcggggtatgtctctgatttcaaaagctttcagaaaggacaggggtagatagaaaagattaagacgaacaacatcaaattctcaacgataatcttaagatgataaagcaatggcttcaaaattctgagggaaaatgaattgcaacctggaaatctctacccagacaatcaagagagttggtagaataatagtagtttcagatacacacaaaaattatctctaatgtatcctttttcatgaaactactggacaatgtgtgccaccaaaatgaagatgtaaaggaagaaagaagacatgggatccaggaaacaggagattcagtgcaggagagagttaaatttctaggacaacagctgtgtagcaggcttaatgagcttcaggtctagattataacatgaagacaaagggctccgggngaaaagtggactgacacaaggtgatacatttgacaacgtagaaaactgcat

SEQ ID NO: 54756 - DNA, 602 bp, Homo sapiens
cgggccccccctcggaagtcttctagaattaattaacgcgggggataatatccaaatgcattgccctatacttttttctatactagcaagggtagattccctagctaggcccacttctccatttaaagacccttcaatctttctgtcacctctctcctcagttgccctccacatccccaggaaactggcctatacattcagggacaattgttttcacaagaagaaagctgtccagagcttccattagctcctatgtgtttttattgatttatacctgccttgttccaaagatgtatttaaggtttacaaagatgcatacaataaaacagcataaaataaattagcagtaaattagagcaaatgacgtaaagggaaaacaaggagaggaaaataagatggagccaagagtgaggtgattacacaaaacacctgccatgaaacctactgcactcactggagacagaacacaagtttgaggctgagttccccagcagcccaggggaaaaaggaagccgggttgcactgtgacttatatcactgagccgagtcagtgatataaaaacaaagcacagttgggagaagcacagttattcctaacatgg

SEQ ID NO: 54757 - DNA, 604 bp, Homo sapiens
cgggaccccccctcgaaatacttctagaattaattaacgcgggcacgtaagaggccttaatgatgatttgtggaataagtatttgattgtcaggaccaaagataataccatttgcccatgtacttcagtgttacaaatagcacttgcttcattaatcacactggtgtattcataacacagtgtggcaataacaagatgcagtcattttttcattaacttaaaaaatttacttatctgttaatcatgatcaaccagctaaacttaagttaaaaaggagttgactatttaaaaatgttaaatgagccagaagtcatcagggaatttttaaatgcaatgagtgggattttttacagtaagaacagagaagaagcatgctgctatggtttttactgtgtcccctagaatttatgtgttgaaaatttggtccctgatgtggtaatgctgtgagatggggcctataagaagtgattaagtcattaaaatggattaatgctgctctcacagaacttgtttaattcttatggaagtgagtgagttttagttctctccagactagattagttaccaggagagggaattgttacaaagcaaggccaccccttgt

SEQ ID NO: 54758 - DNA, 476 bp, Homo sapiens
gggccccccctcggaagtcttctagaattaattaacgcggggaaggtaagaatctcttgactcagaccttattctgtcttggtactctgccttccaaggctttatccttctgtcttccctgtcttctctctctctctccccacccccaaccccaccctatcaccagtcagtttcctctcgtctttgcctatatgtaaaacctgtaactgacaggcaggatccagggaagaaaatattggtatgaatttgtcatctaatcagcaatattaggtttttctcaaatacttttaatcaatgtttttattaaaaagagttcttggccaggggccatggctcacacctgtaatcccagcactttgggaggtcaaggcaggcagatcacctgaagtcaggagttagagaccagcctgaccaacatggagaaaccccaactcgacgaaaaatacaaaatgagctgtgtgtagtggtgcacattt

SEQ ID NO: 54759 - DNA, 586 bp, Homo sapiens
ttctagaattaattaacgcgggttccagctggcacataccgccaagtcaaccccggcgctagccagtccctgcccgcctatcctccctgcctctccttgctgcctggttactgagggagggacccgcagagccagctgcaatcccattcccctgcctccccttgccaggagtggtagccaaagagacagggctgtccctcactcatgctacaggagccacacgacatgcactctgcaggactcatggagctcagggcaaggagatcttcaaaaagtcctgctctgctcctcttaccttttcttctcctctctacctgtcatctagtgccatgataatgctgcaaatcgaaccacctcaaatcttactggtttaaactaatagccatttcttttttctcatgagtctagattttgctgggcagctcagctggtctcacccaggctcacttgtgtgtctgcagtcagctgaaggctggctggtctaggatggtaatacagtttggctgtgtccccacccaaatctcatcttgaattgtactggcataattcccacatgttgggggagggacccagtgggagataattg

SEQ ID NO: 54760 - DNA, 581 bp, Homo sapiens
acttctagaattaattaacgcgggggaaggattagaacacaggctttgatgaccttggcagtgtgacatgaggcaagccattttacctctctgaacatcaattttctatgcatgaaataaataataataattcatggaggctgggcatggtgaatgttatgttgcaccctccacagggtaggtctgttctattaccacacccaggatcaggccccaagtagacacacaaggaggagggcagtgctgagagacgggggaaggattagaacacaggctttgatgaccttggcagtgtgacatgaggcaagccattttacctctctgaacatcaattttctatgcatgaaataaataataataattcatggaggctgggcatggtggctcacacctgtaatcccagcattttgggaggctgaggcgggtggatcacgtgaggtcaggagttcgagaccagcctggtcaacatggtgaaaccctgtctctaccaaaatatacaaaaattagccgggtgtggtggtatgtgcctgtggtcccagctacatgggaggctgaggtgagagaatcacttgaacccggga

SEQ ID NO: 54761 - DNA, 585 bp, Homo sapiens
ccgggccccccctcggaagtcttctagaattaattaacgcggggttctagaactttgtagaaatggtattgagcagggttcactttttcatgtctggcttctccagtgtggcatgtgtgagaatgtgtgaggctctaatatgcttctgggttctaaagaatcttgctccatgaaaaggaatttcttaaaggtttcgtaggtctgggaaggcctaaagcaatgcttctaggaatcacagagtgccagtaaatcatgcagatttctggccatacctgagacgccttttgaatatttgcatctaggaatctgaattttaaaataataattctgagaggtgaagccagctggacatcccttggggaactttcctgtcttacaagaggattgtaaaatgcaccaatcagcgctctgtaaaatgcaccaatcagcactctgtaaaacggaccaatcagcaggattctgaaagtagccattcgtggggaggactgaaaaaaggcactctgataggacagaaatggaacatgggcggggacaaataagggaataaaagttggctatcccaaccagcagccgcaactggctcgg

SEQ ID NO: 54762 - DNA, 478 bp, Homo sapiens
  misc_feature 436: n = A,T,C or G
cttctagaattaattaacgcgggggggagagccttcttacaattagattggaaagtaaagaataagagcagatcactgaacaatagacactagatatgggtgttagctaaagagttaggactaaaggaattagaaaaaggagttcattgaaatagataaaagaagagagagctatatatttttttctttttctgatggagaaatcagaaaagttcagtggaaaaaaaaaaacagggaagtcaagagagccacaaaattgaagaaaaaaaattatagttgtaaataccttccacagattttcaaagacacttttaagaaaatgtcctgatggcatgatgaggagtcagagccaaagacaattaataagaaaattaagaagcaaagacttcttgaaagacgtgggcaggcagctttcccataataacctaatctgcanattgttctattaaagtctcattgttttcagggatgcatgaaa

SEQ ID NO: 54763 - DNA, 602 bp, Homo sapiens
cgggccccccctcggggtacttctagaattaattaacgcggggccaggaccctcctctgggggactctaaacgctgtgtttgtaaccaacatgctgagcctcctgagggctatcattgtaaatgtccaaaatcaatgtccaagtaagataggcaaacttaggccaagaatcttacctagacttagatatttcttaagcattgctaaatgtgagagaagccatgccataaagtgttaagaacacaaacaagtcaacttttcacaatccaccatcaaacttttccaacaaaatattacctagcattgcttgggtgatagtgagtggcatgaaactgcttaagctgctcccatgtaagctccgggatgcacagtgggtcacccccggagaccactgagtacgtgtggtcgggaagaagtctgttctgaaggtgctgggagaatatcctctcattgtctgtcttgaaacgtaaaataaataaatcataagtatacatgtaaaataatacacacgttacattacttacaatatagccaattgatcacattctggtgcatacacctgtaatactttgcaaataaagctgttctaatggtttaaaaaaa

SEQ ID NO: 54764 - DNA, 459 bp, Homo sapiens
cggggccccccctcgaaatacttctagaattaattaacgcgggtgggggcagggactcttttcgtaataagcacttgttttattttgtgtgtgtggagtataaaggctacacccttattgtaaaaaaataataataataaaatgaaagaaacaatcaaaaaaaaaaaaaaaaaaaaaaaaaaaaaaaaaaaaaaaaaaaaaaaaaaaaaaaaaaaaagatcccttcaggttggaacacttttttctttccctgtttggaaaaaaaaaatggaaaagggctttggttggttggtttccgttgggtaaaagctaattgccatcctggggcggttatgaaaactgtttgaaaggctggaaagggttaattgttaatggaaaaattggcctaatttttaaaaggcagggttggaaaacctttaataataaagtggttaacatacttaaaagtctatatttaaa

SEQ ID NO: 54765 - DNA, 590 bp, Homo sapiens
cccccctcgagagtcttctagaattaattaacgcgggagtgtctccattttatatattctacccatcagaatgactcttaaaaataattatgactgtcattcaagtcacaagccactattatccttgggatactgtccactttatggtttatagtcagtcttttatatcatcttatgattgcaaaacctgtaataactccatccataccgaacctcaatctgttagcttctgaccacttacttcctcaaggatatatcaaatttcaagatatacaaccccctttctactcacttttctttcttggattagtgcaatcagaaagcttgaatgatgaatatttctatttactatacaatatggcctgcaaataaaaatgtcagaagttttaatgcagagtgaagtttatctgtggaaactggcagattaaatgcgtggatttccaaaacatcactgaaacaaccatgaggaaatttttaaaaagacataaacccacaggttaaaaataatagaaaagacagtaagaacaaaattttagaagctgaaaagcaaacagatgagtgtgaattgacttaatagatctgagaaacct

SEQ ID NO: 54766 - DNA, 460 bp, Homo sapiens
cgggccccccctcgaaagtcttctagaattaattaacgcgggggacggactgggaaaggagagacgctggtcaaagggtacaaagtgtcactgagaccggaggaacaggttctggtgatctgttgcacagcatggtgactatagttaatgataatgtattgtctgtttcaaaattgctaaaacagtaggttttaaatgttgtcatcacaaaaagattacaagtaggggagatgatagatatgtcagttagcttgatgtaatcattccacaatgcaaacatatatcaaaacatcacattgtgcctcataaatatatactctcctcttttgtcaattaaaaatacatattaaaaaaacaaggaaaaggcataccacaggattgaagaaagacttggctcttgggtgtaatcaattgctgatataagtcacttcaaaaattttagaaaaaaaaaaaaaaaaag

SEQ ID NO: 54767 - DNA, 505 bp, Homo sapiens
  misc_feature 16, 458: n = A,T,C or G
ccgggccctccctcgngggtacttctagaattaattaagcgggacctgcatttaagtgtaatgtttatataacaactctaaagccatttctacagggagtagtcaagttgttcaaataaaaatatttgttttagtctaaaacattttgctacatttaatgccttgattgtctcaaaaatatacagagtatttactgaaagaaatatttagacagttttaaacagctgtctactgacaattttatcaaacataactcatttctgtataagaaattaacattaaagttcacatttattagcttactaattgctgtaatttctattttggatcaaatttgcaaaggttcaaagtgctttccaatgtgaaatatactatttatatgtacatgtcacagaaaaaagcacattgaaaatgtgaagtaataagattctctatattgtataatatatatacaacanatattataattgctaatagaaatacagtttttaatccttttaaaacg

SEQ ID NO: 54768 - DNA, 591 bp, Homo sapiens
  misc_feature 20: n = A,T,C or G
cccctcggaagtcttctagnattaattaacgcgggggcttaaaattagtttttgaaaatcactgaactgtttataatctcctttaggccttccagttccacaaacataccttaactgtagtggtttaaaaatatacagaaagaaagagagatttgaagataaaacaattaagaaaaaatatacaaagatgttttgaacaacataccaattagcttttcctccgttggttatccacatcttctgaccattaataatatactcatctcctttcttttctgctttggtctttataccagctacatcagagcctgctccaggttctgttacacaataagcacacatcaatggctcctcagtcattctccccaaatacttcttcttttgttgatcatttccagcaataataataggcatttgctaccgaagaaaattgacattaaaaaatcaagtcatttttattggatatgtaaattcagagatgctataattcaaaatgaaaaaataactatttttcacctaacaggtaagtccaaagaactggcctataccttgcctctaagttagaatgaggaaataaatctgctaatctaa

SEQ ID NO: 54769 - DNA, 529 bp, Homo sapiens
  misc_feature 75, 458: n = A,T,C or G
ccgggccccccctcggggtacttctagaattaattaacgcgggttaccttaagaaataattacttttgtattganagtcaaccactgaaattcatgctaaatatgtactacttaataagatgccatatgttatatacatgcttagaatcccgtttatcaagtttatttcattgtaatacagatatcgaatccatctaatagtggtgggtggaagcaaaaacgatacattgctcttatttctaaaaccaaagatatgaggaaatgaacaaaatcatggttagagagagggtaatttaaaattatcaagttttgaattgcagcaattctcgaattttttttttttttttacctttttctaaagattttatttcttttgtgctacttcctaacaaacatctactggactactggaccaaaatggaaatgcacacgataatgaggtcaggcacaaggccagnaagtaagctttcccaagatgatgatgatgatgatgatgatttaattaacgcggggcagtgggctgtccatg

SEQ ID NO: 54770 - DNA, 566 bp, Homo sapiens
  misc_feature 28: n = A,T,C or G
ccgggccccccctcgggagtcttctagnaattaattaacgcgggattacaggcatgagccacagtgcctggatctttttttggactttgggagtgagacgtgaggattctgtcagccctagaaccttaggtcttctggtttcttttttgtactctcaattttcttcgtactaccttcaaggtataatgtgcctaagaaatatttccttgtttttcaggttctaaatggcttctaagaagttgggtgcagattttcatggtaagtggactattagaatcatggtttaagttatgatttgatcagaggatttggaatcacttagcatagttttaagtacaagtgcccctttttgtctcttttaatgaacagcttgacaaaaataaagttgtacaacaatgtatcaagtatatctgaaaggtcttcagagaacttgaagtatttcttcaaatgggtagttaaactttagagtgtctctggttattgtacttgaaactactagtgatagattaggagtctgcctgttctggttcttcagcagcattgaaggtatagttactggctgggcg

SEQ ID NO: 54771 - DNA, 558 bp, Homo sapiens
  misc_feature 16: n = A,T,C or G
cgggccccccctcggnagtcttctagaattaattaacgcgggggagcacttaataagataaacttcaatacacgttttgttatgaagactttaatgactatatgcccaggaactgtactcttggtttttagtatctcattatggataattgccgcatggactgtccgagcttgtgaaaggtaagtttgtttcttttcctgagaacataatttaccatgtggtatcttcacaagtaagaaaaaaaaaattttagacttgagacgtgtagtgtctcactcttaaaaattttggattttctgacaggcttctttgaaatgactgtgacaaagcttttctgaagattttttcgtagagcaaatgccttcatgcttgtgtgttttctttctaatttgatcagttttcagtagagggctgcctttataattttgtgccaaaatttggagacctagaaattggtacaggacacttttattggaaatgtgagtttaatggtaatattgagtcatttctgtgcctgattgcttatgagcgttgtttgttgttgagacagaattcctg

SEQ ID NO: 54772 - DNA, 566 bp, Homo sapiens
ccgggccccccctcggaagtcttctagaattaattaacgcgggtatataaatagtttgattcttttttcaagaattactttcttattcatatccaccattgcatatctatttccttgttgatgaacaggtgggcagtttctagtttgagggtattataaaaaagccaccattatattacttatgtaagagagtacagaggtttttgaagtcatgttttctttatcttagataaatatctaaaagtatggttactggattgtagggtagtgtatgtcatggctcagaacacaataacccaaaatatggcctcgtggcaattgagaatgcttcagaagcaagaaagtcactctgaccctcctttgccattctgtgtaatgaaagatcattaccaatttctctcaactaccacaattaaaaatagcttataagatcctcattccagagcagtcatgccccatacacagaggaaagggatgtcacagacacagagatgcagaaaagctctaaacaggtttttgctgaattccccaagtttattaccattaataatatttaccaggccggg

SEQ ID NO: 54773 - DNA, 617 bp, Homo sapiens
  misc_feature 24: n = A,T,C or G
gccccccctcgaggtacttctagnattaattaacgcgggcgttatgattaatttatgtttataggatctgtagtatcggcccttttctcattttgtattaccctctcactgttttccttgatctgtctttgcaggaatataacaattttgttagtcttttcaagacagcaacatttggctatgctgatccaattttgcaggactactcaaagtgttgtctatagatagatgatgggctgtgaagtgtttcatactggtctgagatataatgagcattaaaaatgaagaatgaatgttcagaaacttttatagtaatttgacattgccatgacattcaatcacatcattagtcctaaaagtgcttttattttataaaattatttatgaaaaaaattttatatattttgaaatcatagaaacatacacacaaacacatataacacatttatgtaggtatacatgcatttataatgtacatgtatatgcataattttaatgtaaaagtaaaatctaatgaaaaataaagctgatgctaggtggagatcaataatgttagggaattggagatattaaaagaacataaaaaaataaatttgaactcttaaaagataacatga

SEQ ID NO: 54774 - DNA, 608 bp, Homo sapiens
  misc_feature 23, 569: n = A,T,C or G
ccccccctcggggtacttctagnattaattaacgcgggatattttcagacacattgttgcatttgatactcaaaaaaacttaggagctgttttaagttttaatacaggaaaactgaggtcaaacgggcttcattattctgccaagttcatacacctgagatggattcttaaacagtagagaattaacagtgtcaaatgagaactgaaaaagatccctggatttagcaatttgctaacttacaagattctttcaaaaaatggaatttgtggtggctcatgcctataatcccagcactttgggaggccgatgcaggaggactgcttgaggccaagagttcgaggccagcctgggcaacatagtgagacctcatctccacaaaaaaataaaataaaataaataaaattagccaggtgtggtggcatgcacctgtagtcccagctacttgggaggctgaggtgggaggatcacttgagcccactagttccaggctgcagtaagctatgattgtgccactgaactccagccagggcgacagagcaagaccctatctttaaattaaaaaaagatntcaaggaaaggcaaggactgaagcccagatacacatact

SEQ ID NO: 54775 - DNA, 604 bp, Homo sapiens
cgggccccccctcggaagtcttctagaattaattaacgcgggatggtgttatgaacatctttagacagaaagcttttaccacagttaggataacttcctcatgatgaattcccagcaatgaagttcactgggttagatagcatgaaatttttgaacttttgataaatagtgataaagtggttttcatttccatcaatactgataaggatcctagtttctctgcacctgggaatctcagtttctctgcacaagggaaactattaaataccacttattctctggagggagatgttcttaagattaacatgtatttttagaggctacattcttaaaggtaaaattactaagtcaaaaagtatgcatatttgaacttttggtagataatgtcaaattaccatctaaataggctatatcatttaaacttctatcaaccacgtctgaaaatactcattcctccacactatctccaaccatgagttgtatcaaacttaaaataacattttttagtcaatccgatatcaaaaatatctcattattttaatatgcatttccacaatgcctagagaggctaaatgtcttttcatattattagctacctgtgttt

SEQ ID NO: 54776 - DNA, 510 bp, Homo sapiens
ccccctcggaagtcttctagaattaattaacgcggggggaaaacaagacaatgtcaaagaaaagggcaacaagtagataatcagtaccgatttcttttctttcctccaactccctcttgctcccatgacccagtttcttgtccaaaggtaggaatcgtaagagtgtacagaaataagtcacatgcagaccatattgaaatacgcagagaattccatggagactctgatggctaggtaagctcactttagctgcacacccacttcaagaaagtgaaagagacaattctgggataataaagatctatgaagtatgtatctgccatatataagtcagaggttcagattcaagacaagtgatgatgaaagatgtcatggtcctcctaactgattcagaacatctgtgtatgtctttctttccacctatattatatatttgttgagacgaggagttatcttacagctcttaatgttacccccagtaccttgtacttatggagcatttgatatgtg

SEQ ID NO: 54777 - DNA, 584 bp, Homo sapiens
  misc_feature 16, 29, 508, 530: n = A,T,C or G
cgggcccccccctcgngggtacttctagnattaattaacgcgggtctcttttaatcttgaagaatttcatggcttgtattatcttccaagacttttaacatgtttaaagagctacttgtcttatagagtgtcacacaatctgtatttgactgctttttcctcctaataagattcaggttaacattttggcaagaatactgcaaaggtaatattacctctgtgcaaagggagcacagaggtaaatttatcccattgttggtgaagctgactgggttaaggtatgtctgctagatttctcattgtaaaggtaccttttcccttggtatttaatatgtatctgacatagtaaaggtttcagggccgggtgcgatggctcacacctgtaatcccagcactttgggtggctgaggtcaggagttcaagaccagcctggccaacatggtgaaaccctgtctctacaaaaacacaaaaattagccaggcatgatggtgggtgcctgtaatcccanctacttgggaagctgaggcggnagaatcgcttgaattcaggaggcagagattgcaatgagccaagatctcaccatt

SEQ ID NO: 54778 - DNA, 614 bp, Homo sapiens
  misc_feature 33: n = A,T,C or G
ggtaccgggcccccccctcggagtacttctagnaattaattaacgcgggtccgaaggctgcatataatatgtggtatttcctgagttacttgacccctgtagccattttgcaaagagcttgttacagaattaatgttgtttagaaatactaaaataataacctctcttgtttgcatataccattaaattatgtttcgataattctacataggaagcataataaaaaatcatagtcattggaaaagagatgtttatcatgatttatgaaattatatttaatataattttaatcaaaagtccaatgaattttttggtacatgataaaacttcatgttcaggaatcaaaatgtacctaaataaactgagaaatatacagtgttaattcatttgaagtcttaatattgttaagatgttagttcttccccaattgatctatagatccagcacaatcctgatcaaaatctcaaaatgtttttttattatggaaaatggcaagctgtttcttaaatatacatagaaaagaaaagccctagaatagtcaaaacattgttttaaaggtcaaattgtgaagacttaatgctgcctgattttaatactgactctgaaatctacat

SEQ ID NO: 54779 - DNA, 589 bp, Homo sapiens
  misc_feature 546: n = A,T,C or G
ccgggccccccctcgaaagtcttctagaattaattaacgcggggcttgttttgttttggagatctgttgtagttggagaacctgggagttctgtacaaaacattaaaaataaaataacgtttaacaggtagctctgttatggttcttactgtgttgccttatatgattgttacttgaatgcttgactctcagtttcaatctcatacaactttcttcacataatctgacatagagggtagatttacaagcacacacagatgctgggaaatggtttctgacagtacatagtacagcacgttgttcacggtgtggtttggcaggagttggagtaagaggtgccaatgccagctagcaggagacgggtccagtaagggctacctgccaacctcaggggtcacactttgctttgaaaacagtaaggaatcaccaaaggattttaagctgaagagtgatacagtcagatttctattatagaaatattatttgggcagtctgttcacaaatattttagaggaagacctgcggaagcaattatgcattgagctnttctacttgctgattgtacctattaaatattttatattcagtc

SEQ ID NO: 54780 - DNA, 556 bp, Homo sapiens
  misc_feature 541: n = A,T,C or G
acttctagaattaattaacgcgggggggggagaatgtgtgcgccaatgcgggctgcattgtaaagaagaggaagagttctgcgagttactctacagatattgtaagtgaaaaaagcaaagtgcaaaaaggggatgatactacctgttgtgtaaggaagaaaggaaaataagaatatgtataggtatttatttagttttacaagaagaaacacagcaaggaaaccaaaaacaaatgaaaatgattacttggggaatggggagaaagaataggtacacttctgaatatacttttaaaatttcattttgatttttcaaccatgtaaatgtttgatatattcaaaaaatgaaataagcttggccgggcgcggtggctcacgcctgtaatcccagcactttgggaggccgaggcgggcggatcacgaggtcaggagatcgagaccatcccggctaaaacggtgaaaccccgtctctactaaaaatacaaaaaattagccgggcgtagtggcgggcgcctgtagtcccagctacttgggaggctgangcaggagaatggcgt

SEQ ID NO: 54781 - DNA, 629 bp, Homo sapiens
  misc_feature 531: n = A,T,C or G
ccgggccccccctcggggtacttctagaattaattaacgcgggccataatgtcattttattgtaactttgtgttttatacttttctagtgaaacatgactgataactcttaaagagacaacttgctttatgagaatttcttctgaattctcttatatcagacagcacaagatatagagaattatggatgtaaagacgatataagcatagtttacagttgaataacgcccattatattcagctgcaggttttagacaatgtggaagcattgaccgccagagttcatttccattgctgatgaacattacctccagctctcattaacaacaacaaacacacacacacacacacaaattaaaaagtcatttttaaaaaatcctgagctgatgtagtctgccagctagctcttcctttctcaagtggtcactgataattctgcaaggaaatattagaattagattagatatttggagcctaagtcaaaataattacacatttgtccactttggaaagtaatggaggtgaagggggntgtgtgtgtgtgcacttctatggacacacacatgcatagatacacacacatgtattgtgttttcttgttttgtgctttaaattttatttttaaattgc

SEQ ID NO: 54782 - DNA, 604 bp, Homo sapiens
cccccctcggaagtcttctagaattaattaacgcgggtactattttgtcaagttattctcatttcatttcatttttctagtaattcatttttaatgtattttaaagaagtattgggaaaaaaacctgattcttcaccacaaataatttgaaaagcactgtgataaaagacttatcggtcatgaagctgggatgtgccaaacaacacatcaaaatatacaaatttaaaacaattacagatgcaaggcaaaaatgaaggacaaatgtttatttgggaagcaaacccattccatgacacattagattttttttaaaaaaagcacatagaggaattttaaaatgtcacgttttctctaagaagtcactgattataaatgtcctatcagtttaataccagcttttcaggagggaaaattactgtattaaatgtacatactgtgagacacattacaaactcggaaatgttaaaattgggccaggcgaggtggctcatgcctgtaatctcagcactttgaggggctgagatgggcagatcacctgaagtcaggagttcaagaccagcctggccaacatggcgaaaccccatctctatgaaacatacaaaaa

SEQ ID NO: 54783 - DNA, 554 bp, Homo sapiens
  misc_feature 9: n = A,T,C or G
acttctagnattaattaacgcggggagctattttcattatatccattttacagatgaggacagttaggcacagagaggttacatggcacagccaccatcacaccaccactgaggggcggagtcagaacccagacctccataatgtagctccagaatcttcactcctacctccacactgtgctaaagaaggaagatgaggagccactccaagtagggaggggactctaggtcaaaggagagataatggacatgaatccaatgtttggcacaataacgtacatttatttaagttttcttttttaaaggtttctgtaaaccttttcaaaaaatgattcattccgtgccgggcatgttggctcatgcctgtaatcccagcactttgggaggccaaggcaagtggttcacttgaggtgaggagtttgagtccagcctggctaacatggtgaaaccccagtatctagtaaaaatccaaaaaaaaaattagccgggtgtggtggcgggcgcctatagtcccagctattcgggaggctgaggcaggagaaatgcttgaacct

SEQ ID NO: 54784 - DNA, 589 bp, Homo sapiens
cggggccccccctcgaaagtcttctagaattaattaacgcggggtactgcataatgaatgtatggagatctgcttcagtagacaaagtctggaatgcagttttggtggggtaactgtacatcacagaaaacagaaacagttttggtggtataatggtacatcagaaaatgatggctgaaggtggttatttggccctgatgggcaggtttcacagttttaaaaggaaaacatcaatatgctggaaaaagaaagttattgaggtcatcaggaaagtaaattatcctaaaacacaatctaatttatttttaaagtcaattttgggccgagcacggtggctcacacctgtaattccagcactttgggaggccgaggggggcagatcacttgaggtcgggagttcgagaccagccaacatggtgaaaccccatctctactaaaaattcaaaaattagccaggtgtggtggcgcatgcctgtaatcccaactactcgggaggctgaggcaggagaatcacttgaaccttgaaggcagaggttgcagtgagccaagatctcaccactgcactccagcctgtgcaacagagcgagac

SEQ ID NO: 54785 - DNA, 341 bp, Homo sapiens
cccccctcggagtacttctagaattaattaactcggggggatacagagcagctgatcaatttgtatttatttattttaacattttactaaataaagccaaataaagcctctcaaaaaaaaaaaaaaaaaaaaaaaaaaaaaaaaaaaaaaaaaaaaaaaaaaaaaaaaaaaaaaaaaaaaaaaaaaaaaaggaaaaaaaaaaaaaaagggggccgcccccgggggggacctccatttccccctttagggagtcgttttaccccccctcatgggccgtgttttaaaaacgtggggacggggaacgcccgggggttccccaatttattggctttgaaaaaatt

SEQ ID NO: 54786 - DNA, 575 bp, Homo sapiens
ccgggccccccctcggaagtcttctagaattaattaattttacacatccatgctaattgttttctcacttaagagtttttcctggtttccttctgacattctggcctacaaaatctctgatttggaatgccagattagctatggtcttaggaatgaatgacagttacacgaagatgaaaataacaaagataataactttaatggccacaagcccattttaattcaagaaatacctgtatgaatgaagacatgtctctgtaagtgatagttcgttctaaaggcagcattgcagtgctcacaaacgtgagatttaggggttttcaaaccaagtgatccatcctcatttattgtaaggatctagttcaaaaaaaaaaaaaaaggcaaaaacaaaagaaataagtttttaaaatgtaattaaatagtaattttaaaaaaaagataatgcaaacaacggtcaccacagattatgaaatattttgttcttaaatgatcttgaaaagactattagaataatgttatcattaactgtaggaaagtacaatgtgactcaaaatgagcaaaatcactaataaacc

SEQ ID NO: 54787 - DNA, 611 bp, Homo sapiens
ccgggccccccctcggaagtcttctagaattaattaacgcgggtagcgtagatttaaaaatattactggctgggaaagcactcctcaaagcagaggttctaaattaatttatctgttcttttaccatttgctcactcactcactcatggacccattcaatcatagaatatttaagatttatatgcccagaattataatagtgcctaggccttgataattagtgaatttgtacttggggtgaatgtgtaagtgtcaaaaggtaactattatgaaggagaaaataatcgatttaatatgtaaattctggggaggcatttaaaaaatcagtaatcttcaagttatatcttgtgtatcatctgtgttggatactctaatttggggggaaagaggctccagacagtttgctaaatactattttgaaagttatttttgggcattgtaaaataccttgcttcataccccaaagaataagatatgacagtctgacatcgattgtctgaaagtactaattgcatttaaaattctttaagttaactacaacctcccagactgcaaagcaaatttccaaaccccaggtcatacttttgtatgtatgtaaaagctttagcatt

SEQ ID NO: 54788 - DNA, 536 bp, Homo sapiens
  misc_feature 17: n = A,T,C or G
cgggcccccccctcggnagtcttctagaattaattaacgcgggggagagagaagaagagaatgagagagagacagagagggaagaaggaagagagggaggaagagagaggaagagaggcaggaagagggggagagagaagaagagaatgagagagagacagagagggaggaaggaagagagagaggaagagggagagacagacagagagaggaagagaggaagaaagacagagaaggaggaagagagaggaagagaggcaggaagagggggagagagaagaagagaatgagagagagacagagagggaagaaggaagagagggaggaagagagaggaagagaggcaggaaggggggagagagaagaagagaatgagagagagacagagagggaaaaaaaaaaaaaaaagcggccgcttttttttttttttttgcttcctacttttcaggtttaaatttatcttttttcttctaaaagtatgtttttatcttctaatttccctatcttctctattcttttcttcgccttcccgtact

SEQ ID NO: 54789 - DNA, 453 bp, Homo sapiens
ccgggccccccctcggaagtcttctagaattaattaacgcgggttccctggcccctctccaaccctgatgtcagtacacatcctagcatactgctgggaatgcctcaatttgagggagtgcaattagttgagggaactgaggaagtgctgtaatgggagtctagggttgacccctgggtgaccaaggccagaatgtcaaaggcgtttgaaccagagcaactccatcttgaactggggctgggtgaaataaggctgaaacctactgggctgcattcccagaaggttaggcattcttagtcacaggatgagactgaaggttggcataggatacaggtcacagaccgggcgtggtggctcacacttgtaatcccagcactctgggaagccgaggcgggtggatcactggaggttaggagtttgagaccggtctggccaacatggcgaaatgccatc

SEQ ID NO: 54790 - DNA, 425 bp, Homo sapiens
  misc_feature 17, 237, 238, 239, 242, 245, 246, 248, 249, 250, 253, 254,256, 257, 259, 263, 264, 265, 266, 267, 268, 272, 276, 283,284, 294, 296: n = A,T,C or G
ccgggccccccctcggnagtcttctagaattaattaacgcgggggttagcatctcactctcctggcctcacattcttagtctatgagcttttttagtatctatttactcctctgaaatcacctctcacgactactctttgttcccagatctggaggtcagccagtccacagattcagccccacttagtgacttgcatctgtgtttctttttctttttctttttttttgagacagagnnncanggnngnnnccnnanntncagnnnnnnagcnctanccactgnnaaaatatcgncnccagctccatgacaccaagttggatagtgcgggggtttaccaccacacccagggcagcaaaaattttgacagatggcaggcggccccaccatgacccctgatgccatagagctgggagggaaagagctg

SEQ ID NO: 54791 - DNA, 551 bp, Homo sapiens
  misc_feature 424: n = A,T,C or G
ccgggccccccctcggaagtcttctagaattaattaacgcggggcaggagttctgcagcaagctcttagctgactttcaaatcagtgtaaccagtagtgtgtcactgagtccaaaagcccaaagaacacctctgggaggaggctagtcctttactagaggctccaaatgccaaaatcaagattttcttgacctcaggatgaattgatcaatgcaaatctccccaaatattttcactaaaccttaattggaaagtaagactccagattttttaactctcactaaacataaatatctgattttttcacctgagatctatgtatgtgtgttggagcatgcctttactaatcagcataaagttacatctgtccttgcgcctctactttctacttgtgcagagtttaaaatgcagaggtgagagcttanggttttctgggtcttttgctaagcatgtacctgaccttgagcatccccatttcccattttcttcttgatccccaagaccgttatcacagtcttaattccagccagctttcctcctagagctttttga

SEQ ID NO: 54792 - DNA, 527 bp, Homo sapiens
  misc_feature 13: n = A,T,C or G
ccgggcccccccntcggggtacttctagaattaattaacgcgggagagctacgcagcagcgcttcccatactctgcagcagaggacctctacttccataaaacacaacaaaaacgaagtactaggagaaggaagtgccgcacagtgccacctgcggtgatggcctctacacgctggctctggttcctggatggttctcatccccgaccatggcacaccattaatggactgtgcagaccatgtggaatgacaccgcccacagttagagtggttccaagcacagacctcatttattctccagctccgtcactttctaaatgtgggagcccccggacaagctgaccaatctctgtgcttctgtcccatcacccttcttctgaaatggggatgctgatggtatccacctcctaaggttgatgcgaggatgaagttatttcacctataaagtgctgagactagtgcctgcctcacagaatttgttccgcaagtgtttgtgtgtgttatttaagcggaagctgagctgcttag

SEQ ID NO: 54793 - DNA, 558 bp, Homo sapiens
cccccctcggaagtcttctagaattaattaacgcgggcaaaagaatatttatggccaggtgcggtggctcacgcctgtaatcccagcactttgggaggccaaggcaggtggatcacgaggtcaggagatcaagaccatcctggctaacctggtgaaaccccgtctctactgtaaatacaaaacaaaattagctgggcgtggtggcctgtagtcccgactacttgggaggctgaggcaggagaatggcgtgaacccaggaggcggagcttgcagtgagccgagattgcaccactgtactccagcctgggcgactgagcaagactctgtctcaaaaaaaaaaaaacaaaaaaaacaaaaaaaaaagtttatgattaatcaaatttcctgagaagggaaacaatgaatttaaactaaaacgtaatttgtgctttacatgcctaagaatattctaaaaaaaagattctcctactttccacctacctaaaaatatttaggtttcaaaaaacatatattttagtagggggtttgtaaagaaactttcatactgaacagtacgaa

SEQ ID NO: 54794 - DNA, 571 bp, Homo sapiens
  misc_feature 473, 519: n = A,T,C or G
ttctagaattaattaacgcggggtgggcttcctgtatttttatttataaatctgtcagctctttctttcattataaatttgtttcagaaaatatcaaattaattgtcgggaagatattcagtctcatggaagttaggtaattctttaccttttaggaacttcttgaggaccatgccaccaaaaaggcttcctgcagaagcaactgtaagaaacagaatacaaagaaatatcacaaataagtaaatgcattctattgaaaaaatcaaatgagagtctaaaaaactgcttacagacacagaacatttaaaaagtgaccactactaatgagtttggtaaaaatggaaacatcaaagaaatactataatggtacaatgactgttttgaggaaaaataacttcttagagataaccgaatagcaagtattttcacctatattcaacatccacccacaatcaacaccaggactgcctctntggatgatactctacttgacagaaaaagattatgtgaagactgcanattgcagctagtaatcagaatatatcgtgtcaataactcatatcctaatata

SEQ ID NO: 54795 - DNA, 584 bp, Homo sapiens
  misc_feature 568: n = A,T,C or G
cggggccccccctcggaagtcttctagaattaattaacgcgggggtcgtatacagacaatgaaccaggcctggagggaagatacatagacctcactctaccttctcacttccaaagaacaagcccagcctagagtcaccaaaatacagaaggctaggtgaatccctctgtgcaaaacacagccagaggggaaggccccaggacagccttaggagggagcataaaagaacctggaaaggataggatgtgtgtggtacacatgataaaatcctattatatcatcttttcaataaacccagatcagtatcatttgttctaaaagtgtggtttccagaccaacagcatcaccatcacctgggaccttgttcaaagtacaattcttaggcccaaccctagatctacagaatcctaaactctggggatgggatccagcagtttgggttttaagaagcctccaggccatgcatggtagcttgtgcctgtaatctcagctactgggaggctgaggtgggagaatccctgagtgcaggagtttgaggccagtctgggtaacataccaagacccccanaaaaaaaaaaaagcgg

SEQ ID NO: 54796 - DNA, 322 bp, Homo sapiens
attaattaacgcgggacttgagtcgtgggagtcgaggctttagtgaactgtgatcatgccactgcactccagcctgtttgacagagcaagactatcacaaacaaaacaaaacaaaacaaaaaaaacaaagcactgtaaataaaactaagggacaagctagaaaaaatattcacaactttttaaagagggtcattattccttatatatgttcaaaatgtctataagtgaataacaaaactactgaacttctttgtagctaggacctctttatccttcccaaattccactgaaatgtctcccactcccaaaaaaaaaaaaaaaa

SEQ ID NO: 54797 - DNA, 541 bp, Homo sapiens
ccgggcccccccctcggaatacttctagaattaattaacgcgggtatcatgtcttgtgcataattcttccaaaggatcttattttgtgaactatatcagtagtgtacattaccatataatgtaaaaagatctacatacaaacaatgcaaccaactatccaagtgttataccaactaaaacccccaataaaccttgaacagtgaaaaaaaaaaaaaaaaaaaaaaaaaaaaaaaaaaaaaaaaaaaaaaaaaaaaaaaaaaaaaaaaaaaaaaaaaaaaaaaaaaaaaaaaaaaaaaaaaaaaaaaaaaaaattttaaaaaaaaaaaaaagggggccccccccgggggggacccccaattccccctaaagggggggtttttccccccccccccgggccgctttttaaaaaagggggggggggaaaaacccgggggaaaccaaaaaaaaatccttgggaaaaaaacccctttttcccggggggggtaaaaaaaaaaaggccccccccaatcccccttcaaaaaagtggccccccctggggggg

SEQ ID NO: 54798 - DNA, 569 bp, Homo sapiens
ccgggccccccctcgaaagtcttctagaattaattaacgcgggtatgcttactatatattcacatgttttacttatatgagaaaatacaagcagtaagaaatctctctccatctctatctcccaatcacatgcacagacacatgtatatctatatatacacatatgatatatacatatacattatatatgaatgtttttacatacacatacatgtataatatatacattatataactgtatgtctgtatgtgtatgctcatgtgtgtatttacagatatttatcagctttgaacatacataaaataagagatgacagtgtaaatttctctgcaacatctttaaatggctcttttggggtctctctctctctctttctctcttccatactccatgggtgtatgtgtttctgtttgtgtttgtgtgtgtgtatgtgtatgcacaaatcaacagtcacggtatttttaagacataaatttaaaatagcacaatgttgtgtatgtattgcttttttggtctcaaaacagcacacttcaaaagttaacctgttaaaaagcaaaaaaaaaaaaaa

SEQ ID NO: 54799 - DNA, 583 bp, Homo sapiens
  misc_feature 28: n = A,T,C or G
cgggcccccccctcgaaatacttctagnattaattaacgcgggggattcagacaggcttgggttcaaatcacagcacgtcacttttataatattatttagtctccatcatattccattttatggatgacaaaactgagggtcagagaagatcaagtattttgtttctggactcaaagctcttgtgtggtagaaattgcattctaaactgagtctgtcagtctctaaccaagaatatgctatctccctatgctaaagaaagtggtttcaaattattgttcctcggagtggagtttccataccaaggagggaggcagacacacccgttgtcaaagatgatgtctgcagatcctaaccaggcacagctttctgggagaccggtgtcctcagccactttctgacacttgccttttagggattatggagaacccagttcccccaggttgatctccttactgttgtttattttaaagaaggaaaccaccacccacccaaagggcttctgttttccagttcactcatatctcttctgtgagggctcactttcatagactcccaatcttaagggagctgtgtatttctctc

SEQ ID NO: 54800 - DNA, 435 bp, Homo sapiens
  misc_feature 366, 368, 369, 370, 371, 372, 374, 376, 381, 382, 383, 418: n = A,T,C or G
cccccctcggaagtcttctagaattaattaacgcgggaacagagaatagaatggtggctgttggggggagggattaaatgggaagatgtaagtcaaagcatacacagttgcaggtaggatgaatagtctaaagatgtaatatacaacatgaagactagagtcagaaatattgtatactggtaatttgccaagatagtatattttaggtacttttattacatacacacaaagaaactatatgagatgatggatatgttaatttgcttgactacagtaattacttcactacgtatgtgtatatcaaggtacatgtatcaaaacatcatgttgtataccttaaatatgtacaataaaaaagaagtgaantnnnnnananaaaannnaaaaaaaaaaaaaaaaaaaaaaaaaaaaaaaaaanaaaaaaaaaaaaaaaaa

SEQ ID NO: 54801 - DNA, 605 bp, Homo sapiens
  misc_feature 24: n = A,T,C or G
gccccccctcggaatacttctagnattaattaacgcgggctcccagtctgctccccacgttgtttctctctcacacaaatatgtcgtttttctggtgtctgtccagagatcatgaagtggggctgcccttgtacccctctcagcacaaaagacaggcctgggcagcttatgctcactcactccaggctgagttcattcatgcatgcattcattcatttgacaaatctttaatgagtgtcagctgtgtgccaggagatggcaaaccgcagggaacagacagaccaagtctttgtcctcatagagctgacgctctggtgggaaaggcagaaaataagcaaaagcaaaaggaaataaataaatatccaatcacacccagtgataaaggctgggaaggaagagggtgtgatgggtatttatttcagcaaaagaggtcatagaaggcttgctggcatgctcctttgtccaagttcactgcaagactcacccaacaagccatccctggcccctcaggctggatctgtgatccctcctcatggcctttaagcacatggctataatgtaatttatgtggacacatatgtctcccctgccagactgttaacacc

SEQ ID NO: 54802 - DNA, 543 bp, Homo sapiens
cccccctcggaagtcttctagaattaattaacgcgggggtaggttgaaagccttattgcagagtatgtatgcatcttgtactcttgtggttttcaaactgctccccagaacactaattcttcgtgttgataataaatgtttccaaggagaggaaaaggttctatggtcaaataaataaagaagtaaataaaataaaaaataaaaaaacattgcatattctctctcctttggagattcacagtgcacagttggatagtaaaggctctagagtagaggaaactgtttagcattatttaccctgagtttcccaaacttattttgaacaaaacacaaatgaacaaaacccttctccaccgaccctgaaaaacatggtagaaatcctcctatccaatgtactcaagactaagagttagttggttagttaaaaaaaaaaaaagtcagttaaagcagagaatgctttacaaataacatgtactatctaaaacattttatttaacttaaatacataaatttacaacatctgccagtcatctaacatagggc

SEQ ID NO: 54803 - DNA, 542 bp, Homo sapiens
cgggccccccctcggaagtcttctagaattaattaacgcggggaccatcttaaaatctattatccgcccaaatttgtcctgagtctcaattttgctatcctgaactctaataataaaacaatatttagcatcaaatcttacttcataatttacaaagtaaatcaatatctattattaaattatacttaataaagagatactataatcatcagtgtacttagaaagcatttgagtaaaacatcactctgttttttccaatttaaaaaaatcatctcctgttattttaaattcccttaaatggctttcatactctgcattaaattaattgaaattatttaatgttatttatactatttatgagattaatttatattttatatgtatatgaagcactagagactacagatttatcctatatgcttgaattgtgctaaactcttattactataaaggttttaagttgatttgttaggctttctaaacacacagtcatttgcatgcatttagtaacataagctattcatcttgtccttatatttttt

SEQ ID NO: 54804 - DNA, 610 bp, Homo sapiens
cccccctcggaagtcttctagaattaattaacgcgggcggccgaagtgagggcacttcaaataggaaaaactaccccatccttcaaagaatgcaagaagacataacataattaaacttttgaaaagtaaagacatggagaaaatcttgaaggcagcaagagtaaggatgctgaggaaacaatgatgtgagtgacagcaggtttctcatctgaaactgcggaacgtaaaggggagtagcatgatgatcttccagtgttgaaagaaaattactgtctattgcaaacgcaatgcctggtgacagaaactgagtagaggaaaaataaaggaggaaataagaggggaatacaagcattttcatataagggaaaactaaaaaagatttatctctaatagacctacctgtattgactgactgaaggaagtcctccacacagaaagaaaccttacaaattagtgagactaaatggctttcgcaaattcgcaaaagtcctggaaagaagaaggaacagcagatggagctgagcaatgagtaaacacagtagaatgtccttctgaaaggcctcttgcatcttgtctaagttagagggagtgttggttctttgcagtagcc

SEQ ID NO: 54805 - DNA, 599 bp, Homo sapiens
  misc_feature 28: n = A,T,C or G
cgggcccccccctcggaagtcttctagnattaattaacgcgggtcgctctctttgcctgggtaacagctaatgtattgtctgggattggtttatgtcacctcctccaggaagtccttcctgacacaacaagtgtgagttggttcatcttcccttttactccctttgctctctctattcctccacatgtcatgcaacattagggatgatcattgcttgattagatgacatttctcagtaaattgtaggcttcacgagagctatgctgttcaccatttattctcagagcccggcacatcgtaggtgctctataagtattttttgaatgaacggatgatagatgggtggatgaattcaagagcctaattagctcttcatatggaagtagccgggcttacgtggagataatcaggttatgaaagaatctagataaccacagaaacagaggaggaggaagatcaaggataaggtacctctaattaggaaaccttttcacttctgaagattcttttaggaaaactggtaagtagaaagagagattgaagattgaggaggccaggagcagtggctcacaccagtaatcccaacactttgggaggcc

SEQ ID NO: 54806 - DNA, 346 bp, Homo sapiens
gccccccctcggggtacttctagaattaattaacgcgggggagatcttgctcatctttaattagattaatctccctaggtatttgaagttctttgatgcagttgtcaatggcatggtgtgagccccttgaatgcacagcctctaacacctgtccgtttctaacacttctgctcacgatgggcttgcaaagaaaagttgtaatcgactgggcgcggtggctcatgcctgtaatcccagcactttgggaggctggggcgggtggatcacctgaggtcaggagttcgggaccagcctggccaacatggtgaaaccccgtctcaactaaaaatacaaaaaaaaaaaaaaa

SEQ ID NO: 54807 - DNA, 549 bp, Homo sapiens
cggggccccccctcgaaatacttctagaattaattaacggggtgtcaagggataaaagactacacattggatacagtgtacactgctcaggtgatgagtgcaccaaaatctcagaaatcaccactaaagaacttatccacctaacaaaaaaaaaaaccacctgttccccaaaaacctactgaaataaaaaaaataaaaataaacaacagaaattgaaactaagtgaacaaaaaaggagtttggtattcattcaaaaagttaaacatacatgccttctggcctaagaagtcagccattaatcatattgttgttcccctgtacatcataagtcattattcttttgctactttcaacatcttatctttggccaggtgcagtggtggcaggcgcctgtagtcccagttactggggaggctgaggcaggagaatggcgtgaaccagggaggtggagcttgtagtgagctgagatcgcaccactgcactccagcctgggcgacagagagagattctgtctcaaaaaattaaaaaaaaaaaaaaaaaaaaaaaaaa

SEQ ID NO: 54808 - DNA, 507 bp, Homo sapiens
  misc_feature 27: n = A,T,C or G
cgggccccccctcggaagtcttctagnattaattaacgcgggatcttggttatactgtcttaaagatgctagctttaagatgagatgtggataactttattccttccattatccccactctctcctggagcttccatcactgaccttcactaactctccagggatatcttcacttctgttttcaaacatgacagctctcttctatctggggaaaaaaaaacatttaattcttctcctttaattccaccttggtttccagtagataacatttgttgagtgtccaaccaattgctaattgctttatggtcattatcccactttatcctcacaaacccctagcatgcaggtaatattttacagaagaaaaatataatggccacattcataaagtaccactgctatgtaatccaagaacattattccatttgattctcacagatgatcctttgttatcaatgaagatactatagcttagtatgggcagaagtgtgtaaagcattccgggct

SEQ ID NO: 54809 - DNA, 522 bp, Homo sapiens
  misc_feature 23, 39: n = A,T,C or G
ccccccctcggggtacttctagnattaattaacgcgggnaatgtcattttatttaaccttatagataagaattcgggatccaaaccagggaggtaaagacataacagaggagattatgtctggaggtggcagcagaaatcctactccacccataggaagacccacgtccacacctactcctcctcaggtaagacagagtgagctgtaatggatggcactatttgttcactaacctctactgaactcttctttcttctatagccactttctgtacttttcatttccatcagttgtctcgcagcctcgaatatctaaatggtatttaaacagacatgttttttttctctttgcaaattataatatttttaaatttttattggtaatatatttatgtattgttttcacaatcagagcacaggtgaggtgctgccactcttcttaatgaactatcgcatgatgccaaaaggagctgcattcttgtagaaacctcatcattaaatgagtatttcacatttcacatgg

SEQ ID NO: 54810 - DNA, 571 bp, Homo sapiens
ttctagaattaattaacgcggggcatactttgcagtgagccaagattgcgccactgcactccagcctgtgtgacagagcgagaccctgtctcaaaaaataaattaatttaatttaaatttaaatagccaatgaggagagagagggccttttttctttaaactaaacttttgagaacataactctcctctgttctatttgagacctctggctgtcaccatgataaccaagtgatctaatttactgtcactgagagcaaagcaaggcaacctgatgccacatgcttcacatgaaagagggggatagagaaacattaaatgataccatgaggaagcaatcagatgccagaatgtgagacatccatacaataactgtcctgaactcctgaaaatgttaatgtcattaaattcatttaaacaaaaaaaaaaaaggaggcaggatggagactcttctagatctaaagaaaaccaacaaatgccatgcgtgaattgtgactaaaccttggtttgaaaaaaatactcttgggataaatggagaaatttgcatacaaactgaatattagatgatgtttga

SEQ ID NO: 54811 - DNA, 430 bp, Homo sapiens
ccgggccccccctcgaaagtcttctagaattaattaacgcggggccatcgtcatatatgtagtctgtcactgactgaaacgttcgtatgtggcacatgacaattctatgctagcacctctgtcattcatcaatatctgactgtttctccttgcgtgtataattggcttttctatctcaagtatctggcgtggtcatacctataaattgatggcttaaaaattgatgacacaagcagataaactgattttgtctcgaatgacatgatccatttcttcaataatcatgagttcttctctttaaacatgaagtaatgctactcaattttactctgcttttaaaaaggtagcttaaatgcatatagtagctgtcaataagtggtgctcaattatcatgaaacctcaagttaattcttccctattctgttataca

SEQ ID NO: 54812 - DNA, 416 bp, Homo sapiens
  misc_feature 32: n = A,T,C or G
taccggggccccccctcggaaatacttctagnattaattaacgcggggggggcccaacacccacttctcccattggctttgcctagagagcataagcttgccttccactctctttccaccctctccatccccttcgtgagtcctcctgccctcttcctgtcatccctgtctcataaagctgtccggtcccgagattcttcccaggaaaaaattacattgatattcctggcagcctcctcttctagagtgggtggctctaggagtggagatcttgctggatgctgacaagatgtgggcgctcatctgcatttcggggatggccatggggtcctgggtgcaatctctgcatcaccactgctgtatgtcattggtagactgtaaagagggagagacaggaagcaaaacaagttagcagc

SEQ ID NO: 54813 - DNA, 508 bp, Homo sapiens
cgggcccccccctcgaaagtcttctagaattaattaacgcggggtgttacttcaaagataaagaaagttgtggaataatcaaataaattaatccatacaggcagttaaactaagaccgctttatggtcatcttcccacatttcaggttttcctactataaaaagaaaacacgattctgtcattttgtcaaacagtaacttcaacaatgagttaattagtaaggtacttgactttaaagaggacagaactggaagaacagggtatgaaccaaattaaatggtcaaattcactgctagataaggtgggtctttcaaatttacagcactatctagctgtcataatcacaatttttaaacatcaagtattggattacttcaagcttttaaaatagacacataagcttagaaacagaagaaaatctgtcattttccttctgcatctgtcccacttctgcccacattcagctctcatacatgaaagcataaggggctcaaaaaaaggtcagtgg

SEQ ID NO: 54814 - DNA, 532 bp, Homo sapiens
  misc_feature 16, 440: n = A,T,C or G
ccgggccccccctcgnaaatacttctagaattaattaacgcgggtatacataaataaaatgtcaccggaattaaatccctgttaatataaaaggcctataacatttcttaatcttataaatttctaacatatgaaaagtcacattagtgcaagatttttttaaatttgtattttccaaaggagtttttaaagtattcattttccagagaacatcttgaaataaatgaaaaatagaagtgcttttttaagaataaatgtctaatcaatgattttaaactttacttaattatgtatatttcatataatagaaaacagatttttaacctagtatttttttaagtatccaaattggaatcagctagatgacacacaataacaacaatagtaggcccacaatgaatgtttccatccttccacacttcataagcatagccatctanaaacaaacttcaagcatggctgagtgaagaggtcagtgaattatctttgcaaaaaacaatgataaaactggataaaattgtcaaaaaaattc

SEQ ID NO: 54815 - DNA, 502 bp, Homo sapiens
  misc_feature 482: n = A,T,C or G
attaattaacgcgggggggggaggggaagaggccaaaagtagaagatggaataaggcagtggtggtcaggaaaaatttgcaaaaacatggatcagaaaccttgtacattttaagattctaccagagaaaagcaacattaagtttaaaatagacaaaatagagtaaaaaaacctcttagcatctatgatgtacagcatactttcttatgtgaaattcactttgttctcctaatatccctgtgatagaaatcgtattacctttttaaaaggagagggtcctaaaccaaactaatgcaattcaaacccaagtattcatccatgtccgttttatcttctgctctgttaccctgagactatgaaatacagtggtagatatcagatgtagggtcagttcagaatccttgatttccaaattatgatacttctgcttactggctgtgtaaccttgagcaaattagttaacctctctgcagcctgatttcnttatttgaaaatgggaatga

SEQ ID NO: 54816 - DNA, 569 bp, Homo sapiens
cgggccccccctcgaaatacttctagaattaattaacgcggggcggagaaggatctcttactggaacaaaagatcaggctcctgatgaatttgtgggtttagggctaggtgagaatttttacaaagtatcaaaaattgtttttaacttcctcattataagtcactttattgtagtaatgaaatataattagaaggagaagataaaatgccttttgtctaaccttatgagaaaaagcaagatgactaaggaactaaatcttttttgcctggtctggtttgcaacattaaatgacccttagtttcaggcttctctctggttgttggagaaggatacagtgtgtagagtttttaaattacttgcttttaaaaataagcaggtaacttgaatgtgtgaaagctggtatcaggtaatagttggggcaactggagaaagcattcacatttaattgttaaagcaatgagcaggcctaaccagcctttctgccagtatgaaacctctccccatggctccccatgcgctcaatatgaccaggaacttccacatttaaaccagtaaaaaaaaaaaaaag

SEQ ID NO: 54817 - DNA, 554 bp, Homo sapiens
  misc_feature 12: n = A,T,C or G
cgggcccccccntcgaagtacttctagaattaattaacgcgggagcgcagtggaagctttggctctttccctaacttggtcctttcttccatcctcaaatacattttcctctcaagtgacaggaattgaaacaagaaacagaaaggagtagaaaaaaaaaatagaaataaataaaataccatagtcctgaagcagacagtcacctgctacaagcaaaaataaaccataaaatatattaaaccaattgcatcatttagtctcttattcaggagcaagcaggagaatatatttctaatttattccttgacatataatccaagattgtcttcatgcttgattcttgaataggattaagtacaagtcatacagtaatgtctgatcaatatcatctgaatagctcatagtaaaaagaaaagaaaaagaattctagcattcaatatgcccttaatacaaatcacaatgggactataaaagtaagaaagcaattcacaatatgagatcatttgcacataaggcagtggttcgcaaactttatcatgcatcagaaataccta

SEQ ID NO: 54818 - DNA, 548 bp, Homo sapiens
  misc_feature 426, 441, 518: n = A,T,C or G
gccccccctcggaagtcttctagaattaattaacgcggggagaggtgaaagaggaaaggataactttaatctgtttattgggaaaaactaattactgtatgaacttcagactattttatattatgtgaagggttaatttggtttgaaagcctatttttttggtacttctcggcttacttggagattacgtgtctccaaactactaaaaagaactttctacttcagtcagcaaagtatggatttctcagtaacataaaaactgttaactctaagaaaaataacttctattggctgggcgcagtggctcacacctgtaatcccagcactttgggaggccgagggctcccagtaaatagttctaatttgatctaaagattattaacaacttcttttctgtaatacaatggtagagtctccgaatgtcanagtaattttacattntacttttatcatggctatgattttgtttgccccattaaaaatctggtgtagtgctgggcgtggtggctacttctttnggttttctaattttaactactggcatagtt

SEQ ID NO: 54819 - DNA, 568 bp, Homo sapiens
  misc_feature 28, 521: n = A,T,C or G
ccgggccccccctcggaagtcttctagnattaattaacgcgggtttttacaattaaaaacaatactgcaatgaacattctgtacatgtctccttgagtccacgtgccaaaaattcctctagaatataacacccagagcctgggttagtatatcagcaacttcaaatcgactaaatgttgccaaaccactctccaaagtaaaagcataaatttcactgccaccagcaaagtatagaagagcccaatgctataaattcagcaacatgcacacatgtcaagttgttttactttatttcattgttgtctatctgatgacagcgaaatggtatctcagtgttgttttaatgtacaactctttcattactcgtaagagtgagcattttttcatctgaatgactactcagggatcctcatctgtgatttgcctgttcatgtcctttgatgactttcttgatttatatggagtcatttaacagtaatatgacatgcaaacataagtttgaattttagtgtacacaaatntatcaacttttcctttttgtacttatgtctactccaatatcatactc

SEQ ID NO: 54820 - DNA, 431 bp, Homo sapiens
  misc_feature 25, 38: n = A,T,C or G
ctggggtaccgggcccccccctcgngggtacttctagnattaattaacgcggggggggaggtgttcagtggtcacagtaatcttgggaaacactacacttctcttcttggagaatctcaaccaacattagcctattaaaggctcccagaagtcctgctgttaactcattttgattttgtttagctcagtataaaccaaacatttcactgtttgtaaaccagtcaaagagctgaactctttttcatggagtatatgtgatccgtgaatgctctggaaaaagcctcgctaaggattaactgaaagaaaacaatgcaggtacttgggagcctgaggcaggaggatagtttgaggctgcagtaagctatgatcacgcactccagcccaggtgacagtgagatcccgtctctgaaaagaagaaaaaaaaaaaaaaa

SEQ ID NO: 54821 - DNA, 602 bp, Homo sapiens
cgggcccccccctcggggtacttctagaattaattaacgcggggttcagataatagtttacctctttgcaaataaacttcagcaagtcttaagggactactctgtgaaagtactgtgctatgttgtctctgaaagtgtcacagatgctttgaatgtcattccgtctaaaaactccttacgttcatttctttcatttaataattttactcaggtgtctgttctgcacactggagataagcaggggaggataaaagtctcggctctcataagcttatatcctagttgagggagagaaatacataaataaatatgtagtgtcagctagtggtaagtggtacagataaaaatacagcaaagttagggataaagagtaacaggtgaggccaggcacgtggctcatgcctgtaatctcagcactttgggaggctgaggtgggtggactgctagaggccaggagctcaagaccagcctgggcaacatggcaaaactcccatctcttaaaaaaaaaaaaaaattgctgggcatggtgtgtgcctgtaatccagctactgtggaggctgaggtgagagaatcacctgagcccaggaggtcaaggctgcagt

SEQ ID NO: 54822 - DNA, 478 bp, Homo sapiens
cggggccccccctcggaagtcttctagaattaattaacgcgggggatgtgctgcattttgtagcttgaaggtaggatgtttttaacttaaacttgcaggaatcagaaaagtcaaagatgtggtaggaaaaggcaaaaacggattgtttctcttgccttttattaaaaagaaaaaaaggaaatataactgcgggtcaactagcaatgtagcaatgagaggactttttgaggatgtaaaattgcaacgatgaggaagaggggccgactttgcaaatgctggaagagtagcagccgccagctgaaccccacttgatggttcctttgacactgctttgaaactttcattttgagtcatcctttgtgctcagcagtaatcccggtttggcagataaatgaccacagagataaaagacctttgaactatctctaaataaatccgtatagcaattcctaccaccaacaccaaaaaaaaaaaaaaa

SEQ ID NO: 54823 - DNA, 574 bp, Homo sapiens
gggcccccccttcggggtacttctagaattaattaacgcggggggggggggcgagtaaggggagcaaaacagatcaccctaaattgcaactgagagttggtacaatgtccccttattttccagagaggcatgattgtgtttcagtgttatgggcaattacacaagtaagctagactgagtggaagataaatatatattttttaattggattttttgattttccaatttccacaatgtgatggtgttttcgacagagttcctcagtggtccctggataagaatgttaaggaaattggtgtctcaactttggtgctatctgtagcattctgtccaactcaggcatattggcctgggtgagtgataatcttttctgaaagtacagtgtttgaactgtactctacacactttacttgtatttatctcattttattcatcataaaaccttccaggattggggaatgcaggggtccttattattaactctatattatatataggataattgaaacttagaaaggtgtatcaggccgggagccgtggctcacgtttgtgattgtagcactttgggaggcca

SEQ ID NO: 54824 - DNA, 615 bp, Homo sapiens
  misc_feature 16: n = A,T,C or G
cggggccccccctcgngggtacttctagaattaattaacgcgggattaaatataagtatgccaatttccattacttttgtaaaagagaaacaatatactctttcagattgaaatatgaaggaaaatgatgacaaaaatataaatgtttttcataaccatttttcttattaagaacatattttagttccatgtcactggaagggaaaaaaagaacatattttaggaattaatatatctgtggaaagttataaacatttatctaatagtccagagattctgtcattttaatttctttttcttctgttaaatataaatacaataagctaatctataggctaatttttcatatgaaaaataaaagtaatgagaaaggaatagttctactagatactgtactataatatatagctataatacctaaaccagtgtggtgctaggagatgaataagcagaaaaattaaaaaaagaagagtggagtaataggtctgcatacatctgcaatttcagtatgtaatgtagatagcacttcgaattattacagaaaagactgattattcaataattgttggaacaatcaggtagccattggaaaataaataaaatgaattcaaatga

SEQ ID NO: 54825 - DNA, 550 bp, Homo sapiens
  misc_feature 10, 11, 21, 22: n = A,T,C or G
attaattaanncgcgggtagnntgactgaaacaaacagggatgtgaggcatggtgtttaggcctccccttgaaagaggctagattgtgagatccaaagtggtcttagcagcagcttaagcagacttcagtgggagtctggtcagagcagcacgggtgttggcacagaggcaaagctgcccaatattgctatggccagcatttcattgacaaagccttggacaagttaattactctctttgagcctatattttcttatccataatataaagatagtactacacatctgataaagttgtcatgaggattaaatactaagacagagattcctgacacggagtaagtattcagtaaatggtagcaattataagtgacactgaagccaagagaagagtttccaagaaaaggtagtcaatagatgaagtttcaccttggagcactgtagaatgtaagtgtgtgcagagaagatgaagctagttttagcctcaggtttgcaacattcagaaaggctaaagtcctatactcagagaaactcaatcagcagttcaaata

SEQ ID NO: 54826 - DNA, 533 bp, Homo sapiens
gccccccctcggggtacttctagaattaattaacgcgggggttcacgcctgtaatcccaacactttgggaggccgaagtgggcggatcacctgaggtcaggagttcgagaccagcctggccaacatggtgaaaccccatctccacaaaacatacaaaatttagccaggtgtggtggcgtctgcccgcaatcccagctactcgagaggctgagacaggagaatcacctgaactcaggaggcggaggttgcagtgagccaagatcgcgccactgcactccagcctaggcgacagagcgagcattcatctccaaaaaaaaaggacgatactaccttagttgccagcaattgttgctgggcttcaatctgttgctgctggcgagatgccatttcctgaagttcagcaagagtcagatccatcctaggactattaacctacaagtaaaaacacaaataaacacaatcccagcttactataaaactaccacagagattccgccctcaaaggtctatgtaaaagctgcatatgaaccaac

SEQ ID NO: 54827 - DNA, 354 bp, Homo sapiens
cgggccccccctcggaagtcttctagaattaattaacgcggggcccataacgggtgtcaccaacatgttgactgaattaaaactacatgaatattgagagtctcatgtctgtttagtatgtcatgcctatctaatgccccatgtgtctcatgcatgtgtagtgcctcatgaatattgcggaagcatcactgcattcttgcgtacctttctatatgcacagatatctactgcatctgtctaacaagcaccacagtacactcacttacctctgcttaacacgtgagttatcctatgcattttgcttttccaagacagaactggatgttctcaaatatagagaatgcacttgacagc

SEQ ID NO: 54828 - DNA, 612 bp, Homo sapiens
  misc_feature 67, 68, 85, 86, 595: n = A,T,C or G
cggggccccccctcggaagtcttctagaattaattaacgccgggttgggtgggtaaaatggtgtcannttgtttctggggaactnngaactttgaaaaataaataaaaatccctaccttgattcccaaagctttgacatttaactgggatgttagagtagatgaattcaatttacatgagttggggtaaaaaagaaaaaattgaaactatttaacagattttcatctctttctctctatatatactagtaacaaagtaatcaacaaattttcaggttgagtcactcaagcagagttccaccttttgggcaattgggcaactctgattttgcattcctcaggatttgctgaaaagttttatagcaaagatggctactggttctgggtggtaacctgtaagaccttgtgactctgcatattcatagaggattttgaaaaagtatctgaattttacagtgataaattttaataacttgtttgtgtatcattaacaagcttctcatggttaccaaaacttgtaaacaaagtcattttgccactgcagatagtatctttctacatctgaacatgaccttgaataaaaaatataataactnttacttatagtcatttt

SEQ ID NO: 54829 - DNA, 332 bp, Homo sapiens
gggttcccccctcgaaaatacttctagaattaattaacgcgggcgtgggggtaataaaagctggtctggagtagctagaatgttgcattaattgtgctgttgtgcttgtagttgaataaaaataaaaacctgattgaaaaaattaaaataaaaaaaataaaaacaaaactgaactaaaaaaaaaaactataataaaataaaaaactaactcggcctccaccgtgattggaccccaacttctccctataaggatttgtatcaccccccctcattggccttcttttaacaacacctgaacagaaaaaacctggccgtaccccaatttattgcct

SEQ ID NO: 54830 - DNA, 529 bp, Homo sapiens
aaactgggtaccgggcccccctcggagatctttgaattattaacgcggggtagagtaatatggaagaacagagatgggacgtcagagtaaatcccttttatcagtctggatttccctcaactcggtaaaacgaaggacatgaattgctgtcctatgttccgcctctaaaaattacacaaaagttaagaaaacacagattttcttcactaaattacgatactaaactgttaaggtggcaaatccagaccaagtaagtactttaagcaatggttagtttaaaatatatttaggacttttactagcccactggagaaaaaaatattgaacatttttgtaaacttcagatgctttccggcagcgtcctaaactgatgatgacaccttgatacttttaaagtgctaaggagtctcaaagattatgaccttgctctgccagctgagagcagtgtggccttaataatattccttagctgagaaataccactagctctctgcgtacctcaggatggaaggaaacaacatgcacaaag

SEQ ID NO: 54831 - DNA, 619 bp, Homo sapiens
cggggccccccctcggggtacttctagaattaattaacgcgggagtgctgtgacttgattgacttattccctgtcttgagagttgtttctagtttacaagaaacaatagttaccatgcataaaagaaacacaaataactgaccccatacaaaaaagattttaaacaatttatttcttaagctgagtagtaaatatggaggtattaattatgtaattatctgtacttttgtggttacctaaaatatttcatatcaaataaactactgtaagtattcagaaatgtagaggcagacttgaggacaggtgaattaatttataacgtttgtttttatagactgcaaaactgtgcttaatttattttacattaaaatttgtttatgtactataatttgaggagactttatgctttgtttaacataggtaagatttgttttatatttatttattttgcgatccacactaagtgctgacttacagatacgtctaatctgagaaatatatgtaattctctatattttgctatatatcctatctttccataagtgtattttctcctattaaatattctgtatttcttacatctttgaagcatgctctagttgtactgaattttaatact

SEQ ID NO: 54832 - DNA, 500 bp, Homo sapiens
  misc_feature 426: n = A,T,C or G
cgggcccccccctcgaaagtcttctagaattaattaacgcgggtctatatcactgtgttggccctggaatctgatagacatgagtttgaatccagactcttctacatttcagccatgaagtcttggaaaaattacttgacctctctacacttcagtgcctcatctgtaaaatgggcataatagtatctacttcattggctgatgtaaggaatagatgacatgaactaggtggtatgccagcacagatcaggggtctatacaagctagccctcctattcctgtccacatgtctgtctcctccactgggccaggcctccatgatagcagggactgtgccttgtctttttatatctgtggatcctaacacagttctgggcatacaggagacaaagcaaatacataacaaatgaaatccagactccttgngatggcacaaaatacctttactctcccaggagccctctctgtcctttatcacccccagctgctgtacactcact

SEQ ID NO: 54833 - DNA, 507 bp, Homo sapiens
cccccctcgagaagtcttctagaattaattaacgcgggtcttcattaaattatctttgttgtaataaaggtcatctggaggaatactggtctgaatacaataataaatgttaagctttctagtattttccacttttagacacaaattgaaagaatcatttataatgtcaaaaacacttttttctaactaatctattctatgactaagacactattagcaattaaagtagatagatcaaatctaaatatggagagaaaaagtaatttctacttatgtttaaacaggtgaaaccacgaataaattgaaagcctgaaatattagcttaggggaataatgtcactttcggggagcaggagcagcatataccagcctttagctctacacactcccccaaagaaaaaaaaatatatagatagttatgtacaaaccaaaatagcactgggagggttcaagggaccatttaagaaactatggcaacacagtgaagccaacaaaaaaaaaaaaaaa

SEQ ID NO: 54834 - DNA, 544 bp, Homo sapiens
aattaacgcgggggggaggcctttgtgggcagatcacttgaggtcaggagttcaagaccagcctggctaacatggcaaaaccccatctctactaaaaatacacaaaaaattagccaggcatcatggcgcatgctgtaaccccagctacttgggaggctgaggcagaagaatcgcttgaacacaagaagtggaggttgcagtgagctgagatcacaccatttcactccagcctgggtgacagagtgagactccatctcaaaaataaaataaaataataataataaactacttaactttaatttctcctgtatcccatagttaggccattatattattttttaatgcatgcaggtaagctatactatctatgcacttgatttcagaatagtaaagtgtttgctttaaaaggggcattgggggctgggcgcagtggctcacacctgtaatcccagcactttgggaggcccaggcaggcagatcacgaggtcaagagatggagaccatcctggctaacacggtgaaactccatctctactaaaataca

SEQ ID NO: 54835 - DNA, 436 bp, Homo sapiens
  misc_feature 350, 401: n = A,T,C or G
gccccccctcggggtacttctagaattaattaacgcgggggaatggaggtacttaaaagtgcttgctgcctctccataaggattcaaggtcagtactctttttccagaaaaccctacccttattaagctaattacaggtatttatgtctaaattgagaattagagatggatagagctgatttttagaaaaacaaacttttcgaagctcctgagttatgtgtgtgttttcagacttcagtgcctagcagcaagtcatctggtgaccttgttgatctgtttgatggcacccgccagtcaacaggtaagcttctacattggccttttcttttggtttgagagtcattttttanaatgccaaataaaagatagattgaaaaataagattacttatttgcattggngttcatttttatatgaaattagtgagtcttgagca

SEQ ID NO: 54836 - DNA, 618 bp, Homo sapiens
cccccctcgagagtcttctagaattaattaacgcggggagggaaataggccagccactcaaccttccagcaattattaggaaattaaacaagaactcttaaagtaaatgtcctgctattttctcattgaaaggggaaagtctgttgctctcatggaggtttacattttaatgctctttcactcattttagatattgcttggatgaccgaaaagctttggaaagagatggaggattttctgaacttcagtctcgtcttattcgttatgaaactcaaactacctgcaccagagaaagttttccagtacctactgtgttgagccctcttccatctcctgtagtttcgtcagatcctggaagtgtccctgacggagaagttttacaaaatgaacttcgaactgaagtatcccgactgaaacggagatctaaagatctgaattgcctttatcccagaaaaaggtgatatattacatgcacataaatagtatattgacagaaagtattttagtctcgaggatttttattttattttatattagtctttcaggttaatttcttcatggcaagaagtttgttttatgagctgttgataattttgcttataagttataaaaataaat

SEQ ID NO: 54837 - DNA, 622 bp, Homo sapiens
cgggccccccctcgaaagtcttctagaattaattaacgcgggccttgtctcggttgtaggtttctgtcccctttccagagccagtgtaaccacctccaccacagatagagattggcccagtgtcactgggtgttggctcctcggtcaatctggattttaatggttcctactctttctcccctcagggcccccatgcaacttgtccaagcttaatcatgaaatgaaaaatgtgaacagtccagtgacaaggattgtatcagtcataaaaatatctcccaccaaaggaagcccaagacttggtgactttaccgctgaattctagcagacatttaaagaagaactagtacagattgttctcataattttatgagaaatttaagaagagggagtaatttcaaactcattttgggagatgagcattacctagataccaaagccagacaagaactctccaggaaaagaaaattacagacccgtattcttaatttagatgcagaaattctgaagaaaataataactaaattcaacagtgtattagaaggatcatttactgtgatcatatgggatttacctcaagggtacaaggattatccaacagacctgaatccataaaatgtgatat

SEQ ID NO: 54838 - DNA, 606 bp, Homo sapiens
ccccctcggaagtcttctagaattaattaatcaaaaaaaataaaattactagataaggctctaagtgttttgctttactcttcactaggatgaacccacaattacaactgctaaacctaagtgtgtggatgtgtgtgtttacacacacactgctggtgggataagaagaaaacaaatctcaaactaattcctaacttacaaagtcctcaattttcagtaaaaacagacaacccaaaccaaaatgatgttgaaagaagaggaaagttaggttttgaaagcgttaaagccacttaaaagtttaaattaaataaaacttggcgtaaactaacgttttcccacctaatctgtcactaacttgagattacttttgttgtcttccatctggcctattgaaaattcagactggcaatgagttaccagagttgatttttttttcttttttgagaggaacagggaaaaggagaagttgagtgagaactaggaaatgcttgcttttgtaattggaggctaacattttcaaaataactacaaggtctagtcagtaccactcctggaatattgaacttgatctcgtcttggctcctaaaatacggatagtgaccttgg

SEQ ID NO: 54839 - DNA, 586 bp, Homo sapiens
ccgggccccccctcggaagtcttctagaattaattaacgcgggggaagacgttcaaagaaggaaacaccactcgcaaagaccttgtggtaagagaaactacaggttcaaggaattgaaaggctcgtttaccatataacctgagcacacagagtaagagaatgagtggaaagaagcaggagcagaaccacaaagagtcctgaaggcctcattaaggatttggttttctcccaaaagtaatgggatgctgctgaggaggggtttaagtagtaataggcacgggaaggaacaatgaaggtcaagaatgaattggaggtgggccacatgctctaagaagactacttgggaggccgggcacgaatctcagcactttgggaggccaagaaatgccaaattaagaaaggtaatgaaagtacgccctatgaaataacaagaataattttaaagctacagcaattaaaacagtgttattgatgcaaatatggacaaaaagaattatgaaacggaatagagtcgacacttagacccacacatatatgggaactggatataatacagagatagcattgcaaatcagtaaaggaaaaa

SEQ ID NO: 54840 - DNA, 572 bp, Homo sapiens
cccccctcggaagtcttctagaattaattaacgcggggtgtgcttatacaaacctagatggtatagcctactccacacctggtctatatggtatagctgattgttcctgggctacaaacctttacagtatgtgacggtactgaatactgtaggcagttgcaacccagtagtatttctgtatctaaatatatctaaacatagagaaggtacaataaaaatacaatattataatcttatggggctaccgttttctaggcgggccatcctattagaggtgcattgtggatggaaatgtcatatgtactgcaggactgtacttgataatactgccgttattattacaaatacaccgtgctttttatctttttcgatggggatattttgagatagagtttttcagaattccagtactcatggagcacaaactatagcagtattataaacagaactgaggaggtccacatgtaggcagactcctcgaacactgatttcaatgaggatatcacagaattcattgtctgccactataaaaatacgatgaactcaaagagtatttgaggttatttttgctc

SEQ ID NO: 54841 - DNA, 615 bp, Homo sapiens
cgggccccccctcgaaatacttctagaattaattaacgcggggtactattacctgttaatcaatccattaaggtgaatgggaaaatagagtattgagaaaagggagaataaaggggcagacataagaaaaaatgtgtgggtttaatggaggcaaaagaacgagaatggaaaaaaaattcagtaattaggcatgacctaattactgcccactaaggcagaactaatatgaaacattggcatgtagtacaacacgtgttttccaggtctagtttaagatactgatccctatatgaacatgaaaatgggcattaatttccactgcacagacaggaagtgccagtaaaattacaaatggtaacattccatttaatgaactttcactttttaaaaagttcctcacaaaattaaatagaacatttaaaaaatcttagctcctctactaccacactgtctcctactgcagacattacttgttatcagggaagtggggtgtgtgtgtgtgtgtgtgtgtgtgtgtgcacaaagtctattgcatctagatagcagtgctatttaaattcagaagtatcacacatcatttaataatttacagtccatgtggaagactgtatcatg

SEQ ID NO: 54842 - DNA, 545 bp, Homo sapiens
  misc_feature 35: n = A,T,C or G
tgggtaccggggccccccctcggggtacttctagnaattaattaacgcggggctggcaatattgaaaaaggagagttacattttaaggactacataggtatcagatctgtaacaagaaggtagattatactctcttgtgtggggcaagagaatgatgtgagaatctaccacttcagagtactgcaggtaagcagctgagaaaggaaggccactgactgggcaccctctgagtgacacagggcagctgtcctcacccactgccaccaggttgctgtagttctccaacatcacgtcccggtacaggtccttctgagcagggctcaggaactgccactcctcccaggtgaagtccacagccacatcctccagcgttagggattcctgtaataacacacttctgtttaatgaagtcatattcttttggtgataggaaaagaatgtcaaggaagtcattccgctcattttcaccacataggaagctggtggggtttttttcttagtacattttgacagaataagaattccagtaaaatattctgtaactg

SEQ ID NO: 54843 - DNA, 523 bp, Homo sapiens
gccccccctcgaaagtcttctagaattaattaacgcggggagtggatgcggaaggggggaagttcaagaaagtgccccagcactgaagaatgggtgtttcctaaccgggcccccggctgggcagcacagtaggagaaaaaagacccaccacatgggggcttcatcagggaacgttacaactctaagatgaggtgaagatcccaaaagcttccagagagaacagaagcagatcacttatgaatgaatcagaattacatcctgcttctctagagcaacccagaactcaaaggaaatatatcagtgacttcaaagttaaaacaaaaaatattttcctttcgaactctgtacccagccaaactacctcaaggtgaaggtaggaaaaagaatggcattttcaggcatgcaagtcccaggaagttagtgacggataagctccttgccaaagtaaaagagtaaaagccaaagagagtgagaagcggggagcatgttccaatgaaagctgacggctcttgactaccacaac

SEQ ID NO: 54844 - DNA, 376 bp, Homo sapiens
cggggccccccctcggggtacttctagaattaattaacgcgggggttagtagaaacaggattataaaaagtcttacatactaataaagctgtaagaaactcataaaggacttttggaaaggagttacatcatcagatttctattttagaaagattactttttctacaatgtgaatggcttagaaaaaaaagaatagaggcaaaaacactagatagaaaaaaatgtgaaaagtactctggcccaggccaggcgtggtcgctcacacgtgtaatgccagcactttgggagaccgaggcgggtggatcacgaggtcaggagttcaagaccagcctggccaaaacggtgaaaccccatctctactaaaaaaaaaaaaaaa

SEQ ID NO: 54845 - DNA, 592 bp, Homo sapiens
  misc_feature 28: n = A,T,C or G
cgggcccccccctcggggatcttctagnaattaattaacgcgggtgggctgatcaacaaagccttcttggataaggtgacatttaaactgagatcagaatggtcagaagtgccctccctgggaagatcagaagccacctaaagcagaaacaaatttacaagaaactcaaagcaggaaccctgtagtaggagtccacagcatttacctctaggcatcatgggctccgtgtgtagggcctacagactttttatgtgccaaagaaaccgttaaaatgtaaaacataaaaaaattattggttccacgataccaaaagaaaaccacaaaattgaagtgaataaatatttaattgacattcatacttcattgattgttaaatgtaatattcataaaatattcattatatttataaacaatttgtaggttgcattttttcacctccctcaaattcccaattatgcacacagagttctaagaaatcagagtcaatcataaattaggtgagcctgtcatagccaaataattgcaaaaagcaaaaacaaaaaagccttttagagcaattaccagcaaaaaaaaaaaaaaagcggccgccacc

SEQ ID NO: 54846 - DNA, 453 bp, Homo sapiens
ccgggccccccctcggggtacttctagaattaattaacgcgggatcctttcaatttatgatgttgaagaaagttgaattgtaataatttgagtgtgcagtcaaagcaattttcaatactatgtatcactgtagaaacaagggagaatgtcttggttaactatttaagtggcttgagtatggcaattaaaatttcatctaagctcattttgatgaatcttgaaggtgacatttatttcttatgctctgaacatcgtaagttctgttgatttttatgggaagttttcaaggtcattttcagagatctatgacaaaatgacattatttgagaaaaaaaagaagaaatagctcgaagtttaaagcattatggtattccctaagcccaaaattttctccctttacaaaaacaaatgaaaggcaaagtagacatacaaaaaaaaaaaaaaaaaagcggc

SEQ ID NO: 54847 - DNA, 604 bp, Homo sapiens
  misc_feature 23: n = A,T,C or G
ccccccctcggggtacttctagnattaattaacgcggggtaagatagaaattgtagaattaatgtaagttaagttgtcttatgttccttagaatgatggtggtggtagtggtgatattgacataatagccattacttatatagtttttatcagatgccgggcacaattctaagctctttacacatgtttatttaatcctacaaacattctctggggaaggtattgtgattattcccatgttacagaagaggaaattgaggcacaaaaggtaagaaaattgaccaagatcacagagctagtaagtgtggggatggagatttggttccaggtattctgactatgtagtcttgctttcagcccttacctatgtgattctcaggctagagcccttaacgttctcctgttactactgttgatgtttaaaaatagtatgttagacattgtgaataataatgaactataaaataatgttaaaataatgcctggtgatagctccatggtaataataaaataatgcatggtagtagctcctgggactgtgcatgaaaaaaattgagacataagttaacctccctgacattcctgggcaaagtgtcaccagttt

SEQ ID NO: 54848 - DNA, 572 bp, Homo sapiens
  misc_feature 476: n = A,T,C or G
cgggccccccctcggaagtcttctagaattaattaacgcggggaggaggggtccatggcttcaccaagatgaaacaggtcattggcatgaaaaaggttaaaacgctgtgccctggaaccaggagtttatgatccaggcctgcagcatgctgtatgaccttggccacataacttcattgtgcctcagttgcctcaactataaaatggggataataaacctgtgacatatgatgcttggggggttaaatgtgacaaaagtcttagcactctgtgtgccatacagtgagggccccagcatgggcattgatgcaccgtcttgattcctcctgcctttcccaggtacagggagcttccccagcctgcctgcatctgagaagattccaccagagaaacagaaccaataggagacatatattaagagttgtgttgcggccaggcctggtggcccatgcctgtaatccctttgggattacactntgggattacagcactttgggaggccaaagcgggcctatcacctgagttcaggagttcgagaccagcctgaccaacgtggagaaaccccgtccctac

SEQ ID NO: 54849 - DNA, 589 bp, Homo sapiens
ccgggccccccctcgaaagtcttctagaattaattaacgcgggtcatggggaattgacaacgagattataaaatttaaatggaaatgcaaatggccatgaatgccgtgggaattgaagaacaaagttggatagcaagatttactgtaaaagctacaataattaaaacactgtggtattggcactagactagacaaattgacagtagaacaagatagagaatacaggaacaaacccatgcatacagaatcacttgaattaggacaaagcatagccttttcaatacatggtgctgagacaactggaaattcatttgaaaaaaattgagttggactccatatacacaaaagtcaattccagttatgttatagttctaagttgaaaggtgaaataaagtttctataagaaaacataggagaatatcttcatgagcttgaagtagtcaaagatttttaaacaggacacaggaaacattaaggtgccataaaagaaaagaaaagattgattggccaggcgtggtggctcacaccagcactttgggaggctgaggtaggtggatcacaaggtcaggagatcgagaccatcctggcc

SEQ ID NO: 54850 - DNA, 395 bp, Homo sapiens
  misc_feature 16: n = A,T,C or G
cgggcccccccctcgngggtacttctagaattaattaacgcgggacggggcagggggcacgggccatgtgtctgtgtcagaggttattttacctttaataagcttttagttttagaaaagtgttagatttacaaagaactgcaaacacagaatccccatggccccccactcactcttcctattgctaacccttacactaggatggtctgtttgttaacaatgaacaaatccacattgatgcagcaaggtccaaacttgactcagacgtctggatccatccattgctctcctcacgacgaggctgggctgtgggtgtgggtaggaagagcacagagggaaatgtccccctcgtcgccccgtgcccacggcccgtcctgtcagcacggctcatcgcg

SEQ ID NO: 54851 - DNA, 539 bp, Homo sapiens
  misc_feature 444, 471, 480: n = A,T,C or G
ccgggccccccctcgaaagtcttctagaattaattaaccggggtggaagtactacagatgctcagattatctagtgatgaacttcattgcttattgtgacatgagttaactttggatttaatcatgctggattttagctgcagtatttttacatataaacactgaataaaatatcataaaatacccaaaattaacctcgggcctgttcatattagctaccctttcaccctaaaatctaagaataccatgtatattaaatattttattattgtttattaaatattatattaaatattttagtctcaaacttatgggattgagaaatctccagaaagaattgggagggtaaatggataatcatctgtgtttcagggttctcttttagagtctgtttctgttaatgtattaataaatgattaaaaatagttaaaaaccaacaaaaanttgttaagtacattgttctacttggtnttgagttangattaagtaaaactacagtctttcttctcaaggaacttacatcaagcagaggaaatgag

SEQ ID NO: 54852 - DNA, 568 bp, Homo sapiens
cgggccccccctcggaagtcttctagaattaattaacgcgggcaggcttctgtgagatgatgccatcggggcatctagaggtctcaggctggcccggacagttgcatatttctacgtaattttttcctagagttactaacatcccagagatatagggagttttgggtagtttcattacagagaattattcttgatgaattttggtgttttataccattttgtgctactcagtgacaacttttattaactttagaaggaatatgcttactggctaagtataagacttggaaaatagagattgactaggttgtctgctcaagaagtctggaaaacttttcctctgaattcttgaaatgagagcagtaattcattggggggagttatattgtagaacaggggtccccaacctttttagcaccaaggacctccattttgcttacctcctgctgtgtggccctgtccttggcacagaggttggggtttcatggaagacagtttttccatggacgggggttgtgggggatggtttcaggaagaaactgttccacttcacatcatcagattctca

SEQ ID NO: 54853 - DNA, 408 bp, Homo sapiens
ccgggccccccctcggaagtcttctagaattaattaacgcgggcatccccgattaaaacaaattctgagtacattttaaaacataagtcttccaacggaatttttaaaacctttatatggagatttaaaaacatatatgtaaataaacaatgaatataacaaacccctatatatctataacccttcagagcaaccagaaacacatggacaattctgttctgtctatattccccaacaaaattcatacattgtgattagctgatgtgtttttaagtctatataatttatacatttcccctgtatctcctatatatcattttctggtaatttagtttttgaagaagctgctttgattttcctgattcatcttcaaagtttaaaatagaatttcacaaaaaaaaaaaaaaa

SEQ ID NO: 54854 - DNA, 587 bp, Homo sapiens
  misc_feature 27: n = A,T,C or G
cgggccccccctcggaagtcttctagnattaattaacgcggggacacagtcacctagatgaagggatgatgtatttgggaaaggaaagtcatagggtgctaaagatagaggcagtgttacagagaaaaggccagtccaacctaggtttgaatcccaactccatctgctgctactactatgtgacattttgttaacttttcttagcctcatctgtaaaataaggacaattattatgggtcctattgataagttatgaggattagcagtaacatgtctaaagtgctcagcttttcttgatgtgtggttggcagtcaatacatgctagctttttattattcctctatctgtcctcatttttcttcattttcctctgctcctggtgctatgggtatcaaacagccctagatcaagccactgtctccagaggctggaggcttctgtctctggccactattatcagacctatggcttccagaactctagttgctattccccctggaaggccagaaggagggggggcctttaaaactgctgggagctgatattctctgccccaggaccccagtgcagattaagcagccatcaca

SEQ ID NO: 54855 - DNA, 506 bp, Homo sapiens
  misc_feature 17: n = A,T,C or G
cgggcccccccctcggnagtcttctagaattaattaatatcaatagagtcccttaaaaagttaaagaatcgttttaacaagcaatgaaaaacgattatgattatgagagaggcatattctgtccttcgccaggggttgtttttacgctcaagaaagtgatgtgaaattaactattttcataaacagatggtctttcggataatggcttgtactttttaatttcctttttggcaggacatcatgccaaatgtcagcaatgtcgatagtcttcattagaagttgtctgatattattgggatattttgtacagatatccagttgtttcccaatattataaatggaaggcagaaaggtttaagaaggtacagaaagataaaaatgtaatatactgaattaagaaaaaatgaatccatattaaattccaagattaaaaatttaaggctcaaagtattcactatttctttccatctctactgcattgctatctttaaatagcaatgtaatct

SEQ ID NO: 54856 - DNA, 591 bp, Homo sapiens
ccgggccccccctcgagaagtcttctagaattaattaacgcggggatacataaggagttcttggaaattattaagaacaagataaataccagcagaaaaaaaaatgggaaaaggacctgaaaaggcaaaacaaatacaaatggtcagtaaacgtgaaaagatgttcaactcctttaataatcaaagaaatctaaaaacaaggagataccatttattgacttgtgaatcaggaaatataaaacaggaaaatacccaacacagtactggcaaaagcataagaaatcagcacattcctgtattgcctaatgccctactatacattagtatttttttcaaagattaatttgctaatatgtatcaaaaccttgaaaaatgtaaatctcgatccaacaattccacttctaggaatttatcctgaaggaaatacataaatgtacaaggttgttacatacatatatgtacaaatacacaatcttaaaaatctgaagataactacacatcgaattgagaattgaataagacatcaacaaaatgaaatagtaatgctgttattaaaaattaagttataaaagtatgcttaacaatataaac

SEQ ID NO: 54857 - DNA, 608 bp, Homo sapiens
cgggccccccctcgaaagtcttctagaattaattaacgcgggaggatatctaattagtattttttacattcagaaaattgtaagatgctttaatgatcagtttgtcctgtgctatatgtttatgaaactgctgaaacctacaaccttctaattggcagttggctgctaatcttatgaacagtggtgtgagactgaatgccatttgtccaggctttgttaacacagccatccttgaatcaattgaaaaagaagaaaacatgggacaatatatagaatataaggatcatatcaaggatatgattaaatactatggaattttggagtaagtaaaactatgtctattttcttttaaatgatgaagcaaagcattatttagataagctataaaaagggaagaaataagcttatacagttgagaaatgaacacaagcttcaaacttttggtttggcaaactctctgggagaaaatatatttttctgggtttataaatagaatgtaagtttatacattatgaatgttactttgaaatatgtaaaatgcttcattactaccatcagtcataaagttgatatttagtcacctttgaaggcaatgataccttctctgc

SEQ ID NO: 54858 - DNA, 415 bp, Homo sapiens
cgggcccccccctcggggatcttctagaattaattaacgcgggctctttcctttatcttgcttccaagtccgaaaatcagacatacatcttcccaggcaaccaaccacgcaatattttctggaacaaactaatgttcaaagaaaagacatacatttagaaagcctccaacaataaagttagttctccaccaacttaccctagcccatgcacatgagcttccaattatctcacatttaagagtagatctgcatttttttccagcttgaggtataattgacaaaaataataatttaaggtctacatgataatttaatagatgtatacattctgaaatgattaccacgatcaactgacacattcatcatcacagttaccgtgtgtgtgtgtgtgtgtgtgtgtgtgtgtgtgtgtgtc

SEQ ID NO: 54859 - DNA, 578 bp, Homo sapiens
  misc_feature 23, 553: n = A,T,C or G
ccccccctcggggtacttctagnattaattaacgcggggatgaagattctcattcgtgcattctgaaatacacaacacagtgcacagcatataaagcacaacaattaccagtatggccatcgccattgttcttcagtagagattgatgggaaaaccgacaggccttggagtataatggtgaagaacctagaacatggagccaggctcccccagttcaaatcctagctctactgcttgtcagttgggtgaccttatttaactgtctgtgcctgttttcttgcctgcaaaatgagcaaaataatagtacctacctcctagggctgctgtgaggactaaacaagtaatatgtacaaagctttatacagtatatgcaagtgagtgcaatagagcaccaggcactattctaatgatttattatacaaataaaaataagatgaatcaataaaggacctggggaatagaggtatcctttaacacaatcaaagcaacagttcctagtatctatagtatgctttcatagccactatgttatttaatcttctaatggaaaccncagaaaaacagaatcccatgatgta

SEQ ID NO: 54860 - DNA, 567 bp, Homo sapiens
  misc_feature 30: n = A,T,C or G
cgggcccccccctcgggaagtaccttctanaattaattaacgcgggttccctctctagaatatttgtcttcagcaataaaagataatctaatatctaatcattttagctgtatcctttttaaaaaataccatttcagctattttgggagaacattaagtaacaattttagaactaaacctatgattatttctatgcaatttacgatctgtatataattcttgtgggaaataacatttccaagttatttgcatttctttggcatggggaagagaagagtaattctatgctacactgtatgtttttaagcacaggtagaatcaatgcaatatatatgtaaaaaataagatagcaacttattgtgacttgaattgtgcccccctcaaaattcatatgtggaggtcccaacccctagtatttcagaatataactgtatttgaagagaagatctttaaagtggtaactaagttaaaagtgaggccgttagagtaggctctggtccaatatgactggcgttcttatagaggagaaagaacactggggttacacctgcacagtcaagaagctac

SEQ ID NO: 54861 - DNA, 612 bp, Homo sapiens
cggggccccccctcggggtacttctagaattaattaacgcggggccaacaacaatgggttcaccatttcttctacaatgttctgtacaatgtcttgtggcttttcctcacaatcatggttttctccgtcatataacacttcatttttagataatgctttaaaagaagaaaaattcaacagaacattattttaactttttggaagctttttactaaacatttatgatgaaaaaactcctaaatcatgaggaataaaagaaaaaaaatcaaatagataacatgaaattagaagcaattatatgctaaaccttcaaaatgtataccaaaacttaaatattttccaaattcaagtcaatttcaataatgattcctttgacaagctattacattattacacttaactgaattttctagattagtcctttaagtaccaaaacttcaaaaactattttaaatgaaacatttctaacatgtcctacagatgcttacttatacttagtacacacattacactatcccttatcaaatatactgaatgtaagtaggctgggtgcagtggctcatgcctgtaatttcagcaacttgggaggccaaggtgggtggatcacctgag

SEQ ID NO: 54862 - DNA, 505 bp, Homo sapiens
cgggcccccccctcgaaagtcttctagaattaattaaagcgggaactcctaatcataacacgatgccactaaggtgagaagcgcgacacccaccaccaccagcaccaccacaatgcattccaaatcaccagtgctaccgttgctggggggaaggataactttcaaaagtattttttccccaaacgtttacagtgaacctatttacttataatcagaaaaaaactgaaaaccttaatactttaacacatttcaaaaggaagcagcattgattcatagaaaatgggctacgttcacataaccatgcctgttctatgccagtgatggcccctcaacaaatgtcaatgcccttctctttccaggctctttatgagattataaattgttgagtgacttttgagaaattgtgtccaatttgagaactctgattccaatccatttttacttaaacacaggcattttttgcttaatatcctaaaaacaaactaagaattaaaaaaaaaaaaaa

SEQ ID NO: 54863 - DNA, 595 bp, Homo sapiens
  misc_feature 26: n = A,T,C or G
gggccccccctcggaagtcttctagnattaattaacgcgggactctataattgtctatcttcttcatgtttttttacaataaactaattatataataataaaagaaaacttaagagttacaatttattttacccaaataaaattgttagtagtcaagtgacaaaatagagtagggtcatgtaatgataattttctcaagttttaaagaatataataataagcaaataataaatgactgatagtcactgataatagggtacttgtggatgactgagtttaccttgtaaatctgcagaatgcagaaaggccatggtaaatatttcctgtttcataaaatgccacaaagttaatcaatcacaagcaataactgaagttctttatggatacaaaactatgtttttgcttttaggattcaggatatgttcaaagtgtctaaaataaacttataaggaaataaaggtcagaacaaaaaacttacattttctattgtgtatcaacagagcttgtttcaaatctatcgttgcttttcccaataaagcatctgcttttaaagtgcgatggctccaaacttgaaattccaatgtagtctgtggcg

SEQ ID NO: 54864 - DNA, 417 bp, Homo sapiens
  misc_feature 28, 91: n = A,T,C or G
cgggcccccccctcggagtacttctagnattaattaacgcgggctaacatactttaacattcttttatttttttttttaatagcacagggnagaaaccacagacgtttatcagccttctcacacaattttagctaaccagaatactaaattaacgaacgtacctcatttcttgggcagttaatgaaggttaatgtgacatactgcctctggctctggaagtaaaaaggggtgttactgcctcatattatagctggggaaaaaaagtgttaataatctttctcatcagcagtaaagaattgagcttttaatacccagatatattttagtaaaaggctagtatatcatctgtaagtggagttcaagagcagtgttagataactagggcatttcaagagcctgcttacaccacagaccaa

SEQ ID NO: 54865 - DNA, 504 bp, Homo sapiens
  misc_feature 24, 205: n = A,T,C or G
gccccccctcggggtacttctagnaattaattaacgcgggtccacatctaaatatgatgtttgtttcctaggcttaagattaaaagttctggtaagagcttctaaattatttgttagatcacatgccctttgaatgtttagggagggatgaatagaataggcacctctgctagcccaagtcttttgctagctccttaaacttttnaccttgaaaaaataattccaactctattacagtatttgaataactcttgtatttgactgcaatgataatggtaatgcaattacctttgacataattggtttaggaatcaacatcctaagtgtggtagattgcaaaaatggctacaattccagcatgcacaactttttgtcatttgactttgaaaccatcaagagctgtgttctatcaagagctttatatttctgaatttattgcccttaatctggatttggccatataattcactttggtaaatggtacaatagtatttatgatgcaag

SEQ ID NO: 54866 - DNA, 629 bp, Homo sapiens
  misc_feature 40: n = A,T,C or G
agactgggtacccgggccccccctcggaggtacttctagnaattaattaacgcgggcagtgtaaatgctatgtaaatacttgttaggctctattggttttttaatttgtattactttttatagctccattgttatttacttacttgaatatttttgacccgtcgttgaatctgtggttgtggaaccctggaatacagagggccaattgtactttgtttcttctattcttcctcttaactattttcttatttgatagtaacatcaaccaaattgttgtgattccattcatatgaaaatacagaaataacctttctttctccaggtatcagtattttaagaacaaattgtaagtaatgattacatattatgatgctaatggagtagagatcatattgctgtcttaattgttttatatcataaaattcatgattgaatgaaattgaaaacttagactatttcaattgtaacaatagttgaaatttttaataaactttaaaaaatcttcttcctatagaaatctgggtaagaagtactgccccaaacgttcattcaaagatgaagagccacggtaaattacattacctgttcattaatgcatattaaaaaatttaaaaatacttatattttta

SEQ ID NO: 54867 - DNA, 612 bp, Homo sapiens
  misc_feature 28, 564: n = A,T,C or G
cgggcccccccctcggggtacttctagnattaattaacgcgggggcggggggaacattaagtatcaggtaacaacaactcaaattgctaatttcttatcataaatcatggaggatagaaggaaatggtacataattttctaggagctgtaaagaaagtatgtctgtatttttcctgtatttgatatatccttcagaaattaaagtgaagtaaagacattctcagatgtagaaaatctagagatttaattgctagcatactagtgctaaacaaattactgaaaagaaaacttcttaaaacagtggaaaaattgaaacacttggaacatgagaaacatttgattgaaatgttaaatagctagataaattgaataaattttttttcttttcagttctatgaatttgtcagttgaaaaaataaaacattttttgatagggctttacatctattaagatataatacacaatacaaacataacacagagtttaggtaaatggatcaatatatagtatttttcctattttccacttgagttagtaaaatattaatactaaatagactctanagatatatattatattttaatctttagagtaacaacttaaatatatgc

SEQ ID NO: 54868 - DNA, 590 bp, Homo sapiens
cggggccccccctcggaagtcttctagaattaattaacgcgggtactcagtcttacatactatttaatagcaacacaagaacacactttcttttctaccttgtatcacagttccatcctgccttatagcataactgtctgtagccatattttctccactactaaagtgtgagcatggagcacagtgcctaaatatgaggtattcaataaacaggtattgaagaaactgtgaatgcatcaatgaatcattcatttttgtatcccttgcacctagtgcaagccttaaatataatacaggctcaatacatgtttgtagtaggaattaactaacaaaaaggaataatatcacaggaaggcagacgtcagtacatacacaaatgggatcttaaaataatccttcctggtgactagaatgatccatgtggaagtagataagagttgaagacatcagtaaaatcatgtttcccttaatataggtacagatggctacatagacaaatatttatagatatgcacatttccttgctctgtgagctgaaaggacctaaataaaagcaatgacatcccagtagcaacaagcacatctggcac

SEQ ID NO: 54869 - DNA, 605 bp, Homo sapiens
  misc_feature 584: n = A,T,C or G
cccccctcgaaagtcttctagaattaattaacgcgggtaagattttatttcaaccattggtcataaacttctaataaaggaacaaaaactaaaatgtagcctgtgcctactatgtgctaatattacctgtctgaagtattaacagaatagataaaaacagacaaaaggcttagaatgccctctagttaaaaaacactgaaatcagaccctcctgaacattcatgagcccacatcagtcaaaaagaagctttaccaagtaacattccacttgtagttagtgaccagccaatacgaacttcatgtatgtcaatatcttttgtatataaatgccttactgggatcttctctgtaacctgaaagtcaaatcattaaataattaaaataatacaccaaggaggtaaccccttaactctcgcatatttcattgcgccacgggctaatcttcctctagctataaatacaaagaaggcacactctagcccacccccaatatttgtaagaactttaaactgatgtgcttataacttgaaatttaaagaagtaaatacttatttgacccatatttaaaagaaatacttatattnttaaagttcatgttgtcagtc

SEQ ID NO: 54870 - DNA, 556 bp, Homo sapiens
cggggttgcaatttccataccgaaaaatcaaaatctgaaacactattggttggtcccaagcattttccataagggctgctcaacctgtattatctccttcaattctaacaataatcttccaataatatcagaaatatagtttattaagccaggagaaagagtaaacattatgacattgttaggaatgtttgtgtgtttaagcaggattttggtctgacatagaaatatgaatatatctgtgctcacaggtgagtagcatctgtattctgactattccaaatgagtaatttttgtacctgcaatttgttacaaaagtgagttttccaaattattttcttaaatctgacaggttaaatagtttaaataaaattgtgtgtctaataggcatgattgagatctaaagagattttaccctgtatttaccagcttagaataaaagaaaaaaaatacatttacaatttcaaggcacctctctgattatgaatgcccatattgttcagtgatgatggagacagtttttaaagttttcttatttactatgatttatctgtattta

SEQ ID NO: 54871 - DNA, 571 bp, Homo sapiens
  misc_feature 28, 44: n = A,T,C or G
cggggccccccctcggggtacttctagnattaattaacgcgggncatatatatgtgtatatgtatatgtgggtgttatatatatatagcacccataaattttaaaatatatatataagtaaatacatacatgaaaatgaaaactgaaaagaagagaacaaatctccctacctcatgaatctgatcattttgtcatgtctcttcttctgttatctatccatgacctattctctagacaaagttcaaagctttttaaaatctaaacacagtccacactttcctaactgcagtcttttactctcccttggccaaaggtattcctctctctttactaaggctactcaggagactgaggtggaaggatggcttaagcctggaggtggaggctgcagtgagctgtgattatgccattgcactccagcctgggcaatagagtgacatcctgtcctgaaaaacaatgtacaaagtacatcattctactataagttctttatagaaatctccatactctttcccaaagaggttgcactaatttgccttctcaccaacagtgtatgaccaatcccttttct

SEQ ID NO: 54872 - DNA, 332 bp, Homo sapiens
  misc_feature 11, 22: n = A,T,C or G
ccccctcggangtacttctagnattaattaacgcgggggggaaaaaaaaaaaaaaaaaaaaaaaaaaaaaaaaaaaaaaaaaaaaaaaaaaaaaaaaaaaaaaaaaaaaaaaaaaaaaaaaaaaaaaaaagacaaaaccggccgccccccgggggtcccccccttttggcccttttttgacgtcgctttacccgccctccttgcccgccgttttacactggcagccccggggagacccctgcctttccccaccttgttgcgctttgccccttttgccccttttgcgccttttgggttaaggcccgaaagggcccgccctggcccgcctttcc

SEQ ID NO: 54873 - DNA, 603 bp, Homo sapiens
  misc_feature 68: n = A,T,C or G
acttctacaattaattaagcggtctttaaaactaatctttggcttcaatatgcttcttctgacatggnaaataaataaaactggcttaatactgtaacatcaaattaaatagtataaaaacattaatacagattgctttattttaaaatgaaccatcaacataaaagagtgcaaattgtaaaataagtagactgaagataagaaattagccacaattaactgtcaaattacgggcaaattatatatctgacaatgaaaatttaagacacatataaaactgattagccaagcaatgatacttttggaaattcgccagtatgagaatgttgttatataaatacggagaattcatattgtaagtcaccaacatttttgaaagtctactttaagatatatgttaagccaaaagaatgagctattcagaactatgcagactttcttactgaaaggaaaaataagttcattaaagcagttgctcctcaatctagcctaccttattttttggattggatgtgttcattacacttcgagtctcttttccggtataaatgacaacacctattacagtacctgatgcaacaatggtgcttgcccacaatgtat

SEQ ID NO: 54874 - DNA, 575 bp, Homo sapiens
  misc_feature 22, 44, 48: n = A,T,C or G
cccccctcggggtacttctagnaattaattaacgcgggccttgnaagnaagataccatctgttcttggtacaggtatagcgttccaggcagggaaaacaggaagagtgaagaccaaaggcatttagggaagaacaaggaagtaagtgaaccaatgtggcaggaatgttcagagaggcaggaggaggtttaggaccaagccaggatgctccctacaaaccaagggaagagataagtagaagacaaataacacagtcagcaagtgtcaaatgctggggaaaagtcactggtggccttggaaaggtgctagcagagtggagaggtttgaaagctacaatagtcttaaaggatgcgaagtgaggaaatgaagcagcaagtgtaatctttcaaataatcagaattatctactactactactgctactactattactactactgtagatagcatgattccttcattcatgaggtagaagtgtttgttttatgaaaatttactgtttgaaaaacaaacatgattctaagtttacatctggaagatataccacaggaaatgaggcacagacatgcctgaagac

SEQ ID NO: 54875 - DNA, 365 bp, Homo sapiens
cggggcccccccttcggggtacttctagaattaattaacgcgggggtctctcctgcaatgtactcagtacaaagtgcctcacacataagcatgggttcaaattggttgtacgctaaacttaatgataataaaggtaatcttcatgcagactggcagtaacccataggtgtaattattgtatggaaagaatacacagtaagacaggtgaactctgctatatacttgggatatatctaaaaggcataacgaacttcactttcaacaacttactttaaacattccagcacacatgtctctgatctgcttggctcattgcgatcttttggctcactgggcgaactgtctttaaaaaaaaaaaacaaaaa

SEQ ID NO: 54876 - DNA, 441 bp, Homo sapiens
  misc_feature 81: n = A,T,C or G
gccccccctcggggtacttctagaattaattaacgcgggagatcagtgatcctttatctttcattgttctccttatgtggngaaagcattattacttaggtgtaaatgtagattgtagttgaacaaaaagcaaaggaagacatatccctttcctttggctctcctttttgtgtcttgagtctaaaaggactttaagattatctagttaatctccagtctcccaacaggcagtacctaaaccatctttgttgagagcacttgtaaggttatcagaggtcattaaaaaatttcctacccaaatctctctgcttttaaatagctaacacctttcctttacagagttcctttattgaacattttgtgtaaatattctctttgtgggcagggagaagtaggtaattaccagtagcaacccttggtggtcgcaaaaaaaaaaaaaaa

SEQ ID NO: 54877 - DNA, 568 bp, Homo sapiens
ccgggccccccctcggaagtcttctagaattaattaacgcgggatgccaaaaatatgtataatgattgtgtcaattaaaataataataaaagcaaaaaagaaaaaaagaatatgtatttctcaaataacaagaagtccggaagtcacaatccaggacaaattaccttgctcagaatcaaggcctaggtttcttccagcttttttattttagcatataatttttattcttatacttataaagtacttgatctacctctaaattcatgcccaactctcaggaatgaagaacggggaatggacgaggataaaagtcaaaagtcatggtctgagtcttctatccggaaaacaatggtcttaccacaaagtcccatcctgtagaatgctgcttgtatcttaatatctcaaagtagaccacatggacaccattagctgcgaaaagtgtttttttgttgttgttatagtaactattttctttcttttttcacttattattaaagaatgattcaccgaccgaaagacataggtatgaaaagtgcacaatgtgatacaattttactgatagaacata

SEQ ID NO: 54878 - DNA, 555 bp, Homo sapiens
  misc_feature 23: n = A,T,C or G
ccccccctcggaatacttctagnattaattaacgcggggacataaggaggatcatctccaccaacagaccttcgttaggacccttctcaggcacgaagcccagcagcaggtgggtagtgatttgtaagcaaacagcattggcgacggagtggcaggccccaagcagagaaagctaaacacccaaagtgaccccccgggaagggcagcctaccgtgtcctctcctcctctgtgttttgaaccgcctggtctcggtacaggacctggagaatggcctcgcgttctaactccttgagagcactcagatctatttcttgggccatttcttctccgttttcgttgacccaggttggaagagcttcactgcatggaccaagcgctcacgccctgcagatgagcggcggaggccagctgcagccagccttgtttaaagagctccctctcctatttcactggcaactgttttgcttgtggttcttttttcctttttaactgtgtcatacttcttagaagaagaaaacctcaagaagtctgcgtttgtcggagttacggctcgc

SEQ ID NO: 54879 - DNA, 587 bp, Homo sapiens
  misc_feature 35, 534: n = A,T,C or G
tgggtaccgggcccccccctcgaaagtcttctagnattaattaacgcggggtggacccaaatcaatggggctcactttcttacacataataactaattttaaaatatgatggaaggaaagagaccgtttatgataccaataaaaattttttaaatactgatatgaaaacaactttaaaactctactgagggttgtaaaagaagaattaagtatattaaaaagtgatgtataggcaaattgaacattacagaagtgttaattctccctgttaaatgtccacagaccacttgagaacttgataaaatgttaaaattcatctagaaataaatattatgtgattacatctaggaaaatcctgaaaggacagaaaagaatatggagaaggattattccttccagttattaaaacatattatgaaatgaagttattttaaaagtagggattggaaaaaataggaacaaatattaatagaacaggaaagacagctgagaaatggactccaatataaacttagcttatgataaatacggctnttcaaattatcaggaaaaaaggtgattcttaaataaattataatgatcaactg

SEQ ID NO: 54880 - DNA, 611 bp, Homo sapiens
  misc_feature 27, 555: n = A,T,C or G
cgggccccccctcggaagtcttctagnattaattaacgcggggggcggggggctggggaggcgttcttgctaaacttagtagcatgcttcttagctaaacctggattttacaagaaaatgtgtgcgcacacacacacacagacctaggagaaagttcaggagcatgactacagtgtagccaagcaaagtttttttgttttgttttgttttgtttttttttttggtcaatatacccactaattcaggggaaaaggacaaatgacgtacctgataataaagaaaaagtaaaacactgtgcatactttttgggaagagtaattccaatcaggataacccagtatgacaggcagtgtgggaactatgatttgaaggaagagaagaaatgtgacaaagagatacagcagtgagggagggcaaagaaggaaggacggacattccaggaacttccccaaatactgataaacaggtcaaattccttggcacaggaaattacttcataccaaaaaggttcctgagttccagctaattaatggattgtaaacaatgttgtcctanaccagaaaattctgcaacaataaaagattttggacactcacaaattcatagcaccg

SEQ ID NO: 54881 - DNA, 547 bp, Homo sapiens
cgggccccccctcgagagtctttgattaattacgcgggggaagagtgagaaatttcagaattaaattataataaaaccgaagttttccttcccatgaggcaaaaatggttgttcctagttgaatgcaagcacattaatgggatagttggagggcactgggacgggtgccggcaagacgcgcacattctcgtgggaaggttcctccccatcagctgtgacgggtgggtggggtagactcagggaccttgctggagctcatcccgtgagccgtgtttctccgcaagatgagtcaaagccgccgttctcctacgcgcatctgatcgtgcaggccatctcctccgcccaggaccggcagctgaccctgagcgggatctacgcccacatcaccaagcattacccctactaccggacggccgacaaaggctggcagaattctatccggcacaacctctctttgaaccgttactttatcaaagtcccacgttcccaggaggagcctgcgaaggggtccttttggcgaatagaccctgcctctgaagccaagctc

SEQ ID NO: 54882 - DNA, 522 bp, Homo sapiens
cccccctcgaaagtcttctagaattaattaacgcgggaggcagaggtttcagtgagccgagattgcaccactgcactccagcctgggcgacagagcaagactccgtcatggaaaataaataaataagttttaaggtacaaaaacatgagtttaaaggactgcatttattcattagaagggcatgcaacataaaacaaaaggactgtacttaatgactgcatcccattgttaaaaaatttaatatattacatatatgtcacagtttatttccctattgttgaaaatttaaactattttcaattttcaaatgttataaaaaaaacccagtcaactatccataattataaatgtttaggaacttccttaattatttccttaagataaatttcctgaaaatggaattactggctcaaagttataaatatgtttaagactcttgaaatgcacattcaagttgctctccagacaaagtgcacaaggctaggaatggtagctcatgcctgtcatcccagcagtttggga

SEQ ID NO: 54883 - DNA, 409 bp, Homo sapiens
  misc_feature 28: n = A,T,C or G
ccgggccccccctcggaagtcttctagnaattaattaacgccggggaccgatgtcacagacacttacactctcttaactaatatcaatctaactcccatttggctttattttccttttcttctctagtaacgaaaatgcctcttacctggcttctttatccatagctactctcgatctttgtatgtgcctccataccattgccagagtgatctttctaaagatcactgtgccaaaataaactgctaattaaatctaaactctataatggctgggtgcagtggccacacctataatacccagctctgtgggaggcctatgcgggtggatcacttgaggacaggagttcaagaccagccagaccaacatggcaaaactgtgtctctgctaaccttacaaaacaaactatta

SEQ ID NO: 54884 - DNA, 430 bp, Homo sapiens
cgggccccccctcggaagtcttctagaattaattaacgcgggtcttggtgccatcagatccaatgtcccatgttttaaccaacaattgaaaagccctctttttttttgagacagggtcttactctatagtccaggctggagggcagtggtgggatcttggctcattgcaacctccacctcctgagttcaagcgattctcgtgcctcagcctcccgagtagctgggattacagatgcgtgccaccatgcccggtacattgttttttttgtatttttggtagagacagggtttcaccatgttggccaggctggtctcgaactcctgacctcaaatgatccaccagcctcagcctcccaaagtgctgggattataggcgtgagccaccatgcccagctgaaaagctctcttttctacccaaaaaaaaaaaaaa

SEQ ID NO: 54885 - DNA, 561 bp, Homo sapiens
  misc_feature 37, 523: n = A,T,C or G
ctggggtaccggggccccccctcggggatcttctagnattaattaacggggggatctctgcagttactgtgaataacaaatgctttgaaaactgcaaagtacttttccaaatttagtcattatgttattgtactagggcaaaaaaagaaatcaggaaaagcccgtttcctggcacgttttagctaacgtgaaaaatcaggaaaaactgagttttaatttcaaaggaacatgttctctcttctcactttcaagaacttcacaatcgtccttactacttctgtctaactgcaaaactcatggggagaaaagtgttctttctggccagtcttctgcctcatcccacctgctcccttcacctgcctcctgaaaagaagtgcatgctctcccagcctgcacaagcactcaacctcctaacagagtctaagcaaggtgatccacacttcacacccttttcatggaatttcaactaaggcactcctataagtcaaaagacataaaacatgaaagtggcagagaagaaatntctgctttgaaaccagaagcatgtggtgcagttggtta

SEQ ID NO: 54886 - DNA, 506 bp, Homo sapiens
  misc_feature 491: n = A,T,C or G
ggccccccctcggaagtcttctagaattaattaacgcgggaggtggaggttgtggtgagctgatatcgtgccattacactccagcctgggcaacaagagtgaaactccatctcaaaaaaaaagaaaaaaaaagtattaggtggatggttagcttttttgtttttcctttacaaggatctctttttattctatatttttcataggtttattcatgtttttaaataatactgaatgatagtaattattatatacagtgagtagtttttccatgatagggttatacaaaaagtttcagaggttttttgcaacacagaaggtttaataataaagatacggttgtaattgttatttaccaatatgttgtgatggtataatattatatattttactaatatgtaaaaatggtctataccttaaaaaaatctctttaaataataggctattgccagagaattgggtgtatgtttcataatattattcataggccctgnagctggcacacaaat

SEQ ID NO: 54887 - DNA, 568 bp, Homo sapiens
  misc_feature 16, 514: n = A,T,C or G
ccgggccccccctcgngaagtcttctagaattaattaacgcgggaacttctttaagcccaattttctcatctataaaattgggataatcatacttctcagaggactcttaaataaattagagatgacaaatgttcctttgccttttcaatccaagcacagtacaatttaaaaaaaattaatgtcataattacagtttatagaattttatgaaatgatcaagttcaacccactgctttatagatcaaaaagcaaactgaggccctaagaggttaagtggtatgttcaaagtcacatttagttttagtggctgtcaggataagaccttggtctcctcaatcctggtctagggctcttcatactactctaactgcagcctacacatatagcatcacccggctggctgttttctcctctgaaacaattatgttttgctgaaacatagtagttgttcaaatttgcaagggtttgcacctacacaaaatggcctcagactgttatgcttttggagattgngctttgttggctagttagtattttttctgtctctttacttgcaagccaacaact

SEQ ID NO: 54888 - DNA, 589 bp, Homo sapiens
  misc_feature 544, 559: n = A,T,C or G
ccgggccccccctcggaagtcttctagaattaattaacgcgggatttcacttaatcctcataaaaacccagtgacgtgctattacctccattttacagaggggaaaaccagaagagttaagtcatttaagcctcacaggttttgatttgccagaatataaaccgtgtactctggccccaggatctgtgttcttgaccactgctgcccaggagctgagctgctgaaccctggtccttgctgctgactgcgggcagctggtttctggccactgcctgcgttttaatagctttccgtggatggaaaagccctggtgtctgtctagatatgggcattttactctgcagctgggtgtctggggttggtctctcttgcacctgacctggatatagtgagccattatgaagggctgtcaatctgccaacatcattcaccaactctttctgttgcctaaaggagaaaattgtgctgagtttgaataggttactgcctattatagagaagagaatggtctgtagaaggggtgtttattctcaccattgactangtgaccacctgctgnaggtgcatggttatggtttcaatgtcccta

SEQ ID NO: 54889 - DNA, 545 bp, Homo sapiens
  misc_feature 69: n = A,T,C or G
ccgggccccccctcgaaagtcttctagaattaattaacgcgggtatgtataattgttaaatagcattgnctcagtaagaaaatcaatggtaaaccccaaataatttaatgagtgcacatgcaatttgagtgttaccaatttttagagttgcattattatatgcatatatatcataaaaattacatattaacaattccccaaagtttagatgattattatataattttaaaagtttaagtttgtttcattatattgttttcattatcactagtaacatttgttagtctttcttggtgagagtcactatggtaaatgctttacacagatcatcacattcaatccttataagaatctttagaggcaaatttccaaattatcattatttccctataaaattaaataaagaagcacaacatgactaaggaaaggtttctgtccacaacacatttacagttttaaaaaatgttaataggttggtaggtttaagttatacaaatattaagcaggtgctgggcacagtggctcatgcctatactcccaacact

SEQ ID NO: 54890 - DNA, 619 bp, Homo sapiens
  misc_feature 45: n = A,T,C or G
cgggcccccccctcggggtacttctagaattaattaacgcggggnaacaaaacaaaacaaaacaaaaaaccgtaacactgaacttactttgggataatccaattcaaagaatgtttccaggttgttgattaagttaggatctacccctttcagtggtttcagaagagagacacctgggagcttgctataaggctgtttgtcagttgccttcttgttgaggtgtaatcggctaaaaagcaaatgatataaaaattatttctatagaatacattagtgtcaaatcaaagcactgacaagctatcaataaatccctaaattctaagttaagatttttaaaacttgacatctttctaaaagaggatctaaacatgaagggaagtagaaccaggtaagcatggctttgaatgcggtccaacacaaattcataaactttcttaaaacattatgagattttttgcgattttttaaagctcatcagctattgttagtgtattttatatgtgacccaagacaattcttcttcttccaatacgaccaagggaagccaaaagattgaatacccatgatgtactactctctgactattgctatactcacagaactatgccaggcatagcgc

SEQ ID NO: 54891 - DNA, 589 bp, Homo sapiens
acttctagaattaattaacgcggggggggagaggacctgaaacacctaaatccacccttctgcagtgagaccttccatgcctggctgtcagactgaggtgggggagcctgcacaggtcgccgcgagagctgcacgcattctctgtgatatgagctgaacccgccaccctttccacgcagggcgtttcagctcacacttgcgctgtgttccttgatgctttaactgtcctagtcagtgatttgtgcattttccaagacgtctttttcgttttctctttcttgacttagaaaaatttacttcagtaaattgtttcacaagactccccatcttggtttcagattgtctccagctttaagaccacgacatcgagagctgcctgccagctcgtgaaggagtacatcggccaccgggacggcatctgggatgtcagcgtggccaagacacagccagtggtgctcgggactgcatcagccgatcacacggctttgctgtggagcatagagacagggaagtgcctagtcaagtacgcaggccacgtgggctcaggtaagcactgcctaaggagtgccgtagccagaggccgttgcct

SEQ ID NO: 54892 - DNA, 549 bp, Homo sapiens
  misc_feature 523: n = A,T,C or G
cccccctcgagagtcttctagaattaattaacgcgggccatatcactatctgactggaatgtgctttgctcctgcttctacttccgttttctgagcaatcagacagttattcattaactcattcattcattcactcactcatttgttcatttatgtattaaattattcagtgattctcaactctgggtggttttgccgtccaggggttatttcaccacgtccggagagattcctagtggcataactaaaagaagagatgtttgctactggtgtctagtgggtagagaccagggatgttgctaaacatgtaataatgttcaggtcaacccaccataataaagaatcatcttgtgcaaaatctcagtagcaccaagattgagaatctctgcaatacgtcaacaacccttctaggtgccaggaatatgacagtgaaccaaatgaatatggtctaaactttcacaaactaatccattaaggagaagatagtcaataagctggctaacaaacaattaaatgtatactntcaaattatgttgggtgctctcatgg

SEQ ID NO: 54893 - DNA, 596 bp, Homo sapiens
  misc_feature 573: n = A,T,C or G
gccccccctcggggtacttctagaattaattaacgcgggtcccttcttgtttctgatctttgcagtacttggtactaaactactcttgtgtacttaagtcactataacccactttagcttgaatgataatagtctgtgtgcttgttttatctcccagatttgacaataagcatggcatacttgaaagaacatgagctatgaggttagaaaaacctaagttcatatcttgcctctgtcacttatgagctgtgtgacttcagataagtagcatacttttctgaacttcttttttaaaatctattaaaaataattggttggccgggcatggtggtttacacctgtaatcctagcactttgggaggccgaggcgggcaaatcacttgaggtcagaagttggagaccagcctggccaatatggtgaaatcccgtctctactaaaaatacaaaattagctgggtgtggtggcgcacccctgtaatcccagctactcgggaggctgagacaggagaatcacttgaacccaggaggcaaggttgcagtgagccaagatcacaccattgcattctagcctgngtaacagagtgaaactccgtccc

SEQ ID NO: 54894 - DNA, 587 bp, Homo sapiens
ttctagaattaattaacgcgggatggtattggcttttctgcttctccagcttgcaaatgccatattatggggcttctcagcttcagtaatcaagtgaatcaactcccataataaatcctgtcttatgccttgtgcccttgcactctctctctctctctctctatatatatatatatatatacatgaacacacacacacacacacatacacctctcctattgactctatttctctgggaaaccctaactaatatacactttggtagaaactatgtttggtctaggttaccacaaagggtctagaagaggaaaaaacattagaaactcagaaaggccaggtttcactaactgaaagttatagtctgggcaatttattcagctgcaaaggctgggcttgatgaacagtggtccaagatgaacagaaaatggaaagctaagacatggtataaaaaataagatcaaaggcaacagtttcatctgcattgtagttctgatagaggcccggtttttgacagaagcccacccagtgactgggtacacggtgagtagaattgagaaaaggaactagcaagagttggttgaggtatc

SEQ ID NO: 54895 - DNA, 575 bp, Homo sapiens
  misc_feature 541: n = A,T,C or G
cccccctcggaagtcttctagaattaattaacgcggggggtagataaaacacaattcatatcaaaatcccagctggatgctgctgttgttgtcgttgttgttgttgttgttgttgttgttgcagaatttgaccagctgatcttaaaaccacacagtgataatacaagggacccagaatggccaaacagtattgaaaaagaagatcaaagttggaggactcatattttccaatttcaaacttactttaaagctactataatcaagatgctgtggtactggcataaagaaagacatatatgttggtggaatagaattgagaatctagaaatctttacatttaatagtcaattgattttccagaagaatgctattaagacggttaaactgggtaagaatagtcttgtcagcaaattgtgctgggacaactggatatctacaagaaaagaatgtttagatccctacctcacagcatatgcagaaattaactcaaagtgcattatagctaaaactatgaaactctcagaggaaaacattggagtanatcttcattaccttgggttaggcagttgtttctt

SEQ ID NO: 54896 - DNA, 595 bp, Homo sapiens
  misc_feature 28, 561: n = A,T,C or G
cggggccccccctcggaagtcttctagnattaattaacgcgggtatgttacatatatatacacacacacacacacacaacacacacacactgtataattctactttatatatgtttttcctttttgacctgtctttattttttcatataaaattccacaacattgcatgagaataatttgattccttaccatggtattagggtttatagactgcagtgtttcatttttaatccaatgatttgcaaaatttttatttcaaggaaaataagaaatattgaccagaaaaatagaaaatgatattaaaaaactctggttcacatttattctttattacattaaaaatgaaattgatatattaatggctatagagttttgagtggaaatgttatgacccaagaatttttttattttaccttgaaatcttgtttgttcgacttatgaagaaaaagagaatcattatcagatatgtaaggactcaggaaatattctacctttgggcccaagctgaaaatatttctcaaacatgtattgacaatttaaaaccctctctatatgtgtcanaacatccctttgtacctccataaatatgtacaac

SEQ ID NO: 54897 - DNA, 453 bp, Homo sapiens
cccccctcgagagtcttctagaattaattaacgcgggaaggcaaaagcagccatccctctcagctctaatttatggatatggatgtatcccaaaccccatcccttcttactacctcctgcactagcaactagtccaaaccaccatcatttcttgcccaacctgctgcaatcacctcttaagtattttccctgcttccactccttcaccgtatatttcattctccacacagcagccaaagcggtttttttaaaaaatacaaatgaaatgtgctcactctactattcaaaatcctttagtagtttcttttcacacttggataaaatccacactccctcaccacaacctatatgactggactcttgcctaatcttctcacctcatcctctatcactttcttccctgttcattcctctccaggaactggccttctcactgttcctcaaaaaaaaaaa

SEQ ID NO: 54898 - DNA, 609 bp, Homo sapiens
cccccctcggaagtcttctagaattaattaaaatccaaactctccaccaccaatccctaccttttccctactgtttgtttctccatagcatctattaccatctgacatacttatttatgtactttattgtctatctcctgcacaatagcatttaaacttcataagcacagattcttatccagtttgttcactgcagagtaggcagtcaataagcatttgtcgaatgaataaattatatcatctagccctcagcatccctgaaaaataagtgttactagttctactttagagatgaggaaactaagatgaagagaatttaagtaactcgccctaaatctagagctgccagacctagcaaataaaaatacaatatgctcaactaaatttgaacatcagatgaacaataaataaaaatttttagtataagtatgttcgatacaatattttagacataacttacactaaaaaaatgcattgtttatctaaaatttaaatttaacctgccaatcctataatttatctgtagctctacttaaatcacactataagcaagagacagagctgagaatctcacccacgtttctacgaccccaaattcctgccacagtc

SEQ ID NO: 54899 - DNA, 481 bp, Homo sapiens
  misc_feature 458: n = A,T,C or G
cgggcccccccctcgaaatacttctagaattaattaataataatgcatcaatatttgttcacaaatgttaacaaatatatcatcctaactaatgtaacatggtaataatagaggaaactgggcatgggatctaggaaaattctctgtactgcctttgcaaatttcttgtagacctaaactattctaaaataaaaaggttatttttaaaatataacatgtacaagcatgcatccatacttaggaataaactaagagatatgacaacccctgaaaaacatagttctgagtaactgagtaactgaagaaggcaaataaattgatatactatgttcatggattagagcacttaatacctattttatgtttgttttgtatttaatgcttttcatattcttcagaaagtatggtagagagaactttgaattttgataaaggatatttatagcaaactcaagcanacaccatatttattttggaaaca

SEQ ID NO: 54900 - DNA, 616 bp, Homo sapiens
gggccccccctcggaagtcttctagaattaattaacgcggggacaaaagtaaaaagaattaagagatggtaacaaatattccaacttctgtgtaacagaagaacctaaaaactaaaatcaaagttcacagaagagagtactaaaaatcgtaattgaagaaaacgttcctgaaacaaaacacttgaatgtactaatgcaccccacaggaaaacccagaatgactggcgctaaggcatatccaagtcaaataaacgaattttaaagaaaataacaccctttgggcatttacacaaaaggaccaaatcatgtgtaagggatagactcagaatttgacagcaacactctatgccagaaggcaacagagtaataaacttaaggttctcaaggaaaagaaaatgtgagccaaggatttgttcatcagccaagaaggtacactgaccttcaagtataaaggccgcaaacaaaactgtaacgaacatgtcagaaggcaggggatactgttcttataaagttatatgacaatgagcttcagataatcaaggaactcacagagaaggttcagtacagcactgagagaaagcaatgaatacatttaactgtagaacaaatggcggca

SEQ ID NO: 54901 - DNA, 576 bp, Homo sapiens
  misc_feature 23, 36: n = A,T,C or G
tgggtacccgggccccccctcgngggtacttctagnattaattaacgcgggcccagactacagtgcagtggcacaatctcagctcactataacctcctcctcccgggttcaagtgattctcctgcctcagcctccacagtagctgggattacaggtgtgcgccactgtgcctggctaatttttgtatttttagtagagacggggtttggccatctggtcatgttggccaggctggtctcaaactcctgagctcaggtgctccacccgccttggcctcccaaagtgctgggattacaagtgtcagccaccacgcctgaaccattttaaacattttcaatagggaaaatgtcaaactttcagagcatgaaaaaccttttgactccagacaacatatatcttttaaccattctctctctaaaaaaaaaaaaaaaaaaaaaaaaaaaaaaaaaaaaaaaaacctaaaaaaaaaaaaaaaaagcggccgctttttttttttttttaattaaagctggggttctaaaaatccaaattttccctaccagggctatatttttatttaaaatattttaaaaattt

SEQ ID NO: 54902 - DNA, 580 bp, Homo sapiens
gggccccccctcaagtctttgaattaattaacgcggggggaacacaactactgatgctgacggaaagcttcgataagaccgtgaagccatcttcatctcacaataaatccaactgcttatccactactgtctgctacaaagtactgctcaatgtattttcctttatccatttctcatttaattcataaaatgtctactaaagattaactttcataaaagccatggattattctgctacgataagaaaggaatatttatagttgttttaagaccatctatcattttgttcaataaagaaaaaaaatcaacataccagtgagagccaactgctctgagggatgaaatttgatagaatttactgcaaaataaaaatatgataaaaacaggtttaaagtgacaaaaacatgttatcaacatttattagctatagcgtgtatctcaaagtcaacattaaaagaactatgagtccaatatttgatcctccactcagttaagttataaataaatgtgtgaattagaacacaggcacaataaaaacaactaacgtatgaaccaccaaatcgctatactttatgacccc

SEQ ID NO: 54903 - DNA, 605 bp, Homo sapiens
ccgggccccccctcggaagtcttctagaattaattaacgcgggctaggggatagaacaagattctgcctccaaaaaagagaaaagcaaagaaaagaaaattttatgtcgtcaaaatatttttacaaaaccaggtgttagtcttgcagaacttaatgcagttgagttaatttattcaacctactcaatttagtacacagtagggttgtactactgtgaacatagtttcatagtctgattggaatgaatgaagaaagatggctgagagacaaaataaatcaataaatcagtactatccatcttctctcaaaatataatgcaggaaatccttctccaaatccaccttcaatagtagccctagtagtgatgtaaacaagagtatttcctcagcatactcagtccctttactaaactttacactacatttcctggctgcgacggcttagcatggatccgttgatcagtattgtcggtgcaatcctggagagacactgcttttttgcttctcttgttaaagtggttaaagtgaatgttaagtagaaaaagggcgtggtttgctagggtgaaagcagcacagagatagaaaacatcagggccaccctgagta

SEQ ID NO: 54904 - DNA, 310 bp, Homo sapiens
  misc_feature 9: n = A,T,C or G
acttctagnaattaattaacgcgggagtctaactataatacactcatcatttactacttttatgagaggactgccagtcacataaggcaatttctgctcaaagcaaaggttctggaaaatttgattggtgtgtgtgtgtgtttgtgtgcgtgtgtgcgtgtgcatgcgtgtgtgagaagggctggggttagagccaatgtagagggacatcgattctaggtctttgttagctcacacttgatggaggatatatcaagaactatgaatagagaagaaaaaagattttgataacatattaaatgtgaagaag

SEQ ID NO: 54905 - DNA, 620 bp, Homo sapiens
  misc_feature 28, 53, 67: n = A,T,C or G
cgggcccccccctcggaatacttctagnattaattaacgcgggcacacatggnacttaaagatgggngaaataacagacactggggactccagaaggggagagggaaggagggggttgagggttgaacaattatctgttgggtacaatgttcattattgggcgatggatgcattagaagccaaacctcaccattatgcaatatatccacgtaacaaacttgaacacatattccctaatccataataataataaaataatcctgcaatgaaaggcaaaaaataaattaattcatctgggatagctggaatcctgtgacccaagtgaagaccatgaaatttataaaataattattaattcttgccaaaaatattctttaaaaaaattattctatagaggaattcaccattttttatttcctttcaccagtgtcttggaattattttctaagaataaattcacaggcaaaggaatgaatgtgtatatatgcttctcaaataacagtctaatgtgggaaattaagaaacaaaaataaggggataaggtttatatttctttacatcacagttgatttgtaaaattaatatgttttatattcatcgattctattgattctaggaca

SEQ ID NO: 54906 - DNA, 592 bp, Homo sapiens
ccgggccccccctcggaagtcttctagaattaattaacgcgggggtggtatgtggatgttcatttataataattccttaaactgaatatgtttctgtgttttgtatgtgttttgttgttatgtatgtgttgtattttgcaataaaaaagatatttaagagttccttttcaaagttagctatttatggaaatatacgaatagcctttgaaaattatgtgactttaaactgacaaatttctgagttgagtttggcaagaaagaaaggaaaagtgctgtctcaaaaatagaaatccatgatctagggcaggtgatagggtaaaggctggagggtagttctaagggcattcaggctaactcctccaaaactaaaacacttaatgggataaaatcaggaggattacaatattgctattccacttttagttctaaaatcaacaaggaaaaaacatgttaagaaaaacaagctaaaaacagaagatcactctgcatatctaaccaaaaatgacaaagtattctttatgttataaattccggacatcatccagttccatttgacattgactatttctagccaatgaataaatatatgatt

SEQ ID NO: 54907 - DNA, 441 bp, Homo sapiens
cgggccccccctcgaaagtcttctagaattaattaacgcggggtgattctgcctaccacagacataggctgacattaaatgttactactctggacttctttaaagattatgacaaacatatataacttaactgccattgacttttgaatagctttgagtactttagaagtaatgctaacaacctgactgtaatgatatttagattatgtaagcatataatttgagtttatctttaaattatgtgtcatacatgtctttgtatgtgttgctataaaggaatacctgaggctgggtagtttatggagaaaagagatttattttgcttatagttctccaggctgtaaaagaaacatggcaacaacatctgcttctgatgagggtctcaggaatcttctactcatggtggaaggcaaagagaatcagtcatgtacagatcatatg

SEQ ID NO: 54908 - DNA, 611 bp, Homo sapiens
  misc_feature 43, 550: n = A,T,C or G
cgggccccccctcgaaagtcttctagaattaattaacgcgggnggaaattctttgcaatgattacctctacagagtgggactaagaggtaagggggaaagttatatgataccattctttattgtatgaatttatcattctgtgtattactttcataatgaaaaagctagtataaaattttcacttaattgaaaggattattagtgaacatatgcaatgttttaaagcaaactgaataattacagtgttctagcactatgccaattcttaccaattatacatcactggcacaataaaaattttttgtagctaaagaaagcctaagagattttctggtaaatttaaggatctataatttcaaagttgtataagttcatttccataaattcgaagactactctaaaaaaccctgacttcaggtaaaaatagttaagtgtaatttatagtcaatatattaataaaggccaggcgtggtggctcatctatatatttaattttatgcatcatttgcagtaagagtcacaaatgcaaagatttggaagaaaccttanaagtcacctagccttgggccaggtgcggtggctcacacctgtaatcccagcactttgggac

SEQ ID NO: 54909 - DNA, 601 bp, Homo sapiens
ccgggccccccctcggaagtcttctagaattaattaacgcgggctgggtttaagcaaaagttcaccaaccaggacaaaggtcctcacactctcctcctccccaccgaaaagaaaagaaaagaagaaaaatccggccgggcgtggtggctcacacctgtaatcccagcactttgggaggccgaggcgggcagatcacgaggtcaggagttcgagaccagcctgaccaacatggtgaaaccccgtctctacttaaaaaaaaaaaaatacaaaaattagctgggcacggtggtgcacgcctgtaatcccagctactcaggaagctgaggcaggagaattgcttgaacctgggaggcagagctttcagtgagccaagattgggccattgcactcccacctgggcgacagagcaagactccatctcaaaaaaaaaaaaaaatccaggagaggaagaatgtcaatgggctttgctttactggacagggtaaccctggacactttgtttaaccactctgtgcctcagttcccctcagttccctcatctgtaaaatggggctaatgaaagtgcctacctggtggggcacagtggctcacacctgtaatc

SEQ ID NO: 54910 - DNA, 597 bp, Homo sapiens
  misc_feature 28: n = A,T,C or G
cgggcccccccctcggggtacttctagnattaattaacgcggggcaggtttgtgtttctggaatttgtggttgtgtggaactccagggttctggcttctatgatctgaagcagcagttcagttagtgttcagtgtaatcgatggtaccgttgggaagaggagtgtgataagtgtgaacatgcatgctttgtgtggcaactaggtaccaggtactatgtgctttcccaaaccttggaaaaacttcctttgattgattcaataagaccaggaacttggtattattatcctaccttagagagaagaaaactaagtctcaaagaggttaagtgacttgcctaatgtcacaacagtcaccaagaatcagctcttagacttctgatagcaaagtcaattctctttttattacatcctacttctacccaaaaggcccagaaatggtagggaggtaagagacgtatataaattatggtgactaaatcacgaccttattggtaattattttacctactcaatgggcacactttgtgagttttcgagttacactctatggcttgcaggctagagcttctcaagctaagtggcattctattgctaaac

SEQ ID NO: 54911 - DNA, 544 bp, Homo sapiens
  misc_feature 460, 470: n = A,T,C or G
gggccccccctcggaagtcttctagaattaattaacgcgggggacagacaagctagaaggaaatatttattgatcacctattatgtgccagacactttcacaaatatgagcttgtaatcttcgcaactttctgaactattaatagatacctaaagcagtgcttaaaaattaagactataaaaaacataggaaaatactgtgataaagcaaaaacaaaagcaaattataaaacatgccatagttaaggtattgagaggaaggaatgtcaatgagcttcacaaagggaaaaatgcccatgagtcattcagcttcctgccattctaaagtaaagtacaacaggtcagatattctccagtatttaaacagaatccttgtagaaaataaatcagaaaactgcctccaggaagggaaaatggaaggccgggaatgcctaagaaatgtacttctcttgtgcataacncctttgcatnctttaaatttgtgccatatgcctgtattgcctatccaaatattcaacaaaattagcttaaaaaaaaaaaaaaaa

SEQ ID NO: 54912 - DNA, 603 bp, Homo sapiens
  misc_feature 16: n = A,T,C or G
cgggcccccccctcgngggtacttctagaattaattaacacggggggattgccacaaaccttcagtttgtaaaagtcacagtaactgtgactcacaaaagaacaaagcacaataaaacgaggtatgcctgtatttttaaaaaaagctttttgttaaaattcaggatatgtaataggtctgtaggaatagtgaaatatttttgctgatggatgtagatatatacgtggatagagatgaagatcttaattatagctatgcagcatagatttagtcaaagacatttgaaaagacaaatgttaaattagtgtggctaatgacctacccgtgccatgttttccctcttgcaatgagataccccacactgtgtagaaggatggagggaggactcctactgtccctctttgcgtgtggttattaagttgcctcactgggctaaaacaccacacatctcatagataatatttggtaagttgtaatcgtcttcactcttctcttatcacccacccctatcttcccacttttccatctttgttggtttgcaacagccccttctttttgcctgactctccaggattttctctcatcataaattggtctaaagta

SEQ ID NO: 54913 - DNA, 597 bp, Homo sapiens
  misc_feature 27, 49: n = A,T,C or G
cgggccccccctcggggtacttctagnattaattaaagaagggtattangaaaccaagatctggacagtaggtgtgcacattactcccggggtgttgttgcctctggaacctctcagctgacaaagcaaggaaattcacatgtatatactaagccatgtatatgaacatatctacaagcatttgcatatgtaatcatttgtatatatagtatgttaaacacaagttcatactagtatctccagctctaatccattatcagatggatcattctgtaattgctttatttcaacactgaccattctataccatgttacacagggtagcatcagtaatatacccatttaaaaattatctgttcctctcttagtggtttgaccctacatttctaagtacatacataatttctgctgctagttttattttaacatatctacattgcacaaagacaggtacaagtaactgaattcaagtgagccttgacactttaatgagggtgttctgtgctgattaagcacttctgtaaatatcaagaattatactatgcaaagacttgtttgtacgtcagcactaagaacttctattgagtaggaaatgag

SEQ ID NO: 54914 - DNA, 602 bp, Homo sapiens
  misc_feature 16: n = A,T,C or G
cgggaccccccctcgngggtacttctagaattaattaacgcggggtggagaaataagaataactaaaaatataagcatgactggcatgtttgaatacaagcttctgaaatgggaaacaccacagggaagaaaagaaagtttttcctgcagacatcacacaaaaacctttttcagagtgtctagtataattaggctacagttaacttcatactcatccaggaaatctaaaaggtaacccaactcatggcagggtgggagcctaggctgctgatccagatgaactttttagtactgtattcaaacagagacctgagaagggacaggaagtgtctggtatataaaatatttatagtgtttgctaacctaatactcacttgagccaacttttccattgaattaacaggcagaaggaatactgaattctagaatgggaaggggccaagagaaatcagcttgtctaggctgggagtggtggctcatgcctgtactcccaacaccttgggaggccgaggtgcgtggatcgtcttaggtctggagtttgagaccagcctggccaacaaggtgaaacccagtctctactaaaaatacaaaaaattagccag

SEQ ID NO: 54915 - DNA, 309 bp, Homo sapiens
  misc_feature 28: n = A,T,C or G
cgggcccccccctcgaaatacttctagnattaattaacgcgggaagtttattgatgaaaatctcagtgctttggaattcttagcaatttgtcatgaagctaaccatataatgcttaaacttatgtttattctcctatttattaaagattgtaaagaaaattaaggatatggtttatttatatatttttttttatatacatctcttatatttgtgcaaatagcttttaattcttttttatattttaggaagtaaaataaattaacaaaatatataaataaacaaatacttttcccaaaaaaaaaaaaaaa

SEQ ID NO: 54916 - DNA, 604 bp, Homo sapiens
  misc_feature 33: n = A,T,C or G
ggtaccgggcccccccctcggggatcttctagnattaattaaaaaggaagcagaaaaggaatttgtggctataggtccaaattaaatagctataaatggaccacagaattattttaggccctttgggaaactctcaagaagttcagtgatctacttcatctggtcatacatccaaggctgactcaccgagagaatctctttgctagccccccggaggagaatggtgcaggccttggggtctttgcagtcagtgatgaaagtaaagtattcatctccaattttcttgatttccaacaggcctgctcctgttccaacatcatcttctctcagttcctctggtcggctgactaaccgggccccacaggctctaatggacggaagaggtggggagaatcagatgatttcagatacttgtacccatttccctagtctctagggtctgtagctagggataagggcaaaagtggattgttggaaacatcacttaagaggtcttgcctgtccggtgaaaaagattttcagggggccaggcacagtggctcacacttgtaatcccagtactttgggaggccaggcaagaggattgcttgagcccagaagtttg

SEQ ID NO: 54917 - DNA, 558 bp, Homo sapiens
  misc_feature 546: n = A,T,C or G
cttctagaattaattaacgcgggaaccatttccatggggacacagaactcctcgtgcttctcccgggcggctgacagctccaggagtcccaggtaggcctgtcagacaagcgtgggagttgtggggcgagagggaagctggggaggagggggtctcgctgggagaggctgggagcgccacctccaccacagcacgcagggagcacactggggcatcacgaaaacactccgagatcaacacacagttgccttaagaccacagacaaggatcggcaggttgtaagcacaaagggcgcaggacagacatgatcggttagatgactaaacctctcatgggtaagagtctcatttctgaggttcttactttgtttttgtttttgtttttttgagacggagtctcgctttgtggcccaggctggagtgaggtggtgcaatctcgtctcactgcaacctccgcctcccgggttcaagcgattctcctgcctcagcctcccgggtagctgggactacaggcacctgccaccacacccggctaaattttatattntagtagagacgg

SEQ ID NO: 54918 - DNA, 597 bp, Homo sapiens
cgggccccccctcggaagtcttctagaattaattaaataattgcttgtccacaggccaagctgttaaagcctttacaaaaacacggaagctgaaagctctcacatatattaaacaaaagtgatcctatatgatcactaccaaggtccaaaccttccccttgcctcagtacttgttcccaaagcaagctcaggtttgatcaaccacttcccgcctcaagtcttataagccccagtgtgctcagaccttctgaagccacttgacaggcttcctgcctcaatttcatagattgagtctcataaacaaaaacgaatgccaagcacaaaaatctcttggcaacaaaggggcctgcattagttctcctcaggtaaggattaacttcaatatttagcttagaaataaggcattttaagttcgcattttcagaaacactgggcaaatttgcagaaaagaaaaaaacacgtctggatggggaggggagatctcactgcattaaatgtttctataataaataattccctgaggtaccaattttaatcacttgacattttgtttccttttaatgcaaacatacagaacacaatactaccatttccaat

SEQ ID NO: 54919 - DNA, 588 bp, Homo sapiens
  misc_feature 28: n = A,T,C or G
cgggcccccccctcggaagtcttctagnaattaattaacgcgggtatttgaacaattaaactagacttcattcttttgtgcaagtttctttcttattttgagataatggataatgtagctcacaagctagtttatgtatcttcagtttagtaacctccaaaagatgcttgcatttctcctggcctctgtgtggcagaaagcacattccttctgcacagctgatatgtcctaacatgtctaccctccttacgggccagactcattagaggacagctaggtgagagagcatggtgtgccctggatgaacagtgtgaggcctagcttccacgtcttgttacaggattctcctttgaccgaaaggccaataccagaatgtctgctcctgtcagtggagatctagccacccactcagagagatggaacttcagtctttgatttgaacaactaaaaaatttcttcctctgtacctattctgattcatcaagaatgcttttctggagccttatgcatgtgcgtagattttcaagttcgcaaacaggttccatggaaatgagttcagaggttgattctgatggctgcatgaatggc

SEQ ID NO: 54920 - DNA, 609 bp, Homo sapiens
cggggccccccctcggaagtcttctagaattaattaacgcgggacagtgttacacatttagaaaatataagagacttcgacagaaaacaatgtagtttacctcaggaaaacactaatattttaccagatggcatagaacagaaactgaaaaaagtgagagaaagcaccatatttcttgataaaaatatttagtatcacaaaaatattaatgcttccacaattgtgtaaaaaactcctccaatacaaatcacaattgcaatacttagttgggggaattggggaactgaaaaattagtttttgttcatatagctcttaagtttataagaaataggaaatcaagaaaaacattattgaagggtgatttgctttattagatattaatatttaccacaaaacattgaaatagcatgagaaaagactaaaacaaatacagaaatagctacaaaaatatataaaaatgttacatgacaaaatagacatttatgtttcagtagcagagtgacttatttaataaatagcactaatgtaattagccagccataaggtgaataaatataaaagaatgttaatgcatgctattcaaaaatatattgcaaatagaatgaagt

SEQ ID NO: 54921 - DNA, 541 bp, Homo sapiens
cgggccccccctcgaggtctttagaataataacgcggggggcggctttggaaattaaatgatattaaaggtagttatggtggctaccacagtactaaattgattacttctagaggaggagaattagaaagccctttatacatttaagtaataattcaaatactatctaaaattactcctggacagcatgcagaatcttatgtggcaaatatggggacatagtaatgctcattcgctcccctgataagtttgcctaattgctaaatctgaagacttctcctttaccggtctactttcgttttttttccccttgataaatgaagattgaagtttatagccatgtaagagctaactccttatttttgtggaatagaatttacagtagttttgttggttctataaatggttggtaaaaacatagaagttatatgaggtcagtcctcaaaatatctgtatcttgtggcacacaatttcaatccaaaatggttgacttctatatctggtacacatttcaccctaggatctctctttaccattataat

SEQ ID NO: 54922 - DNA, 599 bp, Homo sapiens
ccccccctcggaagtcttctagaattaattaacgcgggatataaccaaacacatttatttgatctgctttcagacaaaatccacatttatttgtcagaggattacttcatttacaatatttttttacaaagaaatctgaattgaaattcctatgcaaatatacgagattcattaaattgtaataactttttcaaatagagcaatcaagtagttaaacccaaatattcttcatattaactttattgattcaaaatattccaataaatgcatgtcatttggaaatgtgtatgactattacaagtaaaggaattactatacattaagtattaattctgccagcatggaaaacatatgtcagcaaaagattattcaaagtaagtcaattcaaaggcctctcccatttaagactacattatagacaatgattataatggttagtttgaataacaaaagtttattcatgcacattaaaatatttatttttccataacaaattaccctaaaactttgttgctcaaagcaacacacatctattatttcagtttctgttggtttcttatgtgggtttttttgcttcagggtgtcgcacaaggcttcaa

SEQ ID NO: 54923 - DNA, 597 bp, Homo sapiens
cgggccccccctcgaaagtcttctagaattaattaacgcgggcatctgcatcaataacaagaataatagataaaaccctagtggactggctatacagtataaagcaatgaggcaattgcctccaacccatcactgatttgcaaagacacatccactgccaaccgccaaccttgctacaggcctatttgtaagttccctgggcttaactctgttgcaataatgcattacattgtaatgtaacttcctgtgttcttttccatcttcctccaacacccatggactgctttctgctcagtgctgcagccccagcctctagcgtggggcacatcaccagggctccattatgatctccctaggctttgggcattttagccttggtgggacttttcctacataaaagatattttaaaatataccttgtgactgttggtataaagatgaatagtttaatattatatgttacaacatgttcttggacctaaaagttcattttcttcttgagttcataaaagcaatcacagcatttgtctgggcccctaaggttggccttagtgcttaatggataagttgaccctgctgggcacatcaaaggtagtc

SEQ ID NO: 54924 - DNA, 599 bp, Homo sapiens
  misc_feature 23: n = A,T,C or G
ccccccctcggggtacttctagnattaattaacgcgggcaggatgaactcagaaaagaaggtttgtatgggtctcgcagatctaacctgaaatgcttaactatttcatagtgaaagctaaaccatttcgggctgaaataccaacaatatgcccatttttttgcatagaagaaacatattttaataacattcagtggtgaatgttcaaagaaagaaaaaagaatgagctgcgtcacacattaaagtgtaaagacaagagttttgtcatatcctagataattgaaactcagaatttgcacaaagcccttttttttcgaagtattatcaatagaaatatttttacaacaacttttctaggtacatgttcttatctccactttacaggtgagataattgagacacagggagttttacacaagatcacacagcttgtgagtggtagagctaaaagttaaacctgacagtctgacttcaaagaccaggctctcagtccttacactaggattgtctatattttgaaaatgatggttatgtaaactaaattagatttttgagaagttcttcaaaagaatttgtgaccgtctttcacttttagtttat

SEQ ID NO: 54925 - DNA, 555 bp, Homo sapiens
  misc_feature 9: n = A,T,C or G
acttctagnaattaattaaaataattctcctactaactccaatttggagaacctcagctctaggctggatgaaaggcaactgatgcctaaatgcagtccaacactggtgcccttttactccttcaagtactgaaataaagagtccatttcactaataagctgatgagttaaatgctagctggacccagacaggtgtgtttacccctgcttcttgaaacagaaacaaatgtgacatgtgacttccctaaaccaaacgtttaaatttgagttgtttgccatgccaaagaaaacattgttggctgggtgtggtggctcacacctataatcccagcactttggaaggccgaggcaggaggattgcttgagcccaggaattcaagaccagcctgcgcaacatgacaaaactctatctctacaaaagaaaatttaaaaatggctgggtgtaatggcgtgcgcctatagtccaactacagtgggggccgaggtgggaggattgcttgagccctggaggtcaaggctgcagtaaggagtaatcatgccactgtactctagcct

SEQ ID NO: 54926 - DNA, 585 bp, Homo sapiens
gggccccccctcggaagtcttctagaattaattaacgcggggcatggtggcatacacctgtaaagcctgtagttccagctacccaaaagctgaggcaggagaatacccagagcccaggagttcaaggcttcagtgagctacgatcgcaccactacattctagaccaggagacacagtgaggcctccatctctaaaaataaaaaagagaaaggtgtgttatccttctatgggatatacggaacgcacaaaaataatttttaattgttcatgtatcaaaagtaacaatggttctcaaccaggggtgattttgtatccttgagacattggcaatgcctggagacatttttgtcacaagaggaagagttcaagttgcatctaatgggtagatgctgttaaacataaaaaagtccccacaacaaggaattaccaagcaccaaaacatcagcagtgcaactgtttaaaaaccatttgtcgctgggcgcagtggctcatgctgtaatcccaacactttgggaggccgcagcaagtggataacctgaggtcaagagttcgagaccggcctgaccaacatggagaaaccccgtc

SEQ ID NO: 54927 - DNA, 600 bp, Homo sapiens
cccccctcgagagtcttctagaattaattaacgcgggaagtgagaaaggaaaaaaaatcttcacttgggttataataaccttttgtgtgagccaaattttgcccaagtccagctgccttggagcacagtcataattctgcaatccaccggctgtcactgctcgtgcttacgacacacacactgaatctgtttgttcagccttcagggtttaatgccctgctgtgtccatgtgctcagctcatagccaccatgcatgacttgggacttctgaatgggaccaagaaatatctaacatgcgatttcctggaaagcacataggagtttggcccagatccagacttggcaggtaacttgctgtgtgactgtggacaaatgactgaacctttctgggcatcaattccctcaaacatagagggaaggtgggcagggatgggacacccacccctgaagcctcaatcatgagaagcatcccagaatgagacgtattcaggtaataagggagtttttctctttttttttgttatttaaaaaatggatatgtaatagttttatatatttttggggtccatgtgatattgtgatacctgcatatgatgtgct

SEQ ID NO: 54928 - DNA, 507 bp, Homo sapiens
ccgggccccccctcggaagtcttctagaattaattaacgcggggtggtaacaggaattactaccaataattacatgttaaagcttagtctattttgttttgaatttccgtaatttacagcttatagagttgttgtgaggattatggcatgtactagacaggaaaactctataaaagcataaagtactagttccacgtgaatggttactagcactcttaaataagaatatgaatttttaaaatgtttacacctattatatttaataagcctttactcacattaaaaatttaaaataaacttgctatataattcttatgctcaatgagtacaattataaatccaatataaatctcctaaagattttctccactccaattttgtattacacacacatccctacacacacccaaagtctttaaaatgttcatactctttgacctagtaattctactgaaataaacccatcataaggaaactattcaaaaatctaaatatatcaatactaat

SEQ ID NO: 54929 - DNA, 600 bp, Homo sapiens
  misc_feature 19, 32, 543, 566, 582: n = A,T,C or G
taccgggcccccccctcgngggtacttctagnattaattaacgcgggggatgaagtgtagtatttgtatatctgatgcttccgctatccaaggacaatctgttaaatggatttttggagcagggagattgaataggaccttgctccatctgctgtatgcattgacctggtagtgcagtaactccaggaactgtgcaccccctcaggaagaaaagaagaaatacactatacactacccatgaattatcccaaaaatgaaattaacatttataattgcataaaaattattaggagtaaatttaatgaaagaaatgcaaaacctaaactctgaaaaccataaaacatgggaagaatataaagatactaaataaattatgtcgtatttttatggataggcacttaatgttattaaaatggcagtgctccccaaattaatgtacagattcagtgccacccttgtcaaaattccagcaacatttttacagaaagtgacaaattgatcctaaaactcatatggaaatggaagggaaccagaatggcccanacagtgttgaaaaagaaaagcanagttgggactcaaacntagaaagcacattgatga

SEQ ID NO: 54930 - DNA, 608 bp, Homo sapiens
cgggccccccctcggaagtcttctagaattaattaacgcgggggctgatttgttttgtttagcctgcaagtcctgggcaacctctttgtccacttctcaggcgttgcatctcagtcctggagactgtagtaagaactgttccaggtcttctgcaaacagtcttcctaatagcaaaagtgaaatatttgtcaggtagagtataccttaaaaacttttaacctttttattctgatgttgataaaaacaagcgtaaataaattaagcactgtgtatatatagagaatagtcacataaaatgtacattttatatatgcatagataagtaattttaatccaaaatagaattgcataacttactctttaatcctttaaaaattactataaacttgtgtggcttaagcgaattgctgggaaaatgcagttataccactttaaaaaaaagtctgtcagaaattactggagactagcaataagaatttacagtcattaatccatggttgtgttcttactggtataaccaaatacaacatttgccagatttcaggccctaatgaaaagtactgagtaattcttgtttagtttctgtgaattgttatggatagcttaac

SEQ ID NO: 54931 - DNA, 517 bp, Homo sapiens
gggtccccccctcggaagtcttctagtaattaattaacgcggggagtagtcatccgaaaaagaccgaccatgtgatgagggttggagctttgtgccagtgtgacctccatgaaggagagtggggctggaggttgagttccatcttgcagccaatgacttaatcaatcacatcataaaaactctggcttagaggaagatttggaagctccgtacaatgcagttcatgtttccttagttcctttataacttcccacagacatcactgcattaacctctacacttgacttgtctttacttttctattctcaaacctcagcaacttttctgagatgtgatttacatacaatcaaattcacccaactaaagcgtataactgtggtttttagtatatccacagttatataataatcaccagtatcccattttagaacatgttgatcaccccacaaagaaatcccgtatctgccaggcacggtggctaatgcctgtattcccaacactgtgggaggccaaggca

SEQ ID NO: 54932 - DNA, 586 bp, Homo sapiens
  misc_feature 17, 44: n = A,T,C or G
ccgggccccccctcggnagtcttctagaattaattaacgcgggnggagagtagagagagagatttcacagacttttctttatactaaatcatgttaaatccattgtgtactttatactcacaatgcatctcagtccatgctagccatatttcaaatgctcaatagccacatgtggctagtggctgctgaactggacagctctggaatctgtacttttaaccctttattgtttcccttttattcttctatgctgtatatttcttcattataatttttataaaatttattttcaatttctccaacttttgtatcacattggaccttgaaataatccaaaatgtggttacaggaaattttaaaaatcaggccaccccccaaatatagttttaagcacacactccaaactttctgaaaactattttattcatcgtttgtggagaaatatatagtcattggccctttttcatctttaaaacatcacttaaaatcagtttaattagtatctctgggttcaaaatgaaatttaattcactcaacatttcttgggcacctgcagggacacaaactgtagtagttgctaacatta

SEQ ID NO: 54933 - DNA, 590 bp, Homo sapiens
  misc_feature 23: n = A,T,C or G
cccccctcgggggtacttctagnattaattaacgcgggccttcacttactgaacagaaccttggttgcttccaaattttggttactgtgaataaactatatacactataatatgaataaactatatattataaactttcatgagcaggttttgtgtggacgtaggctttcccctcctttgggcaaataccaagggagcgtgatttttggatcacatggtaagaggatatttattttattaagaaactgccaaaccatctttcaaagcggctgtagaacatgcattcccacgacctgcgaacaagagttcttgctgcttcgcatcctcaccagcataacacctcaccagtgttaccagtgttctgaattttggccattccgataggtgtatagtatctcattgttgttctaattggttcacattgctttgctagtttaaagtatgtaaacccccagtcaggcacagtggctcaggcctgtaatcccagtgctttgggaggctgaggcaggtggatcacaggtcaggagtttgagaccaacctggccaatatagtgaaaccctgtctctactaaaaatacaaaaattagcca

SEQ ID NO: 54934 - DNA, 605 bp, Homo sapiens
  misc_feature 32: n = A,T,C or G
gtaccgggcccccccctcggggtacttctagnattaattaacgcggggggggggggaataaagacttttaaaaatgtacagttgtcgacctaatacgttgggcgataaaatgaagtgtaagtttcctaactgttacaccttatagccttcttgatggaaatcaggttcacaagagcttaaataggacttggcattcatcaaaccttaagacttaaatttaggacttggagcatcatcagagtgaggactaataacaatatcacctcatggtcgtcagaataggaaacatcgctctaacagtttaagtcttagaatattgtcacagaaataggttatactgctcaaggaaatttaatgttcccattgaagtattaagttggtgcaaaagttattgtggttcttgccattaaaagtaatgtcaaaaatcacaattatgtttgcaccaacctaatatttgctacatggagaatacagtaactccttcagcactcatatagaccttgcattccttaacagggtaatacattgatttgtcctcaggatttatgatagaggatacccttttttaagatattgtaaaagtgtgctgtttatttgagaacctc

SEQ ID NO: 54935 - DNA, 582 bp, Homo sapiens
  misc_feature 28, 484: n = A,T,C or G
cgggcccccccctcgaaatacttctagnaattaattaacgcggggggaaaagaaatatcctcttatagtcctagaagtggttctttgtgtcccaaaagctctgaagtcaatatgaactgtttgttcatgtcttgtcattttatttgaggagggaatatatacattacactactaacatgaaggatatttccattcttttgggtctcccctacctaatatgtttcttcagtttaagatgatgaactttggagactcaggcactagttcgaatccctacccagctgttttccagttgttaactgaagccatctacttaaactctaagcttatattcatatctatgaaatgtgaataatactgctgcactcagcattgtaatgaggatttttaaaagccaaagaatccacatatgtggtggacacataaccagcctactgtcatcgaactaatttatacatagcactgttggatccactgctaattntaagttttatttttagcacattgagtcacgtactcttgcaattgcccgcaacctgactcagcagctccagaccacgtgccacaccctcctgtccaaca

SEQ ID NO: 54936 - DNA, 585 bp, Homo sapiens
  misc_feature 9, 539: n = A,T,C or G
acttctagnattaattaacgcggggagtcagtgatttaaggatatattttggaggtaaagtaaaaaggaattcctgatagatcctggggaaagggaaagcaaagaatcaaggataactttcataacccaagttgggcagatgggaatgccatcttctaagacagaaaaaaaacttggagaagaggtgattggtgggcttttggggtaattaagagttctcttttgaacaagttgagtttaagatgtttattaagcatccaagtaagggtgtcacataggcagctacagttctcgagagaggttatattttaaatagccatgtggcatagtgaaacccaacacattgttttatcaattccaagacagaatttttcaacaactgcttctttttgattctgtataaaagactgaaaatgaaaaacaaaagaaatctgcttcaaatcatataagttcctttgatttgggaaaaggcctttctagattccaaagtacaagagagttcccttgtttccttggtaagccatattcttgtccatggnggtcctggcctagagttgccccatcacacatttcactctctgtacg

SEQ ID NO: 54937 - DNA, 532 bp, Homo sapiens
  misc_feature 7, 23: n = A,T,C or G
ccccccntcggggtacttctagnaattaattaacgcgggtcccacgctgcatgagcaacaggctggccagtgcccaccgttaccatcagcagccacgacgaatccatcactcaagttctgaaactgatgagacaggagctccctccttcagcacgaaagccactgcatagctcacacagagaacaaaggcaaaaaccaaaaccccttcagtactagaatctaatgaccatgacacaaacagtcagcatgtaggaaagaaaaaacttgagtggtaaatataggagaaaacacattcattccatcttcaaaatttgggggggagtgtggatctaatataaatcctaagaactcagacacagttgattgagaacagagcaattcccttttccctcgttttaaagaatcatgtacataaaaggtttgaacactttgaactttgaataagtgtgaacactgcatgcctgttggccactagcatgctgtgattttatgtctcaagacgagcaacaatgaggcatgcacagctcccagg

SEQ ID NO: 54938 - DNA, 388 bp, Homo sapiens
  misc_feature 27: n = A,T,C or G
cgggccccccctcgaaagtcttctagnattaattaacgcggggggacaattgctacataaattgtgctacagactttctggtctggttgctacaaatgttgtgtgtgagagttccatttttatatacagtatgaccaggtctgtttgtatattcaggctctcatattgttaaaaaatattgacatgtactaggcacaataaaacggatgaaatgtagatcttacctaatctctggtcatgatgtattaatactagaaattattcatgaatacagatgctcctcaacttatcctagatttatgttctgataaacccatcctaaagtcaaaaattgtaagtcaaaccattttaagttgagggccatctgtacagcaaaaaaaaaaaaaaa

SEQ ID NO: 54939 - DNA, 304 bp, Homo sapiens
  misc_feature 25: n = A,T,C or G
atacttctataataattaacgcggnctctgactcggttcacacccactcctgcacgaggcagccctgctgctgttagtaagtcttttccttacattgaactcatctgcctccctgacgctgatctttcatctgccctgtggggccacccacacgtaaaccctcctgccaaagaattgtgatgaaataactgcttctatttaccaagcactcactatgtgctaagcatgatgcatacttttttttaacttacatcttgaccacaacaaccctaaaaaggacgcgctcgatgagaattgcccttat

SEQ ID NO: 54940 - DNA, 592 bp, Homo sapiens
cccccctcgaaagtcttctagaattaattaacgcgggcagtgacttgggaggctgagccaggaggatggcttaagcccaggagtttgagaccgccctgggcaacataacaagacccccatctcaaaggaaaacatgaacaaaaataaccctaccccatgcaaaataaaaacaaggacaacagatgttttcaacataccctcaaggcaggaacaagatgagaaagactgtctcggaggtaggcatagtgcctgaaggtgtgatctgagaacaatgctggcattgttggacaggttttagcagcattgaaaataagtaccaaaactgcaatatctgatagatgactgggttaagtaaacttggaagtataaaaggttggccagattctggcactctcactttccacctccaaaatctccatcaagagactatgattttctaataatcaaagaaatgcaaatacaaacaacaaaatacattcccctactccacccacacccccaattaccaaaggtttttaaaaatgccagagactgccaagaatacaaaaaatggaaatgattttgcctataaagtaagcaactatattgccta

SEQ ID NO: 54941 - DNA, 550 bp, Homo sapiens
  misc_feature 27: n = A,T,C or G
cgggccccccctcggaagtcttctagnattaattaacgcgggtataaaaaatattagaactctgttactattttctagctatggaagagagagcaattcaacgagctgaatgtaggcggatcttggcagagaagaagaaaaaacaagaagaagaaaaattggtaatagattcaaaatgcaaactgagtcaaaaaagaaggatttgtccaggtctttcttaaaaaatgaaaccttgctttttcagaactcctgagacaatagagttacatcaactttggaaatggttttttggcctagtggcctgaattccgtgacaattttaggaaaataagggggacagaaacatcaacatcattaacacagcaggaagaaaatgttatgaaagttgatgagagtcagcagattagaagatttacacataaccaagattagtgtattataggtagatgtctgacctactgaatttgcaaagagggatagttcttattttccaaagttttgacctagactatccaaagtaaattttgtaactaccaaaaaaaaaaaaaaa

SEQ ID NO: 54942 - DNA, 545 bp, Homo sapiens
  misc_feature 24: n = A,T,C or G
gccccccctcggggtacttctagnattaattaacgcggggggggcaaggcactaaacgataccaaaagcacgtgtacatcgattttgaccaaaaccaagcctttctaactacagtatgtacaaactactaccttctgtccattgagtgggctaattactaaagataaaagctagatattatctatattataaagctctcacaaaaaactttataagtctttaatatatgtatagtgtgaaactaaccaaataagaaaaaaaggcttgccaatcatgtgataacaaagatcggtggtgtggataaaacgcagaaaacgcatcccaggattacatatgagctgccatcagacaatgcccatcgagcctgccaagcagcctgacttcagaacttgtttacgcgtttccctatccctctccctctcgccaactgcattggcgtgccattaaatcaccggtaacaccactttgctaaaagactgcatcctttgcctatgaaaagtagctaccacttgtgtttggtaataaagcctctctaaaatgctttg

SEQ ID NO: 54943 - DNA, 451 bp, Homo sapiens
  misc_feature 23, 439: n = A,T,C or G
ccccccctcggggtacttctagnattaattaacgcggggggcaccgcgggaccagaaggcagtgacccacctggacccagctttcactgtcttgtgtgtgtctattatttctcaacctgccgatccacctaggagcagagagagagccccgttgcattgcaggctgctggccagatcccgcaatagctgctcaaacagaaggcaggttgtctgaatggagcatggtgaagagggaaggaaacagacttggcagtcattcacctgcagtgtccttgtcaagactcactaaatccgggaagcagctaagtggtccataaagggccgtctctggtaaaaggctggtttgttcacaggcttcttgtgtggctggtgtgaaacatcccttactctgtgctcttcctccatacccagaaagtgagccacagatgaccatctccanatactcagtgca

SEQ ID NO: 54944 - DNA, 355 bp, Homo sapiens
  misc_feature 32: n = A,T,C or G
accgggtccccccctcgtgaagtaccttctanaattaattaacgcgggggcatctgcagtttacacagtgttttaaagtgatttttctgcatttggtctagtaagcctttcatttggtcactgtattgagaaaagaaaacattaaagtaatttaatttgaccacccaagggcaaaaaactaaacaagagattgaaaacatgtaacatgcgcgtgcatacacacacacacgcacacacacacacacacccctatctacctatctatgtatttatttatattaacatgcttccttcctcttagaaaatgaaaaccaaaatatgatgactgaaaatgtgaccattgatattaccaaca

SEQ ID NO: 54945 - DNA, 516 bp, Homo sapiens
  misc_feature 493: n = A,T,C or G
ccgggccccccctcggaagtcttctagaattaattaagcggggatgtttatctttttcttattgattttaaataacttgctcaaagcagcataaagtggtgtttaaaagcagggcctctggtgctagtctgcgtggtttcatatcctgactgaacacttatcagctgtttgacctggtatgagctacttaatctttctatattttggttccattatctgtaaaatgcaaataataacgatatctatcatttaggtttcttgtgagacttaaaataggtaattcatgtaaagcacttgccatagtacttgattcatagttagagctaaatagtcgttagtcatattaataatgaagtaatatttaaaataccagcccattgtcttttaaatgcattgtaaaagtatttttccagctttctaatttatcttcaatttcaaaggccttttcactcaagattatttaaaaaatgagtgatgactttttaaagtaatntttgagctttatttatttatttt

SEQ ID NO: 54946 - DNA, 416 bp, Homo sapiens
ttctagaattaattaacgcgggtatgtgtatgcacagtaaaaatagaaaatataaaaaataaaaaagcaaagtctcaagtcaataaccaaagctttctttcaccttaataggaatcccaaactaatcaggttaaagcaaataatgaagattagagcaggccacagtggctcacacctgtaatctcatcactttgggaggccaaggtgggctgatcacctgaggtcaggaaggcaggccgatcacctgaggtcaggaaggcgggccgatcacctgaggtcaggaaggcgggccaatcacctgaggtcaggagttcgacaccagcctggccaatatggtaaaaccctgtctctactaaaaatacaaaaattatccaagggtggtgaacacctgtaatcccagctactcagagactgag

SEQ ID NO: 54947 - DNA, 471 bp, Homo sapiens
  misc_feature 28: n = A,T,C or G
cgggcccccccctcgaaagtcttctagnaattaattaacgcgggggggggagagaggcagtctcttgacaaaataaagtatttttattcatttgtatttattaaatgaaaaaacaatcccatggtgtccctgttgtgtggtggaacctaatgactgttgaaataaagttctgtgttttccctgaaaaaaaaaaaaaaaaaaaaaaaaaaaaaaaaaaaaaaaaaaaaaaaaaaaaaaaaaaaaaaaaaaaaaaaaattaaaaaaaaaaaaaaggcgcccccccccggggggaaccccaaatcccccttaaaggaagtcttttaaccccccctaattgcccgttttttaaaaacttggaaattgaaaaaaccttggcttacccaaattaaatccctttgaaaaaaatccccttttcccaagtggggtaaaaacaaaaaagcccccccccaatcccctttccaaaaatttccc

SEQ ID NO: 54948 - DNA, 579 bp, Homo sapiens
gccccccctcgaaatacttctagaattaattaacgcgggggtaaataaagggacttccagaaaccaagttgccaacagatattcacctcaaatggtcagtgcccagcacggaaacctcatgggcctgagaacagcaacagaaactgggagggggctgtgctatcaccagttcatgcatgaatgtaaggtgaccacagaaattggatggtgctgaaaagatctggacctgatgaaccccaaatatgaatcaaccaaattcctttttatgacagagtcccacactgaggaggtaactgctggaagtaaagtctacattgagaaacaggcatatagggccaaggaaagaaatagtcagataacaaatgggggaaggaagcagaagaggcatagctcagaaaatagccatatttttgaatacttcatgctaacaacagaagagataaccctagagctatgaagctaggaaagctttattggcccattccatccatttttttcacatgagaagcaagataagactatggtcacattccatagttgttattgtaagataaaagagaataatggagagtaagtctt

SEQ ID NO: 54949 - DNA, 516 bp, Homo sapiens
aattaattaacgcgggtagctcatcagttatctttagtgttagtgtattttatgtgtggcccaaggcaattcttcttctttcaatgtggcccaggaaagccaaaagattgggcaccactgccttacaccattcacaaaaattaactcaaaatggataatagacataaatgtaaaaggaaaacttgtaaaacttctagaagatgatatcacagaaaatcttcaggcagatggctatgtaatgtaaattaatggccactgagaatagacaccatgaccaccatgtctgagggatgcttcggtgagatctgcagcttcagctttaaatatccactagggtaatatccatattattacccaaatttgttgccttgaagtgcactttgtctataacctaaatatttccttctacatttttaatctgttttcatttgtactcttcctataataagcctccaagcatgttgctgtttcacgaccctgagaagatgagacagcacactatcactgaccgcacac

SEQ ID NO: 54950 - DNA, 578 bp, Homo sapiens
cttctcgaattaattaagcgggatgttttttttcctgcttttacccaagcattccatgcagataagcaccagggtagaggaagaataagaagtggtcttctaagcttaagtgttctgtttcacttccttctgtcccaagtagttgctaaagtaatttacaatttggaaagctgtgatcaccctacctgaagcagtaaaatctcatggtggggcctcctaatttatcaccggcagtaaatgctaacaaattatactgtactaaaagccattgcccaagagtttagcccagaagacaccaaggcaaagccttttttttttttttttttttttaatcaggatgagtgaatgtttagtctactggatatttttcaagcttacatttttatattataccttttggtttttttgaaccagatccaagtttgactggtatttgcagtaatgttctctttgttttccctttatttcccatctcactgttacctctatcccagtggagcctttccagtgtttgaagagggcaaacattgatctagcctgaagttagaacaggaaaatatgtgcgaggaaaatgatgt

SEQ ID NO: 54951 - DNA, 590 bp, Homo sapiens
  misc_feature 528: n = A,T,C or G
cgggccccccctcgaaagtcttctagaattaattaacgcgggccatcttacttcccttattgcctgtctcccaggctaaaatatataacatttataattacatattccaaaacctccatgaagttaagacaatgtctgttttgctcagtgctgtatccccagcagctggaatagcgcctagcatgtagtaaaggctcatacagatgtgtcgcgtgaataaataagggaactgaggctcctaaggttgaatccagcaatgcaagctgcaaaaaggcagaactcaaatttgccaataccaaattttccccaggcactggtggaagtggagagaaactgctacattcactggcatcatgggagacagagagaccatcaaacaaaagtaggtacaataggacccaaggggaaaaaacacaagctgtttgcatttctttgagaaaggctagaaaagcaaaggcaagtggtaggactcatgagaaaatacaaaagtgacagctaattccaggctggtgaaggaagaaaacatangaagatgaggcaatatgaaaataggaacagagctctggggtggaggaacctactccatcccc

SEQ ID NO: 54952 - DNA, 484 bp, Homo sapiens
  misc_feature 32: n = A,T,C or G
gtaccgggcccccccctcggggtacttctagnattaattaacgcccgccacaacgcccggctaattttttgtattttttagtagagacggggtttcactgtgttagccaggatggtctcgatctcctgaccttgtgatccggccttccaaagtgctgggattacaggcatgagccaccgcacccagcaccttctctattctagttctaactcttattttcctctaagggactggcttttttttttttttttttttttttttacctccctttccactgttgctctgacttttctaatttggttttgaagtgttggtaaaaatggaaaagtaagatatttttaagctttctcttatgcctttttcctccagtttccttctaacttcccccctgccccaactatattttgaagtcagtctctcacataattcttgtttaatttgcatcccctatccccaaatttaggacagtgtggtcaggcaagaa

SEQ ID NO: 54953 - DNA, 597 bp, Homo sapiens
cgggcccccccctcggaagtcttctagaattaattaaaagcagtcatctaatcgggctttattccagcgtttgcaaatgcctacataatgcagactatctccacctgcatgactcagcagtacctcacattcatcatgtccggaactgaattccttatcttcactttcaaatctgctcttcgttctcattaatttctgaaaatggtaccactgtgctcatgtcagtaaggctcagaaatggggtatgggcaagcaaccatgacgcttccttcagcactttaacaatgtctgttcattctgctgcttcagtggtcctccttgtcccttcctctccagtctctcctgctgctcacagattaatttctaaaatacaaatcactcccctattcaaaagtcttcagaagttttctgttgtttgccacatggggtggccttctccactatatgcctccatcttaaccatccaacctcatatcctactgatctcatgaaccttatgctatatcctaagcagattactcattcctagagagtgtcagtccactgccccaaactatttcctttgcctctgacacctgtttccctgtactttctctg

SEQ ID NO: 54954 - DNA, 610 bp, Homo sapiens
  misc_feature 19, 32: n = A,T,C or G
taccgggcccccccctcgngggtacttctagnattaattaacgcgggtactgagtgttggctgtcagctgggcaacctcagttttctcattgtggcctctatctaccatcctctggtagactagacaggctcctgacatgatggtctcagggcaattttccaagatagtgttttttaagtcctacctaggctctagaaccatcaaagcctctcttctgttgtattctctttgtcagcagttggcaaggccagcccaggttcacagggcagagacatagactccacctcgggattgggggcctggcgtggcagtgtcattgttgcaaaggaatttatggccactaaatggtttaccacaggtgactacatgtactaggaactgtgcttggtgcatttaacagattatctcacttaagccacataactatcttgccattaggcattctcatccccattttaaagaacccgcaggtcacagaggttgtgttgttcttgcctgaggctacttggtaagtattggaactaggctttgactctaggtatctctccagctgagcggcattcatcttaagaacccaacaagtgggagacatatgctaacttgttcttc

SEQ ID NO: 54955 - DNA, 607 bp, Homo sapiens
  misc_feature 26, 39, 501: n = A,T,C or G
actggggtaccgggcccccccctcgngggtacttctagnattaattaacgcgggggcctccccagccatgtggaactgtaagtccattaaacctctttctcttcccagtctcgggtaagtctttatcagcagcatgaaaatggactaatacagtcttcttgtaagtcatgggtcccagattaaggaggtcatatgtagatgatcctgtttgttctacaggaaaggacctggtgaataacataagccacttccagactaacctcccaaagacacagcaatggcactaatgctaggagtcacatcactgtggggaaagccatatctagagctgtcttgtcacttggtccttgctctcctcatcaactgccatgatttgagacctcccagaggactttggggagggggaattagaggtcctaagggttgcagcaaatggagcaatttgccctgcttcaacaggctgtgcatgactttgagtaatgagcatccctgcccgggctntccttctcccatctttaaagtgggggcaacggtatccaccttgcagggtggctgtgaagacaaaatcaaacagttcacagaaagcgcccaggacagcacatggcac

SEQ ID NO: 54956 - DNA, 616 bp, Homo sapiens
  misc_feature 28, 45: n = A,T,C or G
cgggcccccccctcggggtacttctagnattaattaacgcggggnaagagaccaaatatatatttcttgttatgtcacaggattgcattaaatttgcagatcaatttgggcaatattacaatattgctatcttaacaataatagtttatctgttttgttttgtttttagagatgggtcttgctatgttgcccaggctggctcaagcaatcctcctgccttggcctctctaagtgctgagattacaggcgacaacagtagtttgttgttgtttctatatacaggatcacgtcatctgtgggaaaaaaagacagttttacttcttttccaatgttgatgcctttattcttattttttggccttatcacactgacttgaatctccaggacaatgttgattgaaagtggcaagagctgacattcttgccttgttcctgatctcaaggagaaacattcagtcttgcatcattatatgtaatgttgatggtaggtttcagttagatatgctttatcaagttaagagagctcccttttattccaagttcaagggtttttttttaaccatcaatggatgttggattttgtcaaatgtttttttctgcatctgttgagatcatat

SEQ ID NO: 54957 - DNA, 473 bp, Homo sapiens
  misc_feature 23: n = A,T,C or G
ccccccctcgggagtcttctagnaattaattaacgcggggacatggggaggaacagtttggggatgggagaagttaagtgtgggacctggttaagtttgagatgcctatttgatagctaagtagagatgttgagtaaacagttggatatgtgaatctggagttctgtgaaagtttggagcttaagttaaaatttggggtatgacctatttcttattttcagaagaaactcttaacaccataattaacacagagttaacttttattacaggaaaaaccatatggcatagttgaaaagaagtccagaatattccctgtaagtcttaacacttctgatttttcttttgtttattgtttttctctttccttttcctccctttccaagcaattattagattaaaatgttctttccttctcactttcggtttaagtccctgttttgtgtattcttgtaaaaaacaaaaaaaaaaaaaaa

SEQ ID NO: 54958 - DNA, 575 bp, Homo sapiens
  misc_feature 27: n = A,T,C or G
cgggccccccctcggaagtcttctagnattaattaacgcggggcctgggaagttgagactgcagtgaactgggatcgtgctactgtactccagcctgggcaacagagcgagaccctgtctccaaaaaaaaaaaaattgagagtacaagagttgggctttccagtttaaacaatccttccctttcccatactttctttatttgttcctctcaatattatattgggaagtgtgatgctttggctctggagaggcaaggagcaagccacagggagctcagggacttgccagggctgcttcaggcatcggtaacactgcgggtgtgtcaggtgctatccctgacagaatgttctttcagagcgttctttctgacgcacattctcttgtccctgcccttgaccatgggtggcatcttggttttcttgcagtctgcatcactgtttgctttgtctttggagagagaattttattgagggaggaaatgttccagggtggatcagattggcatctctgtgaactttgtaccagggtagcgaaggaagtgccaaccccatctttttttcaagaacagaacaccc

SEQ ID NO: 54959 - DNA, 596 bp, Homo sapiens
  misc_feature 28, 78, 570: n = A,T,C or G
cgggcccccccctcgaggtacttctagnaattaattaacgcgaggggaaggtataaaattttcaaatggaggagtatnacctgaacctaatcatggatgtgattttatgtaagtaatatgtgaggtaagtattttaactgtatgttaatgagataaaattttgctaccattgatattaggcatttttagcttttgcttcattgacccacaatgctatttcttatgcacctaggcaaaataagtaaatgataaacagcaaacaaataaaaggtaatctaaattatatatatttcaaatcccccaaaccgagatccttctatttttatatataacatttctgtttagctttcacactgaatatagagtagaaaaaaatagttactttttttgttggatagttggtgatgactggaagtaaattcgaagaattttcttgatggatttacaagtctgatttggcttttccctggttgtgcattcattttcttctaaagtttaaacatgttgaagtggtttttgcctacgtaagctatatatcagaccatgtctgtgtttcaagaaatgacacgntggccacaggcgtggtggctcatacc

SEQ ID NO: 54960 - DNA, 389 bp, Homo sapiens
gccccccctcgggagtacttctagaattaattaacgcggggatattcctactttaaagagggactataatataagaaaattcattgtaagatgccaatttgaacttatgcattaaattgccttccctcccatattccctctgaaatgaccaaaatattaaaatcggggagaaaacattcacatcagcccatgaaaacaggaaagttatacaaatagtccaaaaacagaaatgaagtttttcaagatatagcttaggtgaactggatttaaataccaatatagaattacggttaatattctgagaggataatagtgttagtcttatgctaggaaatacatgctgaagtatttaggagtgaagtgtcatgatatcaacatactcttaaata

SEQ ID NO: 54961 - DNA, 590 bp, Homo sapiens
  misc_feature 28, 495: n = A,T,C or G
cgggcccccccctcggaagtcttctagnattaattaacgcgggcttctaaaatttatctatgttgttctatttagcaatcatttatcctttttcttgctgagtagtattctgctacccataatataccattgtttatccactttattgttgatgaacaattgggttgtttctaatttttgtctattttgaatgaagcttctatgaacattcttgtcaaagtcttctggtggacatatgtactcatttatttagggtatatactcaggagtagaattactgggacatggttttacatttagttataggaagagctaccaaatagttttccaatgtgattgtgccaattgacactcactaatgatcagagttccctttgttccacattctcactagcacttggtattcttttattcgatgtaaagactattttttatttggtccttcattcacttttattaagaaaaaatattaattgagtgcttatgttatagcangccctgtgctatggagaggttattgttcttactgtcataaacctaatgtttgagttaggggcccacagacttgttcaactatacttgaacaacac

SEQ ID NO: 54962 - DNA, 406 bp, Homo sapiens
  misc_feature 28, 382: n = A,T,C or G
ccgggccccccctcgaaatacttctagnattaattaaaattattcatgctaaagctgaaggtaacaattgctaatcaaaactaatgtcttaagtgtatttattttatgaaggtatttcctagctttgttcactagaaaaggcaaaaacagtgacaaactgaaaaaaaatgagcccccactaaggagtctctaaaaacatttctttaaaagaaccagagcccattgggaggaatgtgtgattccaactcgggcagaaaacatttaaaatcagtctggaatatcttgtcagaaagaaagctatcaatgaccactgatgatgtgttgaaaggactcgggagccaacttagaaaggttcccaatgggattaaaaggaacaactganacagtctagagcacatcacatgtg

SEQ ID NO: 54963 - DNA, 594 bp, Homo sapiens
  misc_feature 23: n = A,T,C or G
ccccccctcggggtacttctagnaattaattaacgcggggccacttgatgaacgatggtagaattgtcattggcagaaccctgtgcttctttccttttcttcataaaatccactcgctggtcagttatcttcactttgaagcccagttcttagtttcttcctatggcttcattggtcagtgtccttctgaatttccaaggatggtacacaataaatcatgttttgtacttttttcctcttactgcattttgggggatttatcattctatgtctaccttttcttgagtacagctttgatatgcacctgttgttacgtggtgatgggaggtcacaggcgtgctctttctggttaatttgatgccacatcttccttgtcttttcagcttgggaaaagggcggcagtggaggaaggcatggaatgcccacagtggtcagttcaaagaacaaacgtgcaattaaaaaactgtagtcagccaggcacggtggttcacacctgtaatcccagcactttgaaaggccaaggcgggcagattgcttgagctaaggagttcgagaccagcctgagcaacatgatgagaccccggctctacaaaa

SEQ ID NO: 54964 - DNA, 454 bp, Homo sapiens
gccccccctcggaagtacttctagaattaattaacgcggggagcaggccttgtcctgccaggtgctgacagagaccacaggctgagtccaggtttccctagaagggaaccatggactagagacagggcagtttgagcatcaataacaacaatgaccatgagggtcagaaacaaccaacaagaaatgcccagcaggtgctgctcccagtgcggccaaatactcagcaggtgctgctctcagtgttgctgggtaaggattcgcctctgcaggagagaggtaggtggggcccagcccagcaccacgtggaaatcccaggcagggtgcaagaccactcaccagcatgccttggaggggaaggaggccccggatccggaagtggctggtccctgcaactcctttgcttgtgtacagcaacatatctgagaacagaaaaaacatcctctgctgcaggccc

SEQ ID NO: 54965 - DNA, 550 bp, Homo sapiens
  misc_feature 37: n = A,T,C or G
ctggggtaccggggccccccctcggggtacttctagnattaattaacgcgggggtcaccagaatcattaagtataaaagaaaaacttgataagttacgatttttcaaggagtcaagccttctgctttgtaaatataccattaagaaaataccaaaaacggctagtcacagaatgggagagaatattcatttcatatatagatataaatatatatgtaattaatatataaatatatataatgattatacataatgacatagaagtcatttccataatatatatattttaaaacttcttacaattcaatacaaatatgagcaaaatatttttaatagacactaaatcaaagaagatatgaatggctaagttcatgtaaacatgttcagcattcttagtaagaaaatataaaataacaatgaaatggatttttaaagctctcttctagatttgttcaactatatacccattagcaactgaaattcaccatatccaaaactaaattcactttcttttctttttcccccaaaaaaaaaaaaaagcggccgccacc

SEQ ID NO: 54966 - DNA, 521 bp, Homo sapiens
cgggcccccccctcggggtacttctagaattaattaacgcgggggttccgcctgaagtgctgggcctgtcttgtcaccgccctgaccgcagactgtgtgtggcgtgcgcgtgggcaccgttcactacacagacccttggggaagccctgagtgccctcatggcctgcccgtgtcctggatcccaccccagttcctcacctgcagagctgttgggggagacacccaggtcgtccagggcctgaaacgtggctggcagggccgggagtccctcaaagacctttgagtccccccgccttgccacctctgtccaggagctgggctcagtggctgcccgggtgtccctgttggtccctgcccctccaaaagtgctgatccctttgattcagaggtgggctttgcagagcacagccccatgtccacctccacgctgtggcaggctgacaaaagcgtcctcggatgcggcctggttccccacccttgaggggagccagggtcttgatatatagaaaaaaaaaaaaaaa

SEQ ID NO: 54967 - DNA, 541 bp, Homo sapiens
  misc_feature 487: n = A,T,C or G
gccccccctcggaagtcttctagaattaattaacgcgggggtttttgctatttttgtgaatgaaaaatagatacaactgttcaacagttaaataacttagacaactacagttcattatacagcccttagaattttatatttccatataggtaactaacctcggttgggtaagttgaagataatttatttcaagttactaagttaatggagttagctgattatcctcatagcacaatcttttaaagcaactgtcaacagcaaattcaacttactatggctttttaaaagattgaaaagtttaccaaagcaattcttgtcgaaactttactctttgttctttcatgcaaagagcatttgactaaccttattacagtgacgcccaatacccattaggaagttatctggtttaatgtctctgtgtataaaattctttgtatgcacatattcaattctactgatcatctggaaaaaaaaagaagggagagantattgagttaagtagtaaatgaaaataacacatttcttaagtatttcagtatct

SEQ ID NO: 54968 - DNA, 590 bp, Homo sapiens
  misc_feature 532: n = A,T,C or G
ccgggccccccctcggaagtcttctagaattaattaacgcgggtagaagattttaaacacacgaaaattgtagagcaataattaactctgacatacctatcatccagtatcaataattataaactaatcatgattcacttccccatctaccctcagattattttgaagcacatgtgtgagttcgtattatttaattcttaaatattcaaagatagataaagatagatataaaagatagataatgtagattctatggaatgtaagattcaacatcataacaaggaagagagtttccaggtaagataaatgcagacaacaggcccatagagacaatgtccagattgggaggtcagaggaagccagactgggagggcataaggagtggaacatggctgggtgcagtggctcacaccttcatgaggctgaggccggtggatgacttgagcccagaagttcgagatcagcctggatgacatggtgaaaccctatctctactaaaagtacaaaaatcagccaggcatggtggcacatngcctgtagtcccagctactcaggaggcctgaggcacgagactcgcttgagcctgggag

SEQ ID NO: 54969 - DNA, 529 bp, Homo sapiens
  misc_feature 38: n = A,T,C or G
ctgggataccgggccttcccctcggagatacttctagnattaattaacgcggggggggcttatattttgatatttgcctttaaagattaatatttattgttctgattgtaaaagtaatagatgcatattgtagaaaaatacatcaaactctcaggtgtctcttataaggacactaatttttaaatcattacaggcgtgagcctccacacctggctgtaatgcagagttctaaggaataaatggaataaactgtgtaaagtgcatgacacagttctttgagtatgaacttcccttcttctgataaatgtgtatgtccaaatttctgtgttacagacataacaaatcttactttttgatttcagggagtgccgaagaatttaattatacaagaatgggaggcaatactgtcattgagggtgtgaatgatcgagctgaaatggtagagactcaaaagaccttcacgcttctgggtaagggaaaatatcccatccaagtatgtagccattttctcttaaaaaaaaaaaaaaaa

SEQ ID NO: 54970 - DNA, 471 bp, Homo sapiens
cggggccccccctcggaagtcttctagaattaattaacgcgggggaggaagttcaaggaagtcattcttttccctttgcaaaaaaagataatattcagtcttccttttttttttcccacaggcctcatgaggaaaatcaaataagattatcttacattacaaaattttcttgcatactttatgcaacagtggaaacaacacaggattggaattagaagacctggttttaaataccaaattgttccccagaatgatctgatcctactgcttagcctatttggatgtcagtttctacatctctaaaaggaaggtgtgctgggttgaatagtgtacaaattcatatctgtctacaatctgtgggtgtgaccttattgggaaatgggatcttttcagaagtaatcaaattaagatgagatcatactggcttagagtatgccctcatctaataactggtgtcattacatttggata

SEQ ID NO: 54971 - DNA, 608 bp, Homo sapiens
  misc_feature 28: n = A,T,C or G
cgggcccccccctcggggtacttctagnattaattaacgcgggagggaggagaatgataaacgaccagacttctttcttttcctttgccctcctccgactacccattccccatgacgtgatttcaagcaaagcatgaggactcaagaaaaatcttccgtgtgaatcagggctagttttttgttttgtttttttaacagaaggaagaggtcagtgcatcttacctttggctgtgtgagaatgcatttcatctttattctttctgagatcttgttccctactctctcctttattctttctttatccctcttgttttcctttctgtaggggctgtttgtcttacatattttctaagtattctgaatgtattgctttctttatctaaatatattcattctgtccagagttaaacgcagtgattctcatcctttttgaaggttttggtttgatttcatgctttctctcttctctcagcactagcgggtgggtgtgtacgtgtatgattgttaaaagtaaatgaatttaagttaatctggggacagcccagagatgctctgtagcatcacataaccagggctaagaccaacctctcctccaccttgtaaagtca

SEQ ID NO: 54972 - DNA, 611 bp, Homo sapiens
  misc_feature 27, 40, 522: n = A,T,C or G
gactgggttaccgggcccccccctcgngggtacttctagnattaattaaactgattctggggaaggacaggccattggcgttccatctatgaaatgtgtactccactttcggtgggaacagagtggtcttctgtgtgctttgggaatttctatttttgaaagtgaagtgcttggttccagttgcaaacatgccctaaaccctacttgtcatgactgagctagacatgctggcaaattatatagattgatcctacacaataacctccaaaatggcacttggtaactataccatcctgctaactgtttgaggcacaatagttttgtaatataatataaagtaatggtgttagccaacacatctttaataagatattgttcgtgcctttgccatatgctacagagcagcctctcactcggtgggccttttgattcctctcaataagattatttcaaatactctaatcctgaatcattgacatgaatacaaaagcctagtgacatctaatagatgcctcttagctntgcttttcctcttgttcctttcctttttcttctctttttacctgacaaaaagctcatagacacttgggctctgtctctcagtagcagca

SEQ ID NO: 54973 - DNA, 394 bp, Homo sapiens
  misc_feature 10: n = A,T,C or G
cccccctcgngggtacttctagaattaattaacgcgggagagcgaaactgatttctgttaggaaaaggagaaacctactgtttttcaaaaaattacagcgtttctgaacagactttctcgagtcatgtcatttcaagtggttctgtttcagctgatgtgcctctgggctgatgtcagaaacaaggaaattgaccacagagagaagcagtcaggacgcttgactttgaacatcacggcgtctcaggcactgatgtgatctaacgtgggtttttttctcatgaccactactttgttctggtattgcattggccgcccaccatggagaacagacatctaccagatcctgaggtgattgcagactctttggcagccacgtgtattccccgaatgaatg

SEQ ID NO: 54974 - DNA, 513 bp, Homo sapiens
  misc_feature 9: n = A,T,C or G
acttctagnattaattaacgcgggggtgcaggtccccataaacactcttggaaatacaggatcacatcctccaccccagacctactgtatcagaatctgctgtttctgacatccccaggtgactcaaatgcacattaagatttcagaagttctgtttagacacccagtcttatgcactgaaaatcagaaagaggagaaactgaagaagattgtgggcattcttgccaccagacaaatggccagaggccccttatgaatggaccatgcctgggagcagctaggacataatatataagctgccaaccgaattgcctgtccatggcttgatagctgctatggtttgaacgtgtccccactaaaattcaggtgttgccaaggtgatagtattaagaggtgggccctttaagaggtgattaggccatgcgactcctcccacatgaacaggattaggtgcccctataaaaaggcgtggcaaagggggtttgtctcacttgcccttccattttccaccat

SEQ ID NO: 54975 - DNA, 545 bp, Homo sapiens
  misc_feature 13, 26: n = A,T,C or G
ggccccccctcgngaatacttctagnattaattaacgcggggcagtgcataacgtacatgatggtgtatgacgattcggatggtagtacgagtcataaactcaaattccaacagcatccagccaggtatttaaatgaatgcaaaagcccaagcacccttcccacccacatattctctgttcctcttagaaaactgtagtaatgattatgttgcctgtctctctcctcctcattagattataaactccctgataagttttggtcactactatatccccagcgtctaaaacagtgtcccaagtaatagacgctcaatgcttttcaatgaagctgtaactttctaactgaacagtgcgtatctaaagatgtcaactactggtaaattgcagccatttattgaaatgtgggtcctactagagtttgcaatttttcaatgatgtttaaatgttgagaattactccaacattttaaataatagattaatcaaaaccattttacaaactctagtataaagacctgatgctatagagagctcatacacattca

SEQ ID NO: 54976 - DNA, 203 bp, Homo sapiens
attaattaacgcggggggacaagaatgttcagcatgtttggtcttgtggataaaagcatgctgaggacgacaagaagtgtgcatggcaggactgagaccaatactcaggtctggtcaaaggatctacatcccgcacagggtgcagtgtagaccttgttcctcttttttatttttttcttcttttttttttttttttttttttt

SEQ ID NO: 54977 - DNA, 404 bp, Homo sapiens
ccgggccccccctcgggggtacttctagaattaattaacgcggggaggttcatggttttcttaattgttatttgcttagccaaatgacttatcagactaggcctcctaatattgttggagtaaagaccaaaaaagaagatatttcagccagcttcacagcagctgaaaatgtagtttcactgcatttcaaatatagtgcttggttagcaatatttctcaaactttaaggtgtatttggatcaatagggctcttgttaaaatacaaattctgattcggcaagtctagggtggaggttgagactgcaatttcaacaagttcctgggtgaccctagggctgctagtccacagaacatatgtagagtagcaaagctttctataggtataagctgaaaaggcaggctgc

SEQ ID NO: 54978 - DNA, 443 bp, Homo sapiens
gggccccccctcggaagtcttctagaattaattaacgcgggtacctcacatgtatgtagaacttcctggtttctagtgtgcgctaaaacttgtcttattctctctccttttagtctcacactaccctggtaggtggtcaaggcagtgttattattcctactttacagataaggagatactctctggttagaggcttgggctctatcccatttctttagaccctaatcccagtgtagtttgtcactagcccagcctgggtgacaaacgagaccctggctcaaaaacaaaaaaaaagattaaaaatagcacccttttacaatgttttgtgaaggtaaactagctgactgttgttcttaagaatagctcatatggaaaatttctaagttggaaacatcttcagaactacacctctacccaaccccaccccctcaaaaaaaaaaaaa

SEQ ID NO: 54979 - DNA, 606 bp, Homo sapiens
cggggccccccctcggaagtcttctagaattaattaacgcgggggcttcctcagggtaactgggctttttatatggagtctggcttcctccagatctagtgttccaagaaatatagatgaaagtggtgaggcttttcatgacctagacttaagaattctgggaattacttttgccgtattctgctggccaagcaagtcaagctagcccagattcaggcagaggagcatacactccatctcagtgtgaggagcagcatgcatgtgcagagagggaaggaactgatggtggccatttttggaaattacctatcacatgtgaaacagaagaggatttcaatgctgaaaggaacctgaaagatcatcttatacgttttctcattttaatggagaaaaatccaattactaaaagtatgaatgctatttcataaatgctattcaagtatgaatagtattcatatttctagtatgggaaataatcatctctccagtatatgcatgttcttcgcctgttttaaaattgtattatttggtgttgttttgcaattgagttgtaggaactctttgtgtattttgagtactaactccttatgagataatgttttgcaa

SEQ ID NO: 54980 - DNA, 593 bp, Homo sapiens
gggccccccctcgagatacttctagaattaattaacgcgggcttcctgtgaacaaaatttttagaggataatctagataatgtagtttttcattgttggaacagggtaacggatggtactaggaggaaattctcaaaaataggctgtgttaacatctctcacctgtatctgtcctcccatcttcttctctgctcctattctctccatggactggaaactcccaccatttgtcattcactggcttaaagctctgactttctatgttcagtggcgctttaaaaatttagtggtgaggtttcaggaaatgaaagatttcaggtgctcaaagataggcctaaaggtcacattcagaaaccccatctcatgtcaaacagagttttttgtttttgtttttgtatgttaccagaccacaaaatatttctggaaaaagtgttcagctaattttttttaaaagactcactttaaaattcatatggagccaggcgcggtggctcacgcctataatcccagcactttgggaggccaaggtgggtggatcacgaggtcagacgttcgagacaacctggccacacagtgaaaccccgtctctgcta

SEQ ID NO: 54981 - DNA, 536 bp, Homo sapiens
  misc_feature 9, 25: n = A,T,C or G
aacgcgggngcagggctatatgtgntgtaggggtgtgcttaagaaagggacaggctggacaagcacatcttttttaaaaagatgaaatgaactataagccaatttgagagtcattatgattatcaggaaatcaaagaaaaggagatccaaggatagaagattcatgggatggctctgccatgggcctgaggtctgtggagataacatttcctctccttcgaaaggaggttagaatagagatatctactttactaggagaaaagcagagaaagatgagaaggaatgaaatagttatcataacaggcatcttaagatgtaaattattttattccttctaaggtaggacagtatatttccacctataggtcaaaatccaatactaaaatgcaaaatcaatttagtagtgagtgaccaacacttaaaaacaaaaacaaaacatgataaaacccagcaaataaaatgataatataatagaagtaaatggaaatgaaatagaatagaattaaaaactatcatcatgcactgatgaaaatatg

SEQ ID NO: 54982 - DNA, 587 bp, Homo sapiens
acttctagaattaattaacgcgggggggaggtagcagggtctccagaaacataggcccttaggagccacactaaggacatggactcggctggggcatgatggaaagccttagtggagtttttagcggaccgatgcaatgatctgaagtttcagttggttcagcctggttgctggatagaataggctctggagaggccaagttagaagcagagttgggtagaagggtatagccagcatgtaggagagatgaaaatggatgtagaaagacatgattagattctgggtagattattattattttttggagacagggtctcactctgtcacccaggctggagtatagtggcacgatcatggctcactgcagcctcaaactctcaggctcaagtgatcctcttgcctcagcctcccaagtagctggaactccagatgtgcaccaccatgcctaactaatttttttattttcttgtagagacaggttctcactttgttgcccaggttggtcgtgaactcctgggctcaagtgatcctcgcatcgccctaagtgctgggattataggcatgagccagccaccacacctggccct

SEQ ID NO: 54983 - DNA, 603 bp, Homo sapiens
  misc_feature 538: n = A,T,C or G
cgggccccccctcgggagtcttctagaattaattaacgcgggtacctattgtttagtgttcccaatcagtatcctgcaacactttcatcacagatgagattcccatctgcaactggatagaatactgatatgagttagaattacaggatgttaaatgtgctacagattcttcatttttacagatgatgaaattcgggctcagaatagagtggcctatccaaagttacacaaacaattaatggtaaatccaaggctagaatccatgtctagtggccatctgttagcaatataatggcattttccaaccaactcccataaagacgaaaattcccacccttaaaatcacttcttatttgttttacatttgtccccagaaagccccaagcaaagtaccaatatgcaagtcaggagaatggtgcattcttatagcattcattgccataaattttgttcttagagaagtttctgatccttagtagaaagtagaactctgagagaattgagaacacttgatgttgggagtaaaagtcaagaactntctagaacatttttaagtatgtgtttttcagaacacttgtgatctataacatgtgaattatggac

SEQ ID NO: 54984 - DNA, 559 bp, Homo sapiens
  misc_feature 21, 42: n = A,T,C or G
ggtaccggggccccccctcgngggtacttctagaattaattnaacgcgggggttttcccacactgtaattattaagttcttacctggtagctgcacagatgcaaaaaaaaaaaaaatgttctgtggaaaattctgtacctgccaatggtagattccaagttttacttccaaagagtgtaaacatgggtgttttaaaaagtatgtctcaatgcaaataaatgagagctaagtaaggaaccacatttttctaccctgtaatcttttttactctgtaaactaattactttccatgctagaatgctcacacagcactggctacgtaatttgtagggcccaggtaaagtgaaaatacagggcccgttacgcaaataaatattacaaatttcatgatggcaacagagtgagactctgtctcaaaaaaaaaaaaaaaaaaagaatatggaagttataaaaataatctgtgatcatataatgactgtttgccccaaaaagggcattactttcctgcttcaaagtttgtattttttaactaaagtgtttgtgggatatggctgcattt

SEQ ID NO: 54985 - DNA, 597 bp, Homo sapiens
  misc_feature 23: n = A,T,C or G
ccccccctcgaaatacttctagnattaattaacgcgggggggccagtcaagtagcctgcatctaggtatccatatggaggtgattaccaggaagaagttgtgtaagacagatacctgaatcaaccacattaaagaactgggggatggagtggggtgtagaactggaaactgtctcaagggtgactgagccctatttctggtatgagaaagtcaaacttatatttaatatgggtgtcaaagtgctgggattacagacgtgagccaccatgctcagcccacagtgaatacgtttttttgataatagtcatgagtcttcatgttaagagttttccagttaaatctttatcacaggatcctattcactgcattctgtcctttcttcaacttagttttagtcctctgcataattttcacataatttctccaattagtccaatatactgaagctgatcatcagggagaagaatatgtcacagttgaaaccccttttgtggcaacaataagctaatcatttaaagattaataggcttttattacagaaagtaagtattctttatctaatttcagatattttataactgtgaagttttttcccct

SEQ ID NO: 54986 - DNA, 617 bp, Homo sapiens
cccccctcgagagtcttctagaattaattaacgcgggctgcctcaatttcagaacttcttattggtctgttcagggactcaatttctccctggtttagtcttgggaggttgtatgtattcaggaatttatccatttcttctagattgtcgagtttatgtagatagaggggttcataatattgtctgatgattgtatgtattttgagggagggtcagtattaacatccctcttgtcatttccgattgtgatgatctgaatcttctctacgtatcaatatgtcatatttcaggcaactgtaaccaataggaaagagataaaagacttcaaatgaagaccctaagatagctatcctaaagactgagctttgtaaccgtatcaggtatcatggtaaaacactgaaaagtttgcactttgttgtcatttcttaatcgaacatacataataagtattacaaactataatctacaatacagacataccttgttttatcataatttgctttatagcacttcaaacaatttgcgttttctttttttttttttttttggcaaggtattgttctgtcacagagtctggtgtgcagcagtgcagtcatggtccactgcagcctcaattt

SEQ ID NO: 54987 - DNA, 604 bp, Homo sapiens
cccccctcggaagtcttctagaattaattaatgctaactacccaaggagagatatccagtagacaaatagttgcatgagtttagagatcaggagagaggcctgggctagagatataaatttggagccatcagcctgtaaatgcatttaaggccatgagagtagatgagatcattaaggagtgaatgtacagagaaaagataattatgaactaaaatctagtacattcaagcgctgaaaatcaggaagatgaggagaaactctgaaaacgaaatgataattggctgactgaatagaagaaaaatcaggaaatacattgttccagaagaaaagtaaaaagagttattcaaggaagaagaagaagtcaactataacaaacagagaaatgccatgatttaggagagggaaaggagcctccagatttggtgaggtgtcagatcaagcagcttaactgtgtacagctgctccaccaaatctggagtttcgtttatatcctaaatcttgggcttgtgtggtttaacaagaaaagattttcactcacgacacaagaaaaaatgaaaaatgttgtattgaacctctattttttaaactgaaagccaaaaaaaa

SEQ ID NO: 54988 - DNA, 579 bp, Homo sapiens
ccgggccccccctcgaaagtcttctagaattaattaagtggctctgctaatctgagccaagctcacctggtctcatctgggctacctcatatacctacaatcaatgagcgaggtagtctaggggtcagctgctttagaatggtcttggctgtaaaaatgtctgttttgcaaggtctctcaacctcccaaaggacagccctggttagttttcagaatggtgtcagatttccaagaaagaaggcagaagagcacaaggtctcctaaattcttggctgaaaattggcataccatcactccccacatcctactggcaaaagtaagtccaagtctgtattagcctggttttgcattgctataaaggaatacctgaaattgggtaatttataaagaaaagaggtttattttcgcccacagttctgcaggctgtgcaggaagaaagcttccaccatctgcttctggtgagggcctcgggaagcttgtaatcatggtggaaggtgaagggagaaccagtgtatcacatggtaagagagggagcaaggcataaaatgtaccacactctttgaaacaacgagatctcaa

SEQ ID NO: 54989 - DNA, 560 bp, Homo sapiens
  misc_feature 37: n = A,T,C or G
ctggggtaccggggccccccctcggggtacttctagnattaattaacgcgggggaggcagagacatagtcggggtcagtggtcatgagtgtggctttgagcccaaaaacttggtttctgttccctactttgccactcagtagtgcatgactttgagcccaggagtttgagaccagcctgggcaacaaagtgagaccccatctctaaaaagaaaacaaaaacaaaaacccgcatttttattaaatctttttttaatcttattaaagctttctctaaagctaataagaagaatctgttaatgtatctgttttataaatagtcaaaatactcaagctttatgaaaaagtgggggtacacttaaaaaatctcacaagaaggaactgttttgtctttttaattagtaaatatgtttgtgttagaagcattaacatccttggttccaagctattacttggcattaactctaacttttccttaatgggcaaaattgttaagtgggtaaagtgtgttagaaatgtcctctcagcaggaccagccagatttacctgctttgcattgcct

SEQ ID NO: 54990 - DNA, 415 bp, Homo sapiens
  misc_feature 27: n = A,T,C or G
cgggccccccctcggaagtcttctagnattaattaacgcggggtggggggaggcgggcaaaactctgtaatgacaccattgtattaacctccacttatgacccagccaagggcagacttttaagttttcccagctgtgtcattaagtttgttgctctggctccactgacatgacaccatcacaatcccagccacagactaatgactgcagttgtgaaggcagcatgttatagaagagagtacatagggctaagggtccagaacaccagattttgtcttcttgttttcccataattacccatgtggcattaggcatggccttgaacctttgtgtgtctcagtttccccacccataaaatgggaattgtgccctcattccttttcttagaagtttgttgtagaaaaaaaaaaaaaaa

SEQ ID NO: 54991 - DNA, 615 bp, Homo sapiens
  misc_feature 25, 38: n = A,T,C or G
ctgggttaccgggcccccccctcgngaatacttctagnattaattaacgcgggcacatagaaaaaataatgcaaataatttttcagtatgctcttatgacaatacagtcttaatggaataattataaggaacaaaaacaacaaataaatcaaactttatttagtaggtttattgttggttatgttattggtgaaactattttgtgcgtattgtaggatagagcaaatgaatataaagttgatgctgttgggaactaggtttgctgaacaggataaggaaaacacaaacatggaatggggaaagggaagaaggttctaagcaaaaaatctgagggatgctatcttaaccattatcaattagcattatcaataaagccataaaccttacgatgtgatgcaatgggaaatacacagtgtcacttacgtactattattgcctaaaatcatgagattaagtccacaaggtggcacatattacaatcaactgggttggactcttgaagaaaatgccttaaccaaaaaggtgggaggaaagtatattaaagaaatagtactaatacatgtaatgtgtgattcttattggatcctggactgagaataaaattaaacagctatc

SEQ ID NO: 54992 - DNA, 367 bp, Homo sapiens
attaattaacgtggggggaggtacatgaaatcatcttagcttagctttctgtctgtgaatgtctatatagtgtattgtgtgttttaacaaatgatttacactgactgttgctgtaaaagtgaatttggaaataaagttattactctgattaaaaaaaaaaaaaaaaaaaaaatttttttaaaaaaaaaaaaaaaaaaaaaaaaaaaaaaaaaaaaaaaaaaaaaaaaaaaaaaaaaaaaaaaaaaaaaaaaaaaaaaaaaaaagcggcccccccccggggggaatcccaatttccccttaaggaaacgattaaaaccccccccaatgggccggtttttaaaaactggaaaaagggaaaaaacctggg

SEQ ID NO: 54993 - DNA, 579 bp, Homo sapiens
  misc_feature 32, 51: n = A,T,C or G
ccccctcggaagtcttctagaattaattaacngcgggcctgaaactaccanataaatgaaacttaaagaaattaggtagggaaaaagaaaatatattaaagaagccatatgaaattcttttggtaagggggaaatgcataaataggtatgcaagtaaataaataagcaatcaaggtaacaggtgatattttacaacaaatatctgaaatatgttaaatgtgccttaaaaatcaaccaaaaaaaaccgttaaaaacaaagcaataaccattatttttcaaccattgcatttcatagtttgtgaaaccaatattacctgcagaagtaaccattttaactctgtaagcagataagcaattaacagaacagaaaagctctgtcttccccaagctattggtattttcaatcatttctgctgaggatctcaatgatttgcaaagcgcacacggtgtaattttggctgatttctattaagagaataaaacaacattcatttttaacaaattcctagtaaaagcataattcttcgaaatgtttatactcaacactggtgaaatattggaaatcagtgatttttaaac

SEQ ID NO: 54994 - DNA, 578 bp, Homo sapiens
ccccccctcggggtacttctagaattaattaaccggggcctcatgatctgtctgcctcagcctcccaaattgctaggattacaggcgtgagccatcacacctggcccaataaagtgatttttaaaaagccaacaaagacattataggtgaaaacccttcacaaatttgcttcatgcacataatcacaaacactaaacttcttacaagatattagtaaattgaatccaacaaaatgtaaaatggataatgcatcatccccacaatactagtgtaggctaacattttaaaaattgatccgtgttggccaggcgtggcggttcacgcctgtaatcccaaaactttgggaggtcaaggcaggcagatcagaggtcaggatttcgagaccagtctgaccaacatggtgaaaccgtgtctctactaaaaatacaaaaattagctgggcatgatggcacgtgcctgtaattccagctacacaagaggcggaggcaggagaattgcttgaacccgggaggcaaaggttgcagtgagccaagattgcaccactgcagtccagcctggacacagagcgagactccatc

SEQ ID NO: 54995 - DNA, 597 bp, Homo sapiens
ggtaccggggccccccctcggggtacttctagaattaattaaaaaaacaaactattgtagttaaaaaggaaaaaattagagatactatgtaaaaaagagccaaaataccttgtattttatttgaaagacatatctccataagattacacaacctcgtgtaggataaaggactttgctttgcttggaatttaaacaatttaggctcttaaatgtcctaaaattctctgtagctaagaaatttttatattggttcctaggaactaggaatccttaaattaggccctacatttgcttacaagtttattttccttggcataaaattttttagtttttacattactggttatatttgatcagggttctatttaaataggcacaagttcaagcaaagatcagattctgcttttagcagtgtgtactcagacaggaagtattaaaaggcaggcagaaaatcctttataaaattactactttcaatgcattttcccacgttgaaatgcttctgcagtttataattaggcaaattactttaattataatcaataatgctgttcaaattactataagaattatacagatatttataccaagagacaa

SEQ ID NO: 54996 - DNA, 597 bp, Homo sapiens
  misc_feature 27, 539: n = A,T,C or G
cgggccccccctcggaagtcttctagnattaattaacgcgggagcagacttttctcttttcatgaatgatgcttaagaaaattaaaaataagcaaaaagagagagaaagagaatgctgcaggtaattagttgctttcccagatgcggtaaggtggtgtacaccccaggtgatatccaagaggaatcctaggggtacaaaagaaaatattagactttctttttcattttatttaatactttatctttctacttttatctgtttaatgatgtacataatatagttatatatttaatcagttatatatttgaggggagtggccactgaaaagcaagttttatgagtgcataattttaaaagttcagagatcactccagtggaccgcaagggggagggattcattctatactttgagatcatttattaggaaaaataaaacatactaaagaaaggaaaagaaaatatagcatatatgttacattttaaaaattaaatttttaggccaggcatggtggctcatgtttgtaatcctagcactttnggaggctgaggtgggaggatcacttgagcccagagttcaagaccagcatgggcaacat

SEQ ID NO: 54997 - DNA, 595 bp, Homo sapiens
cccccctcggaatacttctagaattaattaacgcggggaggggggagaggagcagaaaaaataactagtgggtactaggaaaatatttattaaaaaactaaagtgaatgtggcaaaaacaaaaaaacaaaaccaacacatacctttaaatagcaagcatatgacagactggatctaaaacttttctaactccattaatctggtctttcacaccagctgtagtcaacaccagctatagtcaaggtgggcttctgagggaatccatgtgtaaaaaggtcatctcttctagtggtgagcaagaactatcaacgctgtatgacttgctttccatttacttgtatcattaggattattgtcaatctctggtactttttacaagtatctttgtcagctatctttttgtactgtgtagtttagctacattagataatttaatacaaataaatccagtcaatcatgtgaatatgagtggaaactcttatgcattgacaactctccctcttctcttggggtatctcttacattgtgcgtgatacctggcaacatatatgagggcaaactccatgtccattagtgaaatgtgatgtcctctaatt

SEQ ID NO: 54998 - DNA, 498 bp, Homo sapiens
cgggcccccccctcgaaagtcttctagaattaattaacgcggggaggctcagggagattaagtaatttgccccaagtcacacaggtagagaacagcaaaatggaaatccaaacccaggtttgtcagacctaaatcctgtgctcttaatcatgaattttaatggcctgtcctcatgctaattcaaaagatgatggaatcctcttcttctcaactggcctttcagtaaaatacatttagaaagtgtttgccatttaaacttatggttcaaaaagtaattctgaagagtatacactatgaggtttaaaaatatctcttaagaattaggagcagtggctcatgcttgtaatcccagcactttggcaggctgaggcaggaggactgcttgaggccacaagttctaggatcacttgaacccaggagttgaaggctgctgtgaactatgatcatgatactgcattccagcctatgtaactgagactgtctcttaaaaaaaaaaaa

SEQ ID NO: 54999 - DNA, 600 bp, Homo sapiens
gggccccccctcggaagtcttctagaattaattaacgcgggcagttgtgtcaactatcagaatttgcacaagcaaaaagtaatttgccatctccagtaaaatggaaagagcctaaaagtatgtcatcaggtacacctgggttcacatctctctcctacttctgactagccatgaaatgttaagtaaattattgaagtgctctaagcctcaatttccccacctctcaagtaaaaataataatacctccctcagacaaccattcaaaagatgtttagtgtgatttgcaaggataaacaattccaaacacatatcagagcactacgtaaagacagagaagttactaatttccccagcaatccctatggttgctaccatgcctctttccaactattttatcaatattttaaataaacaacttaaaaattgtattaaaatgccagttaagataagaaaattaccaactgacttacctatcttgggacaaagggtgcttgccatgctgatacacaggctatttgcccctggttttaaaatgcttttcagagatatgaccctattagatatctaatttgtcagagctgtaactatgtgtaagcatat

SEQ ID NO: 55000 - DNA, 621 bp, Homo sapiens
ccgggccccccctcggaagtcttctagaattaattaaagcctcccccgctacttttccccatactgtttactcactgaagaagccgagttgtttagcttagagaagtttccagtctggatttggcagatggtttacttgtggtgtcattaatttatccctccatgcctggtttcctgtaagacattggtttaaactagagggtcggccggcatggtggctcacgcctgtaatcccagcactttgggaggctgaggcaggtggatcacctgaggttgggagtttgagaccagcctggccaacatggagaaaccccgtctctactaaaaataaaaaatgagccgggcatggtggtgcatgcctgtagtcccagctactcgggaggctaaggcaggagaattgcttgaacccagtgggtggaggttgctgtgagtagagattgcgccattgcactccagctctgggcaacaagagcgaaactccatctcaaaaaaaattaaaatttaaattaaaaaaataaactagagggttgattttttttttcttttattggtgaactacctcttaggtgatgctgagtgcttccacagcatcgcttccatcaaaactgatcagtggtttca

SEQ ID NO: 55001 - DNA, 448 bp, Homo sapiens
  misc_feature 19, 32: n = A,T,C or G
taccgggcccccccctcgngggtacttctagnattaattaacgcgggtagtacttgggatatatccataaacaaaacaaatatccctgctgtcatggagtttgcagtcttttgtaatatttttccattgtttaaatatctaatagcaagcacacattactccggctcctcctagttgcctattcttgggcaagttccttcacctctccaggtagcagtcccttcatctgttaaagtataaataatcccacctcccatgtagaagtatcatgagaatgatgacacaatactcagaaatcatttagctcagtctgacctgacacacgagtacccagtgttagctattattatttaaccatatttttagagtagttatacatatatatagtgattataaaatgttctaagagggctgggtgcagtggctcatgcctgtaatcccagcactt

SEQ ID NO: 55002 - DNA, 418 bp, Homo sapiens
ccgggccccccctcggggtacttctagaattaattaacgcggggccagatgatgaagggccttgtagacaacagtaagaattttagactttggccttaagaatggtgaaaaatcagtaagattttaagcaagaaaagattatgatcattagatgatttttaaagatcatttggtaacaatgtagaagatagtttatttgcacagtgacaagggtggaaatagagaaaataagttactgcaatgaaccagacgtgattattagacttagggtaccagtggtagcagcagtatgatgaagaaaggattcatttaagaaatactgagtaccggggaggcggagcttgcagtgagccgagatcgcgccactgcactccagcctgggcgacagagcgagactccgtctcaaaaaaaaaaaaaa

SEQ ID NO: 55003 - DNA, 605 bp, Homo sapiens
  misc_feature 552: n = A,T,C or G
cccccctcgagagtcttctagaattaattaacgcgggattcttataattaattgaatgataagcataaaataaaggagaatttataaattgccaataaatcacaatgctggaagagagctttctttcttattcagccatctctttttatagatgaggaaattgaggaccaagagattaaattatttgtcctttgttaacctaattttttaaaagatgatcaattatctgttaggcctgtggtatgcaggaatctacctattttattggctgtggtgccttatggcagttaggtcagtgattgcaaatgggcttgtggtgtctactcttagagtagactggataaactcttctgtttgtcaactacagcctggcagtgagctggacaacttggaggagattttggatgatttgcagaatagtcaattaccacagcttttcccagacacgaggccaggcgcccctgctggatcagttgacaagcaagccatcatcaatgacctcatgcaactcacagctgaaaacagccctgtcacacctgttggagcccaganaacagcactgcgaatttcacagagcagtgagtatgagaaatggctggttatgc

SEQ ID NO: 55004 - DNA, 554 bp, Homo sapiens
  misc_feature 16: n = A,T,C or G
cggggccccccctcgnaggtacttctagaattaattaacgcgggcagctatgaaataatgaggcaagaattttttttcccaaagtttgtgtttgatacatgcacagatctagacctcagaccctttctcaaaaagccatcaatagctacaaaactaagatgtttctggtgaactgtttaaagagggatgaggacaccgaggtatctgtgtctgtgccagagctaccaccaagggactctctcctccccttggtctagtcggcccctcagccctggtgtccccacagccaaggtgcaggggattaggtgttctccgtggctgctgatggggacagcaggaactaggagaggcccgacattgctcctttcttttgtaggccggtctctttccagggcccaggggtttcagcctcatagtagctatcatacagttggccaagaaatttattactgtgctgaaatcctctttaattgctccattctcatgctaatctctagtaacagatcggccaaaaacatctattacatcttcagtattgctagaaatctgacgtg

SEQ ID NO: 55005 - DNA, 558 bp, Homo sapiens
  misc_feature 24, 506: n = A,T,C or G
gccccccctcgaggtacttctagnaattaattaacgcggactctaataaatgtattctattcatttttgatggtttatttacaacctcttaataaaacactgccttgtcgagatggaatggctatttgatccaaggactccaagtccttatttatgttatctctccatgtagtatgctaatgcatttatggcctgtcttgtcagttacatttacactccgtgacacctgctgccttcctggtagcaataaaggctgaagaacgtggtgaactttcctaactcggattttaagcacctatttaagaattaacctcgacccttgaaagacaaagtgaatgatgtcgctttgggatacaaaggaataaacgatgttcatagcttttctccctctttcctaaaggatctaccagggggtcctcctcacttcatcctggatgatataagcagatttgacatccaacaaggaggcgcaggtaagagtgcaacatcttccctccgtgccctgnataggaagtggtggagggtggtgcttacccacagagtcctgccccacttctg

SEQ ID NO: 55006 - DNA, 461 bp, Homo sapiens
ccgggccccccctcgggggtacttctagaattaattaaaaactgatattcaaattatacatgcatatataatttaagaacatatatcctggagatatatatatatatatatatatatgtatatatatatcctgttcttaaattttttttcagtagactaaaactctctcaaaattatgtttttaaaattagactcttaaattttacttcctttcttagaaattgggccaggcacagaggctcacacctgtaatcccagcactttgggaagcagaggtgagcaaatcacttgagcccaggagttcaagaccagcctcccgaagtgttgggattacaggagttcagccaccacacccacccatacagccacagagcccaaatcttgattaatgggagaaaaagatttgtgtgacaagtcttggttatagcttttggttctctgtggcatgaatatgcaaatgg

SEQ ID NO: 55007 - DNA, 625 bp, Homo sapiens
  misc_feature 27: n = A,T,C or G
cgggccctccctcggaagtcttctagnattaattaacgcggggaagaaatcagaatttaggacactgcagagtagggaactgtgcagagagggtctcccagaaatccacaagggagtgtccagtgagcagagaggctgcacatacctatatcaagaccacctaagccttacgcagcagctgctatggagttgagaaaacagagatactagacagtgtaccgtgctaggggaaaaaaacaatgctgaggactctcaagttttagggctgccagaatttaaagatctcattactaatggcattcagctgatgtaccaaaaggttcgcccttaaaaataaggaataagtatataactaaaataagacctactacagatctctcctaaaaagccacaggggagacagagcttggaggctaaggcccaccacattgggaggcttaggaaacaccctggacttgtccccacaaatatacattaatacagcacaaaactacatctacagaagttcaaaattatcattaactgaactgcctgctaaaaacaagaaccaacactcttcagaggaagatgacagaaccaagagtctctacacattatcattcaaaatgccaatatagtaaaaact

SEQ ID NO: 55008 - DNA, 531 bp, Homo sapiens
cccctcgagagtcttctagaattaattaattattaaaatgaggataagtcaaggaggatatcaatgaatagaaaattttgtgagccataattatacataaaccatgcaactctggaatctacaagaatacagtagattattatttttaaaaatcatttacttttttaatttcgtgtaggtggagttataattttccactctattgactttggacttggccacaagacttattctggccaacggacagtaagaaaacatgatgtttgaaacaaccaaacagaaatgtttaaagacattacaaatttccatttgtgtacgtcttttcagttctctacatgaagtgaacaaattccaaatcagagctcatcattcagtctgagcctggaagaaaaagatacatgaaacagacttgattccaactcatagtcagaagtgagtggagcaataggcatgtaacaggagagagaaataaacaaccgtccttttgggacactgagatttgcagttgtatctgatgtatcatcatctagc

SEQ ID NO: 55009 - DNA, 512 bp, Homo sapiens
ccgggccccccctcgaaagtcttctagaattaattaatttaatttagttaactctgtatctagtgtagttctcaatttttttgtcctaaatgcaaagaagacacacctattcttacctaacacttgcctctaaaacaaaaacctaaactattaactcactaaataaacatataaaaaaggcccagatgtaactaatcacctattgctaatgtaaaacaaaactgaaatttgtcttctttttatcatttctgggccaaatggtttcaatatgtaaaatgcataaaacaatgcctggcagatagtaagcactgatatgtatttgttatcattaccaatctcatcatcattacttctgtatcttaactgacccttctggctgtttagataaaaccccaattctatctggagccctaacaacagtacaccaacccacgttccaccatgaaactctcttccacgaggcaaggtttatcagataagactgcatggataaaaagccaaaaaaaaaaaaa

SEQ ID NO: 55010 - DNA, 598 bp, Homo sapiens
  misc_feature 24: n = A,T,C or G
gccccccctcggaagtcttctagnaattaattaacgcgggatgggagaaaaccattcacaataggagtaaaaagtaataataataatgctgtggacctaataatcaagttaataagaaatatgcagaacaaatattcataaaataagaaaattttaatgagacatataaagacttgaaaaatgaaaagatatactgtttctagataaaatcactgcatattgtaaagatttcctccaaattaatctgtaaacttaatgtaattacatttaagatccaatgggacatttttaagatgagaaaagtattataagcatagaagataaacatatagaaaaacccagaattattttagcagtatggaattggtcaaggaaattatagcacatcgatacaaagcaacacatagcagtcatttgaaatgtttgtgtagctctaaatttagggacatggaaagaatatcacgaaatatcaagttgaaaaagcaaattgcaactttgcttattttagtttgagcccatttggataaattaaatacataaacaaaaaaataaagtcttgaagatatacatcaaaatatcaaaagttatttttaagaaa

SEQ ID NO: 55011 - DNA, 530 bp, Homo sapiens
cgggccccccctcgaggtacttctagaattaattaacgcggggctgtattttggcttcagtggtttccctgcaactcgatctttatgccttcggctagaaatgtgctgcttgagttgaatttctgaattaacatgaacatcacagatttcacaatgaaatgtcttgttctgtagtcctgaccccttactgccattctgcatctttaatcttgatccaggtctaggataggatttaattggaccagccccattacgagcttcaaccatggtcttgtgtttagatcctgtgttgtgtgcctctagctgtgacagggagttcacagccactttgcatagtgaacaataaagtaattttttggctttttcttcttctgattcaacaacagtaccgggagctccatttgtgctcttggagggagaagtggctgctccaggtggcaggggtgttgtgccagatttgaggagaaatgagccactttcagagcttgatggctgactggaactgctgttgaatcaaaaaaaaaaaaaaa

SEQ ID NO: 55012 - DNA, 413 bp, Homo sapiens
cccccctcgggggtacttctagaattaattaacgcggggggtctcactatattgagacccaggctggtggcaaactcctgggtccaagtgatcctcttggatcctcccaaagtgcagaggggtcactctacaggcatgagccactatgtccagctggattgcaatcattatttattggaagccacgaaaacggatattttaaggaatatataatcaagttaaggatttagaaatctatttggctttgttagttgttatagtgtttacgtataagtaaaatcatgtaaaaatgtttaaagtgccttaattttaaaacaagaacatatggatatagattttgatataatcatagatataaagctataaatatattttaaaagtgaaaccccatctctactaaaaaaaaaaaaaaa

SEQ ID NO: 55013 - DNA, 510 bp, Homo sapiens
  misc_feature 28: n = A,T,C or G
cgggcccccccctcggaagtcttctagnattaattaacgtggggtaactgtgggtgatcttgcatgatatggtataacaaatagcaaccttctcaacaaggatagggtcaaaggtcagcagtagctgagaaaaaattaaaatgtttttattgggttgtaaaaaacctgcatcatcacttcaggttttttatttcatatgctgaggttatagctccttatgtaaattataaaataaaaacccatgggagtgagtaagctcatctaccagacccacaacagatttgaaaaatgattgattccacaacatttaatgcagaacatcaattgataattgatcaaaatgtattcaggaaaagcccaaacatgcctgaagctagttttgtcataatgttacaggtaacattgcttcttgtgcaagaatcttcctaaaaagacttctgggtttgtttcaactcagctgagctgacacaagaataccctgaaggcttcttgagaactcaaggagcagag

SEQ ID NO: 55014 - DNA, 346 bp, Homo sapiens
attaattaacgcgggggagaaatattattaaaataaagaaaatagagggctcagttatgaaagtacatagataataggtccgggtcgcggtagtctcacacctgttaatcccagcacttttttaggcctaggcgtgttcggatttctttgttttggtgattttattctttctttttttttttctttttttcctttttttttttctcctatttattattttttttcttttttttttttttttttttttttttttcttttttaattttttttttttgcttttatttttcttttttttttttttttcttttattcttttttttttttcttttttctttttgcttttttt

SEQ ID NO: 55015 - DNA, 496 bp, Homo sapiens
cccccctcggaagtcttctagaattaattaacgcggggtgccttcccaccctctagctctatgcccaaatgtcacctctttagggacaccctctctgactaccctacctcaaggggcctaccaaagtcaccttgcttatttctttggtagctcttatccaagtgaaatgatcttgttttgcatttgctgtacaagtaaatgatcctgacatcaaccttgtcatgttaatatgatattacccccattttactgatagggaaacagaggcacagagaggttatgaagtaaatctctgaagccacactacaggctgggggtggagctgggagtaaactgaagttcagtaaatgcaaagttcccgctctttccttgccatcgcagggagtctctccttaatgaatggagggtcctggggtgacctgcattcacaactcctgtatgcacagcctcattcaaacacagagaacacaagaatcccagctggggggggtggggg

SEQ ID NO: 55016 - DNA, 370 bp, Homo sapiens
  misc_feature 44: n = A,T,C or G
cgggcccccccctcgggagtcttctagaattaattaacgcgggnggaagccaaaagattggacacccctgatataaaacattgatgaaaatattgaagaagacacatataaatggagaaatagttcatgttaatggcttggaagaattaacactgataaaatgactatactactgaaagtgatctgcagattcaatggaattcctatgaacataccaatgacattctttacaaaagtagaaaaaacaatcctaaaatatgtatgaaaccacagaagagcacagacagcaaaagccatcttgagcaaaatgaacaaagctggatgcattatgatactacctgacttcagaactacagtaaccaaaacagca

SEQ ID NO: 55017 - DNA, 604 bp, Homo sapiens
  misc_feature 37, 563: n = A,T,C or G
ctggggtacccgggccccccctcggggtacttctagnattaattaacgcgggtaaaagaggaaacgcgtcccctccaggggggaaaggttatttaatccttgcctccctggcttctggcatatgtgcgtgtagcaaggttagagttgagaacagatgtgtttctttgtttgtcttaccatgtggttgttcaaaaaagttctgaaaaacctcacaaacttccttggggaagtttcagtgcaagagcctgattcactcactgccataaaagctaagactgttgtgagtgtgtttcccatccccaacacccacctggatttcacattgtttttacaagccattcttcccatctctgtattttctctgtctcccagtcatcttccctcatctccagtgccacagcagcagctctactgagctctggggctgtggactactgcctgcacgtgctcaaatcactgctggaatattggaagagccaacagaatgacgaggagcctgtggctaccagccagttgctgaaaccacatactacctcctccccacctgacatgagcccattctntctccgccagtatgtgaagggtcatgctgctgatgtgtttg

SEQ ID NO: 55018 - DNA, 311 bp, Homo sapiens
  misc_feature 25, 27, 38, 281: n = A,T,C or G
ctgggataccgggccttcccctcgngngtacttctagnaattaattaacgcgggggtggtgacacagataatcagttcctaacacacagaaaaggaagtagaacctggattattaatggctgctatctgcccatgacaggcagatttctaagaagacccacgtccctcccctaagtgaaggcaggacccgtgaatataatgagatgtcactcccatgattgcgttatggtacgtaaagaaggtgtagggattttgcagacgcaattaaggactctgagcanatcaaaagtgacatgattctcagcgggccc

SEQ ID NO: 55019 - DNA, 610 bp, Homo sapiens
gccccccctcggggtacttctagaattaattaacgcgggggatgttgtaaagcaaaccctctggatcccaacaacccattcccttaccagacaacagtactttcaactccctactgccaatcctgtctcaaacagtaagtcagccacctgttcatacagagaaccttagaaagtcatgcaatcccagcctgggcaacatggcaaaaccccatctctacaaaaaatacaaccatcagctggatgtggtggcacatgcctagctacttgaggggctgaagcagaaggatctcttgagcccaggaaatcgaggttgcagtgagccatgttcacaccactgcactccagcctgggtgacaatgtgaaactcaaaagaaaagaaaaagaagaaaaatgaaaaaaaaatttagaaaaagaataaaaaaagaaagttgtgcaatctttccattttcctcagcctttcaggttttattcctggatgaccctaccagccataagactgggtccttgggtaaccttgccttggacccctgaactgtgtcctctgagttcctttggcctcttcccaaaaaggtctctgaggacctgtgctttggcatgtatgagaaggctg

SEQ ID NO: 55020 - DNA, 592 bp, Homo sapiens
  misc_feature 24: n = A,T,C or G
gccccccctcggaatacttctagnattaattaacgcggggatgactccacttcatcattgtgacaacatcagtcaatctgaggctgtcacatactcaaagaatgctcaggtatgtaggattattgaactctacataaaatagacacaaagcacaatgctttataggccttatatctgttttccccaatattttcaggctcccccaatacatacacacacttcaattcaattccattgtcacttctttttcatatcaaagttctggtgctagactcctcacttcacctccaaatccctagattctgcttctaaatttctaaggggtagaaaccacatcagaatttaaatgaagagccaataaaatcaggacaacattctctcccacggaatagtgcacagcgaaaaccacttaagctattagagaccgtttttggaaaggcaagcctctagactcccagctttattctggatattgagattattagaaatctgaccttcaaatgtccagtagtattaacataatgaggtaacagcagtgacaatattctaactgatgtgcatgttaaatcacttattctacttagcaactggg

SEQ ID NO: 55021 - DNA, 580 bp, Homo sapiens
  misc_feature 27, 38: n = A,T,C or G
cgggccccccctcggaagtcttctagnattaattaacngcgggaagtcataacggtaacaaagtaaagtgtggcttaatgctgtgatataggcacttagcaaaccaggccaatgtctgtttgttttattaaggaccattcccagaaactaacaaaagggtaattgttttccagaatagatgtctatctacatttataactttaatccatttcttttgtcttctacctcattaattttttaacagatgcaaaatcattaagtagggagccagatcgtacttaacatgcaccaaaaacatagttctcaatcccagctgtatgttagaatcagttacctagagacctttaaaaaaatattgatgctcagatcccactcctaaacaattaaatcagaatctctatggatgagacatacacacaggtatttattttcttatttatatatttaaaaaaatacagagtctcactatgttgtccaggatagtctcaaactcttgggctcaagtgatcctcctgcctaggtctcccaaagtgctgggattacaggcatgagccaacctcgccttgcccacataggtatt

SEQ ID NO: 55022 - DNA, 402 bp, Homo sapiens
gggtaccgggcccccccctcgggagtcttctagaattaattaacgcgggctccttcgctttcataatcactttcatccctttcagaaatctgagttctatttccagccactccttcatatcaaacgttcagtaatcagtgcactccacattgctaaacccagtagacacttttcagtttcatcatgcttgagttttcaacagtaatcaacagtgagctgttttgctcaccattccttcttgaaatattttcctccatatctatatctagatataacttttcctctatatctagatataagctagctgaatgtgagtccaggactgagatacactcagccagtgctattctccaaagacaactgctgcaccaagctggtattcgaaggcaaaaaaaaaaaaaa

SEQ ID NO: 55023 - DNA, 553 bp, Homo sapiens
  misc_feature 512: n = A,T,C or G
gccccccctcggggtacttctagaattaattaacgcggggccatctctgtttggtaatatagaaagtaaaaactgaagaacaatctgtacccgtttgacttatctgttaactcatgccaagctgaaatgttaactaaaatggctgtgaggcatgtggtgtgtctccccagttgttttcactgtagaaaagatttttttatattaaggcagttttgagaagagttaatgaaataatatttacaaatctcctcatacgaagcttggcacagagtaagcattcaaaacgtaaaagtttcctcaactgaattttttatatcttagttaaaattttggtggaggtctctcacgcactgttggtaggcagatggacttttttagaaaacaatctggcagtgtataccaagactttttccatttccccttgaccaatttattccacttctggaaatcaaacctaaggcaataacccacaatcacacacactcatacacacacacacacacacacaccanactcatgtacaaagatttttctgaaacatcatctacgacac

SEQ ID NO: 55024 - DNA, 588 bp, Homo sapiens
ccccctcggaatacttctagaattaattaacgcgggggtggggtgggacggagtccaatctgattctgaagtttgagaagctgtacaacccattagtaattgtggctatttaaaaataaaatacagtttccttcaatttatgggtatttattttcttttttttttttggaggcagagtttcacttgttgcccagcctgtgggcaacagagcaagactctgtctcaaaaaaaaagagggaggaagagtccccacaaaccgaccagactgcagctcagctctaaatccaccccaaaagcctcacctactgctctgcccctccactttgcagtaagctgtaacacactacacgctcatcaaaaatgggaactgacactttgggaggccgagccggacagatcgcttgaggtcaggagttcgagacccgcctgaccaacatggctaaactccatgtctactaaaaatacaaaaattagctgggcatggtggcacgagcctgtagtcccagctacttgggaggctgagacaagagaatcccttgaacccgggaggcagaagttgcagtaagccgagatgctgccacttgcact

SEQ ID NO: 55025 - DNA, 510 bp, Homo sapiens
aattaattaacccggggcactcaaactgagtaatgaaatatttttgtatatgcaactttaaaaaaattcttaaaggtagaaaaaagaaacattaattgatccatgtgtttatggaattccatatgaggtggctaaaaaagctaaatacacttaaataaataaaataaaattaagtcaatgtattttgttccattgagtgatgatgacaaagaacaaaataggctgccgttttaaaataggaagaaaattatatattaggttgaaccatatgaaattgctcttattcaacaattctggtaatattgaacattttaacataagaaaatatcaattgcatgtggttcaacctaatactgatgttttaaagacatttctgatactatttctctgctgtaaatacttttctacttaaatgataatatatgttagtcaatttttcttttgaattatttttaattacttcataatgccagtagactgcgttggctgagtggtgatttcaattacaat

SEQ ID NO: 55026 - DNA, 574 bp, Homo sapiens
gggccccccctcgaaagtcttctagaattaattaacaccctcccccttgtttctactagtgatgtcggtcctttcagtcttgacgatgcttctcatcttttccttggaatatccagatccccactatagggttggcggatttagcaaataaaaatgtaggatgctcttggagttacaaaatggagtgtgttcagtgctgttaactccagtggtcttcggggaggcagacagctctcctcctcactctccaacatagagagatgaggcccatgggggacatggtgttagaaactcctggtttgctaactacaaagcacttcatgtgggaagtacatcgaaagcataccagaagtgacccacccacttatccagaaactagtagctccctgtgcacccgggcttcacaatccatcaagtactgtggtagccaccatggaagttcaaaaaaatggccaaaagattgctgagaaggaattgacagataggaattggaatcaagaagatgaagcagaagagctgagaacgttctcagtggccaacgaggaagtttttgagaatagaaaaaaaaaaaaaa

SEQ ID NO: 55027 - DNA, 609 bp, Homo sapiens
cgggcccccccctcggggtacttctagaattaattaacgcgggggctttctgaaattagcaaagggggaaagcaaagtaaagacagaaacctaaccactcactggtttcttctctgcctagagtgttagggtaagaatacgactatgaaaatataatattttctgatattaaaggaaatgtcaaaataaaactataagtcacctactaagggtactaaaggagaaagtgtagactctagcagattacactgagattaaagatatttgaagaggttctcatcttcagtttctcctatcttttgaaatgcataggaataccatctttcatactaatccagtaaacagtactatctggccctgatgttaggaggcctttacgaaccttgttaccagtagtacgagagtccagcttatatgtttaagagtgagcaaatgagtgcgtaagtgtgtgtgtttgtgtatgtgtgtgtctgagaggtggtccttaatctatttcaggtgagtttcttgaaggacaggttaaatcaactgaatgagctgattttatcatcctgtggtgatgttttatttatctgataaaatgcttagaaagtacttaatttgtcacgg

SEQ ID NO: 55028 - DNA, 438 bp, Homo sapiens
  misc_feature 17: n = A,T,C or G
cgggttcccccctcggnagtcttctagaattaattaacgcgggccttcctccgttcttctctgtcctttcacgtgcctacatgtatttgcttcccggtaagtttttgggacccaggtcttctgagtctagatctgttgttcatgctcatggaccatatcggtagaaatcaagggccttccctgctgcatccagtcatcagacaagccagtttttccagtatctctttaccctttttacccaatgaacttaagtatttggaatggtttacccttgtgtatattacaggtatcagatttaagagattaaaaactctgcttagttttttattttccttatagctcaaatctaatccaagtgaaaatgaagaaaaggaagcacaggctcaacttataaaatctgatgaaatgcagcgtgtgcgtacacaagcactgaacgct

SEQ ID NO: 55029 - DNA, 621 bp, Homo sapiens
  misc_feature 27: n = A,T,C or G
cgggccccccctcggaagtcttctagnattaattaacgcggggggggtggaaacttgtttcttatgtacatatagatacttataatattgatttaaatgactgcatcttttaactacatggctaaatttttggaacttgaataggatgctatgggctcctccaataaattccactggtgctgatggtttggaatatatataagcgggttttaatcatattaagatataagttgttgtctaagtatgaacaaaaatggggaaatttaatggtcatgtaaatctactaacaaatgagttataaccattacatatatatggtttgctccacactgtcaatcagttctgtgttgtatggtgataggaaataatggctgcttttggaaaggtaacacatacatggggtatatgcctatcgcattcgtaacatcactttgaatctatttataactcctccagagttccattaagcatctcttcacaaaataaaataaataataactgtcttcatttctcacaaatgccttttggtaattgtttctctctaggaacttaacaggatcttctcataggttttacgaacaatgccttccttctttcattgggctagttctgtgtcatctt

SEQ ID NO: 55030 - DNA, 591 bp, Homo sapiens
cgggccccccctcgaaagtcttctagaattaattaacgcgggaactaatccccatctaagaagtgctctaaatgaaagtgcaggttgccaagagagtatatgtcaagagcactaagaaggcttcctgaagcaagtggcatttagaaggagtgagtgttgtgaggcaacactaaggctgtggatgggaaggactcagactctcagggaggtgatcagtgggatctgacatccaaaggctagttgaaaagtgtggaacctcagtctggtgatgtgggcatggccagatcaagtgcatgtacatactttgtgagctgaagtattaaacattccttagtctctgtacataccctcatctgcaaagtaggaataacaatggtaccagcctcatagggttataaggattaagtgaaattaatacatgtaaggccattagcaaattgcctgctacatagcagatgctcaatgaatgttactgtgttattaatttatacattgtttatgctttctcagtaggagaaccaggatttaaactcaggtctttctaacttgagtcccccctattaattcctatgatgtatatgctggcttgat

SEQ ID NO: 55031 - DNA, 612 bp, Homo sapiens
  misc_feature 36: n = A,T,C or G
tgggttaccgggcccccccctcggggatcttctagnattaattaaccgggcaggtgatgtataatgagatgatgatttgggagatttcaggaattgatagaatacttcagattaaaaagaatgacatttttcattatgttgctaaacggttcacataagattcccacaatgttttttttcaatataatcacaacggaaaagtcacaacagacaaattcacatcctgtccaaacaacaatggttatatcatcctttttgtttttgttacccacaaattaaaacaaactttttgttcaattaaatttattaagtagttcatttcaggtaacaataatatctaatagttctgttctcttctttatatatacatggatcaatgtagatatgcatacaatttattgtactttgaattatgtttcatgctgaaaacttttgtaaagaggaaaggaaggaattatgaagtgagggaaatgtctgaatggaattggtgcttaatgtggtttggctctgtgtccccacccgaatctcatctcgaattgtaatccccacgtgttgagggagggacttataatctgcacgtgtcaagggagggaggtgattggatcatgaggg

SEQ ID NO: 55032 - DNA, 502 bp, Homo sapiens
  misc_feature 430, 445, 464, 470, 471: n = A,T,C or G
gggtaccgggccccccctcgagagtacttctagaattaattaacgcgggcctattaatacaacaattaacagagtccacgagaagcttcacccagagatctttccaaatgagccaaccctggaaaacgttggaaaaggcagagaagggatccacaggttgaaaatgaatgcttgttgagaggctactaagaacaattgatattttctttaaaaaatctttaatacaaaagacatttaaaacaaaatgagatgttgagagaatatcatataaaccatgaacacatcactcaacttcaataattatcaacatcttaccaattttgttttatctatgtctcccatgcctttctttctttggttattttaaaacaaatcccatatatcagggcatttccctgataaatctacagtgtgcatctctatatcattnttgtttacattatanaacaactgataaaattaanataatnntttgacattatctaatatgcaatccatgctc

SEQ ID NO: 55033 - DNA, 588 bp, Homo sapiens
ttctagaattaattaacgcggggggaacgtgtccacgctgagaggtggactcacgtttttacgctcctacgatttcatccgcaaccaattggcggcacccattccctatctcctgaccacgaaagtatcggcgaaaatccctaatctccgagtctttgtgagatggctgtgggtgatagctcagtctcctccgtcagttaaactccttctttattgcaatgccctggcctcagtgagttggttttctctgtgcagtggacagcatgaacccgtcagatgattacagcttgttggagtagatgatcatttttattaagttggcttcagaaaagccaagaaggggctggaacatttatttttgagcaccttagagaggataaatgctcacttcgccctgcacatcttctagtcttgaaaataaaagttaaaatctgatgacgatgatcagctgggcaagttaggaaactcaaggcgctcagaagcagcctgaggccgagtcctccagtcctctcagctgttttaacagtcacattccatcctgcatcttttgagtctgagactcaaaagtcgcataatcttctaacttga

SEQ ID NO: 55034 - DNA, 548 bp, Homo sapiens
  misc_feature 30, 485: n = A,T,C or G
accgggcccccccctcggggtacttctagnattaattaacgcgggcagccgggtctgacgttcaccgcaagcttctcctgggggttgcaggcaggccagagctggtgtgcctcccgccacctacctggtctcttcctgagcacagcatcgctccatgctgtctgtcccacgtccctgtcgtgcagaaagagagcccaggctgagcacaggacacactcctcctggagcctgcgcaggtgcggattttcagtgcaaaccggctttctcttcttgctctttccacaaatactgagatcgaacgtggaaagttcagtgaggaaatcaccaggaaacaggtggtaattgtgagtttggagggctcattttcatcaaggttcctgatttcttgataggtagagataacttatgtaattgtagaaagtaacatattctctgaacagtgcgaagcgtaaaagcaaagcctcgtgactgcctgtctctcgctntaccaggactttctgaagaccttttcccccgatgtcttccggttcttttgcctgcggagcagc

SEQ ID NO: 55035 - DNA, 463 bp, Homo sapiens
ccccccctcggaagtcttctagaattaattaacgcgggggaggcggggaagaaagaatttatatacagctataatttctggacccttatgttttcacttccttcacttaaaatatgtgtgatatcttcattcctactttaccagcaggatattataaaactggattttaagtcactagcatttttaaaatcctatcacataaatgagtaaaatattaaaattttaatgacaatgcatttcaaaatacctgcaccaatcatggtgattggagattcaatatatatccattcatcagtatatattccagaatgaacaaagataagtccatcaaaatgagcctcttgtaccccaccaagggcatcttcaatagtatcataatactagaaaaaaataaatgtgtcagtacagaactgaaagattaccattttaagtcataaaaatgaaaatcaaacatgccaacata

SEQ ID NO: 55036 - DNA, 483 bp, Homo sapiens
cgggccccccctcggaagtcttctagaattaattaatgcgggggatggtggagtaggacctgtgagtgtcagacccgattagaagttagaagaaaacatgctcgcaagggtaatgtcagcattgtgcagaattctctctctctctgtctctttaaaatacagacacacacatacatacacacacacacacacacacacactcctcacaaaattaagagacaatgctggagttttagaaatgtagtctcttgggcttcactgcagacctactggatcagtatctgtattttaataagaccccccattttattcatatgcatgttaaagtttgagaagcactcctctggcatggtttaaattcttcaaatactaaggtttgcctgcttacagaggttgatagaacccagagcaattagtgtcaaatacttttaattttgtatatgaacaaagatacagtttaaaatgtgtaccttaatgttttca

SEQ ID NO: 55037 - DNA, 620 bp, Homo sapiens
  misc_feature 27: n = A,T,C or G
cgggccccccctcggaagtcttctagnattaattaacgcgggatccagaagagaagatcctagagtgttatatccaaaggaaaaaatgataaaaaaatgttccactgtggaataaagagagaggagcaaaggcatgagcagagtgttgccctttttccacctgctttgtcgtggtgggaccccagccaattgaatggtgcctgcccacattgagggtgggttttcctttctcagtccactaattctcatgtcaatctcctctgcaaatatcttcacagacacactcagaaacaatgcttcatcagccatccaggcatccctcaatccggtcaagttgacaccatcaaatttagtatattgtgaaaattagtagtaatcattcaaatttttaaaaaatgtttaagtgaaagttttaagtccttgtaaaccatggtttaagtgacggttaacgaagcacaatcatcagttttatttaatgtgaaactgaatattgggttaaaggaaagtaggctattcacaggttggctgggtagcgataaatatggagaaactggttagagaactttctatgtcccaagatgtaattattaccactattttgaaaactaacatgatcatga

SEQ ID NO: 55038 - DNA, 485 bp, Homo sapiens
ccgggccccccctcgaaagtcttctagaattaattaacgcgggcaagcatgaatcattttacagatgaatcctattagatattcagggaaaaaaataaaatcaatcctacagaaatgtcttcggaaaaatgaaaaggtagaaggacttacaactcattttctgagtataaaccaaatcaaatatccttcatgaacatacatataaaaacttcttgagaaatactagcaaatggaatccaacaatgtatataaataaacattattgccaagtaagttttatcccagaaaagcagattggttgaacattttttaaaactcaaacaatgtaatttaacatattaaaataatgaagaagaaaatttgtaacatcactccagtagatgcagaaaaagcagttggcagaatccagcacatattcacatttacatttttagcaaactaagaataggaaggtacttcctcaatccaaaaaaaaaaaaaaaagc

SEQ ID NO: 55039 - DNA, 619 bp, Homo sapiens
  misc_feature 24, 512: n = A,T,C or G
cccccccttcggggtacttctagnattaattaaatactttgaagttagaacttttttattttaggttccttaagtatgataaatctaaagctcttgataactctgtaagtaagagcggtaactattatattttcaagccgtgggaaattacagagtccccagagaaatccagcaagttggtacataacaaggaacgaaagcaggactcctagttgcagtgtctcatttcgctgctgtgtgaggaactgtctataggcttctatcttttttctttgccactgagtcagttttacttaaactgttgtgtgtgtgtcatttttattacatttgccatgcttaaatgatctctataccatcatttacttagtaacgtatttttttaaacctttcaacttgtcctaattattagtatctataacacctttgttgtctttcttatattttttctaattcacattaaaacaagtgtataactattaaaatacaaaatgtttgcacaccacctaacactntgtgtagcactggtggcacacaccccacactggggggaagttgtggactacgtgagcttcagttctttcgcacagtgttgaattcatgcttgtgaacacctacagag

SEQ ID NO: 55040 - DNA, 598 bp, Homo sapiens
gccccccctcgaaagtcttctagaattaattaacgcgggtcccaggctttcaatcaacccaggtgatgcttttgctacgacctcattttctgctggaactgctgaaaaaaggaagggtgggcagactgtggactctggcctcccgcttctaagcgtgtctgatcctttcattcctcttcaagtacctgatgcaccagaaaaagctgatgttgctgttgagagtctcataccaggactggagcccccagttccccagcgcctcccatctcagacggaatctgtgacctcgaatcgcacagatctccagagggagtccaatccctgtcctgtaataactgtagagcactttaaagaatcactgggtgttaaaggccttccgctgtatccagacccctccagagtacctggcacaaagactcagaacaacttagaatctgactacttggccagagatggcccttcaagcaacagctcattccacagcagcgaagaggaagggactgaccttgaaggagacatgctggactgcagtgggtctcggcctctccttatggagtctgaagaagaagatgagagctgcagaccccccccggggaag

SEQ ID NO: 55041 - DNA, 573 bp, Homo sapiens
cgggccccccctcggaagtcttctagaattaattaacgcgggtacctttcttcctctttagctcgctaatttttctctccttgttcctaagtgtgagctttcttaagatctgtggcagctgtcctcttatttttaccttatctctctcaagactgtggtctatctagctttaataacttttactgtagaggcatggctaacctttcttcctagcccttacttctcaaccaaatgaaactaagctcatcttattcctactggatataatgaatgaacaatagtgggaattctcttccctcagatacctatgctctatactctatctttaactcttcttatacctgccatttaaattttcaaaggtttataaattgttctttcaggatatctctcctagcctttccatttcattcccaatgctatggccttattattacacttattcattcaacaaatacttgaggagtacttactctatgatgcatgcctagagtatgtcttgttttacttccaactatacctaagaggggatcaattcatttttctaaagaactactttgaatatgtctttcc

SEQ ID NO: 55042 - DNA, 473 bp, Homo sapiens
  misc_feature 28: n = A,T,C or G
ccgggccccccctcggggtacttctagnattaattaacgcgggattgtaaaaacgtatttactcatcattctgcaataagaagtgtttaatataggtaaatgggaagggatttctcatataatcctaaatgcaaaagggaccactaaatatacataggcctgattttaaagtagttgttcagatgacccagaatatacttatggtaatattttttggaatttaatctaaatgacttaacagttaacaaagagaattctgagttccttacaagtttgtaaattactgtccgtaggccaaaccaggcccaccaattatgttgataaataaagtttttttggaacacaaccctgctcattcatttatttgttgtcattggctgcttttccggtgttagaacagagttgagtagttgtgacagacaattggcatgcatgacctgtaaagcctaaaatatttaccaaaaaaaaaaaaa

SEQ ID NO: 55043 - DNA, 541 bp, Homo sapiens
ccgggccccccctcgggggtacttctagaattaattaacgcggggtcagaggtactaaacagtggctatacacagtcacatgtttctccagggctttaatctgggcaacagccccagagagaaatgttacaactcaagcagaaagagaaaaggagagacacacacacagaggtacagagatggaaacgaatggggaaataatgaattaaatgaggggctctagttttctcagctcctttttatgaaatgtcacaggggcaaccccaccattctagctcccatatactacttcagtcttgtctatctttttttaaatattaatgtattcgtgccttactagggctgctttaatgactatacagaatcactaattgtgtatcaggacggaaaaagaatcaagaactaatttctacctctatgctgtgaaggctaattcccgacatggcctttggcaatagttcagaataaaactgccagcaccatcccatacagtggctacatggaaattctctatggaagatgtcaccaagcctaacagtct

SEQ ID NO: 55044 - DNA, 604 bp, Homo sapiens
cgggccctccctcggaagtcttctagaattaattaacgcggggacaagcaaaggcactcagtccttaaaaaagggcctgtggtagttggagcaacatttactggtctacaggagggaagactggttcagatacccacaggtgtgtagatttgtcaggaaatatgacagagtcccaagtgacagcataaggccaggctgttagctaaaagtgaggggagtgaagacagaggattaggaattttggaaagaaaaagtgtgatacagctggggtaagtggagattagacttagaaaaaggcaggttaacaccatagagtgaaaggcatgtaaggctagcactgatgcatttccagtgactccaatatgctaggctgtgttggcatattaatatttcacaaaccaatggaactggaaccaatacaaatatatctctctaccataaatcatgcaagaactgctgttactatcacacagacacacccagaactttaatgtctctgccccttctttatctggaacagctgtgatgtactcatttatcaattgtccttttctttcagttaagtctccagtttccatatccggaacacagataggactttcat

SEQ ID NO: 55045 - DNA, 610 bp, Homo sapiens
cgggcccccccctcgaaagtcttctagaattaattaacgcgggtacagatgaagcttcgctcactctctctcaccatcacctcctgctgtatggcctggttcataagagagcatgaactgggggggttagggacccctgatctaatagacagtattgtctattgattaagactgtgggttctggagccaggctttctggatttgaatcctggttttaccaaatactacctcaagccttaacctttctgagatttagtttcctcattgtaaaatggtaataatactacctacctaataggttgttatgagcattagatgagttggtaccttaaaaagtacttgttaaaacattaagtggcctggaatcagtttcaaattaaatatcaattctaatagaataatatattctggaaatagagcattgaggaagatggcagagagaaaattttccaagaaataatatcaaacaattccccaaactgaaaattgaaagggctcagtgaccaagtaatcagaacaaaggataaaaaaagccccacatgaaatttttgtatatcatagattaaaaaaaagattctgaaaactttccagaaaagaaagacaggaaaca

SEQ ID NO: 55046 - DNA, 486 bp, Homo sapiens
cccccctcgagaagtcttctagaattaattaacgcgggaataaataaaagatattctcaaaattaatttcacctgcctatttttacttttaaaaatgtgggtattaggggccaggcgcggtggctcacaactgtaatcccagcactttgggaggccgaggcgggcagatcacctaaggttggcagttcgagaccagcctgacgtcatgatccaccgcgcccagtctcccaaagtgctgggattacaggcgtgagccaccgcgcccggcaactgactcgtaaaaagcagtcttaccctacacgtatttgaaatcgtaagaaaaatgtacaggtcatattttttctaatatatattaaaatatatacttaaccattaaaatgcaaaatatagatcgaggtgccaccgatcatttctcaaatcaacacatgtggggcccgcacttagaaaaacatccaaatgggggatacaggcatgatgtgcaggcac

SEQ ID NO: 55047 - DNA, 593 bp, Homo sapiens
cccccctcggaagtcttctagaattaattaacgcgggggtacatacacaggttacatggagatactaaatgatgctgaggtttggggtgcagacgatcccatagcccaggtagtgggcatagtacccaacaggtaggttttcactgccctgcgtcttcctccctcccgctctagtagtctcaagtgtctactgttcccatctttatgtccatatgcactcgatgacttacgagaacatgttgttttcggttttctgctcctgtgttaattcactaacaacctccagctgcacccaccttgctacaaatgacatgattttgttcctttttatggctgcatagtagtccatgatgtatatgaatggctcacatttactgcacacttaccttcgtaacaactgtgagtcaggtactagcattattccagcttacagtggaaaaagctgagtcagagagggtaataaaattgcctcggatcacacagttatcaagtagtgaagccaagaatcaaacccaagcagtaagcctgggctatgcattaaaacctaagtgcatcatcattgagctttgctgtctgtgatgtaaacatcgtcc

SEQ ID NO: 55048 - DNA, 614 bp, Homo sapiens
cgggccccccctcggggtacttctagaattaattaacgcgggccttaagcacaagagattgaggctgtagtgagctatgtatgattgcacaactgtactgcagctggggtgacagagtgggacctgtctctaaaaaaactttttaaatgtaaaataaataacgaaaaattttattaaaaaaattttttttatttttaaataaaaaacacttgtccaggatcattcacctatgagtcctgggggtgggaacttaagggggttcatagcttagggcgcatagctctggataatccagcaatggtttgtaatcctggagtcgtttactccatctttttaggcctatccctcagccaaggaaagagactgtgagaacagcctcttgccacagttcccctggtacgttgtgctcaggttgggagcccctgtctgctactagatgcaaatcaatttccaagttcacagtgatgggaaaactagaaggctcttcataggttctgcctgctgttaatgagctgatctgggggaaagggccgaatgaaaatgaacaatcactacctagagtcaccggagtgctccatgcagcccacccgatgtatgtgttttatgcagtgctt

SEQ ID NO: 55049 - DNA, 595 bp, Homo sapiens
cgggccccccctcggaagtcttctagaattaattaacgcggggctgtcagttggatgtattcattttggatgttaagcaagaaatcaacttttttgatttgaactgctatatattttttttttggtttgcttagcagtttagcctattctatcgtgtgtgtgtgtgtgtatgtgtgtagatatacacatatattttatatatagattatttatatagagagatatatttgtatactcatgttcatagaagcattatttctgtactgctgttaaaagctttttctatttctagtggcaagtgatactctaaaacgtgtgagtgcatgcacacactaactacctttgggttttgtcagtgagtaatttatctgtgtgtattttacccagcacatgtttaggctgaagactttttttttcttttttttgtttttgagatggagtctcactctgtcgccaggctggagtgcagtggcacaatctcggcgcactgcaacctccacctcctgggttcaagccattctcctgcctcagcctcctgaatagcggggactacaggtgtgcgccaccacacccagctaatttttgtatttttagt

SEQ ID NO: 55050 - DNA, 529 bp, Homo sapiens
agactggggtaccgggcccccccctcggagatacttctagattaattaacgcggggtggggtggggactacgttggggattttagggctaaattcttctgtcctctcttctcctatttccccaggataccggccatttctggaccccagcatctcctcagagttcgtggcggcctctgagcagttcctgtccaccatggtgccccctggcgtctacatgaggtgagggaggggctcaaaggtgtgtgtgctgggagggatggggctgtcaactgaggaaaatctgccctcaggagccctctgtacaggattatcagtctgaagtgtccccaagggaaagaccgatagagaggggaagaaaacaattgttttaaaagatacatcactgtggtttttaagtatttttacttccattctcctgctgctggtgtagatattaccctcccccccaccattaaatatagagtaataaaggttcagagggtgtcacaaagtccactggtctaaacctcatgtcttgacactacact

SEQ ID NO: 55051 - DNA, 372 bp, Homo sapiens
cgggccccccctcgaaagtcttctagaattaattaacgcggggggtgatagagtgagactccatctccaattaaaaaaaaaaaaagtaataaagctctcctttccaagtatatgaacctcgtgattcatcagttgacacccctataatgtctactgtaggacatgctcaaaggacacgtgatgacttgtctaagttcagatgttatctgggacatgtggatgggccctgaactttgtctaagtatgatactgtaatttataatgagaaatatatatttggccttgtttaatttcctggcagctgatcctaaaacctttggaatctctgggtgatagagtgagactccatctccaattaaaaaaaaaaaaaaa

SEQ ID NO: 55052 - DNA, 506 bp, Homo sapiens
  misc_feature 16: n = A,T,C or G
cggggccccccctcgngggtacttctagaattaattaacgcggggggagaataaatggatgtattcagtttcttcagttttaatgttatatgtcatcgaattataaactcacagatctgcaaaaatatcttagtccagctccctgacttaacaacaaattataaaccagctggtccagtggtagtgagttatatcaattgattgttgggacttgactactctttaaaaaaagaaaaaaagaaatgataaaaccaaggaccagaagaggtgacataacttgctgggggtacacagtatcaaccttgtgaacaggacttctattgccttttcccaaatcatctaaaccaacctctcactgaccattttcttttattggaataaagaaagactcattagagacgttgatgtctggtttgaggttccatggtgtaatggtgagcactctggaccctgaatccagaaatgttgatgtctgccttcgtttagtgatctgaaaaaaaaaaaaa

SEQ ID NO: 55053 - DNA, 545 bp, Homo sapiens
  misc_feature 16, 44: n = A,T,C or G
cgggccccccctcggnagtcttctagaattaattaacgcggggnagagagaaaataagagaggaggaataaaagaaaaggaggagaaaagtcactattatctaattgcatttgagttcctagatccaggtgtccctgaaaccagcaaaacccttatctttcccacaattgtgtaaaccaagaaagtcccttttgtttgcttgcattagttggagttgcgttgctgtcataaccaaaagttgactacatattctattatatttaaactcctttaatttttacatggttttaatttgcaaattgaataaatgtgcagcggagcagccttttgaaatacagtacttttataaaaataatttttattactcttggcactatgataagctagtggtaaaaaaaaaccactttcatcaaaagaaaagactggtatataattaataaaggatctgtcaaagcagtgattaatatgtaatagattaatatctacttatcacagatatatattatttgtaaataaatggatatttctgctttgcatgatttata

SEQ ID NO: 55054 - DNA, 256 bp, Homo sapiens
  misc_feature 33: n = A,T,C or G
ggtaccgggcccccccctcgggagtcttctagnaattaattaacgcggggtatatattatagatgtataaaatattctatactatatataaagtttataatctattacatagatatcctccttgattttcactgagtccctaggaccccacgttgtcttggttttcctggtaactcactggctgctccttctcaggtgcctttgctgattccagcctctcactgctggagagacagggctcattggtccttggtcc

SEQ ID NO: 55055 - DNA, 594 bp, Homo sapiens
cgggccctccctcggaagtcttctagaattaattaacgcgggagtcacgttccattatttggtatttgataagtatttgtgtcagtcaatctcttggcaatggggataaaatggtgagtaaagagagacttgggctctgccctcatggagtttatcatgtgactagagacaaacaattttttaaaaaagaaaagtaaacaaagaaatgaagaaaggacaagtggtaccaaggaatgctacaagatactactgagaatctgcacactgggggtctgacctaattaagatagtcaagatgtgtgtgcctggtagccataaaaaaggcagaggcctctcatgctctcctagtgaccttagaaagaaaactgttccctccttatcaccttaactcttagggcaggtatattccaaattctgatctctctaactacctccaactttcacatcaatcacggagctccttggcctgactaaagcatatataaaactcagttggaccagcagatggtcactgcatcctctatccacatcagtgtactattaactgccattatctccaccatctttcatgcttaatttcataaaggcaaagtt

SEQ ID NO: 55056 - DNA, 595 bp, Homo sapiens
  misc_feature 28, 47, 52, 55, 57, 121: n = A,T,C or G
ccgggccccccctcggaatacttctagnaattaattaacgcgggggnagganagnanagagtagtagagtagtgtgtgctgtgtgtctggctggctgaaggtgctggtactgtagatacangaactagctctgcgaagacaactatgtttggaaatcattttatatgtaaataccccatctattttcaggggtagaaagggaatagccatgctttgatggaacactattcagcaaaacaatataaaatcaaccaaattttttaaagtactacaaatgagtcctcacagtgaatttagcatcagtaaaagtaataaaatacttactgagttcttagcatgtacaaagctctatgtcaaatgttttacatatattatctcatttaaggctcacaatcagcatgcggtagttactattattattccctttttagacatgaaaagacaggctaatggccaataaaaggcagaaacaggtctgtttcgctcctattaaccactatgctttgctgcctcccaaagatcatctttaagctgggcgtggtggctcacacctgtaatcacagcactttgggaggccgaggctggtggatcatga

SEQ ID NO: 55057 - DNA, 560 bp, Homo sapiens
  misc_feature 15, 492: n = A,T,C or G
cgggccccccctcgngaatacttctagaattaattaacgcgggtatcttaactgttctttctgttcagttttgcatataatgccttctgcatatctttttagtctctcccccaaaaaatatcttgtaaaaaaaagtaatgcatttgaaatagagacctagcaattgttaggttataaatgtgtggttttttgcaggcacatatggtgctggttgtctcattacggaaggatgtcgtggagagggaggcattctcattaacagtcaaggcgaaaggtttatggagcgatacgcccccatcgcgaaggacctggcgtctagagatgtggtgtctcggtggatgactctggagatccggggttgcttctgtgagtttcagcaccgctcgccctcaccttcgtgtgcaggcacatgtgcacagccacctctctcagctgccggcaggcgtctgttagtctgcgatattttcctaaagacctacattttgaaaattntagccagtttctttctcaaatctgtggaacagagtttctcttagtgtgtgtgagtatgtgacggagta

SEQ ID NO: 55058 - DNA, 610 bp, Homo sapiens
cgggcccccccctcggaagtcttctagaattaattaacgcgggcagactaggtcctttcttgaaagactctctctgtaccttttcatcactaaattaaatctctaggctagggtgttcataagttccactgtaacttaggatttgctttttcctcttaacaaaactgaggcatttttttttttttttttttgagacactgtctcactctgtcacccaggctggagtgcagtggcatgatcccggctcactgcaacctccatccccccatgttcgggcggttctcctgcctcagccccccaagcagctaggactaaatgcatgtaccaccacgcccggctaatttttcatccttgtagagatgggatttcaccatgttggccaggccggtcccaaactcctgacctcaagtgatccacccgcctcggcctcccaaagtgctgggattacaggcgtgagccaccgcacctggcctacctgggcttttttggacagatgtacatgattttagaaattgttatgaatgactgtcttgggatcctcaagaacacccccaggtttgacgatttgctgagaagactcaggtctcagcattctgtcatactcaacagc

SEQ ID NO: 55059 - DNA, 517 bp, Homo sapiens
ccgggccccccctcggaagtcttctagaattaattaacgcgggcaggacagagcaagattgtctcataaagtacaaaaaacaaaactaaaggggtgaaactgaattggaagcacattttatctttcccctggatacattcattaacattccgaagggagacgaggaaccttcttccctataccatagggggtgtgcatatattctgcttgaatatgtgtggaaaaatgcatatttctggcatactcccaggcacctcacctgcagtgcaattccttacctcgcgtagtgttgagtgcatgctgctactgggttttgctctctatctctggtgcaagtagaataatatctcatattgatcacaatgtctgacttaacaacatgttttttttaatgacgagattgtctaaaaattattgagttaagaatcaaactctagaatttagaaataagcctggtgcagtggttcatgcttgtaatcccagagctctgggagactgacgtgggaggattgcttga

SEQ ID NO: 55060 - DNA, 536 bp, Homo sapiens
cgggcccccccctcggaagtcttctagaattaattaacgcgggcattttgttatgacagccctagcaaactaatacaacttgttattttatgatcagaatctctctgtgcaatctcagttcacagtttccaaatggccatatttagaacaaagtaagtgttctgttttgcttttactttcctccagacatagttctaactcttttatttttaagattgtgtttaattttctaaaaacaattaaatcgaatatagtctttctggttttctttctttagttgtctttctttttactcatttattatattgtttcctcatttatcttaagataatattaaactgcctttacagtgtcttagtagcaatacttgtggcttgacagaaatcttggctctatgttggtagtataaaaagtcacagataaagaacttttcttggattctttggttattctttatgagacagtcatcaacattagtttactaataccattttaaaaccaccttcatttctggaccctaaaagtctgatttttcc

SEQ ID NO: 55061 - DNA, 604 bp, Homo sapiens
  misc_feature 586: n = A,T,C or G
cgggccccccctcggaagtcttctagaattaattaacgcgggcaaatttgtattacaagagacaacaacatatcaagagctctctataaatttacatctgtagtcttttgatctgcctatttagaaaggttcagagttgtgcctgtgcctaatagttatctttgggaggaactaggaaagttataagctgtggaggtatttaatgaagtaggtaacataaaggtatgtgaagagattgggcaatgtcgatatgttgttttagtcataggaaggcatttgcagtaaagggctgcttggcattctgaggttctgatttctaaacttcctggagtcttggtaaagttactctgttgtgcattccctgtaatggttagttagctatgattgtgtttactggaaattagtttgctaagcagatctgtacctttagcaggactctgaaggtatagatccaacccctaaaaaaactgaagtgtacaaaaaactatgttaaactggtgaagagaagtagctattttttagtgcctgctgggggagtattaccaaaatttggtctaagaatgttatgtcttagttggattattgnggggaaataaaaatttaa

SEQ ID NO: 55062 - DNA, 406 bp, Homo sapiens
cggggccccccctcgggagtcttctagaattaattaacgcgggccatagatttatctttgagcaagcgcttaaagagggaaatgggatcaatttctgatttatcgtgtctagtagattaaaacatatcagttgtttaggagaagtaacaaatatttttaatcctgaaaccatagataaatttcttttgtttttcatcataaagaggatacaatgacttcaacatcactctaatgtcaaatatagccatgagtttcacgaggctgcttcttgtaacacatattttaatattctcagtgttggcaaatactatagaactaaagttagcataccttaatgcatttataaaaaatcagaacaagattatatttcaatatacaacttctgtataaccaaaaaaaaaaaaaa

SEQ ID NO: 55063 - DNA, 603 bp, Homo sapiens
cgggccccccctcggaagtcttctagaattaattaacgcggggggggaagcctagaagccttgtaataagataaacctgatccagatctcagatctactacttacttttgactttaggcaagttactttatttcactgagaatcggtttcctcatttctaaaatgaagatgcacatggtttttatgaggataaagtggaggaaaaaatataaagcattcaaaaaatatttcttccatttcatgtagttccccttttataagtcctgcctattctttaaaattcgagttctaactactcaaagcttattctctgaagcacttatttggaacaagtattctttgctgtcttgtatttactgtctccccaagttgtttgtcgatttcttgagagctaaaactcttaaaacaaagaatcctcaatttctgacatagtcttgttaaatatggtagcctccaatgtataatagtgtaaaagtggaaaatggaaaatgactctctaagcatgtggtccccttactctaaagtcattaagttggaaaaggttttgagtccattacattttcttggcacagtaagggagatggcattagaagtacttcctta

SEQ ID NO: 55064 - DNA, 596 bp, Homo sapiens
gggccccccctcgaaagtcttctagaattaattaacgcgggggtacatacacaggttacatggggatactaaatgatgctgaggtttggggtgcagacgatcccatagcccaggtagtgggcatagtacccaacaggtaggttttcactgccctgcgtcttcctccctcccgctctagtagtctcaagtgtctactgttcccatctttatgtccatatgcactcgatgacttacgagaacatgttgttttcggttttctgctcctgtgttaattcactaacaacctccagctgcacccaccttgctacaaatgacatgattttgttcctttttatggctgcatagtagtccatgatgtatatgaatggctcacatttactgcacacttaccttcgtaacaactgtgagtcaggtactagcattattccagcttacagtggaaaaagctgagtcagagagggtaataaaattgcctcggatcacacagttatcaagtagtgaagccaagaatcaaacccaagcagtaagcctgggctatgcattaaaacctaagtgcatcatcattgagctttgctgtctgtgatgtaaacatcgta

SEQ ID NO: 55065 - DNA, 295 bp, Homo sapiens
ccgggccccccctcgggagtacttctagaattaattaacgcggggatcccacagtttaaaattcctggaaaagtaaaaattgtattgattttaactatgtagtaagatcttagcttagaccatgttccttattttagaattttaagatattattgcataggtataggtgtgtgtaaatatatacacacacatacatatatgtagatatatatcatagtagatgggatgggagaggggatatactgtgagtgtgtggtgcttgtaccatttgttagtaaatgataactagttcatt

SEQ ID NO: 55066 - DNA, 593 bp, Homo sapiens
cccccctcgagagtcttctagaattaattaacgcgggggccgggcgcggtggcgcgtgcctgtagtcccaaagtgttaagattacaggtgtgagccaccatacctggccagtataaatctttttaaggttgtttgctctgaatgaaaaaaatcccattccatatgtcagtaaaagtgaatatataaactattcactgctactaattgtgaggcattaagtcaatccgagactccatctcaaaaaaataaaaattagaaaatagaaaaagaaaaaaagaaaattaatacgctgttgtgtatcacagctaatatttttgttatatgtcgttttctaagtgcttttacctatgacaatcgttttacagtcctgcaaagaacatacattgtcattttcattttccagataaggtagatgaaacttagaggagttaagaaaatttctaaggtcatacaaattatggcagctgctactcaagtccaggtcctttgattccagttttataactttgccttatatatgctgtgttgcgtgtaattatgtgttctaggcctgtcactggttctctgactacatgcttatttttgtattggtt

SEQ ID NO: 55067 - DNA, 574 bp, Homo sapiens
  misc_feature 24: n = A,T,C or G
gccccccctcggaagtcttctagnattaattaacgcgggaagatttcctccatccacccgcaaccccaaggcttaagcattcccttaggaaccaaagctgactctttgggaaagttttcacagccttattaggttacaaccctgaagatgttttgttgttttgaccttaaaattttgtgaactgttttgtgaactgtgtgtgtgtgcacacacatgtgcaaaggagttgcttgcaccttgagagagtcaatttttctgcctaagtgaaaggtcaggaactgcagttaacccagagtaaaatattggttgggtgaagggctcacttctagtatagtcagaaagggctcaagatcttaggaggatgataggtgatgaactgcttaaggtaggtactgttgtgtttgtgctttgtctcatgtggacaaattaccttgttgcatatgtgagttatgtggacataaacatatacagcagttactccctgactggctggctttcttaaagtgatagtcagaatatagcctgtactgtcagatatgaaagatcaatataattgaatgaaaaagaaagctga

SEQ ID NO: 55068 - DNA, 593 bp, Homo sapiens
cccccctcgaaagtcttctagaattaattaacgcgggggggcggaagaaaatacaaatcacacgcataatggatgaaaggaaccgacaggtcacttttacaaagagaaagtttggattaatgaagaaagcctatgaacttagtgtgctctgtgactgtgaaatagcactcatcattttcaacagctctaacaaactgtttcaatatgctagcactgatatggacaaagttcttctcaagtatacagaatataatgaacctcatgaaagcagaaccaactcggatattgttgaggttatctggatcaactcttctgttgaagacatctaaaaactagataaactgtaaaaacagaacaaaaaaacttttttacgttatcaaagagctcaaggaatatgccaggccaaaatttaagagaaggtaagaacataaaggtaaaaaagtatttaaagttctaaccaccctgaatcatttgcccatctggataaagcagtttgtaaaactgagatttgggttctgatagatttgggttctgatagattcagaatcaaggggaaaatgatcacttctaggtttatgagcctaatagatacc

SEQ ID NO: 55069 - DNA, 603 bp, Homo sapiens
ccgggccccccctcggaagtcttctagaattaattaacgatggggagggtggtccttcaagtagcttttatcgttctcattgttcctcttttgttaagctgccttcagtttgtaggtgtttgtgcccagctaagtgatcagaccctggggatggcgctaccatcacccctggggctccagcttttcgtgaattcttcccgaattggtctgacagtggttctctctgctcctttagcagtggggtctatctgttggcttgtgctatgacgaggtctaggaactgacgtgattgtgggtctctaatactgtttttggagcaggatggaagaaaacatactctatgtggatgagattgagtggaccttgacccataagttgggacatgaagagagcgtttgaaaactaccaacctggaccgggtgcagtggctcacgcctgtaatcccagcactttgggaggccgaggcgggcggatcacgaggtcaggagatcgcgaccatcctggctaacacggcgaaaccccgtctctactaaaaatacaaaaaaaaaaaacaaaaaagaagaagaaaaaagaaaaaaactaccagcctgaaaatgcatagtg

SEQ ID NO: 55070 - DNA, 627 bp, Homo sapiens
  misc_feature 603: n = A,T,C or G
cgggccccccctcgaaagtcttctagaattaattaacgcgggtacattcagtccataacaagatattatttattacgggggatatatctcatgtattatgtatgagatagatatataatgtgatatttcccatccaattttttattggaatgattacatatacaagcaagattaaatattagccaaaaaagaaagaaatgggccccagataaagtaaatccaatagaaacaacttgtaaagctgtgtataaaaaatattaaaagaataataaaataaaaatcattattaattttcacaaagttgctacacaaggacaatgtaaaacaacgaattgaatttctacataccatcacgttaataaataaaagctgtaaaagtttataataatcacagttatagcaaatatctagaagtggtgctaaatttatatatgtcttcataaaaaattatgaaacaaattgagataatttaaaggactaagtaaatggacaaaataggttacaatcatagatttgaagacagtaatttaaagatggaaattctccttaaacttcttcttaaattaaatacaaattcaatcaaaattgtccccaacatgtatntctatgtattttggtattttaaaa

SEQ ID NO: 55071 - DNA, 608 bp, Homo sapiens
  misc_feature 567: n = A,T,C or G
ccgggccccccctcggaagtcttctagaattaattaacgcggggtttccccatttgtgagctggacggatttaattcctggctgtttgaatgatgtatcccctcatcagtgaaaccaacagagtagctcaacttaattttctctttctatggcatgccatttatacccattcaattatgcctgtgtcaattaagtcaaacattcttactgtctctatttctaataaaaagtggtaaacactcgaaaacccctttcataaataggcatgtataaaagcaatgttcttaataaaaatgttggacttaataaaagtattttaaaaaacagtaggaaccatagtataataaaggccttggccgggcgtggtggctcacacctgtaatcctagcacgttgggaggctgaggcgggcagatcacgagatcaggagatggagaccatcctggctaacacggtgaaaccccatctctactaaaaacacaaaaaattagctgggcgtggtggcaggtgcctgtggtcccagctactcgggaggctgaggcaggacaatgctgtgaacccaggaggnggagtttgcagtgaacagcgattgtaccactgaacttcagc

SEQ ID NO: 55072 - DNA, 597 bp, Homo sapiens
cgggccccccctcggaagtcttctagaattaattaacgcgggactctgtctcaaaaaaaaaaaaaaagatttactagaggctttgttgggttagttcattaaaggaggttttaacttgatggtgagctggcaaactctgacaaaggaaatgttgaaggaacaggagaaaaggatgctttcaagcatctctggagaaattgacctgagtgatgggaaccaggggttgcaaggtaaagaacgtgctaggagagtgagagcagcctggtcattttccttttctgagtaccagaccataattgaggcccccgtatatattcccccatttaatattcacgttatccctagcctggtattcttatcctcattttcatagaagaggaggttacaattcaatgaggtttaataattaacccaaagtctcactgttcataaatatcaaagttgggatttgaacaagcaactttctgatttcacttcatgtgatttttaaccattgagctgggactgtattgctctttccatgtcaactcctgggactgtttctctgtgcttgtctctaaggcttgtgtatatgagaagcttacaagcttaggatac

SEQ ID NO: 55073 - DNA, 604 bp, Homo sapiens
cccccctcggggtacttctagaattaattaacgcggggggggtaaggtggggcggcgggaagtgctagaagtcaccccagccaaactgaaggagcccagtttccagctgagagggacccaggccgtaataaggatgtccagccaaacgcagcaataattactattggagtgacgccccgaagttgaccccaagctacacagagggtggagtggtgcatcctgaacccaggacagagctggaggcaatgattcagggtttgagaagtatcagcccatcggcctggcgctttaaggtgcagctgagtaggaaaagccaacccacatcatattcccagagccttgctgcgctttctgggttgtcttgttcaaaactagtgaaagggatgggaaacctgcccaacctcactttagccacgaaaataatgctcttggccagtggccttggacaaacagcctctggtgcaacaaaacaatcaataggaagaagaacttcattcccctcaccatcctccttccccaagttcctttgaccagcatacctcattcggcttaaaggagaaagaaaactatgtgtgacattccctcccagcctacctgcagccag

SEQ ID NO: 55074 - DNA, 198 bp, Homo sapiens
  misc_feature 45, 50, 175: n = A,T,C or G
ccgggccccccctcggggtacttctagaattaattaacgcggggngaaanatttttacctcattacttcaagggcgtgctcagtatctacaaagacccaggtaacttcatttgtaagcaagctcttctccatgagaggtctgtgtccagggctactcaccttgaaaaggcctcangaaataaaggagtgaaatgatct

SEQ ID NO: 55075 - DNA, 609 bp, Homo sapiens
cgggccccccctcggaagtcttctagaattaattaacgcgggggctgaggtggaagtagaaggatcgcttgagccctaggaggtcgaggctgcagtgagccgtgatcgtgcactccagcctgggcaacagagagagaccctgtctcaaaaaaaaaaaaaaaatcccaaaaaaccaatttgacacctatgtctctttggccaggattcaatgacagtaaaagatgctataaaagagttgggtactgtgtgagtgtgcgtgtgtgtgcacatgcatgtgcatacctgcaggtgcacatgtgcatctgtattagaggagctcctttccttgatagggtaagatgttctaatcatctactatatacacctgtactattaggcacttttaagtaaatccacatctaaattttcacagtatacacaaggttcttcctctaagcccacattttctgtacttttaattataccacagctacctcccccattcagatacttagtaatttgtttccttgtaaaagataagtgggaaggaatgttagttaaccaggttatggcgaagtaaggactaaagttgatgtaaggccgggtgcagtggctcgcgcttgtaatccc

SEQ ID NO: 55076 - DNA, 541 bp, Homo sapiens
  misc_feature 28: n = A,T,C or G
cgggcccccccctcggggtacttctagnattaattaacgcgggggttacggaagtggattttctctctcccactcttttgccatgcaaggacacagcatccattcccttttttacctttctgccttctgccatgtgagaaggccctcaccagacatcaaatgccagtgccttgatctcagactttccagccttcagagctgtgaggaataaatttctattttgtataaattacccagtctgtgttattttgttacagcaacacaaatggactaagacatataccattagcacttttggaacatgatttactttactggcacggtacatatataaaataaactcttttatccttttgaaaatcaataaatatgcattgaatgcctatgtgtttatgtaggtgtacacaggctataataggagagctctaagatatttaaacatttattctcacatcattagttacttgatagagagtataaagggcagaaagacttgaagtagtgggagcatagccactgctgattaaagacaaaaaaaaaa

SEQ ID NO: 55077 - DNA, 606 bp, Homo sapiens
cccccctcggaagtcttctagaattaattaacgcgggtggtagagtgaggactacagcccaggccccctggtcctccagagggtgggatttacctgcctaataccagccttctccctcaggccgcaagctggatcttcaggcctcagtttcttgctggtaattcctctgcagaggatcaccaggtacccactgctgctgcagaaaatcctggagaacacagtccctgatgccagtgcctatcctgtccttcagagggctgtctctgccctccaggacgtgaacaccaatatcaatgagtacaagatgcgcaaggaagtggcctccaagtacaccaaggtagagcagctgaccctccgggagcggctggcccgcatcaacacacacaccctctccaagaagaccacccggctgagccagctgctgaagcaggaggcggggctgatccccaggacagaagacaaggaatttgatgatttagaagagaggttccagtgggtgtctctgtgtgtgactgagctgaagaacaacgtggctgcttacctggacaatctgcaggtgaggacactgcagggttcataaagggcgagtctgggctgggttcccct

SEQ ID NO: 55078 - DNA, 376 bp, Homo sapiens
cccccctcgagagtacttctagaattaattaacgcggggagatctccaaagacaacaccctacaatgcctccttgagtggctgaatactgaaagtcacaatgacagagatgttggaattaacagacaaggacttgaagacagttatacaacatttcttaaggatttaagggaaaggtggaaatatgagtgaaaaagatgaggaatatcagtaaataaatggaatctacaaaagaatcaaaaggaaattttggaactgaaagaaaaacaatacctaaaatgaaacaaaacaaaactaaactaaaaaacagcaagaaaaaacaatgagtgagctaaaaacatactggacagtacaaaaaacgaaaaccaaaactaaaa

SEQ ID NO: 55079 - DNA, 597 bp, Homo sapiens
gggcccccccttcggggtacttctagaattaattaacgcgggtccccaaaactagttctttcctgaggtctagttttataaatgttgctgataaaccaggtctgtaaaattggaaaaggaaaaaaagtttagaaacaaaagaatagagtcaaatacatagatgtacataaatctgtgaggctttcatagttttttaaataaagcatcttttgactggaccaattaatttgtttccttccccttctgtataaagcttaacattaccataatttttgtgcattataatgtaactgtactatacctaaaaattgcttttgccttgaaaagcttagtaataaccttgtttatcaagtatacatatatatgtgtgtagcagtaagagtaaaatatcatttacaactttagcttataaatagggcatctttgtatataatgaatacataggtacatggtgatttggctcattttgctgttttatgtatatttgttttgagagacgggagattgttttgtagaaaagaatggtatttgagaccgggcacggtggctcacgcctgtaatcccagcactttgggaggccaagacgggcggatcacg

SEQ ID NO: 55080 - DNA, 393 bp, Homo sapiens
  misc_feature 23: n = A,T,C or G
ccccccctcggagtacttctagnattaattaacgcgggggggcaggtcgattgcttgagctcaggagtttgagaccaaccttggcatcatggtgaaacctcatctctaccaaaaatacaaaaattagccagtctcataacccggtctcaaaaaaaaaagataaataaacatttgcagctactgctagaaaattagataaatgtattttgttgctaagaaatacatagaatttttcatttactagttggactattttatttctggaaaatgtatgttaaaactttatagtgaagaatgttaaacctccattttaatgatgccatccacctactggtgtgatttctccccttccctcttcttttttttttttttttttttctgaaactccgtctc

SEQ ID NO: 55081 - DNA, 612 bp, Homo sapiens
cgggccccccctcggaagtcttctagaattaattaacgcgggggagaccccatctctacaaaaaaattaaaaaatcagccaggtgtggtggcacacacctgtagtccaagctactcagaaggctgaggtggaaggattgcttgagccctgtagttggaggttgctgtgagctgtgatcatgccactaatagtccagtctgagtgacagagtgagacttcaccccaaaaaaaaaaaaaaaaggaacttatcacttttttctttgccatgagcaactctcactccaaggcaaatacatttgtaatttttaaggcaagagaaaaaagctaaaggtgtactgttggccaggcacgtggctcacacctgtattcccagcactttggcattttaagataatgatttcatgtttacaataactgtggttgatctctcaggagtaaacattccagtcttttttttttttttttttgagatggagtctggctgtgtcgcccaaataaataaataaataaaatgaaattaggcaaattctgatagtcagcaactatagtaatcggaattgtaaggaagagcccaggtagctcacgcctgtaatcccagcactttgcgaggct

SEQ ID NO: 55082 - DNA, 268 bp, Homo sapiens
cgggccccccctcggaagtcttctagaattaattaacgcggggaccttgtgatctgcctgcctcgtcctcccaaagtgctgggattacaggagtgattggaaactggaatactgacaacgtgacgttgttcagcaattattgttgaatttgctaggtgtgtttatggtatggtagttatttctgtgatgtttgacaggtaaaataatatgatgtctgggatttgattaaaaagaataccttggggtcagggagtgaatgagtggacat

SEQ ID NO: 55083 - DNA, 571 bp, Homo sapiens
ccgggccccccctcgaaagtcttctagaattaattaacgcggggggctgctggagagatcttcccctccacttacccgattgcctacttacccctttggtgatactgggaaggcattgctaaggtgtcacggttgcatttcctggctggggcactgtggcccagatgtggccactgtgaaagttgccatttgaagttacccctcccgctttctcttccattccttggaagataagtgcattctaattttatgtttattttttaatcttaactttaacatattaggattattgcatctttccctgcagtgcttttgctggccccgagatagggtctcctcaggtgtgagggagacattaaagaaccctggagaaaacacatcacgaggccaagtagaattttgtgttctctctgttggccacgcccacctcccaggacgctgtgtttgggaatctgtctcaaacaaattccaagaactgtgaaatgccttcatattcacaaaagagtcatgggtgaagtggccaaaatactagaaaatgacattccagcacgagcaaagattttttaaatgt

SEQ ID NO: 55084 - DNA, 630 bp, Homo sapiens
cccccctcgagagtcttctagaattaattaacgcggggtctcgatctcctgaccttgtgatccacccgcctcgacctcccaagtgctgggaatacaggtgtgagccaccgcgcccagccaattttagttatctttgacataataaacttttcagccagccactctctttcaacctcagtttatgaagacacttggaaagaaagcatggaaagggacgatacagctgtaagccctggaggttcttacaagaggatatcaggtaccaaaggtcaatggtatgaataatgtaatatagatctaattggcgtaatcagtagctcaattgtcagatcccttctttaaaaaaatattttaatgaaagtcaggaagttaccatgatgaataaacacacaaaaaagtcaaattaaattactatttaataaagtgacagaatgagggaaatggcaaaaatacattcctaaaaagaattagtctatacatctgtatagtgtggaaaaataaagaaaaaaagaattaatctatatgttaaaatctgaatagacactgagataacattttcattaagaagcttccccccgccatagctcatatttagtcaaataatcatcatacaatatttacattttatat

SEQ ID NO: 55085 - DNA, 614 bp, Homo sapiens
  misc_feature 24, 531: n = A,T,C or G
gccccccctcggagtacttctagnaattaattaacgcgggataatacatttgtgtgtgtgtacacacatactattgcaacactcatgacatggtggtgttttcataattagcgtgtagatagtcaatatatgtgggcagaaacccatgtctgtcttatttaccgttagtatttgcattagcacagcacgtgtctacatagtatgtgctttaccgatacaagtgaagaatgataatcaacaaagcaaacaatctttgatagtgagatgagaagctataataaagcttatctgtctgttgctcctgattgccttttctctgttcatctagagtaagagtaaatagaagaggcttattcaacaatattctgtatttatagaaagacattttagtaatactctttcctcttttaaaaattacaataactattgttaatgactaatcttaatttatatatacaacttttaaacaggtcaaagaaagtatctgttccatcaactgtgatatccagagtgattggaagaggaggctgntatatcaatgctattcgggagtttactggtgcacacatagatattgataaacagaaagacaagactggagaccggataatcac

SEQ ID NO: 55086 - DNA, 416 bp, Homo sapiens
ccgggccccccctcgggagtacttctagaattaattaacgcgggcccagccacttgttaagctgtgaagtctctgagcctcagtaagatggacttaacttcatctacttgcggagttgattaaagataaaataatgtatacaaagccctaggcatattgttctggcaaatattttgtaataataaatgtagttacttttaaaacttgaaacttggtatgggtgaggaggagatgcatacaagcatagagaaagatgctctatttgcattatagttaggttgaagattgggttttcttagactgactccctcctcatccctattaaacatgtctatcataatctgggcaaactgatcagtcatcacagcctggcagtgtgtggaggaaagactaactgacgactcccttgcggacaa

SEQ ID NO: 55087 - DNA, 586 bp, Homo sapiens
cccccctcggaagtcttctagaattaattaacgcgggggaaattacctctattgaaatggacccttaaagcatcaccatccatcactgacaagtgaggggactgggaactttgcaaaggtggcagtttgtagagtattttacatatgagagcaatattgcacaaatttacaacagaagtagcactctctgtggaatgtcctaagaagtgcacagtggtcctatttatgcgtaacattaagtgccaataaagaggtgacttctcagtatgagacttaagaacacttcaggtagcacttcaaagccaggtttcagtcgtctgaaaaacaagatactgactgaatgaaagggtctaataatcataaaatggttttaaacatagtggagtttaaaattaataagatactataaacatgtataacatgaagtattattaataaaatataataagaaattcaaaattgttgcagatttggcataaaatgtcttcaagcgatctcttaatttcctgtttcttaatggtagatttaaagtcatatattcatataattttttctttattatacttagcatcttaatctaatgtgt

SEQ ID NO: 55088 - DNA, 504 bp, Homo sapiens
cgggccccccctcgagggtacttctagaattaattaacgcggggggtgtctctggagcccagagaaaaatccaagattctttgaaatggcaaaagcccccaaagtgactttcttgtattgccacgatgaactggaactgccctgacaaactctaaaaagatagagaccttaataaattgtgtagagaagaattaaaagagtgaatacagatgcatggaaaatctctagaacagtgcctggcactcatattaagtattggctctcacacatggataacagacacaaggagaccaagtgacttgccccaggtggcacaactagttagtggcagagatggaggaaaaaccagtctctgattctttgttcacagctcaggtaccttcagtcctttctgaaattaagtgagagtataaataaagtcatttagtggataaatgaattttaccactgttaaatatcagagtagacctggcacagtggctcacgcctgtagtcccagcactt

SEQ ID NO: 55089 - DNA, 611 bp, Homo sapiens
cgggccccccctcggggtacttctagaattaattaacgcgggggtgaggtggcaggcacctgtagtcccagctgcttcagaggtctgaggcaggagaatcggttgcacctgggaaacggaggttgcagtgagctgagattgtgccattgcattccagcctgggcaatcaagcacgactgtctcaataaaaaaaaagaaggaaagtaagttcgttctttgaatgttctcttctgtctggaaattaccaggcagagaacagaaaagtttgacagagtgaagacttcccagtatgcattcaagacaaggacttctgtcctaagaggcagctttggtaaaaagaaatccttcagccccaatactggggtatgagacagcagggctgccaagaaaagctgacaacagcgacaaaagcagcagcagcagccgtggcagccacagctatatcttgcacatttactacctgccagcccctgcctgcagcattgcatacagtggtgacagttatcagtaccagttccgagtcagcaggcctgggtctgaactggctccactgctgactagctgtgagggcttggaaagtccctgacctttctgagcctcagtttcctctt

SEQ ID NO: 55090 - DNA, 559 bp, Homo sapiens
  misc_feature 88: n = A,T,C or G
gccccccctcggaagtcttctagaattaattaacgcgggggtggtcggggaaaacaaggagaacaaatcagtatcttctctgacacantgaaaattatataaaattcaaattttggtgcccataaataacatgttattggaagagacacgcccatctatctacatattttctataactgcttttgtgccacaatggcagaatcgaagagtgctaaaagagacaatatggctgcaaagtctaaaatatttactatctggcccactagagaaaatatttgctgacctgtattgtaattcatttagagaaagccagagacttcaaatagttacataaatataagcaaagagttgatttactgtcatcataagaatcccattcaatgactttaaaataatcctgtataaatacctcatgtatttaacatatataaaatctgtggataaacaagtatagcctccactgagaaacactatgaaggctaagaagcaaaacaaaggccaggcaaggtggctcacgcctctaatcccagcactttgggaggccaaggcgggtggatca

SEQ ID NO: 55091 - DNA, 596 bp, Homo sapiens
ccgggccccccctcggaagtcttctagaattaattaacgcgggggtggggttcaggattccaggcaggaccctggaacactggtcgcagattgaaatatgaggaacaaaagcagccattgttaagatgcctatcacatacccacggatgcactgagtgtcttctgggaattcctgttgaaccccaccaaagtcccaggtgtcaaggtcacccagccagcagccagtcacacgcaggtgtgtgtggtcccaactcccgggatctcagacactcccttcctactgatggaacatggatgtgtactcagaactcagagaacagaacctgatcgcaggggatctttccaggctgggaacttcactgtcacttttcacagtgagtctaagcaaaagcccattctgagtcctaaagtcaaacctcctgagctccagcagcctgtgagtggtgtctgcacacacagccccgaaggaccctgctcaaaaatgccacggtcgggcctgcaggaaggggagcttattcggaatttctctattcgacttcaaggcagctttaagcagaatctgctgtggatgagcatccactttaaaacacgattag

SEQ ID NO: 55092 - DNA, 591 bp, Homo sapiens
ccgggccccccctcggaagtcttctagaattaattaacgcgggcctacaagagagatggagtagcacatattaaaagaaactccagacttcaggcctttggccttaatttggaattattgaattggttttcattccttaatatcccactattgtacaagtcatatgtactttcaaaagagctgtagaaattacagaggtgagtaacaactaaatatttatgtcataaatatcatatcatttaatctatacagcaatttcacaagattgatataatgatcgttattttataaagggcaaaaatcaaggctcaaaaagatgaggaaacttgcctaagattagcaagttagtgctaaaactatgtttcaaatgcagatctatctggggagaagggttaaaacacactcataaataatcttaataggtaccttatatacattttctttttcaatctgcataaaagctctgttttgtctccatttcatagatgagtacaatgaggatcagggaaagttgatactttttcagagaaaacatgcaaatattctatgagaaggatacctgaagtactcttggtttctgggggtcatcaa

SEQ ID NO: 55093 - DNA, 530 bp, Homo sapiens
  misc_feature 20, 33: n = A,T,C or G
gtaccgggcccccccctcgngggtacttctagnattaattaacgcggggaccatgtcaaaggcaggctcttttctcttacagattactaccagatagagtacactaaagacatatctaagaataccaagtgaagattaggtctgcctttcaaaaatatataaaatttcaaagttagcagcaatgctaaaaagaaaaaaaaaaggaactacctaaaagatagatcattcattcattcagtcactccctcattcgagaaatttttatttagcactcattctgtaccacacactctgtaggcattagaaatattataacgagcatggctgagcacactggctcatgcctatcatcccaacactttggacttcaaaacttaaaaagatgatacaagataactatatctatgacaaatttgtttagacacaaagattcttacaccgggtcaaaaaggtaataattacaaaactggggaccatgtcaaaggcaagctcttttctcttacagattaccaccagatagagtacactaa

SEQ ID NO: 55094 - DNA, 499 bp, Homo sapiens
ccgggcccccccctcggagtacttctagaattaattaacgcgggcttctaaactttgtttatattcatatagtgcctagtgcctatacagctccctgagataggtaggtgaggtattactatctttgactttcatattacatttcacatcagacatatttgtgaaataaattttataagtagtctgaagcccagagaggctaagtgactaatccagggtctcttggttagtatttggcatatacagaactacaattttgggcttctttctcattctggttctcatctagtaccttttcatttgagtgctggaaaatgtatcccagtcaactgaattgtggagtcatattgcctcccccttaccaaccaagtgatggcagtactaggaagaggggcaaaagataagtcagaaatataagtgataaaataaatggaaatgtttgaaatggatcatcgacctccttttacctatgttagcacctcacaaatatcccactcta

SEQ ID NO: 55095 - DNA, 490 bp, Homo sapiens
ccgggccccccctcggaagtcttctagaattaattaacgcgggggcagcggcgtggtcagcaccgtggtgtagccctacgacgtggagatccggcgcggggagaacgagggcttcggcttcgtcatcgtgtcctcggtgagcaggcccgaagcaggcacgacctttggtgagtgctgaacgtgaaattacccagggtttcccaccatgcctgggagtttttgttctcttgcgagtgaaagctgactcagacctcacgtgcagaaatgctttatagcttcttgctctgggtaattaaagacttaattggagatggagttgatttggtagctttttcccttttgaaggttgggaatatttgttcaaccctttcaacttccacactgagaatgtgatcacgcatacacaacttaaagcatacatcagatttgcgtgaaatttgaatagcagccgggcgctgttgctcacgcctgtaatcccacactttgggag

SEQ ID NO: 55096 - DNA, 586 bp, Homo sapiens
cccccctcggaagtacttctagaattaattaacgcgggtagactatacttcaaggcgatctttacatccgattattaataatgctcttagaatatgttaagatattgaacaattcccttgaattaatatcgaatcctcaacacatcaaaaagtccatcttgcctttgaagcaggagtgagatggtcttccatataagctcatggttataagagctttgtagctagtccctcctcatcccttttgaacacacataaatgcacacacacagagacagagagagagagagagagagacagctccagccaagaggcagaagtagatcttacatagatcccactaccaaaatagaagtgtctgcattcagctaagcgaataaccataacaaagatgagcagaatgcttaccatgtgccaggcaatgcactacaagttctatatgaattatttcatttaaccctcaaaacaactccataaactatccattaggactttgagactggtgggggcggggggcggggattaaaatgtttagaggaaaattcaagcaactagaacggagtgaagctggaattcaagcatggattgt

SEQ ID NO: 55097 - DNA, 594 bp, Homo sapiens
  misc_feature 24, 589: n = A,T,C or G
gccccccctcggaagtcttctagnattaattaacgcgggcccaggatcaatagtttgcatccttcaatccaaccaagttgacactcagtattaaccattacagtatctaatcctataaggaagatacaatttttatgttaaaaaaacttccatagaacttcctatataccagacacaattctaattacttaacatttattaatcattttaaccacataacattcccatgtggttagtactgtcattattgtccactttcaaaataacaaagacactgagaggctaagtatcttgcccaaggttacacagttggtaagatacgggatgtaaacacagccagtctgtttccagagtctgcattccatagagtgtggtataatgtattataaaatagcttctatgtaaataacttcctcatatatttaagagtttttattacttttagataaataatacttctctagaaattgccagtccatttctttaaaagtgaacatgttatatacttacccccagagcaaagggtatggcttattcaaattgagcaattgactcaattgaacagatttaagctattgcagcctagctntgatg

SEQ ID NO: 55098 - DNA, 616 bp, Homo sapiens
cgggccccccctcggaagtcttctagaattaattaacgcgggctatcattgatatttattcaaggcccaaggtctctttagtcagcaaatgatgaatcctgcaggaactgggttcttctcttcaaggcagcgggctcctttctgtcacaaggtgtgcctataaatgtcatctgggagctagagcctagaacacatagtacacaggtctcaggactctccctggtgccctattctactgtagggctgagctggtacccaagttgcaagacaaagtcccctttatttaaccccctctgttcctcagtcagaagaaaggagtgtctccttgggcttcatgaaggaagtgaccctttaagattttccttttagtgtgagtaagacattgacgggggagaataacaaacaaaaaatacattgaaggaaacatgcaatgtatatttagggaatggtcagcaggcccacctcactgtagcagagtagagttagattcaatacaacattttggaaaatggattagagcataaagggactagaactagaactatttattcataatccagatcaagaacactgcagaagaatacggcaatggaatggaagcctaaagtcagatcta

SEQ ID NO: 55099 - DNA, 186 bp, Homo sapiens
  misc_feature 30: n = A,T,C or G
accgggccccccctcgggggtacttctagnattaattaaaaaaaaattaactctcacaaagtagaattttggggcctagcatctgtgttttaggaaatgaaagaattcaggcatactgtactaagtcacgtgaaaggcagtaacttttagaagcccaaattgcttttccaaaaggaaaatattttt

SEQ ID NO: 55100 - DNA, 471 bp, Homo sapiens
ccgggccccccctcggaagtcttctagaattaattaacgcgggggatgacgaaaattgactgtgggtcttgaggactcacaaaaggttgggtaataaaaacaaatcagaataagattagaaaagaaagcagagagaataaaaatagagcagaagaaacaagttgttttaaaatctactagttatggaattagaggagaactcgtattttaagggctatgaatttcttgaaagaatggtgaagtagatcttggaaagtagcagaaatcctaaacctatccattcttaaattacttctttaattgaaaaagaagtcctaattcactgctaatgaacactgattgatgtatttttaacattcttctgtttagcattcattctccaaaaattgaaagcatttaatggattttaattgcataatattattattcttgcaggtcaagggggtcaattttgaggcagttctgagggtg

SEQ ID NO: 55101 - DNA, 613 bp, Homo sapiens
  misc_feature 15: n = A,T,C or G
cgggccccccctcgngggtacttctagaattaattaacgcgggccaggctgagggtgatactgaaataagaagaatctaaaagtacaatggtacagtgcctggttcagtatttttgctcagcaaatacttaaatttatttcaaatatttccaaatttgataattatcttaagttccagatgtaaaatgaattaattactttgaaagggaatagtgatactaccacagccatcacagaatgtggaattaactgttctccattatgcaattctcgatagtatttgctatcactttaatgtatcttactaacctattaaataattcattcagaacatatttattgaggaattatcattttacccacactattctaagcattggggatactggagcatatgaggcagaacaaaacccttaccttcatggagcttccattgcagaggaggaaacagatataaacaagataaaaagtaaattatatagtacattacatagtaataggtactaaaaagaaaatacatggctgggcgcagtggctcacgcctgtaatcccagcactttgggaggccaaggtgggtggatcacgaggtcaggaggttaagaccattctggcc

SEQ ID NO: 55102 - DNA, 582 bp, Homo sapiens
ccgggccccccctcggggtacttctagaattaattaaacgcggggagtacaagtgtaattttgtaacttgcttagattgcatagtggtgaagtcagggattttagggtttccgtcacctgagtgacagacattgtacccagtgagtaattcctaacccttgtcgtcctacttcctgaggacagtgacctgattccacttgtggactgtgggcttggcttaccttgtggatggctccagcccccagcagaaaacttagaagcatcagatcttagtgttgctgtggctttctgcctgtggttcaggctgcattgctggtttccgaaccttgcttttccttgacctctgtgtgtatcccagatctctactgtgatctgactttgtagcctcttccttgatcctgattgccagctactgggtacaacttagtctgctcccagcccaataaagaccccacctctggttccaaccttttcctggctgtcatcctaggtgtccacctgcttgagagccatctgttttagagaagtgcagaggtcactatccaggtcctaaggcagcatcctggccgggggtgggggcaa

SEQ ID NO: 55103 - DNA, 619 bp, Homo sapiens
  misc_feature 605: n = A,T,C or G
cgggccccccctcggaagtcttctagaattaattaacgcgggcacctggcagaaagtaggatgagtattacagcatctgacagcaggtagctgaaaggaactggcaattctttcagtcctgcctgctcatgaattctagatacagcaagaaatgtaacaggtaaaattatatttatgcttaacaaagacttcctgaattttcaaataacatgactacaaacagtcctatacttccccaagaatatatttttacttttttccccagcttcccaagcttacaatcccaagaataaaatattataaagcagaatgagcttccatttttgttgaagtcactgcaatgcaaataaaaggcttaccgtaattacatctggcaatgaagttacatttaataactttcagtctcatggcacctagcagagactagactttcaaaaagcacaaaataatagacactgactacaaagaacaacaatataaaacaaagaaactcaaaatagtttgctttatcccttaaaggggcacaaaggtctgagatttgtatgtaaatgcctgaaaataagagaataccatttatatcatcatttatagttattcaatgaatntttgtaattctaat

SEQ ID NO: 55104 - DNA, 603 bp, Homo sapiens
cccccctcgagagtcttctagaattaattaacgcggggcaatgaaaataatcaaaattggtgagagtcagttagggaccatttttgagctgcgttcccacagaccaaatacaactctaccattgagggagggagtgtgtgtcctagaaaggtcccgctcagagcaggcaccaggggaccagggttctaacccagtgtggcctctgcttgctgatgacttataagccaacgcaattcctttgtgaaaggaagcaggggtgaagccatacatggagagcatggcacttagaagaggcccatgcaacccaagccctgctgggtggacactgagagctggagaactctggatgcatgacaaccccttcccaaccccctgcactaagagacttaacgaaactccagcacagtttctagcagcataaggccctgtcccttggataacaccagcccctccctaaaatgcctgcctaagaaggctcaaccttgccagaaaattttactatttgttctatccaagacatccctgagaggtccctgacttctctttcctgaaatacttactaaaaaagaactttaaattgtaaatatatagctcttgcaatgc

SEQ ID NO: 55105 - DNA, 527 bp, Homo sapiens
  misc_feature 468, 494, 495, 505: n = A,T,C or G
ccgggccccccctcggagtacttctagaattaattaatgtgaagtttcactgtgtatagaacaaaccgacagacacataagaacactttagattattgcaagatgtttccagaagcccacatactagaaatgtggaaaccaagtttttcagggaaagagaaaatacttaccaccgctagcacttccttctcttttgccacgggagcccccactgccatctctgcctgactttatgcgctagagcaaagagaagacaagtttaaaagaataagtgctattccttcaaagttgaatatagataaaggtggattttaaaattaacattactacattacccttaggactaacccatcatacctgagagttgattctatagaaaaaaaaaaaagcctgagttgttttgtaagtggagggttcaagccttcccctctaaggctcttgagaaactcgtatagcactgtaattcanaagtgcagcgtaaccttggcttacanncagcactcanaactaaacagtattttcttgat

SEQ ID NO: 55106 - DNA, 515 bp, Homo sapiens
gggccccccctcgaaagtcttctagaattaattaacgcggggggtgtatatagagaccctgagaaaaatgcgaggatgcgttgagatggcggaagcccccaaaagtgactttcttgtgttgccacgatgaactggaactgccctgacaaactctaaaaagatagagaccttaataaattgtgtagagaagaattaaaagagtgaatacagatgcgtggaaaatctctagaacagtgcctggcactcatattaagtattggctctcacacatggataacagacacaaggagaccaagtgacttgccccaggtggcacaactagttagtggcagagatggaggaaaaaccagtctctgattctttgttcacagctcacgtaccttcagtcctttctgaaattaagtgagagtataaataaagtcatttagtggataaatgaattttaccactgttaaatatcaaagtagacctggcacagtggctcacgcctgtagtcccaacactttgggaggcca

SEQ ID NO: 55107 - DNA, 597 bp, Homo sapiens
cgggccccccctcggaagtcttctagaattaattaacgcgggccaggctgtttttcatcatctccctcgtgcagagtaaaatttttcctgagttcacatttaaacttctaagtatacagctatcaataaatatcatgttcctctagcatatcagcaggaaatctgaaagaacatgggataagcaagtacaaggaaaatacaaaatgaaacacctagtaaaatagtaagtaaacattttaggaattgtgccaaaaaatttctttagaaatctttagaaacgcttcagaatttagggatgttttattatttgtatccctcctctcccctccccatcctacacacatgcacacacacacacacacatacacattgagcacttttggctcaaaaagtgtcttttctttgatcttttggagatttaaaatctgcttatctgtggaatggaacttcaagagatctttttatctaagtgcttagacatttctacaaaaggcactctttaatctgaaaagtatcgatttttcttattaattgctactgtttgccaacggtacaaaaattttccttgtcttatgtctgtttatcacactatgtcca

SEQ ID NO: 55108 - DNA, 601 bp, Homo sapiens
ccgggccccccctcggaagtcttctagaattaattaacgcgggagtacaatattttatatgttatatccatataacaataactgttctaccaaaagcccaagccaaacaaaatctaacaaagtctcattaagtattcaactggatatgcagtgcttagcagagaagttgccttaaataattctgctatgatttcctactgaaggagatgcaaagttctttaccctgacctaagttcataaaccttttgtgttgactgactggcattgcaggttggcaggatatttcttccaatttactttcactgcagttataaaaagtatagccctcactcttatttttaaatgaacaagtgtatgtcattcacaataaaataatatcagtcagcccagcaaagaatgagaagtcagtttcacaagtaattgagatctcttttcagtcttttagagaggggagaataaaatttcagtgcaattgtaatttcctttaattcatgcaaatcttagcatattttatcatattcataaactttccttgggattcagttaattcctaagttgccaccttagatactatattgtaaggccctggaaactactactg

SEQ ID NO: 55109 - DNA, 487 bp, Homo sapiens
  misc_feature 24: n = A,T,C or G
gccccccctcggggtacttctagnaattaattaacgcggggttcatgtcattcacaatgtgctggcggtaggtgtggaccacttccacgttactctgcatttcttcctgcatttagagaggtgagaagatggtcctcatcgcactgtggccctgagctggtcactactctctccattctccaggttatttggagacaatagtaaagataataatgcctaatccacaagacagcgacggacctaaaaaaaaacctttgggaaagcaacacgcccaaccaggtgcagacaggggtttcactatccgctgggagcacaaaagacccccatcctggaaaggccacaccccacccttccaaactcattactttgggagtttcaatttgaagtcagacatcctggatctagagcttagcttcatcactgtccctttcgtaggcaaatctgtcaacctctctgagcctcagatctcttaaaaaaaaaaaataaa

SEQ ID NO: 55110 - DNA, 522 bp, Homo sapiens
ccccccctcggggtacttctagaattaattaacgcgggtgggaagaatttgtaatgatgaagcaacagctccaggagaaggaagaattcattagcactttacaagcccagctcagccagacacaggcagagcaagctgcacaggtagggacctcacaaaattaggataaagagctatgaagtccagtgggttattacgcacaagtcaattcagtgagtcactttaaaaaatcctagtagataaaagtatagtagcatgggtgttgcactagaaattagaaggatatgtagtagaagagattaggagatgtgtggtaggtaagtgtgtcattagggaacaccagaaaacctcacaatgtgttatttgccttgatgaattttctatagcctaattgatgactgtttcttagttctgcatgtccagaaacttaattttaatagcagacagagattcagtcttttgggaatggactcatgctgagttcaaaagagaccaataagtaaaccaaaaaaaaaaaaaagc

SEQ ID NO: 55111 - DNA, 595 bp, Homo sapiens
cccccctcggaagtcttctagaattaattaacgcggggtccaactggctgatgatagcaggttgtttggttacttcaacaaccaaagcctccatggctgcccggagaccagtgatacaggcagcagcttcatgagatatttgcagtttaatcctaaagtggcgaaatacattaaaaataagagagggagtatatgtagaaaaagaccattatctctcaacttcacacatggcacattatagaataaatttaacttcttaagcattaatattaaaaaaaaaaactacttataatggccccaaacttaggcaaacacagatatgaagagtagttataatcagcactagcttcttaaaattcactgctagctatgagcaggagtcttaagccaaaaagtctatcaagccaaataaaatataataaaaatatatgcaatatataataaacaaaaaacaaagtccagcaatatggatcattcagactttcttttttttttgagacagagtcttgctctgttgccctcgctggagtgcagggcaaaactgactctcaaaataaataaataaataaatttaaaaaaaaataaaaataaaaat

SEQ ID NO: 55112 - DNA, 596 bp, Homo sapiens
cgggcccccccctcggggtacttctagaattaattaacgcgggggtgtctgagggggtagtgatttgggactattaaaaggaacattttttgtttgtttgttttgggggtgtctgaggaagtcctattttagacaagttgaatctgagctttgtggggcacatgtagaagaaaatgtctaacaagcacctggaactcagcaaagcctggagaatggacataagtggcaagaaagtagatgagatccccagagaagatatcaagccaacgagaagcctgctgctaaaactctatggaatgaatttaagaataatcacaggaaaagaaaccagaaaaagggacagaatgaatattcatagtaagaatatcagggcagactacttaacaactactaacaagcatatgcaaaaataaagttaaaaaagagagagcaattaatgctaaggatggtttcattaagaactcatagaaaaacagcttttcagaggaaataattgatacttcattccttgaacagaattttgggagcaattctaaacatacattccctgacaatgagctaaacaatacaacaagttttctaaaatttagctctcc

SEQ ID NO: 55113 - DNA, 598 bp, Homo sapiens
cgggccccccctcggaagtcttctagaattaattaacgcgggtcagtgtttctccacagctgcgttctgtggcagaagacgctagagtcacacgtagaaggcgcatgaggagggaaggtgagtggcaaggatgctacggctggccacagcgatccttccagattgcaggcgcgtgagctggctcactgacacgtgcagtgagtgcgagctacaaactagattccgaaaactcagtccaaaaagtcttcaaataattcaataatcttacagtatgggtggttgcctgttgaaataatttttagataatatcgggttaaataaaatatattattaaaatcgatttcacttgtttctttttacctttttaatgtagctattagaaaatattaaactacataagagactcactctctagaccttttcgacagtgcaggaatggagttttcaacccttggcacccaaggagctttgtttctatgtcttctccctgaggacattaccagcagctggatgtcatcaggagacaatagggaaatgatgcggaaagaaacctccgtaaacactgaatgtactaagccaaaaaaaaaaaaaaaagcgg

SEQ ID NO: 55114 - DNA, 585 bp, Homo sapiens
cgggcccccccctcggggtacttctagaattaattaacgcgggaaccccggcctttactgttggttcatctcagatgaatatgtttctaaagtcatgataaaccaacctcatgcattttaaatacctccagaatcacagttagtctttttcatggctcccgtgaggttttctagtttttcacgtcctcgcctgtgactccttcctctggccaaatggggagctcctttagtgaaaccccacatccttacctctgtgagtctccccttcatattcacccagccccctttaataacagggctgctggttccccctcaagccgacttctaacaagctactggagcaaccgtgcaagcttgggctagtcattgcttcaaagcaattactggcggatatttaaaggagaaagagaagactagtccaagaatcctccacttcagttaaaacagaaacacaagccagtaatcccagtgattgggtcagcccactaaatgaggctgcacctggaagagaggaattcttcctcctgcccacatttctctgagctagcccagccggcattggaagggatcacagtgtagacagag

SEQ ID NO: 55115 - DNA, 604 bp, Homo sapiens
  misc_feature 27: n = A,T,C or G
cgggccccccctcggaagtcttctagnattaattaacgcgggaggaggggaggagcgcggccctcttgtccactctgcgggtctggtctgagggggcggagccggctgcaagtggaaagggaccgggaccaacctggtaaaccattccccaagtctgagtcccccagaaccttgggctgaacccgcccctccatcgcctctaatggaagactggttagggctgcggagttaggggtggcgtagattggagatgcttggctagtggaaagaatggattgccttccggcattagagaaattagattggcaccttgttttcttgctcggttggatccgtgatgttatgtcctcacagctcatcgactatgggaagctgggagacactaacgaacgagccatgcgcatggctgacttctggctcacagtgagtgcgacctatctgccttcaaaatcccaccctttgctccctgggggtgggggttggaaaaaggagaactatgcagaattaaacttgggtactcacttatgggccagtgctgctaactaaattagaaactgtgtcttaagttagttgaagtcgatgtgaatatacctctgcacaactg

SEQ ID NO: 55116 - DNA, 603 bp, Homo sapiens
  misc_feature 25, 27, 38, 558: n = A,T,C or G
actgggataccggggccccccctcnangatcttctagnattaattaacgcggggtggtaagacatgtatatatatccaggctcaactcctgtgtgatcttttgccagacgcttagcctctctgagcctcagtcgtttcctttgtaaattggaggtagtactacttactttcagaattgctgtaaggagtatggataatgtctataaagctattggagcatagtctgtatccaataaatgtaagctatgatcataatttttaatttaacatgtgcctagtacttgacattttacaacgtttttttcatgtgtattaactcacttgctctgtctgatctttgcaataccatgtgagataatgatgttattatcactactagtattaagacccaaaacataaatacatctcttcttctgagtcaaaagcacaagctcatttcataccatcatgatatgtgtaaatgtatttgtagaccacctacatcacacaataactttatccctgcatattttataaatttttctgctataataattataatcatcttttcatcatatngcctaattagttgtgcttgcttaatggaatgctattgattttact

SEQ ID NO: 55117 - DNA, 627 bp, Homo sapiens
  misc_feature 24, 556: n = A,T,C or G
gccccccctcggagtacttctagnattaattaaataaaatgggaaaattcagatcctcaggtgctcagttactatatgtgactaccatcttggacagtgcagatacagaacagttccatagtcacaaaaagttctattggacagcgctgttctacagcaaccttttcctagaatcttgcttggattgttccccctccctggacgctttgggaacctccctgttttctgtgacattaggtccaaattgctccctgaacttccaggccttctgtgaactgttgccattgctatgtgccctatctgcctttatatttcttgtgctctctcttaggccgtttgccttactgccctatagacatgctgtgcctgactgagactctacctaacaatgaggggttgagggcagtagctgagtcttggtcagctttagggtctggttcagggcctggtgtaccttgtaggcactccctctgtaaatattttgaatattttctcttgcttagaataatctgcagctggccaggcacagtggctcacgcctgtaatcccagcactntgggaggccgaggtggatagatcacgatgccaagagttcgagaccagcctgaccaacatggtgaaaccccg

SEQ ID NO: 55118 - DNA, 580 bp, Homo sapiens
  misc_feature 28, 84: n = A,T,C or G
cgggcccccccctcggggatcttctagnattaattaacgcgggtccctgttctgcccttggcctcagttttcccacccacaaanagaaggacaagagttgggcaagatgattcctaagctctaatgggaaatgcctcctggtgggtggtatctaaaattcttgtcagcacctaggacagagatattcatagcactccagggatttcagagaggatggaaccttagcatggatagaagcatggatgctgttgaatgcatgtttggattaaaatcctcttttcatttagatcttgaagtttagttgaactttttatggagtttaagaccctttcaacattttgatatcaaaaaaccgaaaatagaacctaactcctgtgccatttattccttgggagtatgaaccaaaaataaaaattatatagaaattgtatttcttgtcttcatgaagtttgctaggtaaatgtaaaaagggaatctgagtaggaaaactgatagagaattctcaagtgacagaggagagtggtctattatcatatgtgattatttggcttcccacttactgcagtttttggattaaaag

SEQ ID NO: 55119 - DNA, 599 bp, Homo sapiens
cgggcccccccctcggggtacttctagaattaattaacgctggggggcgtcatcctgtcctgcttgttaatgatgtccatgtggaagggggagctctatcgtcgaaacagatttgcctcttccaaagagtctgcaaaactctatggttctttcaacttcaggatgaaaaccagcacgaatgaaaacactctggaactgtccttggtagaggaagatgcgcttgctgtacagagttaattctggttgtgaatatcttgagagtctgccttggcattttataatatgaaaaaagttaatttataaaaattcacagtgcaatttatttgcctggcaagaaaagtttatttcacaaaccaacagccagtaagtgtttttgttctctatgtgtcttctatttagaagaaaagccatgtaagatgtataagaaaccacaaccagccacacctatccttctgaagagctgaaggctaattaatctgtaatggccaagaacttctacttcgatagaaaaatatttctaatgacccagtctacaaattatttcttttacacaaatatatgatgttattctttggacactaggtggtcctacacacagt

SEQ ID NO: 55120 - DNA, 594 bp, Homo sapiens
  misc_feature 28: n = A,T,C or G
cgggcccccccctcgaaagtcttctagnaattaattaacgcgggatacgcaaattcttttctttcttttttcaaattttggtagagacaagggcttgctatactacccaggctggtctcaaactcctggcctcaagcaattctcccaccacagcctcttaaagcactggggttacaggtatgagctaccatgcctagtctccagatgtgtaaattcttacaacctctatcttcattcaccattttcaggaagctactgaaagatgtgttgccgaaaataagggagtatacaaagagagaagttagggaattcaggcaacaggagctcccacaaagggggaaggtaaaggaaattctgagaataccagcaaagggaaacatcaggaccagaacaaacatgagcaggagagcagagaactcttgaagttggaggcaagacgtcaaagaaaaaataatgacgtaaccaagtacctgatatattttaccatgtggaaaactttatcaagaagcttttttaaatagaggtgtttcaaggtatgagaaaactcaaatgttatacaactaatttgtttttaaaaagagaggggtggctggg

SEQ ID NO: 55121 - DNA, 435 bp, Homo sapiens
  misc_feature 396, 397, 398: n = A,T,C or G
cccccctcgagagtcttctagaattaattaacgcggggtaggtcggggtaggtagcagggcaagtcccttattccccctaatccaggtaactagcatatcccagcacagcagttgcaattccgtgggtgccacccataacattgggtggggagggtccatgggaaggggagatagacttcctctccctgcagccacgtagggcaggttggtggcccagtggctggcaggaggaggaaccctgcttagtccatgaagccaggggattttgcatacactaagtagcaaagcagggactccaggtgcccatgggggtctgtactcctccatgaatattcccaaactcaagggagtaagatataaacagcaaataaaattacaacaagggagagactgtnnnaaaaaaaaaaaaaaaaaaaaggaaaaaaaaaaaaaaa

SEQ ID NO: 55122 - DNA, 455 bp, Homo sapiens
  misc_feature 37: n = A,T,C or G
ctgggtaccgggcccccccctcgggggtacttctagnattaattaacgcggggggtgtcggggaggggttcagctgctttgctcttttaaatactttttaactgtggtaaaatataaaacgtatcatcttaagcactttttaaattgtgggaaaagatacataacataaaagttagcactttcactatttttaagtatatagttcagtggcattaaggacatgcagacattgttgtgcagccgtcaccaccatccatctccaggactttttcatcttcccaaactgaaacaacatacttatcagatactatctccccattcccccagccttcctgcaaggctggcgttacgataggtgtgctcagcctggacaggacttcagtggaggaggacttgacaccaccaaatagtgtgaagaaaaacctagaagtttggggagaaacagatagggagag

SEQ ID NO: 55123 - DNA, 488 bp, Homo sapiens
  misc_feature 431: n = A,T,C or G
cgggccccccctcggagtacttctagaattaattaacgcgggtatcagcattatttaggaactgtacctcggcttgtactccttgtcccaataccctggaaatgtgacctagttaataataatgataaaaatagctagtgtttatgaaatgcttcctatgaagtagacactgttttaaacacttataagcagtatcccatttaattcttattaatgatcttaactttaacaagccctattgtcttcattttacagatgatgacactgaggctttgctaggttaaataatctaaaccaaagtctcacccttaaccttggctttatctccacttgagtctaagcttccagtttcaaatttatttaaccatagcaccatgaagaggggagtaagcaccatggatctttggaggccagtgtttgggatgagctanatagggtcaagtagggcttctcaaatgtacatcaaaactcatattcataacatgtaa

SEQ ID NO: 55124 - DNA, 601 bp, Homo sapiens
ccgggccccccctcggaagtcttctagaattaattaacgcggggggggtagggagggagatttttatattacatcttctttactgtttgagcattttaccttaaaatatactattttataatttaaaataagttttaaaaattctgcctagtgactcctctggtttttctaaacttagtcatatgatgaatttattaagaaaactgaagccgagcttagccaagatttggaaacatcaccaacagccaagcctcagattaaaacgctctcctcagcttctgaaaaacccaagatcaaacccctcacaccactacacaggtagaaatttttgataacttgtctgtattctgccttgtttgaaaaaggaataagggaatattttcagtagaagttaccctttaagtaactgaaattacagaagtaaaaatattattttctatttttagtgtcagtaaattaaaattgttacatattataattaaaaattatatgtataaggtattgattttaaaatacatttttaatcctgcagtctgatgggtacaatgaaaatggtagtttccaacattgctagtagtagcataagttgatgtagaccttt

SEQ ID NO: 55125 - DNA, 576 bp, Homo sapiens
  misc_feature 546: n = A,T,C or G
cgggccccccctcggaagtcttctagaattaattaacgcgggggttaccagaacaagaaaaggccttcatagttctaagtgaagaaagaaaaaacattttattttggccaggcgcggtggctcacgcctgtaaatcccagcactttgggaggccaaggcaggcggatcacctgaggtcgggagttcgagaccagcctgaccaaaatggagaaaccccgtatctactaaaaatacaaaattagctgggcgtggtgatacatgcctgtaatcccagctactcgggaggccgaggcaggagaatcgcttgaaccctgtaggtggaggttgcggtgagccaagatcgcaccattgcactccatcccgggcaacaagagcaagactcagcctcaaaaaaaaaaaaaattgattttaggaggctgacaattacagttcatttcctaagatattccagacaatcactggttggctgacagaatctaggtgacagctaagatcacccctctgaaactcccttatatttggttaagcagaaatctgggctagcanaataaactactagaaagtcagggtctggat

SEQ ID NO: 55126 - DNA, 585 bp, Homo sapiens
  misc_feature 28: n = A,T,C or G
cgggcccccccctcggggatcttctagnaattaattaacgcggggcatggtggtgtgtgcctgtaatcccagctacttgggaggctgagacagaacaatcgcttgaacccaggaggaagaggttgtagtgagccgagactgtgccattgcactccaccctgagcaacagagcaagactccagctccaaaaatagagaaactcaataaaagggttggaagataaagtgagaaacactcgcagcaagttaagcaaatagacaaactgagggatgagaaaataaaacaaaacatacagtaatttagagaactagatcaggagacctaccatacgaataacaagagctccagaaaaagaaaacagaagaaaaagaaaaaaggaaagaagtcgtcaactaaataattcaagagtatttcccaaaatgaaagaatggtttctagattgcaaaatcttctagggtatcagcacagtggatgacaatagacccacaccaagatgtattcattaatcatgaaatgtcagaacaatgggaggaagaatactgcatatactttcagaggaggggggaaactaagccacatcaaatg

SEQ ID NO: 55127 - DNA, 387 bp, Homo sapiens
cgggccccccctcggaggtacttctagaattaattaacgcggggcagccagtttgtcctatagcttcgatgttaagggctttacgttcctcctcgtcttccacatgctttagacagggttcattccgctactactcgcccccatctacaaggatataaaggaaaatggattctgtaagagttggaattcctacagagatatgtgccatctagatgtaaaatgtagcatctattttcctaatagctgaaataacaaaataatggtgaaatggtttgtgtgaactatttcccagcatattatcactacctctgaacagtaaaatgcctcctctccagcctagagaacagcctacgagccaaactgctcctaaaagtagctggggtacat

SEQ ID NO: 55128 - DNA, 515 bp, Homo sapiens
  misc_feature 441: n = A,T,C or G
cgggccccccctcgaaagtcttctagaattaattaacgcggggccacacgtaagttgctcattttataagaatactgtgcatatgtatgagtatgtgtatgtacactaagatttccacttagctagactgtcacagactaagtctgtagttaaagaagacagaaggataaagctagggccaaaacaaaatgggaattgcaaagtctgtgcaataaagttgcaaaagcaggacgtatctgttccatcacaagcttcatataaccattaaattactttttgtctccaaaagtgtgcctcctcagaattttatttgaagagaacagtacagttgtggtctttgcttctgcatttcaatattttgcttgaaacaactgcaaacacacaactatacacacacacacagacacacacacacacacatatatatacatatctgaattnttttaaaacaagttttactttaatttcaacagctttaaattattcattaaaagtaaaaaatgttgctgagtcat

SEQ ID NO: 55129 - DNA, 614 bp, Homo sapiens
  misc_feature 40, 48: n = A,T,C or G
gccccccctcgaaatacttctagaattaattaacgcgggngtccgtgngaaaagaaactttgacctaaaacaacaattcccaaagtgtgctacaaggcactgcagaccttcggagcccaaaaaaacatcaggcacattggcaatgctgacttcagttttctttgaattagactaaaggtgaccagtgggatgttaaataaataacatagctgtagcattctcatacactgtttgtgagagtataaattggtaaaccttgatcgtttgactttgtgctccaaaaggcttcaatgatgccaaaggccgtttgagccagcaattccacttctagcatttattccaagaaaccaatgagatatgtgtgcaaagcttaaaacacaaaaatgttcatacccagctgtgcaagaaatagtattctgtcaataaattatgtaaattcgtgattattgatataaaaataggacaaacatgaagtaaaagcagtatgaggcaaataaaaataatttcatatgcatatatttacacagaaaaaagtttggaaggatatacactaactctttcctagtggtactttctggtgatttaatgatcctttggtctattcattttcctat

SEQ ID NO: 55130 - DNA, 590 bp, Homo sapiens
ccgggccccccctcgggggtacttctagaattaattaacgcgggaagtctgataactccaaggaccaagaaggatgtgtggaaatgggaattcaaatatggcagcatagaaactggatatcaaatattgttgaagagatggtaaaatcaaagaagtacttgagagagcaatttgtcaatatgttgaatgtgaagacatgctaccctatgacccatcaattctactttgagatagctattctagagcagtgcttctcaaaccacctgtggaaaaataccttacctttttgtgtgtgtatttcaatttatgaggaaccaataaattgtaaactataacaaaaacaaattacagtactagaaaaaagaaattaaaaaaacaaaaacataaatatataagctctgattttttatttttgattcaacagacataaaactgctgtattaaaatgctataaaaacttctaaacactcattctcaatttctatactcatctcattgaggctcagaaacaaaaagctggtgatagggcactggcccacaccatacactgagtaatgctactctatggaaacctgcacatgtacactgta

SEQ ID NO: 55131 - DNA, 484 bp, Homo sapiens
  misc_feature 28: n = A,T,C or G
cgggcccccccctcggaatacttctagnattaattaacgcgggggaggcagaaaaacacatataactcttggctgtatctctgtgtaacttaactactataaattctggacgacacgggtcatggagcaaataaactacacttaggctactgagtttcacaaagctatctggttttatgttactgtgttattcagattcatcttaaattgaaattatcacaaaatattcatttgcattttcattactgggtatagtctacttattttttcatcaaagcatttaaatgttatatttgtctgtttcaggactcatgcccgttgcacagcagccggtttattgtgctttaaagcatggcatagttggattcacatgctcagcagcgttggctgctaatcttatgaacagtggtgtgagactgaatgccatttgtccaggctttgttaacacagccatccttgaatcaattgaaaaaaaaaaaaaaaa

SEQ ID NO: 55132 - DNA, 465 bp, Homo sapiens
attaattaattgatttaagttaatgtgtttacatttaaattaatttacttaaattattagaaatttttaactcagatcctctgtgcagatatagaatacttccatcattgcagatggttctgttggaccgcgctggtctagaagacactctaggatggagaataaagagtcttagtgccaggttttcagttcctgattccaaatcacctgaaactcaactttatctcctgccccctatcctatgagttaatttgtacccttacaataatctacctccctgcctttaccatcaccacctttctcttgagctagattttagttcttattctagctctttataatcaaaagaagcttggctaatacattggttgactaatatgatattaataataaatcaataattaccattacaatttatgggatgcttatgtgtatggacagcaagtcttcaccattttacatata

SEQ ID NO: 55133 - DNA, 443 bp, Homo sapiens
cccccctcgagagtcttctagaattaattaacgcgggctgctttattagaaaacttatcaccaccccttgatttatgacacttaattttttggttaacattacacaaactagttattaatatgacttttctaactaataactaaaaataagaatcctcttggttgaaacttatcttaaggctatccatatgaggtaaagttatgatatctaaatgtaaggtatgcttgagataatctcttctaaaacacacacacacacacacacaaatgcacatttccattcctggtctcctaaagtgatggctctcatccagggggagattatgagttaggtctcctccctcatttctataacatgtctagaagcaatttcagttgccaccattggggaataagggtgctgctggcatccagtggatagagagtggggatgctgcaaaccc

SEQ ID NO: 55134 - DNA, 266 bp, Homo sapiens
cgggcccccccctcggggtacttctagaattaattaacgcgggctcttattttgaggtatctaagagaagaattgaagaaaatgatttcagacccaagtcagggccatcacactgggatggaatttaggaattctgataccaattcaaactctaggatatcaatttaggtccaagtactttttattttgaagtagtggccagacaagtattttattactgaccttgtttggaattgtcagagcatggtcctaaaaaaaaaaaaaaa

SEQ ID NO: 55135 - DNA, 281 bp, Homo sapiens
cggggccccccctcggggtacttctagaattaattaacgcgggcaatcttaatagtcctggcttcccgtttcatttcttctaagcacttaaaggaaatcaaaatatcttactgagtagttttctgatgtaaaatctctccagtttaattccagttgaatactcaatgtaacatcccttcattatcctcaagtaaataaataaccttatttgaggtgctactctataagccaaacactatttctcaagttaacaaaattagacactcccaaaaaaaaaaaaa

SEQ ID NO: 55136 - DNA, 336 bp, Homo sapiens
ccgggccccccctcggggtacttctagaattaattaacgcgggacatatgtaactaacctgcacgttgtgcacatgtaccctaaaacttaaagtataataaaaaaagtagtttgattaaaaataaataaataaataaaagacttattcagtacccaacataaagtacctatttaataaatataaaaaattctaaaaaaaataataagtcatgttagatattgcaaagattacatatatggctcacactctgtatgcaacattgatcttatcagcactcacatgcttatcctttctaaactcaaagctaggaatttacattccaaaaaaaaaaaaaa

SEQ ID NO: 55137 - DNA, 599 bp, Homo sapiens
  misc_feature 22, 35: n = A,T,C or G
gggtaccgggcccccccctcgngggtacttctagnattaattaacgcggggggtctcccatattggatctcctttttttctggagtcgatgccttttgtttccttggtttagtctcttcttttggtggaacacaccttccagttagctccctgtaaaaggaagctgtcagaaaatgtctctcttctattctcatacctaattgatcatttttggctggatacagaactctagctcaaacatgattttccctcagaattttgaaggcattactccattggcttcttgcttccagagttattgttgagaaaactaaatccattctcatcttgatcatttgtatgtggcctgtttttttttctccctctctgaaagtttataaggggtattctttttctttttaatgttctgaacttttatagcattgtacattggtgtaaagtaatttttatttattgggctgggccctttcaatcatgtccatatccttctggtcagggtaaaattttccatgtatttcatgggtgattcttctttttgaaacttgtgttgttcagatgggggttttggtgggctagtcttagaatttgtcttctactct

SEQ ID NO: 55138 - DNA, 618 bp, Homo sapiens
cgggccccccctcggaagtcttctagaattaattaacgcgggtagtatcaagagaaaactcatgattattgtatctaagtcgtattgctgacataaggttttccaaaacatctctaagttgttgcacgttggatatttttgaaaattgattaagatacaagaaagagagccaccattttccaaaatgaaaggcaattatttaattttattttatttgtgagaagattaagtctataatgacattttttgcaaaaattgctcccattatatatgtataataagctgtcaattgtaggtatcacaatgactgcatttttattttggagattttgtggagaaatggttgatgaaataacaggtatacatgtatgtcttaaatgctttttctgtccagaagtcatttttttgtaaataaaagtatatattttttctttttcttcccccactagatgtgggttctgtggaaggacttgcctatcacagagcctgggatacactgtactggacaagctctaccacctcatccatcaccagacacactgtggaccagactcggcctggagcatttgacagggaagctgtcatcaccatgtcagaagatgaccatccacatgtgct

SEQ ID NO: 55139 - DNA, 585 bp, Homo sapiens
  misc_feature 459: n = A,T,C or G
ccgggccccccctcggggtacttctagaattaattaacgcgggtaacagcagatagtacagaaccctatatatacctgtattatgttttttctatacattcatttctataataaagtttaatttacaaattacagtaagagactaataataactcatagtaaaatagaataattataacaacatactgtaataaaagttatgtgaatgtggtcccccaaaaaaatatttgattgtatgtaccatactcacctattgtgggacctcacaggaactgaaattgtgaataaggaggaacttctgtaataccatttttaaagtaaaaagagaaaacctcactgatcccttttggtggatgctagaaaatcaaataattattctgaaaactggtaaataaaagtggagtgagggagaatcaaccaagagtttaccctgtcttttctatttgaattgtgccttangccaaccagagggttaatgagggaaagttttatattttagatggattatagctccatctaaatagtgaattagatataaggaagcaatgatagagtatcaacattttgccggtctctaatgaaata

SEQ ID NO: 55140 - DNA, 592 bp, Homo sapiens
ccgggccccccctcgaaagtcttctagaattaattaacgcgggtacattagttaacatatccatggcttcagtttcctcatctataagataaggatagtcaaataatctatctcataggattaactgaaagattaaatgtgatgattcatgtaaaggactcactagtgcctagcatacaaaggatgttcaatacatactggcttccataattagtgcagccatcatcaccttcactccttgtgtcatctttaccacctgaggaccagtattggtggctgcgggagcacaatctaaaattgatttggtttcagatgtaacatttaatttattctgcaattgcaaataacatccaagaagggaaaggattttgggtattccaatgggttagaaaaggttaaaagtagcttaagtaggtccaacgatctctcttaccttcttagagtcttccttttagtgactttcagcttcaccaaacatttgcatatgaatccacaatattaagactatattaactctttttaattcaaaactacattacaggccaggaacggtggctcacacctgtaatcccagcaccttgggaggctgaag

SEQ ID NO: 55141 - DNA, 347 bp, Homo sapiens
ccccccctcgaaagtcttctagaattaattaacgcggggggctcctctcatttccatcatacgcctgcctgtgtctgaactcatctcttatacttaacagctgtctcccccttctctattctcaagttggtttatgaggggcagggaccctgtgtgtcttgctcataattaaattcccagagcccagaacagtgtctggtacacagtaagtgttcagtaaatatttggtgaaacaaagcatggatggatagcaatatcctttttctccaggtggagtaaagcaatcatttctgtttgtgttcttcccaacaagcacatacagtattttgtaatttgaaaaaaaaaaa

SEQ ID NO: 55142 - DNA, 591 bp, Homo sapiens
acttctagcattaattaacgcgggacaagttaggaaaggctatattttcttttgtaaattactggaaacagtcaggtattaaaatgtgctccaaaaatgttgcagataatctgtctgccctatctagggtaggaggacgttcaaacattgttttggaataaaatgctgatatataaaatatatcatgactttatctattacagcaccatagtccatcatctctcacctggaccctgaattgatctcctaacaggtcttcctcccctcttgcactcttgtttcctgtcacttctggtagcaaaactatttactaccagagtgctgcttatataaaatctgctgtggacttagaaactataaaactaagcttgtaggctatagaaagaagagtgaatactatattacctgcgggagagaagaaggaatggagggttctcctataaggagaccatgaccttttgaacttaaactggatttggtctgctcagtagtaactctgcttgcttgattcatgactaggaatacagttcagggtatgagaatgaattgagctaaaccttcactgagcacctcatgtgccaaacaccgatg

SEQ ID NO: 55143 - DNA, 498 bp, Homo sapiens
  misc_feature 11, 23, 36: n = A,T,C or G
tgggtaccggngccccccctcgngaatacttctagnattaattaacgcgggtcatatttctttaaagctaaaataactcttttgtcatcacttccccctccaattttccctttacaataaaactcctttaatatgtccatttttacactccctaatctgtctttcatgaaaccaaactccagtcaaggttttacctcatccatgccaccaaatctgcttggattaataaacccagtggtaaatctcagttcctgtgttacttgacccatcagcagcattcaacacagttgatccctcccttttccttgaaacctggctttctgctccctcactggctgctgctccttggtctcctttgttggttcatcctcaccttgaaatgttggcatgctcctggaatccgcccacggacctcttctttatttgtctacactccttctcagtctcatggctttgactacgatctgtatgttcaccactcccaaaaaaaaaaaaaaa

SEQ ID NO: 55144 - DNA, 620 bp, Homo sapiens
cgggccccccctcggggtacttctagaattaattaacgcgggtaccattgtatgtcaagggtctagaacagtatctagtatgcggtaggtactcagtaaatttggtgaataaatgaatcagaagtaaacaaacaaggaaccaaacccgcacaagaaagaaagctacaaagaagggaaagaaaaaattcacagaacctccgtctgcccatacaagccacttatgactatgctcattttggtggatattctttcactcacaaaaatttacaagtctgttctccaatgccttctatttcacaaacagcttttttcttttttacttaacaatacattgaatatccattccataatatagctttatatttatggttacatagccaactattgtttggcttataccataaattatttaagcaattcttattgataaacagttaagttgtttgcattgttttgtactacagacagtgttatgttgagcccttgtatacaagtgtctttacatatgtatctgattttatcttgggaattaatttttaaagataaactcactaggttagacagtatgtacatttatattttgataaatattttcaaatcacctgcaggagcaaacaatt

SEQ ID NO: 55145 - DNA, 617 bp, Homo sapiens
  misc_feature 30, 593, 594: n = A,T,C or G
accgggcccccccctcggagtacttctagnattaattaacgcggggggtaatcttgttatttaatctctcagcgacttggttttctcatctataaaatgagaattatattaatcactaccttatagggtagtttaaagtgtctaacatacagtatgtatcaaatctacatcagtttttctttgaattactattagttgtttcattaaaattattagcaattattaattgttctctctgtattcattaaaataactaagattacactgggctaacaaccccaaaatttcaagggctttaaacaacaaaggctttaaaaattttatttatttttttttagaggcagagtttcaccctgttgtccagcctacagtgcagtagcgtgatcatagcttactgcatccaaaaactcctgggctcaagtgatccttccgccccagtctcccaggcaagtaccatgtgcccagctaagtttttaaaaatgttttctagagataagtctcgctgtgttgtccaggctcatctcataatcctggcctcaaaggatcctcccacctcccaaagtgctgggattaccagcatgagctaccatgcnncagctgacatgatttctttctag

SEQ ID NO: 55146 - DNA, 546 bp, Homo sapiens
cgggccccccctcgaaagtcttctagaattaattaacgcggggtctcttggaacgaagtatgatgtataatcctgtccacaagctcctctgatggcttcctttccaggaaatgtatcaattttatcacctcttttctgatatcctagggagagaaaatgttttgagaactaaattgctaaaactgaataaatcactatctaaatgaaagagaaaaaataaacctttctcttttctcctactgatattagaattagatttctaatgagaaatctaattgggggaattttataaaagctgttttaagtataattttcctcatccataaaatgcttataaaagatactttaagattattcaaaaaactaaatgagatgtttgtgaatgcttattgtagtccttgatgcataatcacacttaatagatgttgtctatgaaaacaaacatcatactcaaaacctaaagtcccctgtgaaaaatcaagtttgggggataaagatatacaggcaattttcatttttctcctaatttattggtgtaattagtga

SEQ ID NO: 55147 - DNA, 571 bp, Homo sapiens
ccgggccccccctcgaaagtcttctagaattaattaacgcgggactgtcttgatgtagtaatcaattgcatgctctctgaggacataaacctatgcttgcataatgttttgaaccaggaaatataatgagtcagtgcttggagaattacactaatgtgattttaactgatcaaattaatgcaaatttcaacataaaaattaacttttgaaaaatgtcaggggccaggcatggtgggtcatgcttgtaatagacctgtatattgtagatctattcacagtagtcaagatatggaactaccctaagtgttcattaataaatgaatgaataagaaaaatatggtatattttgggagcactttgggaggccaaggtgagaggactgcctgaggccagggtttcagatcagactggctgacatagcaagaccccgtctctaaataaataaataaataaataaataaaattagctgggtgtggtggtacacacctgtagtctccagctacttgtgatgctgatgtgggagaactgtttgagtctgggtggtagaggctacagtgagctgtgatcttg

SEQ ID NO: 55148 - DNA, 600 bp, Homo sapiens
cgggccccccctcggaagtcttctagaattaattaagaaattaacctttatttaagttatggatagtatccttaactgtattttcaaaaaattaagtataaaattgtgataacagcctaacagtcattaattcaaaccaatccctaaattggcagaagttcagctggtatcagtaaaacaatcaaatattgctacccagctgctcctattcctatctgctccacaaatactgagacatacaagtcattctttcatttaacaaatatgtattaaacacctatgcacctaccatgtacaagactgcctactaaatgatgggaatacaggtgtgaataagagacaaggtttccggactcacaaaacttaaaatctagctgtagagacagacaataaacaaaagaaattacaaaatgtggtcaatgctatgaaggaaatacaggctgctcagacaaagaataacaagggacatctcatttaataaatgacagcaattaacattcactgagcactttggatagggtagtgagagaaaacctctctgaaaaaatgacggttaagttctataacaaaagaacaacaaggagacaccaatgtgatgac

SEQ ID NO: 55149 - DNA, 289 bp, Homo sapiens
  misc_feature 23: n = A,T,C or G
ccccccttcggggtacttctagnattaattaacgcggggtggaaaaaaaaaaaaaaaaaaaaaaaaaaaaaaaaaaaaaaaaaaaaaaaaaaaaaaaaaaaaaaaaaaaaaaaaaaaaaaaaaacaaaaaaacacagaggggggccctccaatgggggccttccccgggggggtttttccccggcttccttttcccgggtttttttacgccccccttgggacccccctttttggcccccccttggttgcccccccttgtttcccccttactccttcccctttttccccg

SEQ ID NO: 55150 - DNA, 496 bp, Homo sapiens
  misc_feature 49, 77, 96: n = A,T,C or G
acttctagaattaattaacgcgggcactatgtacctcataaatatgtantcattattatgtgtccacttaaaaacangaaaaaatttataaataangaaaaaaaatttatgtaatagaacaacctgatacatatttcaaaataaatatgtttaggatatttagggagatgaatgaaggaaaaacctccataatgagcaaataattgaacaaaacccagcacaaagtgaaacaaaagagatgtggatataaaaaataatttaaaattctagaaataaataatatagtcagtgaaattaaaaactttatagatgagatatactctagattagacgtaggcaaaaaggaattaataaattggaagaaagtaataaataattcacccagaaggcaacagttagagatgaaatatatatgagagggtgtttaaggtatttggagaatacactgacagactcctatagacatctaacagcagttccaaaaaaaaaaaaaaaa

SEQ ID NO: 55151 - DNA, 305 bp, Homo sapiens
  misc_feature 37, 88: n = A,T,C or G
ctgggataccggggccccccctcgaaatacttctagnaattaattaacgcggggaggccaagtgggaggattgcttgagcccaggggnaagaggttacggtgagctaagattgcatcactgcactccagtctgggcaacagagtgagaccctgtctcaaaaaataaaaaacaaaataaataaataaaaaataaaaggcattctaattaagttgttgctttttttttttttttaattccagagcggactgatgtactggcccttagtacaggtgagttccgctctggaattaaaaaaaaaaaaaaa

SEQ ID NO: 55152 - DNA, 533 bp, Homo sapiens
cgggccccccctcggagtacttctagaattaattaacgcgggaccttacccccacaattcctcacttctttagtcttctatgccttcaaacacatattttcttatattgtccagcttttttagctgtttttgacgggaaagctgttccaacccatctggtttcctactgctggttatctcaaaagcccttgcttctaaatcgtatgcacatgaaagctgtggcagcagaatctgtcttgctcaagcttatttaatatttcattttgaccctgtaccaatatgataaaatttatataaaattattttaaaacctttctgcaaatcatattcttgtaaactgttgacaataaatacctttcactaaattacattaaaatacaggggaaattattagacattaacccctaagttttattctggccaaaaaatctaagcaaattttcttctaaccttgatgggaactgctgaagttgcttggctgcataagttggtactgcaaatctgtttgcatatataggctaaaaaaaaaaaaa

SEQ ID NO: 55153 - DNA, 309 bp, Homo sapiens
cggggcccccccttcgaaatacttctagaattaattaacgcggggtgccctggggcagaggggatgtaagctctagccctggccacagccatagcccagaccagctgcatcccccttctgagcctcaaaaagtttgtcatctataagatggggagaaactgaaagctgattaattacaggaggtttgttcaggtcccccaaaccaccgtcagatttgatgatttcctagcaggacttacagaaataaagagctatcatgctgtaaaaaaaaaaaaaaaaaaaaaaaaaaaaaagaaaaaaaaaaaaaaa

SEQ ID NO: 55154 - DNA, 279 bp, Homo sapiens
  misc_feature 28, 39, 57: n = A,T,C or G
actgggtaaccgcggccccccctcggangatacttctanaattaattaacgcggggngagagagagagagatcatggcttataatccaaacaaaatgtaataaactgcatgaaaataaataggaatattaaaaaaaaaaaaaaaaaaaaaaaaaaaaaaaaaaaaaaaaaaaaaaaaaaaaaaaaaaaaaaaaaaaaaaaaaaaaaaaaaaaaccggccccccccgcgggggacccccaataccccctatagggagtcatataacccccccccactgcc

SEQ ID NO: 55155 - DNA, 602 bp, Homo sapiens
ggtccgggccccccctcgagtctttaattattaacgcgggcacaggaaaggctaaaaatatgagtaccgttctagttctggcattatagcagattggggacactgaacaatccatctgattaaaattatgaaaatattgggttaaatatattaaaaaatatttttaaaaaactattaggcacttctctgagctcacaggaacaggaaaaacatgacaattacactacgtgtgtagattgaaaaaaaaaaacgtaattggtgaatttaacttaagagccctgttattagcaatgatagaaggaaactgggaaatactattcccccctggaggatgccaacttcaatcctatcctcaaattatttccacagattccatgtgttgtaaaaataaggtcctagtttgtggttgtatttttatcttttagttgttcttgataaaccagaaggtttaattttaatgttttaaatgatacatattttcttttataatttgtaaatttttgacctgaccagttcacaaaaaattcttcctgacttaagtcagaatttcctaatgataaatttgcagtttcatagtatggggttttacatttaacccacct

SEQ ID NO: 55156 - DNA, 600 bp, Homo sapiens
  misc_feature 41: n = A,T,C or G
aagactggggtaccggggccccccctcggggtacttctagnattaattaacgcggggtatgaaaatttcttagacaaatcaagtagaataaaataagcaattgatatgggagatttcagaaagaaccattaagcttgatttaatgaataactagctcatattattaaaaaagaaatgtggaatatgcagtctcttaagttcatacaagtcttgtaaaaatcaatgatgaacttagtaataaggaaaacctgaatacataacaaaaagttgagatattgccaaaatccaatagaaagcaatgatgacaaactgctgaccagtgaccccagaaattagcctattagaagtcaccaaatcctcttctgaataatccttgaatgatttcctcaaaactaaaattatattatatagatcaatagttttacatcaaaatttacctcattattctgtaagaaaaatttatactcataagtgatttctgttttgaaatgtgctctgaaatcatgtgaaaagttataacattggaaaatcagaaaaagtagaatagaacaaaggaaaaattaaatataaaaaagaaacaaatgagaaaaaaaaaaaaaa

SEQ ID NO: 55157 - DNA, 562 bp, Homo sapiens
  misc_feature 23: n = A,T,C or G
cccccctcggaggtacttctagnattaattaacgcgggggagtcagagctagaacaccaattacaaaccacagcttcctgctctagggagttgatccagaattgtctttctgaaaggaagcactcggaatccttccgaactttccaagtccatccatgattcagagatactgccttctctctctctgggattttatgtgtttctgatagtgaattgttgatgtatttgctactttgcttcttttctctttcaagacttgatcattttatatgctgtttggagaaaaaaagaacttttgttagcaaggaggtttcagaaatgattttggattttctgtaagtgtttaatttagttctaggggacagcatctctcatcccggagtaaatttctgcctttgacctgcatggattattttttcaggctgcggaatttctcggcacctacctgtagtatggggcacttggtttggttgcagagtaagaaggtggaagaatgagctgtacttggttaagcagttgaaaccttttttgagcaggatctgtaaaagcataattgaatttg

SEQ ID NO: 55158 - DNA, 498 bp, Homo sapiens
accgggcccccccctcggagatacttctataattaattaacgcgggtctggcctctcctttctatctccagtctgtcctacatattgacaatagctaattttccttagatatcacttactttttttttttttaatttgaaaatccattttcaaatcaccttctcatgcttactagttgtttctgctctggcataatattggcatatatgtggtttgggttgccgtggtgccagttcttatccattgactctgggagatctttcattatctcccattgattgacagtattccatgagcctcttagtttgaaattctgaggaaatgtgattgattacttgccatccagtagattgggttggctcccattgagataggtacttactcctatctcatttgtctttggccaaatagttgactgccaaatattgcaggagcattttctagagagaaggctatgacttaagcagtcatttcaaagcgtatctactacagctctcc

SEQ ID NO: 55159 - DNA, 334 bp, Homo sapiens
ggccccccctcggggtacttctagaattaattaacgcgggtactaagaaaactgtgttggtaaatctcaagcatttcagaaaagtgtttttttccttgcacagaatttacttacctaattcccagagaccctgttttcaaatagaatatcctaaaatatatttcatgtcactttctgtgtcatatttggtcatgtgctgattgattcccctctccccttttaatagctccgcaaagctggatgaagaatttgaaaaaaaattcaacagcctccctcaatatagtcctgttacatttgaccggaaatgtgtacctgtcccaaaaaaaaaaaaaaa

SEQ ID NO: 55160 - DNA, 594 bp, Homo sapiens
  misc_feature 20, 33, 504, 516: n = A,T,C or G
gtaccgcggccccccctcgngggtacttctagnattaattaacgcggggcatcatctcctaattttgtaacccgtaagtactctacatacgtgttatctcacttttgttttcagtagcaaacccatgcctttctacttaaagtttattcctcactccatttcccctcaaaattctcttttccaattattttactctctttgcatgagtctgtctcaaccgaagtcagatactgtacacttccttttttcacaaagagaataaaatacataccaaattctttttgattttttttttttaaataaatattcacactgcaacttaccttcttgtatttatcccgctgacgggagagacagtactacattttgagctttctggggcttctgctcctggaatagatacctcaattgtcctctttgctccttctaaaatataaaaataaatattagttccattacctttcaatgaaataaaaatttcactcaatttctatcttactgcanactgcacattanaaatttggtggttctttccatctgttttatcttagcccaagatcacttgaaagaccttttttttttttttactgaact

SEQ ID NO: 55161 - DNA, 618 bp, Homo sapiens
  misc_feature 22: n = A,T,C or G
cccccctcgaaagtcttctagnattaattaacgcgggcccaggactaatattttgtatttctcattcaatacctatattacatcaattaaatgatgaaacatgaaaatgactagcacaaccagacatttaacaaatggttgtacatagtttagtgaggtggaataagataagcctgtttttttttttaaagtagatctaggaataagatgagtaaaaatcagcatgaaacagaaaaatttagcctctctgtatatatacctatccctattaatacaaatcacatgatgactatatacttgtaaacacagagacactcatttgaaaatcagcattaccaaagagaaaataatgaaagttttcaggttcctagggaggtatattctcttgaaggagataaattttcataggctcagaaactaattttctttctcttatttgtacctgcagaaacacatataattaatgatttaatttttatctatctatgaagtatatatatccctctgtataaattaatacattggtatttggtttataataaatatctttttatgctaactaagagtcccttccctagagcccagtgaatttcagctcagttcaataaacatttactg

SEQ ID NO: 55162 - DNA, 525 bp, Homo sapiens
  misc_feature 11, 24, 488, 512: n = A,T,C or G
gccccccctcnaaatacttctagnattaattaacgcggggtgtccctgatgccttggggttagaaaaccttgagatcagattcattttgcaattcaggatgtatcagatttttggaacaacacatatcgatacaccatatagtgtttaacatatccagtttggtttaggggagcactctacaatcaactctataaatatttatgtactgaagtgtatgaatatgcatgcaaacttgtataaataaagactataaatagcttccccatccacttccatcatttatcaaagtacaaataatataaaaaacttggtttttaatgaattttggatcacagattttggataaggatttgtaatttatctaggcactgggctgtccgaaaaaaaaaaataagaagctgtctttggcaggatgtggtggcaatcccagcactttgggaggccaaggcagggggattgcttgaggttgagttcaagaccagcctgngtaacatagtgagacccatctcanaaaaaaaaaaaaa

SEQ ID NO: 55163 - DNA, 543 bp, Homo sapiens
cgggccccccctcgaaagtcttctagaattaattaacgcggggtgggaaataaataacaaccaaacgtgcctcgtcgctgaaccaggcgacttcccctctagaacgacagctgccgaagaaagcatctgccacacgtttgctaagaaataattctttaaattcctttcttatttatacaacaatagcaacaacaaaagctactctcaataagcactttaggatgaccttctctattagaaatagtcactgctctttcaggctattgaaagctgagtatagtgtttttttaaaaagtcaacaatgtgctaaactttgttggctcaactgacacgacttaagcgtcaggttaatctagtccatttcggcgactctaaaaaaatcacctatttaccaccttcaaacttggagaaaaacttcctggcctgtatattttttaaagacacacacacaaaatccccacacacatttttattctttttctcaaaatattagaggaaaaggagtagtgtgacatcaatgaatacctatttgccttcaaaaaa

SEQ ID NO: 55164 - DNA, 590 bp, Homo sapiens
  misc_feature 38: n = A,T,C or G
ctgggataccgcggccccccctcggaaatacttctagnattaattaacgcggggtgggggactagggagggatagcattaggagaactacctaatgaagatgacaggttgatgggtgcagcaaaccaccatggcctgtgtatacctatgtaacaaacctgctcgttctgcacatatatcccagaacttaaagtataataataataaaaaaatttaaaaagctctagttaaaatgggaaaagccaacatattactatttcaatatgaatacaaaaaagccttttaaattgatgcttgcaaatactaagtttttatgagattaatttttatgaaagaacccagtacttttgttaaagccatttgaaatacgctcttctcaatcataaatctctatcatttcaaacacattacaaaaccagggacttttagatcctctactgtgtatttaaaacttcctttaccttcatcttaagtactctgtagaagtccaatacccaccgtagatagtcgtcacttagcttttattcaggacaataatgagtgtggctggggaatacatctctgagaaggtggaattttagctgagatctg

SEQ ID NO: 55165 - DNA, 473 bp, Homo sapiens
ccgggccccccctcgaaatacttctagaattaattaacgcgggacgagtgccttgcttgaaccaaagcaacgatttagccagtctggacctctctgtgctttttttaattcttcctgtgaatacctcagcttcaactgggcctccatacagtcagttggtgggcttattgtactgtggtgctttgcaatgcaaccctgcaaagaacaagatttgtactaataccaaaggttctttctctatgtctcctcctctgcctccctcgttcttcccttttttctagttcttcacggttccaaagctttactatgaacctgggcatgttggcaatgcagaccgcgcaattccttaccgaattttctcagatatacctcatagacaatagtgtttagagtaatgttattatagcgtatgtaataaattattcactgtttcttttggtaactgtgatttaaaaaaagaaaaaaaaaaaaaa

SEQ ID NO: 55166 - DNA, 589 bp, Homo sapiens
  misc_feature 569: n = A,T,C or G
cccccctcgaaagtcttctagaattaattaacgcgggaagttccaaaatcattcaggtattaaggaacagaaggtatcatttaagtgaaatgctatgtaagaaacagaacaaaaagtgtccaatatatagaaaataaattgttcaatctcacagaaataacaggatttttggggcactaaaccaaatcaaagttcctgtcagaaaggtttgattgccattgccagtaatatttttcttcattaaatgatctctaatgtccctttaaatacacagactttcctgtggctatcttgagaatatctgataggagagaatctaacttcttaaaacaaacatatgtgaaaaccacaagtaccaatacatgattggacagttccagctcacaatataaaggatggttcaaatacttacatttcagaaatgcttagttcttctgctgcttcttcagcaatttcatcagcttgtttgaacccagatcatcatcatcatcacttgctatgtcttcatcactttcaactggatcaaaaaaagtctttgtccttcacatttctggaacttttacctgacntaaataaaagatttttaaaa

SEQ ID NO: 55167 - DNA, 622 bp, Homo sapiens
  misc_feature 31: n = A,T,C or G
taccgggcccccccctcggggtacttctagnattaattaacgcgggactcatccatgggcattaaaaggataataagtagctctatgccacagatttgataatgtagataaaacagaccaattctttaaaagacgcaaattactaaaatccacagcatgagagataacctgtatattcctatttctgttaaagaaatcatatcaataataaataatattccaaaagagaaagcaccaggcctatatagttgcattggtgaatcatagcaaatatttaaggaatagataatgcaaattctccataatctcttccaaaaaataaaagcagttggaacagtctctacattattctatttcgccctaataaaaaacacagaaaataaaggtattatttaaacaaaaaaactacaccaatatcttttacgaatatacatgcaaaagcccccacaaaatattagcaaactgaatccaataatttatgataaattatatatcacaaccatgtgggtttattccaggtatgcaatgctggttctacatttttcttcttaaattgttgctattctatgctatgtttcttgttcacattgttctattaataaatagaaatccagcaaagcac

SEQ ID NO: 55168 - DNA, 307 bp, Homo sapiens
cccccctcgagagtcttctagaattaattaacgcggggtggggatataagtctcttattttacaccatacataaaaattgtctgaaaatcaatcatacacctaaatgtaaaacctaaaacacaaagctacagtgacagtaaaaacattagttgttacgggttctaggatgtatagtggaaggtttgaataggtgaagaacagaggatgtttaaagatggcaatagtattctgtatatagtagtgctgaatacatgaccctatgcattttcaaaacctttagaaatttatagcccaaaaaaaaaaaaa

SEQ ID NO: 55169 - DNA, 442 bp, Homo sapiens
  misc_feature 24: n = A,T,C or G
gccccccctcggaagtcttctagnattaattaacgcggggatgtataaataccctaggcttcctgctccttgaattaaatcattcagagacatctgttttagacgagtctcagaatttcctcacaacattaagttccagatatccccagtggtgcttggcttcataacactccatttaatgcatcttccctgtgtcacttccccacctcattaccactcttcctgcccctctgtattaggccattcttgcattgccataaggaatacctcagactgggtaatttataaagaaaagagttggctgggtgcagtggctcacacctgtaacacctgtaatcgcagcactttgggaggccgagacgggcggaacagcagaagtcaagagttcaagatcagcctggccaacatgacacaaccatgtctctactaaaaaaaaaaaaaa

SEQ ID NO: 55170 - DNA, 615 bp, Homo sapiens
cgggccccccctcggaagtcttctagaattaattaacgcgggacttcctcctgtctgtgtcagctgactcaaaataaatctttctcactgcaaaaacctggtactttagtatttggctttccattacacaagcaaatagacccagtttagttcggtgacaaaagggcacttcagagagatcaatgtttaaagcactagaatatgagttacataaaagtcaagcaaatcaagaatgggtgagtttttgaaaatctattactatgattcaccatattaataggtttaaggaaaaaaaaccaacatgattatttccaaaaatactgaaaaaacttagaccaaatttaacaccgattcctaacaaaatctcttgaaaaatggaaatgggcccggcgtggtagctcatgcctgtaatcccagcactttgggaggccacggcgggtggatcacctgaggtcaggagttcaagaccagcctgaccaacgtggtgaaacgccgtctccactaaaaatacaaaaattagccaggcatggtcacacatgcctgtaatcccagatacttgggaggctgaagcatgagaatcgcctgaaccctgtgtgtggaggttgtagtgagcca

SEQ ID NO: 55171 - DNA, 627 bp, Homo sapiens
cgggcccccccctcggggtacttctagaattaattaacgcgggctggtaatctttggtattctttgggttgcaattgcataactcccatttctgccttcgatgccaaaagacattcttcctgtatgtcttcacatggccatcttcttatgagaacaccagtcatattggattacggacctccctactccaggataacatcatcttaactatttacacctgcagtgaccctatttccaaataaaggtcacattctggtgtattgggagttgaacttcaacttatcttctttaggggacacaatttaaccaaaatagcaacaatgtgatttattatttagaccaggaaagctgcagaagactcacataggtgaggtttttgcaaacactcataggaataggtttaagttcatttaatccttcccaagaaacttcacaagactaacagacttgtctggccaaaactgattttttctcatagtttagtctattatactaaagagagcaggaaactgtgctgtcacacatacattgcgtatgattttatttaattctcaaaactttgcatatttgttattcttatctagatttatatatgagaatagtgaaaaagttaaataagtactcaag

SEQ ID NO: 55172 - DNA, 568 bp, Homo sapiens
cgggccccccctcggaagtcttctagaattaattaacgcgggatctgggtttatccagtacaacaaattcctttctacatattccaactgtgctttgtacggctatttaagaaaagtgactattttttaaagttgttatataagtgacaaagaaaaactgaaagtttaaacattctttatacctatgtaaatactttatcacaaccccgtaggacatttctgcatacaataattaggatcaaaactatgtctattttaacataatggaataatcactagaaacaagaacacagatgtgtatctcaagcttacattctaataccttgaatataactacaaaatgtatttctgaatcagctttgtttccttctgagttcaataattcaaaacattcacaataaaaaaatttttttacgtgtagtacagaaagcacaaacatactctgattaacaaagtaacaaccacattattccagtaaattaacccagagttgtaggaaaaagggtgtacttactgtgtaactggaagaaatacctgaagggtaaaattcaggggcattcacagacag

SEQ ID NO: 55173 - DNA, 584 bp, Homo sapiens
  misc_feature 524: n = A,T,C or G
cccccctcgagagtcttctagaattaattaacgcgggactttaagttgaaacaagatttagtatgtgatttacaaaacaatagaagtagttaagtttcattaaaccatatgaaattgttaacatttgaacattttgacctataaaaatggtgatttcatatggctcaatcaagtattataacaggtttcaatagcaaaaatgtttaagctccagccagtgtcctacttattccagttaatgtttaaaacagaattgccacaaaagcattatttcatctttaggcctcaatgaaagaagataaaagtacagaaaaaaaaattttacatctaatcaaatatgatgtaataagtgattttattcactccatggggtatgtcaatagaatttgtttaggaatgaaaaagatgggctcagcatgatggctcacgcctgtgacctcagcactttgggaggcccaggtgagcagtttgcttgaacccggcggttggaggcctgcctgggcaacttgatgaaaccctgtctnctacacaaatacaaagatcagcaaggtgtggtggcacttgcctgtggtctcagtggcttg

SEQ ID NO: 55174 - DNA, 601 bp, Homo sapiens
  misc_feature 518: n = A,T,C or G
ccgggccccccctcgagagtcttctagaattaattaacgcgggagcatttcaatgttactctatgaactttcattaaactagtaattttccttatttttaaatagaacatatgtactagtttattaaataatattgaatatctccttattattactttgaatattgaatacccccttattgtatcagttgtgggcaaacaattacaaatttattttctgtttttcatcagctttttgctgtgtccgacagagaaacctcatgccttacatgtcaaataaaacccaacttaaattaggcaaacaagcaagtaataaccgattgattatattttttggaagtttatttaacttactattctttaaaaaacgttttctttaggcactcgaagactccagcttcctgaaaagaagtggcagggacagtggctacggtgacatctggtgtcctgaacgtggagaatttcttgctcctccaaggcaccataagagagaagattcctttgaaagcttggactctntgggctcgaggtcattgacaagctgctcctctgatatcacgttgagaggggggcgtgaaggtgtgttgtgttttggctgtcag

SEQ ID NO: 55175 - DNA, 636 bp, Homo sapiens
  misc_feature 573: n = A,T,C or G
ccgggccccccctcggaagtcttctagaattaattaacgcgggcagagggtgattcccggccatagtaggccatgtctcagtctgtaccatcattaccttttgtaccagctgagtccaaagcttctccttccagaagacccaaccaacatcctcccagattctcccataacctacactcaactgaagattggaagatgaatgataagagaggagaaacttaacctgcatatcctcattccatttgaaagtctgagaggctggcagtttgggggcagatatttatttctgaatgttccctatatctggttgttgggtttttagaaagccctgtcctattggtttttttttatttatttttatttttttaaacagcctattgggtactctgtgctgatgctttgatcctcaaaatgcatacactgaaccagtcaccttcccagtgactaggtacatgatcttgagtaggctcagccttcagtttaattttaaaaaactttcagtgcagggctgggtggctcatgcctgtaatctcagcactttgggaggccaaggtgagaggactgcttgactangagttcaagaccagcctgggcacatagtgagacccggggtactaccaaaaaaaaaaaaaaagc

SEQ ID NO: 55176 - DNA, 584 bp, Homo sapiens
  misc_feature 518: n = A,T,C or G
ccgggccccccctcgaaagtcttctagaattaattaacgcgggacctatgttttaagtcaggagtgggcaaacttcttttgtaagggcacgatagtaaatatttcaggcttctggtccttatactctcttttgcaacgacttaattctgacattgtagcacaaaagcagccataggaaatatataaataaataaattgctgtagtagcttattttaaaaaacagatggcaagcttatgaactacagtttgccaaaccctgttccaggttattaatacataaatggataaaattagtaagcagattgaagttatctgatatgataccaaactattaataaatgtcatcatttctgttgctaaaatttgatattcacatcataataaaatccatctaacataacattagattatttaatattcatttatataagcattgactaataaattgttttgtgttttgtttgtttttgcaaattcaagagtagagaaaaagtatcaaaaattaaataaagctatntaggggcatatggaacaatatcatattctaacataaatgtagttggagtctgaaatagtgagaata

SEQ ID NO: 55177 - DNA, 645 bp, Homo sapiens
  misc_feature 11, 24, 35, 610: n = A,T,C or G
tgggtaccggngccccccctcggngatcttctagnaattaattaacgcgggagaaaacacacacacacacacacacacacacacacacacacacacacacacacacatacacacagtggcatttgaaagggaagggaaaggaattagtatcaattaattctttgaaatgtatctctttgtttcagatgatgtgggacaccggcttgtgcaatgtgatataagaagggggaactctttaagccatacaaaaacatgtatcaagtgatttgatatgtacaggggttataaatcttgtattccatttatttacagattagtgatattagatgtaaatctatttagcagggaaagtataagcaatttatctttaatggaagggatggttgggaggccataatctcctcttctactacttgataagatatgattaaaggaaagcaagttaaggataataattatttaaacataatcctttatgtcaaaattaatattgcatgaattttgaattctatatttacctgaaagaaacctgtaaaatctcggtgctgtgtggacgttacagattttagtgcattgaggtgtgagacagtgagtacagatagagggagancagatagagaatccttgtctcccatcagtatttgg

SEQ ID NO: 55178 - DNA, 470 bp, Homo sapiens
  misc_feature 26, 39: n = A,T,C or G
gactgggtaccgcggccctccctcgngggtacttctagnattaattaacgcggggtgggacgacagtgaaatctagagtaaaaccaagctggcccaggtgtcctgcaggctgtaatgcagtttaatcagagtgccatttttttttttgttcaaatgattttaattattggaatgcacaatttttttaatatgcaaataaaaagtttaaaaacttaaaaaaaaaaaaaaaaaaaaaaaaaaaaaaaaaaaaaaaaaaaaaaaaaaaaaaaaaaaaaaaaaaaaaaaaaaaaaaaaaaaaaaaaaaaaaaaaaaaggaaccccaacccgacccgaaagagaaaaaaataaaaacccgctaaggggccccccggttgaaaacccccaaaattggaaaaaccttggcgttttcaatccccctcccttggccgaatattcccctttgggggggggggaaaatccggagggggccc

SEQ ID NO: 55179 - DNA, 588 bp, Homo sapiens
  misc_feature 481: n = A,T,C or G
ccgggccccccctcggaagtcttctagaattaattaacgcggggctaccatcacaattctatcaacatatttaaaagcattgaattatatactcacaattgacacattttatgtaatgtaaattataccatgatacagctgttgaggagctatttttagtttataactaactctaaatgttaaataatcaagtccattaaaaacaataaaatggttaaacccctagttagctagagtgttcattgaaaaatgagaaaagaaaaaaaaattcaaattaaaatatcagtaataaatgaaagataaaattacaattctatagatatagaataactaataaaagaatattataaataactaggttactgaattcaaattatttaaaggaaaaactaattttttcaagaacacaccaaaaggacaaaataagaaatagaaaactgaattgctctttatctgacaaagtatttgaattgtaattcanaactttctccaggattaaatttcatgactacatggtttcactgggtaattttttttcaatcatttaagaagaaatcaaagaaatcatatgaatcttacagggatgca

SEQ ID NO: 55180 - DNA, 640 bp, Homo sapiens
  misc_feature 594, 624: n = A,T,C or G
ccgggccccccctcgagaatacttctagaattaattaacgcgggcacactcttataatgacatttgcttttccttttcagctacttaactgaattacatttttgtattttctacatttatcatgatttcaacctgtactcattcccaatcatataaaatattaaaatataatttatcgtaagtacacaaatcttgaatatatcttatcaaacatttaaattaaatgttaaaaattaaaattatttttatgcctttgaaattgcatttctactgaaatattcaaaattttctattaaaattaaaaagcaagacacaaattatacttcatatcaaagtgttgttaagtgtttaaataatgcagaaatgataaaatttgctttttgccaaatttatttgtcaataaatattttaataaaatgtaatgtatgcaaaattctaggattcatctgggaggccaaggcgagtgggtcatctgaggtcaggagttccagaccagcctggccaacatggtaaaaccctgtctctactaaaaatacagaaattagcttggcatggtgacaggcacctgtaatcccagctagtggggaggctgangcagaagaatcgcttgaaccccagaagcanaggttgcagtgagctg

SEQ ID NO: 55181 - DNA, 647 bp, Homo sapiens
  misc_feature 567, 587: n = A,T,C or G
cccccctcgagagtcttctagaattaattaacgcgggttccccttttataataaacccactcctaagataacaaacctactcctctgtgataatagcattaatctattcactctgccttcatggcctaatcaccacacattaaggctccacctctgaacactgctgcattgggaattaagtttccaatgcatgcctttgggtggacatattcaaactatagcagtgtcccataattcttgtagggttttttttttttttacttttttattttctttttttctctgggtaatttcaaatgatctgtgttcaagtttactgattctttcttttgcctgatctattttgctattgaaatgcaatatggaattttccagttcaatcattgagttctttagctctagaatttctgtctggttcttttgtatgatttctatctctttattgagttcattttgcttattttcctgatttttcttagttgtctgttttctcttgtagtaaactgaatttccttaagattattttgaactttctgtcagacagtttataaatctccatttatgtanggtcaattactagtgctctntttgttcctttggtgatgttatgtttcctgattgttcataattcttgtgcccatgcattg

SEQ ID NO: 55182 - DNA, 533 bp, Homo sapiens
ccccccctcgaaagtcttctagaattaattaacgcgggcttattactaaatagacatgttataaaatcacttagtaatttatgaaaatatgctatttgttttaaaaattatgatatgtgtgaatatatgtcatggtgagcatgatcctcatcaccatggagctcagttcaataagtttaaacaaatataaccagcaatgaaatcatatcacatgaagatataaaataatttgaacactcccaaaagatacttcacttctatctgcatattgaatgttcccccatccctacagattcttttaaccattcattcctttcctttccctagcattttttgtttctttgcttgtttgttttctgtcatttctacagaatcacataaaaagaattatgtgatatgtagccttaacataatgcttttgggttgtatactcatattgcattttgtttatcaattacccaatatagaaaatacagtattttttttaaaatggtgctgggaacattagacatatatgaacaaaaaatgaatct

SEQ ID NO: 55183 - DNA, 484 bp, Homo sapiens
  misc_feature 43, 469: n = A,T,C or G
cgggccccccctcggaagtcttctagaattaattaacgcgggnataatagaagaaggccctgcaacaaaaccaggcagtcatgcaagctgctctaccacttgtgcctatgatccggcagatacaagagttattgacatttcagtgcacataaagatgctactcaaactaataaatgagtaaaatatttctatgtattagacagacacaattaaaaataatcaaaatattctttagcaaagtgcaaattaaaccacaatgagacaccatttcacgcttatgagattgtttataaattaaaacaatgtagtgattcataagtcttggtgatgaaaccttgtatattgctggtgggagtataaaatgctacaaacattttggaaaaaagtttagctttctcttataaataaaaaaaatcttctcaatgtttcagaatttacttagcttacattctaaggagttgtgtggttntttgttcttgtttgt

SEQ ID NO: 55184 - DNA, 470 bp, Homo sapiens
  misc_feature 32, 408: n = A,T,C or G
tgggtaccggggccccccctcgaaaatacttntaataattaattaacgcggggggccactttgggaccataatagccaaattcttcctctctctgtcttttttcccaaagttttgtgttattcaagtttctggagacagtttcagataataatttaatttgtaaacattgtgcaaattttaatagcttaaattatatatatggcctgaaaaaaatttgcatgatcaattgatgaggctggtgtgataggatccttgtgtttgactgctttttcttgctgaggatgtagacttgagaatggcctggaatctctaagaagtaagagtttattgaaaaagtaaaacagtaaaataaaagtggaagcaatctcagagactagtgtaaaaaaatgtgtgtttgtgtataaatntaaaaaataaaagaaaaactttaaaaagagacaaactgcagagcagttacctttaatgatac

SEQ ID NO: 55185 - DNA, 643 bp, Homo sapiens
  misc_feature 28: n = A,T,C or G
cgggcccccccctcggggtacttctagnattaattaacgcgggccatggtcggccaggagctggttcttaaaacacacattgacggctttgttagacataccagtcacctctagtaggtttcacacaatttcaggctcaagaattacattttctaagtattaagacaacttatactttaaacaaactctgccttgaatcctctaggaaagtacagaattcttttgtagaacaagcaaatctatcaatacatttatgttttggggatgaacctcccagcaaactaacagagttgaaaggaacacttgcttagtactgactgggcttctatttattaatatgtactcatttttactgtctaccagcagctgatacagaggtgccatttgtgacatcttaattccaacagagaagtgccatcacaggtatgcgataattatagatgggaaaaagtactcaagtaaggtatatgaaacaggtcttcgaaaagggaaaagtgatctccccaggcctctaaggcactctgctaagctatgaataatcagagagtttggtaaggtggaaagtgtacaggctttggtcaggtaccacttatcataggcatgaatttgcacaggtaaactgagtctcagcatcctcatctgt

SEQ ID NO: 55186 - DNA, 581 bp, Homo sapiens
cccccctcggaagtcttctagaattaattaagacctgaaagatttgctagtcaaagaattttccccttgtaccaataagaatgtttgctgcccttaagcagttctgaagtgataggcttatctctcatagcaagataagttaattattctaatgagtttttatagtatataaacaaagctttttttcattttattttaatgatttgaatttaagaacattttaaattatttttttgaaggaactatatcctagaaagtaagctctgtgaaggcaggttttaaaatattttgttccgacaagtagtttgtaaatgtttgttgaataaggtggggcacagagcagatagtaaaaccctaaaacactagatttcatggtaattttgtgagcctgaacttgatttaaaaaactaattgactttgaaggctagtttaatttagctaagttttaagatctgagagtaattcctaaaaatgacaagatattaatagtttaaagttaagtattttagaattatttcagaatgaactatagatagtaaattaagattaagaaagcagtttcttaatatcctaatgttatg

SEQ ID NO: 55187 - DNA, 628 bp, Homo sapiens
  misc_feature 20, 33, 568: n = A,T,C or G
gtaccgggcccccccctcgngggtacttctagnattaattaacgcgggtatcctttgaggaccacttcaaatgctacttctttcttcaatgaagacatgtactgctatttctgcagtcagaaataacatcttactcttcttgccccgtggcccccagccctcaattactttttctttgataatgtaattaattacattcatgacttatcttgtctacttaattataagctcctttaaaggcacagaatgtgtttcactcatcacaatattcccttcagtgttcagcattacataattaacagtaataaacaatactaaaaaaatctaaaacctatagcacaaaaatacaatattttagagacatttctattacatcttctgtactcttaattgtgtatgtattctaaaggctaaattagtatacctttgcttctgttttatcatgtccactcaaagcaagacagttagcatcttcacttgtttcatcctgtttttaaaaaaaaaagctttattctctaaaatgaaaaatttagattatttgccaatcaatgctttactttataaactntaaaactataaaataattaaacctgtaagatcaactacagccttaaaatagataactggc

SEQ ID NO: 55188 - DNA, 606 bp, Homo sapiens
  misc_feature 510: n = A,T,C or G
cgggcccccccctcggggtacttctagaattaattaacgcgggttctataataattattgaaatgaaagcataagaatgaataaaaataaatgaagtacttcgtagagaatctaagtaatgtgttccaaatgaacaactttgtgatctaatttgatacaagaaagaagagtagaagtcttgcattctaagctagggagcagataacagacagtttgaagccataattttggcatggagctattctatacagatgactatagaaagataagactaaggtcaatagatcaacagttgatagggttgacatttctacaggaagattaagtgctagcaacattgttattcaactggaaagaatgcctcaactttcaaaaaaaacaagaaagaaaggaagaaaagaaaaggtgtatctttacagatacctgcagatatagctagaattttcattaagaagaccacttgaatcaaaactagcacttgaattgcagttccttgaaagcttaaagttncgaaccatagaatatattacaaatgtcatttttctccgagatccattttgtttgaggctttgtcaaagtgcacattaccaattgtctaacttgatt

SEQ ID NO: 55189 - DNA, 565 bp, Homo sapiens
acttctagaattaattaacgcgggctcctgaaacatgcaggaatatatttggaatatgtgacgctaatctagcttattgcatccaaatgcattccttctaagagcatttaaattaatatgcttttatttcctaaaatcaggaatgaatttctcttcatcaacttcgtggaacttcccatatatttatttatgaacataaattcacatgcatatggatctacttatctcctatctcttatacatactatgttgaccaaaagcaacagtatcagtaagagctggcagtaaataataaaatcagttaaaagttctgaaatacttttaaaatgttattttaaagtactatgcaatttttagttcaaaaataagagaaaatttaaatttcttttaaaaatatattgtctgaaattaataataattaaataattgaaggaagtataaatgttaaaaacatataaaagtaatgcaagaagtaaagcataaagcaataaagtgaagaaccaaacacataatagttaagataataaatataagctgcttagagttcccaaaaaaaaaaaaaaaa

SEQ ID NO: 55190 - DNA, 428 bp, Homo sapiens
  misc_feature 39: n = A,T,C or G
gactggggtaccggggccccccctcggggtacttctagnattaattaacgcgggacctcatcaggtttcttccactctgaaaaacacttggggctttttccttacgaaatctctcttttaaatataaaacaactaagaatctacatgaatcaacatcaacaagaacaacaaatcttacttcattcatttacttcttatgaacaggttttcacattgaagcaccctttttttttttttttttacctacctatataatccccaaatcacagctttctttttcattgcaaggtaaaaaatggcagcatctaaaggatcattctttctataaaaggctgctttagctacctataatcaaaaaatattgatcaaaatttcacagaaacagttttgaacaagtaatttctttcatatgaaaggctggcacatat

SEQ ID NO: 55191 - DNA, 612 bp, Homo sapiens
cgggccccccctcgaaagtcttctagaattaattaacgcgggacagccaaaccatatcacttagcattctaatttcaattagtattttaccatgtataaattccagaatgcctaggtccaaattccagctagcccacatatgagttgtatgtcatttggcaagtaattaaatattttcacatgttttctcaccatccaaggggagacaataatagcacttaccaatagtggtctgatgctaagagttattacttagagttattacagaataattggatgaatttagcacttattatacataaagcaaaccaaatagacctaaaagtagagaatcagtgaagatataaaagacatgaaactactactaaataacttgaactaactgacatttatagaacatgcctctcaacaacagaatacacatttttttaaagtgcaaatagacatttctcaggatagaccatattctgaaaaatgaaacaaatctaaataaatataaatgcactggaataatacaaaatgtattctctgaccacaagcaattaactaaaaaatcaataacagaaaaatacaaggaaaatctccaaatagttgaaaatgaaacaagacact

SEQ ID NO: 55192 - DNA, 648 bp, Homo sapiens
  misc_feature 19, 21, 32: n = A,T,C or G
gtaccgggcccccccctcnangatcttctagnattaattaacgcgggttcattccatgagtttggatacatatatcatgtgtacatcattataatattatataaatagttttattatcctaaaaatccttattcctgtctattcatccatctctctcccatccactggcaaccactgatctttttactggatccatagttttgctttatccataatgtcatatatttaaaaccatacagtaatcgtagccttttcagactggtttatttcactcagtaataagcatttaaggttcctccatgtcttttcatgacttggtagctgatttctcttttgctctgtacttctcaaaatgattggtgtatacttttttgtttttcagtgctcctgattgttatttatgtacataggtagaatatggcaaaattgtatttgcagattgaatattttcataaaagatttaaaaaacggcattcttattttttcacatttaagctttcttcaattcaaaatgaaattcaagataacacacagaaattcgggatttacattaaattctgttatctgtctaagataattctatgctcttgatttagttaaatagttaaatagttttcccattgcagatttttattaactgataggtat

SEQ ID NO: 55193 - DNA, 634 bp, Homo sapiens
cccccctcgagagtacttctagaattaattaacgcgggaactcaaacatttcttcaactgcattttgtatcatgtagttttattaaaatgaacaaaatatatccctcttttccttctcgtaattttaaagtgacacggttagaagtataacatgactaaacttgaaacattacatttggaaattcattaatacagaataaaatgtacttttctcattaaaggcacttggtttctattgaaattagaatattactagcagaatcatatattgaaaataatttaaatgtttatctttcaatctaagtatgaactaatgaaatggaaaatttaaacgtttatatttagatctgtcactacatagtttttgtattagactactgtctgtctctatcatattttcactgtaggccttccagacacgtaagtgtttctgtgaattaatctatgttttatgagggagttcatgaagactgatttcttagatgcttagaaaatattaattatctggcttggcgtggtggctcacgcctataatgccagcactttgggaggctgaggcaggcggatcacgaggtcaggagttcgagaccagcctggccaatatggtgaaaccccatctctactaaaaatacaa

SEQ ID NO: 55194 - DNA, 295 bp, Homo sapiens
  misc_feature 17: n = A,T,C or G
ccgggccccccctcganatacttctagaattaattaacgcgggtagatgatttctagcaggcaggaagtcctgtgcggtgtcaccatgagcacctccagctgtactagtgccattggaataataaatttgataaggtggtgaaaaaaaaaaaaaaaaaaaaaaaaaaaaaaaaaaaaaaaaaaaaaaaaaaaaaaacaaccaccaccaaaaaaaaaggcaaaaaaaaaaacaaaccgcccccccccccggggaccccccaatccccccaaaaaaaaacctaataacccccccccc

SEQ ID NO: 55195 - DNA, 589 bp, Homo sapiens
  misc_feature 31, 562: n = A,T,C or G
taccgggcccccccctcggggtacttctagnattaattaacgcggggcatgtgcaaggctacagagagatggatataataaaacgggctttcctctctccaggaatgtctttctagcaataagatagttttcccaacgaaatgattcctttaccagtataacattttaacattatgcaaaatcattcctgtttgatttttgtttacacaactaattcttacagaggggaagtaactgcttttcttcagtcttgatgttcattctagaagttttttagattatctgccagacatttacttcactagttttttacatttgctttttctttgtattaatataaactaactttaagttccaaccataatcaatttttctagtcatatgtgaacctaaggatattagtgaatatattactttattgaagctaaaaatgcccatggcaaaatgcacagggagacctgtctcaaaaggttgcttaagtttttgattctgttcacttctgagacacttttaaattatcccttttcatcaggtgaactatgatggggaactgcacaagcanccacaactggaagctgatctgtcagca

SEQ ID NO: 55196 - DNA, 607 bp, Homo sapiens
ccgggccccccctcggaagtcttctagaattaattaacgcggggacatcaagagatacatcttagccatgaagctcaaaaattagcaagaatcctgacaagttctggcaagttctttatataagcaatgctggttatcctttaagtgttaaacttttcagctatgagcttttcttagaaacagtctttcatgcaaggtaggtagtaatagtccagtagttctttactctatgtaatcttaatcagtggtagaaattaaatttacatagatctgcataaataattcagctatctgtcctgctctaatatatttaaaccaaataaaataaaacttgaacagaataaaaataatggggctatttttaaatggtcacctcctgatttttctcattttcttatccaaagtcagggacaggaactgcataaccagaaagaaggagaaaaaggagaacatgcacctgaggacatctataatcactttcctctattgctccaccactcctacccctattgatacagtagctcacaacagggagaaatctatccccccaggataaaagtaacaatatctggagacatttctggttatcacaactggggcagagggg

SEQ ID NO: 55197 - DNA, 610 bp, Homo sapiens
ccgggccccccctcggaagtcttctagaattaattaacgcgggagtctgttgattagatgtggagtcctcgggttccttgctctgctggatctcttcaccaggtatcgaagctagagaggtacttttagaagccacttctggtactggagttgcattactcttgtgagcatcctctgtatcaacacctcgcttgtttgaaggaggccaggaattagaatccttcaggtgaccaaatgtgtcaagatttgtaacagtaacagatggtaaattcaagggataatgcccagtcactgagtattcattgttttcagccttctcagaaatgatggcactgggagaatcagtgttctcaaatactgcactcagttgactcacagttggggagacagcctcagttcgggagctaaggctgtccaaggaatcagtactgcctctgttggacttggaacctccccattcatcctgaggttcactccctccagctttctctttctttggggaatagcggttgttctgtcctgattcatgcacacttctctcaacatctttcgagtctcagtgaacttggaatatgaagggccatcgtacatagtgtcaaatctactaatc

SEQ ID NO: 55198 - DNA, 597 bp, Homo sapiens
  misc_feature 26: n = A,T,C or G
gggccccccctcggggtacttctagnattaattaacgcgggatgtcctacaaacaggtaggaatctgttcacttttgatctgaaacaatggagcacccctaaaataccaacaccaataaataagagtaaacaacccaatagtttcggattgcagcaggatagcaaaagattcgaagaatctacctgaaattgcttcttcatcataaagaatgccccttagcaactgatgcaataattacttggcattaagatagacatatgatttatttggcatttaactatcatgaatatacataaaggaactcagtgaggttacattacacccttaatagctaactcataactgtagtacgtaaataggagctaatgtaaatgctaagcttctatagataaataaataatatttgatgtatcacccttcagtgagccgcaaactgaaagaaagattatatgatcaatttaggcctgaaatccttagcgcactgttggtgggaatatagactggtacagccattatggaaaacagtatggaggttcccgaaaaattaaaaatagaactatcatacaacccagcaatccctcttctgggtgtatacc

SEQ ID NO: 55199 - DNA, 614 bp, Homo sapiens
cgggcccccccctcggggtacttctagaattaattaacgcgggactgttttgattactatagctttgtaatataatttcaaatcaggaagtgtgatgcctccaactttgtttttcctctcagaattgctttgggtattcaggatcttttgtggataaatacaaattttagaattgctttttctatttctgagaaaaatatctttgggatttttatagggattgtattgaatatatatattgctttaggttgtatggccattttcacaatattaattactctgatccatgagcacttatttgtatccttttaatttccttcatcaatattttatagctttcagtatacaggtctttcacttccttcgttaaatttattcctaaatattttacttctttgatgctatcataaatgggattgttttcttgtttgttgttattgttgttgttgttgttattgttcaggtcattggtcaataaatattacatttagatgaagcatgtgttagcttatatttgtaaagccgatttaaaattaaaatgtgccattcccaaggcagtatatttcagtaacacagtgctgattataatttgaggacttagcaagttgtagctg

SEQ ID NO: 55200 - DNA, 580 bp, Homo sapiens
  misc_feature 74, 517: n = A,T,C or G
acttctagaattaattaacgcgggtgagatcttgaatttcatttagaaaatttctgctaagcaagaagcagtgngaaaaattacaggaaaagctgtctagacttgactacatagaaattataaatgtttgcatatcacattgtcaaaaaacaaaattaaaagatattgacatgaaaatatttgtatgtgggcagaaaaaagtttaatattcttaatattaatgagctcttagaaatcttaaaaataattaaacatttgatagaataatgaacaaaggacatgaataggtggttcataaaagaaatataaatagctaataagcatatgaaaatggtgtttagcctaggataatcaaagaaactcaaatacatcttttgtttgtcaaattggcagcaatttgagaaaaatagtatctagcacactgctggtagtagtattacgtttgaatagctttactgaaaagcagtttggcagagtatattaagaggcttaagatttaccctttaactcagcctgngaaatttccctatgaaaatagtgaggtagagatttgtgtatggagtgattcatcttagtgttg

SEQ ID NO: 55201 - DNA, 471 bp, Homo sapiens
ccgggcccccccctcggagtacttctagtattaattaacgcgggtcccccttcttccctttcttttcatcagagttgagttcagtctctctcttttattgcaatactcatgaataaagtgtttcttacctgtttaactggatctggtgcaatttttcttttacagcacccagtcaacatttgttgaattgaatttgaagaacttcagacttcaactttttattctcatgtataacatcagtttagaaaaaaaatcagtcttcatgaagagtaccagtgctggagaagacattacaaaacaaagcaaagtagctgggggtggtggcacatgcctttagtcctagctacttgggaggttgaggcagggggattgcttgagcccaggagtttgaggctgcagtgagtgatgacggcaccactgtactcctgcctgagtgacagagcaataccctgtctctaaaaaaaaaaaaaa

SEQ ID NO: 55202 - DNA, 616 bp, Homo sapiens
cccccctcggaagtcttctagaattaattaacgcgggggggtagctattattatccccattttccaaacgagaaagctaaggccaatggagtttaaataacttgtctaagaccatgggaagtagctgagctagaatctgactctcagggttatttccttaccattttcaatactatcctcaaaataatattaagttccccattcttgaaatcatcaaagctggcaatgaacaccctgaaaatccctaggaagaggactggttcctgctgtagggatagtaatgattgggagaagaaccttgtagcaaggttgagcaccatatagactaagaacaaagtcaaggtttagaactattatgatcatgatcacagggagctgaagagtgaagtgagaaggaagaatcaaggaaaactctcaagttttcctgatgccattcacagacagagaatacagaaggccttcttaaagagttctaatttattaaatactgatttaccatgtgcttgaaaatcctagctcccattactattacttttctgtgttgagcatcgtggaatccaaaaatggaaacagaagcatttcacaaaatgtcttgcattaagcagaacaggacacg

SEQ ID NO: 55203 - DNA, 540 bp, Homo sapiens
attaacgcgggcatcattcgtaagaaggcaacaaattatcatttgcgtttatggaattatatatatatgtaaaatagtttcaatccgtagaaattttgagttgttctcttttggttatagattatttgaaactgagtgattgtacacttttgacctgttcaagaactctgaattttatataccttgcaagagtctttcagccattgaatacaaattacacagaatttattactgagaatttgtagacttaagactacattgaaaacaaatgttacgtttttaaatgtgaggaaacttctgcttaattggattgtttttattcccacaggccttgtctggttttagacagattcatgttatagatatggacactatagatgtttccaatctaaataggcagtttttatttaagtaagttttaatatcttagcggttttctttttttaagctctgataatcatttgaactggtacattgcagttaaataatttttaaaaatgacttgagaggataatactaattgtattttaaaaaacaaaa

SEQ ID NO: 55204 - DNA, 591 bp, Homo sapiens
  misc_feature 89: n = A,T,C or G
ccgggccccccctcggaagtcttctagaattaattaacgcgaggccactgtgcctggcctattcatcataatattgttagaaatgcatntcagtaagaaaaaaataatagtacacaattttataaaaacaataacttagatttaatatttatttatgtagttataataatgtaaattttatttggtttaaacaataaagagctctgttgaaaaatcattgagtaaaataactataataaagcaaaataagtcaaaaatcataatttatcaagaactgattggtaaacacatttgatatgaaaaagttaaaaacactgtaaaagcattttaaatgtaaacaataagttctctcattcatgaacatgaacaaagtttctattacatcctaagcataacctcacaacgtacccatggcacaggcagcatctattgttaaacaaaaagaaaactaaattagggagtgtgtagtgtagcgtgtgcttatgcgtcagtcaggctgacagaacaaagctcacccagtcaacaattagttgatcttcagcaagtcagttaactttaactggactccaggggatggaataaatcatcaag

SEQ ID NO: 55205 - DNA, 509 bp, Homo sapiens
  misc_feature 23: n = A,T,C or G
ccccccctcggagtacttctagnattaattaacgcggggctgccttgtgataattaaactttttccctgctgcaacactgctatctcagtgtattggctttacactgtgaagcaggcaagaagaatccttaaaaaactcacagagccatgagctaaataaacttattgtctttataaataacccagtctcagatattctcatatagcaacacaaaacaactaagacatacaccacattaacaagctaaaaaagaaaaatcacatgatcctatggattgacacagataaagcatttgacaaaattcagctctcattgattaaaaaaattcagaaaaagaggaaaagaagaaaaatccgtctaccttataaaaagtatctacaaaaacctgtggctaacaccatccttatggtggaagatggaatgctcttcttctgaaacagggaacaagggcaagggcttctccctcatcactctcactcaatatagtattggaatttccagccactgc

SEQ ID NO: 55206 - DNA, 619 bp, Homo sapiens
cgggcccccccctcggggtacttctagaattaattaacgcgggatatgggaatttacagatttagatataagtaagttgtagtaacaataaaacatacttgtttaccttctaaacttcagttatcctatttaccctctctataatttttaccatttccttgtaaaacctctattagtcacttcatatgtgtctttaaattgttttcacttgatgattttatggaaaacttcatatcactctcataaatagaaaacctttatcatttggcataaaatacacaactattttttactaaatctttatccaagtgtcccaataggagatgctgccacagcaggatctgttccctctgtctgaaatgccccttcctctcttcttcaccatacaaacttctgctcatccttcaagacccaaatctaagtgacccctcctctttgaatagggcccttggctaccgaacacttaaattgtaactggtccaaattgggttcagccgttaagtgtaaactgcgtgacaaattacgatgatttatttaaaaaaaaaaagattatttaagtgactgtcagccggatgcagtggctcacacctgtaatcccagcactttgggaggccgaggc

SEQ ID NO: 55207 - DNA, 481 bp, Homo sapiens
ccccccttcgaaagtcttctagaattaattaatgttaagactttctaggcttatatcgaagctgtgtgtgggtcacggggtgatcactgctaactggataaagtttgtgcagcacattcctgagtgtacgatattgacctgtagcccagcgtgaaaaatttataaataaatttttcattgatctttttatattaaaaaaaaaaaaaaaaaaaaaaaaaaaaaaaaaaaaaaaaaaaaaaaaaaaaaaaaaaaacaaaaaaaaaaaaaaaaaaaaaaaaaaaaaaaaaaaaaaaaaaaaaaaaaacacgccgcccgcccccggggggacccccaattgcccccaaaagggatggttttaccccccccaatcggcccgggttttaacaccctttggccgggaaaacccttggcttacaccacttaaacggtttgcaaaaaaaaccctttttcaccgtggggggaaaaaggaaaaaggcccccc

SEQ ID NO: 55208 - DNA, 576 bp, Homo sapiens
  misc_feature 28: n = A,T,C or G
ccgggccccccctcgaaagtcttctagnattaattaaccgggtggctcctagacacatgtgaacatgtgactatcgactaatgagcccagggaaccaaattttaactttattaaattctaactaattaaaatgtaaatagctatgtgaggctagttggtactatattgtatagcacaactatagaaaagaaaagcatgccagaaaaaaaatttcaaaaagcaatcaaaactgtaacataatacttcaaaatgacttaaagtcattaagaaagtaatataatatgacagtaacataaaccaaaattagaataattgactgaggtaacactcaagaaataattagaaattaagaaaattattttagaagtgaagacttaaaagaaaacgggtaaataactactttgaaataaatagaagaaaaaaggagaaaaaaattaaacatcaaaaacaaatgaagaaagagatgaaaatgatgtgggaaaagagagaaatattgaagtagttaagaagacccaacatatggataataggaatacctgaagaagaaaaccagtattgataagcactaaaacaaat

SEQ ID NO: 55209 - DNA, 526 bp, Homo sapiens
cccccccttcggaatacttctagaattaattaacgcgggcctactgtattattaatgcagtgtctgccatgtaacagatattatgtgtgtgtgtgtgtacatatatagatttaatcttcataaaggtacacattcccattttacaggtagtaaggcttaaactaagcgagcattttgccaaaggtcatacaatcaggtagcaaagttggatttaaaattaattccagagttgggtgctgtggcgcatgactctagtcttagctactcaagaggctgagtcaggaggaacacttaaggtcaggagtttgagccaggctgagcaatacagtgagaccttgtctcaaaaaaatttttttaataaaataaataagcaaattcctgtattcagtttttcacaatctctctaacataatcaaatccacaacctcatactaaagaatgtttttggaaagcacttgatgtccctctctgggctgacagtctactgactgtctaaatgagactcagaaatctgaaagcttggttt

SEQ ID NO: 55210 - DNA, 628 bp, Homo sapiens
ccgggccccccctcggaagtcttctagaattaattaacgcgggggctactatacattgcggaatggctaaatcgagctaattatcatatacattgcctcacatactatttttttgtggtgagaccacttaaaatatactcttagtatttttcaaaaatacattgttatttagcgtagtcaccatgttgtacagaagatttcttgaaattattcttcctaactgaaattttgcatcctttgaccaacatttccccagcaatccccacccaagtccctgataaccaccattctactctccatccagaaattgaacttttatcagttcaattttttagattctacacagaagtgagaccatgtagtatcttgtctttctgttcctggcttatttcacttaacataatgtcctccaggcccatccaggtcacaaaaaacagaatttccttctttaagattgaatgatattcctttgtgcatactgtcatgtgccacataacaacactgaggtcaatgatggaccgcatatttaacagtggtcccataagattataatggacctgaaaaattcctattgcaggctgggtgcaatggctcacacctgtaatcccagcaccttgccgtgggagga

SEQ ID NO: 55211 - DNA, 632 bp, Homo sapiens
  misc_feature 14, 27: n = A,T,C or G
gggccccccctcgngggtacttctagnaattaattaacgcgggaaatatgtgtgcatacatacaagcaccttacccataaaatattccacataggattttcaatttctgttctcaaatatgttcctccctcagtctttcctaccttcaaaaatgacacagtcatgccactcattgcacaagccaaaaacctgctctttatatttgcttttatccttcctctcacatctaccccatcagcaaatctttccagttttaccaaaaatgtacatccagagtctttccacttcttgcttttccattactttctttttagtacaagtcactataacctctaacttgaactactgcagtaagtttcctttgtctactcatgtgtaattcatttgctacatagcagtcagagataccaccttttcagagctaatcagaccattgaaagacttctcattacattgattctctagactgggtatgtaagcatatttcttgcctaatctcctgcctctgtcttcctcattcagcattcttcagttattatgtctatattctgtttcttaaaaacatgaatatatttacaaccttagggccttctctcggttgtcatcacctagagtatatattctcagttcta

SEQ ID NO: 55212 - DNA, 515 bp, Homo sapiens
cgggcccccccctcggaagtcttctagaattaattaacgcgggcctaggatggttgtgaatattaaataagaaaattcaggcaaaacatttagcacattaaaaaaaaagtccaatgaacgctattgttataataatgattatgaagactactatttattattaatagtattttctcaacagggtctactggtggctgggataagaggcttgcttggaaaagatgtctttctttgctcatggaggggagaagtcttatctctgtttttttctacttcctctccttagattcccttaggagatacataaccaagggagcagcttgaaatttgagactaggctaatggagccccatgcaaattcaccttggagttatacacacagaaagttttgtggccacatcaatctgtacacagtgaacatttctctcagtgccataaaccagatacccttctacccccagctgtttgtagcattttaggtgaagacttcattaaactccaaaaaaaaaaaaaaa
